United States Patent Application Publication US 2015/0315605 A1 - sequence listing, part 30

SEQ ID NO: 49548 - protein, 415 aa, Zea Mays
MNGEPDIVKNFLLKTLLLQGWEKKVDRFKLGEGAMPASFKVMHDAKKGVETLHADFGESAIGRVAPVDSGFWWIILLRAYTKSTGDLTLAETPECQKGMRLILSLCLSEGFDTFPTLLCADGCCMIDRRMGVYGYPIEIQALFFMALRCALQMLKHDNEGKEFVEKIATRLHALSYHMRSYFWLDFQQLNDIYRYKTEEYSHTAVNKFNVIPDSIPDWLFDFMPCQGGFFVGNVSPARMDFRWFALGNMIAILSSLATPEQSNAIMDLIEERWEELIGEMPLKICYPAIENHEWRIVTGCDPKNTRWSYHNGGSWPVLLWLLTAACIKTGRPQIARRAIDLAERRLLKDGWPEYYDGKLGRYVGKQARKFQTWSITGYLVAKMLLEDPSHLGMIALEEDKAMLKPVLKRSASWTN

SEQ ID NO: 49549 - protein, 569 aa, Zea Mays
MASGGEGAGSGESPPAASVEAAAVEATLHIRCANGSKFTVQTDLGATVGAFKEVLSGSCGVPAPQQRLIYKGRILKDEQTLDSYGVETDHTIHLVRGVATPAASSAPAAANPLASFTPSSGPAGGLGGLFPGVDAPGNDRPSGIFRPGFPELEQVEQHLSQNPNLMREIMNMPAMQNLMNNPDLIRNMIMNNPQMREIMDRNPDLAHVLNDPSVLRQTLEAARNPEIMREMMRNTDRAMSNIESSPEGFNMLRRMYETVQEPFLNATTMGGEGSTASNPFSALLGNQGSSQPGQGQPATNAPTTGSESTTGTPAPNTNPLPNPWSTNAGSAQGATRTPSGNARTGGVGGTGATGGLGGLGSPELSSLLGGLAGSPRTGSAGGLGGSGSPDLGSMLGGSPDVSPFSQMLQNPAMIQMMQNIMSDPQTMNQLLNLNPNARNLMESNTHMREMFQNPEFLRQLTSPETLQTLLGQLGQHQPSQGGNNAGSATGTRGNPSLDTLMSMLSGLGSGGGLGVPNTSSVPPEELYATQLTQLQEMGFIDTAENIQALVATAGNVHAAVERLLGNLGQ

SEQ ID NO: 49550 - protein, 103 aa, Zea Mays
MTEKASKLCDPDAENVFKALRKAGVKTAVVSNFDTRLRPLLQALKCDHWFDAVAVSAEVCLPVLSFLLLMLETDGLVVEILYLLHSMLSCLYYVLLLPSATVT

SEQ ID NO: 49551 - protein, 227 aa, Zea Mays
MGASILRLFFHDCFGCDASLLLDDTPSFQGEKMAKPNNGSVRGFEVIDAIKSAVDKACPGVVSCADILAIAARDSVVTLGGPNWDVKLGRRDSRTASFSGANNNIPPPTSGLANLTSLFAAQGLSQKDMVALSGAHTIGQARCTNFRAHVYNDTNIDGAFARARRSGLLHSDQELFNGAATDAQVQAYVSSQSAFFADFVAGMVKMGDISPLTGSSGEIRKNCRRIN

SEQ ID NO: 49552 - protein, 54 aa, Zea Mays
MFRPPRARPTTLVETSVLESTLASQMPLDRIRSQVVGWGRWKTAVWSPTLTATG

SEQ ID NO: 49553 - protein, 104 aa, Zea Mays
MAFEKIKVSNPIIEMDGDEMTRVFWQSIKDKLIFPFLDLDIKYYDLGILHGEATDDKVTVEAAEATLKYNVAIKCATITPGTFDSCVDAICTLNLYYYIKAVRG

SEQ ID NO: 49554 - protein, 163 aa, Zea Mays
MRLLLVIGPAQLETPAQPTQTAATSRTFTSPISNSRSHQPSHSRARSSLQAAAAPTLLRRPSGAARPASACRCSRPPPLQSAALQAVLPPGRCSPGRSRPLLSRPSSSPASEPLRATAPGRRAPGRPPSCAACPAASPSSPASAVPLRQDYRVQRLTVPLFGI

SEQ ID NO: 49555 - protein, 119 aa, Zea Mays
MKAAEDATRCPQIPRRCHHCAGPLSKDMETSSWTVPPLVRDSFSMIGSALGGIAGAFYGFNHGTTSYCVLFCMCWISRWYNTSHRTAGFIILSCRVIALLCPLFACTNTCTLLRPRCIS

SEQ ID NO: 49556 - protein, 218 aa, Zea Mays
MADPDVIEVTFGNDVINTTVTSSGQAVERWIAEILALHRPGSNGYSIIVGLDVEWRPSFGPHQNPVATLQLCVGHSCLIFQLLYADYVPGALAEFLGDRGIRFVGVGVEADAERLSDDHEPLGRVLPQLRADQVRLHRRLRLFRGRPQAAWRRVLIDAVRQFVLVCSDFRFGCCCISGYKVVGVSVIEENYSDSHVLRSWFVAAFGVQSRIEHLRSCL

SEQ ID NO: 49557 - protein, 205 aa, Zea Mays
MRPPPPPLPSLRSSVLVLVLLPLLAACSSPASGRAVPLSPGTASVAPAPPPVDTARGIMLAPILSKFNSLKTSRKGVVAMAMIEYPSLEAATGKFSASNVLGVGGFGCVYKAVFDGGVAAAVKRLEAGGPECEKEFENELDLLGRIRHPNIVTLLGFCVHEGNHYIVYELMHKGSLDTQLHGASRGSALSWHVRMKIALDMARFL

SEQ ID NO: 49558 - protein, 54 aa, Zea Mays
MAALPFVKGLLKVLGLARAGPDILGALSESLYRGPIRKFDSAIFSTLNDIWKIK

SEQ ID NO: 49559 - protein, 353 aa, Zea Mays
MNTVASLPLAPRLLIKPSLACFSRKDVGRYGGIKVYAVLREDGAEFARNNNLEALFQVDDPGPRAPVKKFLDVNEALEVVRFDIQYCDWRARQDLLTIMLLHSKVVEVLNPLAREFKSIGTLRKELAELQQELEKAHNQQVHLSEARVSSALDKLAHMETLVSAPSTAEPPTSSSLSATASSTARVRAKNKQPRRRLDVSGPVKPYNPSLKNFWYPVAFSSDLKAPDTMVPIDCFEEQWVIFRGKDGRPGCVQNTCAHRACPLHLGSVNEGRIQCPYHGWEYSTDGKCEKMPSTKMLDVRIQSLPCFEQEGMVWIWPGDDPPKATIPSLLPPSGFTVHAECSLYLADSDGATS

SEQ ID NO: 49560 - protein, 221 aa, Zea Mays
MNVAVPPQSPHLRLYDFAKSAIIKIFAFPYATVCDLYCDGGMDTDKWCDAQVGHYIGIDASASGVNYARELWENRRKPFTAEFIELDPSDDGFEAQVQEKGIQADMVCCMQHLQLCFENEEQAKKLLNNVSSLLKPGGYFFGITPDSSTIWTKYQKNVEASHNKGLKTVPNSIRSENYTITFEVEEEKFPFFGKKYQLKFASDAVFENQCLVHFPTLMRLC

SEQ ID NO: 49561 - protein, 113 aa, Zea Mays
MADSKATSAVTLRTRKFMTNRLLARKQFVLEVIHPGRANVSKAELKERLAKAYEVKDPNTIFVFKFRTHFGGGKSTGFGLIYDNLEAAKKFEPKYRLIRVTHYSSSEGKSIKI

SEQ ID NO: 49562 - protein, 290 aa, Zea Mays
MSHQQALAQVTAQAVHSQYNMINHTDYSIPFSSTTAPALITAQHANSSANVASAQEKPALPSHAGNSNIESNEVSQGLKTSAPTFDKPADDGYNWRKYGQKAVKGGEYPRSYYKCTHTSCPVKKKVERSAEGHITQIIYRGQHNHQRPPKRRSKDGGGPLNEADVLHENEDISTRSEPGSQEHSGKHEGSNDGILGPSVSRRGGGDEQLSGSSDSDEEQDDEQRAGDEDPGYANANKRHVPTPAQRIIVQTNSEVDLLDDGYRWRKYGQKVVKGNPYPRTHKLWNYNSLP

SEQ ID NO: 49563 - protein, 364 aa, Zea Mays
MAAREASAPAPASPHAGDGPGRPPRPTLALPPRSAVESLFATGASSSAGAAETSPGPLTLAAALFPDASSPAFHGSFTQLLVGAIGSPAVPSPPSPFAVPPGLSPATLFGSPGLFSPTGSFEMSHQQALAQVTAQAVHSQYNMINHTDYSIPFSSTTAPALITAQHANSSANVASAQEKPALPSHAGNSNIESNEVSQGLKTSAPTFDKPADDGYNWRKYGQKAVKGGEYPRSYYKCTHTSCPVKKKVERSAEGHITQIIYRGQHNHQRPPKRRSKDGGGPLNEADVLHENEDISTRSEPGSQEHSGKHEGSNDGILGPSVSRRGGGDEQLSGSSDSDEEQDDEQRAGDEDPGYANANKRWFLP

SEQ ID NO: 49564 - protein, 97 aa, Zea Mays
MQRITITEIRNHSWFLKNLPADLMDDDSMSNQYEEPDQPMQTMDQIMQILTEATIPPACSRSINVLADGLDMDDDMDDLDSDSDLDVDSSGEIVYAM

SEQ ID NO: 49565 - protein, 316 aa, Zea Mays
MERMQLQGPIASSLWTDKQQVVASTSAAMAAQMPFLALLQGAGVVVEGAETEQQQYEHEHDGRKRQALARAVSKLDLLESCLTQAAAPAAAACAPVASRTTERRMKRPRTRARAAPPPEKRRKPEEAESQRMTHIAVERNRRRLMNDHLASLRSLIPSSYIPRGDQATVVGGAIDYVKQLEQQLVALQAAAGARRGSSVVSDDGVFLVSPQYASYSGSRGGGGLGVDVEATGAVGGHVRVRVAGRRWWPGRLVRAVAALEGLRLAVLHLAVTSVGRDAVVCCFNLKMEEGCEVATADEVATVVHQIFAYSAAGACC

SEQ ID NO: 49566 - protein, 160 aa, Zea Mays
MGDPDAQYELGCRLRIENDYVQSDQQAFHYIEQAVDQLHPGALYLLGAVYLTGDCVKRDMASALWCFHRASEKGHAGAAIAYGSLLLKGAEIPEVITRFNSGKSPSTGKMRKRTQQQDPVKLAKEQFQIAAEAGCDLGLRWLKRLEAYENQEEKLKQVQQ

SEQ ID NO: 49567 - protein, 523 aa, Zea Mays
MQVIIVGDFLCNPPHSSWQVLFGDVKVCVEIIQQGVIRCHTPCLDAGKVRMCLLDGNGKSCSEAREFEFLEKPTKCMIDGNTNPCNEAQDVKLHQIPTKSSEELSLLLHYVHTLFDGHASGLFSNFSLPLQNLGCGIQSNQMDVMKKAYKQLDPENVVSSVMEVLLNDKFKQWLSSKCEQNIDGDHLLPKQYRNIIHTVAALGYDLALKPLLSSGVPINYRDANGWTALHWAARFGREDMVVALLTAGAAAGALSHPTSEDPAAKTPASIALAYGFKGLSAFLSEAQLTTHLDSIESKENGKLDSREEGICRAVDRISDKSSHVHGGTDDQLALKDSLGAVRNAVQAAGRIQAAFRIFSFKKKKEMALGNRNSCCLSISEAGAVSHDMLEKAVLSIQKNFRCWKKRKEFLKMRNNVVRIQARVRAHQERNKYKELISSVGILEKVMIRWYHKGVGLRGFNSGAMTIDEEVDEDVAKVFRKLRVETAIDEAVSRVSCIIGSPKAMHQYRRMLNRYQQTKDDQEK

SEQ ID NO: 49568 - protein, 246 aa, Zea Mays
MTTLTIMRTLPREVDPVVYNMLHEDPGNVSYSAVGGLSDQIRELRESIELPLMNPELFLRVGIKPPKGVLLYGPPGTGKTLLARAIASNIDANFLKIVSSAIIDKYIGESARLIREMFGYARDHQVKMIMATNRPDVLDPALLRPGRLDRKIEIPLPNEQSRMEVLKIHAAGIAKHGEIDYEAVVKLAEGFNGADLRNVCTEAGMAAIRAERDYVVHEDFMKAVRKLNDAKKLESSAHYSADFGKE

SEQ ID NO: 49569 - protein, 92 aa, Zea Mays
MDSRQASGTGSSQEIAARAMKKILEFSGIASKLNSKDPNMVNVVSTSFSLTYETGPGAHVAYVERLDIAFSHFSTLVSFLRALPMTATVRGW

SEQ ID NO: 49570 - protein, 157 aa, Zea Mays
MAPRGRVELRRIEDKASRQVRFSKRRAGLFKKAFELALLCDAEVALLVFSPGGKLYEYSSSSIEDTYDRYHQFAGAGRKVNGHNNDNRDVAASDLQSRLKEIATWSKQNNAEESDANELEKLEELLTNALRNTKAKKTRELSSDKVKIFKTLRVGQH

SEQ ID NO: 49571 - protein, 462 aa, Zea Mays
METSSAPAAATEAGWYVLGPNQEGVGPYALAELREHFANGYFNESTMLWAEGRKEWMPLSSISELHSAVAAKDQSEQDAPDVDDDFEKFQKEVIEAETEVKALKGNDVDQQDDERPATPPDGEEEFTDDDGTIYKWDRTLRAWVPQNDASGSKEDYAVEEMTFAVEEEIFQAPDILGPALEEINNLPESKNKGSDKAEMRGDKKRKSYENPAEKKEANKPPDSWFDLKVNTHVYVTGLPDDVTVEEDPETKKPRVKIYTDRETGRKKGDALVTYFKEPSVALAVQLLDGTPFRPGGKTHMSVSPAKFEQKGDVFVSKKTDKQKKRKIKKVEDKMLGWGGHDDKKLMIPATVILRHMFTPAELRADEELLPELEADVREECIKFGPVDNVKVCENHPQGVILVRFKDRKDGAKCIEKMNGRWFAGRQIHASEDDGSVNHALIRDYDAEVSRLDRFGQELEEST

SEQ ID NO: 49572 - protein, 451 aa, Zea Mays
MAVAPLIFYGIQHYLSIAGSLVFVPLILVPTMGGSDEDTATVISTMLLISGLTTILHTFLGSRLPLIQGSSFVYLAPALVIANSEEFRNLSDNYLRKISLFGNHIFLVYAVPLSVAIVWAYSFFLTAGGAYNFKGCSSNIPSSNILLDSCRRHLETMRRCRTDVSSAWRTAAWVRIPYPFQWGPPTFHSKTGIIMIIVSLVASVDSLSSYHAASLLVNLSPPTRGVVSRAIGLEGISSFIAGVWGTGTGSITLTENIHTLETTKMASRRALQLGAAVLVVCSFFGKIGALLASIPLALAASVLCFTWALIVALGLSTLRYTQAASSRNLIIVGFTLFISLSIPAYFQQYEPSSNLILPSYLLPYAAASSGPVRTASSGLNYAVNALLSINVVVALLVALILDNTVPGSRQERGVYVWTDPKSLEVDPATLEPYRLPEKISCWFRWAKCVGM

SEQ ID NO: 49573 - protein, 147 aa, Zea Mays
MQSLSFRVGVMKMRKMLHLLGLHGLEDIVGSEIQATMVSVHTIFITGISKAKRNSKRARSQKSRNWSFETDEEDEVSAPSEVSLARQALGLSTSGPLKLEDVKSAYRACALRWHPDRHNGSSKSTAEEKFKHCSAAYKTLCDSLAAA

SEQ ID NO: 49574 - protein, 224 aa, Zea Mays
MNSIKSAIFSGHRSHPHVGAAAVPQQQLGSTASFHSTPILQRKHKTQWHNVNTDSTIIRDVGGTEKLKGQCYGTCQNMQSLSFRVGVMKMRKMLHLLGLHGLEDIVGSEIQATMVSVHTIFITGISKAKRNSKRARSQKSRNWSFETDEEDEVSAPSEVSLARQALGLSTSGPLKLEDVKSAYRACALRWHPDRHNGSSKSTAEEKFKHCSAAYKTLCDSLAAA

SEQ ID NO: 49575 - protein, 287 aa, Zea Mays
MNGGGSGLAPNAAHTADEVFRDYKGRRAGMIKALTTDVERFFKLCDPGECARSLWFLAPGCGVIAEEASVVFLLGLRCFEKENLCLYGYPDETWEVTLPAEEVPPEIPEPALGINFARDGMNEKDWLALVAVHSDSWLLSVAFYFGARFGFDRETRRRLFSLINNMPTIFEVVTGAAKKQAKEKTPNSSSKSNRPSSKVSRAESRSKAKVPQDEEESGDDDEDEEADEHNNTLCGTCGTNDSKDQFWICCDNCEKWYHGKCVKITPARAEHIKQYKCPDCTNKRARA

SEQ ID NO: 49576 - protein, 905 aa, Zea Mays
MTRRPASSAPSAARLLLLLLLLLLLHCQCHRAGAATDAERRALLDFKAAVTADPGGVLASWTPTGDPCGFVGVTCDASTGAVKRLRVHGAGLAGALSPSLARLPALESVSLFGNALTGGVPPSLRLLAPTLRKLNLSRNALAGEIPPFLGAFPWLRLLDLSHNRFAGGIPAALFDPCPRLRYVSLAHNHLTGPVPPAIANCSRLAGFDFSYNRLSGEFPDRACAPPEMSYISVRGNALSGDIAAKLASCGSIDLFDVGSNSFTGAAPFALLASVNITYFNVSSNAFDGEIPSIATCGTRFSYLDASGNRLTGPVPESVVNCRGLRVLDLGANALAGAVPPVIGTLRSLSVLRLAGNPRISGSIPAELGGIEMLVTLDLAGLALTGEIPGSLSQCQFLLELNLSGNKLQGVIPGTLNNITYLKMLDLHGNQLQGGIPVTLGQLTNLVLLDLSENQLTGPIPQELGNLSNLTHFNVSFNNLSGMIPSEPALQKFDFTAYMDNPLLCGSPLPNNCGPGTGMKHRKRLRVPVIIAIVAAALILVGICIVCALNIKAYTRKGTDGDGKEEEEVLVSESTPPAASPGSNAIIGKLVLFSKSLPSRYEDWETGTKALLDKDCLIGGGSIGTVYKATFENGLSIAVKKLETAGRVRGQDEFEHQMSQLGNLSHPNLVAFQGYYWSSSMQLLLSEFMANGSLYDHLHGYRPPPRALSESSSSSRGGGGELFWERRFNIALGAARALAYLHHDCWPQILHLNIKSSNIMLDGRYEARLSDYGLGKLLPILGSIELSRIHTAIGYIAPELASPTLRYSDKSDVFSFGVVLLEIVTGRKPVDSPGIGATAVVLRDYVRGILEDGTASDCFDRSLRGFVEAELVQVLKLGLVCTSNTPSSRPSMAEVVQFLESVRVSS

SEQ ID NO: 49577 - protein, 884 aa, Zea Mays
MAPDPCGDLVVTPKTAAKDEASCSVPTPPKVTPDEVRAVARKFADQPIQETEPDVWAVLTAISKKARLRPQGMNILLSADEHCLGRSVEERFRIFAQQISGMHCKIYRDTVLGELNRHEPVPVFLKDTSSNGTFINWKRLKKNSSPVKLNHGDIISLSSPPHDDNSFVFVYREVNAISRVENGAPILKRKSVEGGSGSKRLKGLGIGSPDGPVSLDDVRRLEKSNADLREQLEAHVVTIETLRAEIKTAQVQHGKELEELRETISSSYLDQTKSLRSALEEKQKQIDSLSTSNTELQNSIKDLDERLNASKQSRADADEIISSQKGMICELEGQLNEERNLRREERDKAAHDMKSALHKVQAEAQEEIKKQAESYLRQQREQKEVISKLQESEKETRLFVETLRSKLEDARDNLVTSEKRVRELEAQLQDEQMVSANNRKKTENLEAELRKLKKELDNEKQAAREEAWAKVSALELEIAATIRDLSIEKQRYQGARERIILRETQLRAFYSTTEEISSLFAKQQEQLKAMQRTLEDEENYESTLMGVDLNKVPLTTDNAGMKPVDCSKNTVGASSASPENTQVSEHDSSDEDANMTEQQDDDGTAIGGSTQGLECTSPERSEGRLKSGFHGNPVSTAPEREVTDTEQVPETDSQAGNAGCDDQRCDNTGGETMPLEDDMLLPDNEEPTALLKDVGQPQANVVPIPIPGDGVGHCFEEKHEGACSESKREDTHAGAIRTADLLASEVAGSWAVETAPSVNGENESPRSLGDATEHDEAGGSVAGDALVTLVNSEGQAAGSQNNVERGSSKITHHHHHHRHHHRVLSAMIGIVDPEFRKQMSGRSGVGNEEPMSDAETGEGIEEGDSDSGSDGSDSEEAMVEDSVV

SEQ ID NO: 49578 - protein, 209 aa, Zea Mays
MELRLCLRLHARLPPATTPPPFQATAVLPASRRLRTGGSYGVALRRHTRRSSPAICASITDGEQGVAVKERSVSVILLSGGQGKRMGANMPKQYLPLLGLPIALYSLKTFCQLKEVKEVVVVCDPDYSDVFEGSIDNLQIPLKFARPGKERQDSVFNGLQEIDGDSELVCVHDSARPLVSSEDVKKVLEDAAVHGAAVLGVPVKATIKE

SEQ ID NO: 49579 - protein, 355 aa, Zea Mays
MESCVPPGFRFHPTDEELVGYYLRKKVASQKIDLDVIRDIDLYRIEPWDLQEHCGIGRYEEQSEWYFFSYKDRKYPTGTRTNRATMAGFWKATGRDKAVHDRSRLIGMRKTLVFYKGRAPNGQKTDWIMHEYRLETDENAQPQEEGWVVCRAFKKRTAYPARSMAMAWDPSYAYREASATGAAAFVDPNAASYTQIRRQPNKSERFKQELAELDGAAALLQYSASHLLELPQLESPSAPLAPANPSQASAADEAAVDAADSGRRPGKKARADKAATDWRALDRFVASQLSPAAASTTAAASSVACSQVDHVEDDDMAALLFLNSDDGRDEAERWTGLLGPAAGGDGDFGLCVFEK

SEQ ID NO: 49580 - protein, 221 aa, Zea Mays
MARHGEVEAVSLLRGALFSVTIGSNDFINNYLTPIFSVPERATTPPVAFISAMIAKYRQQLTRLYLLDARKIVVANVGPIGCIPYQRETNPSAGTACAEFPNRLARAFNRRLRALVDELSAALPGSRFVYADVYRIFSDIIANYGSHGFEVADSACCYVGGRFGGLLPCGPTSLYCADRSKYVFWDPYHPSEAANALIARRILDGGPMDISPVNVRQLIVT

SEQ ID NO: 49581 - protein, 192 aa, Zea Mays
MPTEWIHSPWAAPNSILQVAGVELGFNYPKPIVELHMARECLDDAISTMWQLDTAAKLAELDGEVVDDNLNNIRNFDIPKVVLNKKLSPSTSSMEHRVLSTNGKDEKSQPTEVKALYKQIIRDDMMNDSNMDDTCSTANLKVTRKRSSSDSAFNVPSCSSSLVMESRIHHNEPSSVLYSGYFQKTADRDGTS

SEQ ID NO: 49582 - protein, 319 aa, Zea Mays
MTGYPLVDAGMRELWATGWTHNRIRVIVSSFAVKFLQIPWIWGMKYFWDVLLDADLESDILGWQYISGSLPDGHELSRLDNPEVQGQKYDPDGEYVRTWIPELARMPTEWIHSPWAAPNSILQVAGVELGFNYPKPIVELHMARECLDDAISTMWQLDTAAKLAELDGEVVDDNLNNIRNFDIPKVVLNKKLSPSTSSMEHRVLSTNGKDEKSQPTEVKALYKQIIRDDMMNDSNMDDTCSTANLKVTRKRSSSDSAFNVPSCSSSLVMESRIHHNEPSSVLYSGYFQKTADRDGTSKVEDNDSEDSGTSISRPSKKAA

SEQ ID NO: 49583 - protein, 473 aa, Zea Mays
MSLPIEISQYLAPTRLVAAPGLANVRCCSIDDLGLESSKDVESSNALLSRAWSPGWRNAENMLEEFVSYGLLEYSEHGMKVGGSTTSLLSPYLHFGELSVRMIYQLVKMRQVKWQNEGKSEAEESVRLFLRSIGFREYSRYLCFNYPFTHERSFLGNLKHYPWLLDEGRFKSWRQGMTGYPLVDAGMRELWATGWTHNRIRVIVSSFAVKFLQIPWIWGMKYFWDVLLDADLESDILGWQYISGSLPDGHELSRLDNPEVQGQKYDPDGEYVRTWIPELARMPTEWIHSPWAAPNSILQVAGVELGFNYPKPIVELHMARECLDDAISTMWQLDTAAKLAELDGEVVDDNLNNIRNFDIPKVVLNKKLSPSTSSMEHRVLSTNGKDEKSQPTEVKALYKQIIRDDMMNDSNMDDTCSTANLKVTRKRSSSDSAFNVPSCSSSLVMESRIHHNEPSSVLYSGYFQKTADRDGTS

SEQ ID NO: 49584 - protein, 479 aa, Zea Mays
MDANANALGMDAITNETVDLEHVPVEEVFEHLKCTRDGLTSAAAQDRIDAFGYNKLEEKQESKVLKFLGFMWNPLSWVMEAAAIMAIALAHGGRDVRGKPMGIDYHDFVGIMLLLIINSTISFIEENNAGNAAAALMARLAPKSKVLRDGTWSEMDASLLVPGDIISIKLGDIIPADARLLEGDPLKIDQSALTGESLPVTKQPGDGIYSGSTCKQGEIEAVVIATGIHTFFGKAAHLVESTTHVGHFQKVLTSIGNFCICSIAAGMTIELIVMYAIHAREYRQIVDNLLVLLIGGIPIAMPTVLSVTMAIGSHKLAQQGAITKRMTAIEEMAGMDVLCSDKTGTLTLNKLSVDKNLIEVFARGMEKDDVVLMAARASRLENQDAIDFAIVSMLPDPKEARAGIQEVHFLPFNPTDKRTALTYLDARGKMHRVSKGAPEQILNLASNKSEIERKVHHSIGNYAERGLRSLAVAYQVVTN

SEQ ID NO: 49585 - protein, 246 aa, Zea Mays
MASLQVTPTSAFTEWNELKFEGLYLFHTPLGSGANQARVIDNKAPIGIGATVVNNWTVYDGPGPNAKLVARAQGLHIQAGNWVNSFSLVFVDQRFSGSTLEVTGIVVESGEWAIVGGTEPQRLKSITVATGIAVTSIAFSYVDSAGQTQSAGRWGGSGGETEPVIQLGDSEVLTELSGTIGNVDGHTVITSIKFVTSLKTYGPFGAWGDGSDTPFAIPVQQGSAIVGFFARAGVYLDALGVYVRSL

SEQ ID NO: 49586 - protein, 145 aa, Zea Mays
MYWDELPDLEELTGVNTTWVSTLMAQHLLAAADRYALERLKLLCELKLCEDVAINTVANTLALAEQHHCYQLKTVCLKFVALPENLKAVMQTDGFDYLQQSCPSLLTELLEYVAKIGEHSVSPCLYSTEVLDGGDANGRRVKPRI

SEQ ID NO: 49587 - protein, 164 aa, Zea Mays
MACVSTFQSCPIARRAKINTRSRGSSSSVAKGSPPPAFQFQCRASTFAADTSLRLELDENPEAIISGAWPGNCSLLSYDDLRAYLESQETAAQADDQRGVALLSETMSTPVLVATADQTLEDVECHFEAVSGLPVVDSGLRCVGVIVKNDRARASHGPRRRYRK

SEQ ID NO: 49588 - protein, 177 aa, Zea Mays
MACVSTFQSCPIARRAKINTRSRGSSSSVAKGSPPPAFQFQCRASTFAADTSLRLELDENPEAIISGAWPGNCSLLSYDDLRAYLESQETAAQADDQRGVALLSETMSTPVLVATADQTLEDVECHFEAVSGLPVVDSGLRCVGVIVKNDRSKTKISEVMTSPAITLSSDKTVMVHA

SEQ ID NO: 49589 - protein, 843 aa, Zea Mays
MRSQLNASFSPPPSLRRALPSATPRALRFHAFPWRFRAPQHHGRGAGARCATNLPAPGSHGVGVLASERRADDGDTTVKNADAPSTSTATQGNLNMAAIVSIAFCFLHRIVSGRMQSMMNLFPWMSNGIASLPFACISDPTRKPMPLKLDLTLPPLPDFGWNFSRLYYRFNSQLDRNIALSIITLLITCFSFVIVGGLLFHKFRKQQQSLEDCFWEAWACLCSSSTHLRQKTRVERVIGFFLAIWGILFYSRLLSAMTEQFRNQMHKVREGAQVQVIEDDHIIICGVNSHLMSILNQLNKYHESSIRLGLATARKQKILLLSDLPRKQIDKLADSLAKDLNHIDVFTKSCSLSMSTSFERAAAHKAKSIIILPAQHERYEVDTDAFVSLLALQPCKQIAPVPIIVEASNATTCELLKSITGLNVQPVEMVASKLFVQCSRQKDLLKIYKHLLNQHKNVFNLFRRPELEGMKYMDAVVCGIFRSGKIHFHPSEEELLKETDKLLLIAPVRGMKRPQYRALSVRKETQTLSRNSEPREGQGSFNMATTMDNETRLNNIVKRPLKSLSKSSDYMLGPKECVLIVGWRPKVTEMIREYDNYLGPGSTVEILSETPIKERSSIINPLLQSQLKNVKVTHRVGCPLNYDTLKETIINVRESAKSDKEVPLSIVVISDRDWFVGDAAQADKQLAYTLLLAENICQKHGVMVENLVSEIVDMGLGKQISKIRPSLSFIGAEEIMSRVTAQVAESSELNEVWKDILNAEGDEIYIKEIGLYMKEGEKISFLELSERAVLRREVAIGYIKDGKQHINPINKSEPLSLEMNDSLIVISEFEGEQPIMMGGETSG

SEQ ID NO: 49590 - protein, 322 aa, Zea Mays
MKYMKLGSKPDVLQTEGSNIRFVATDLATDVVILIGDVKFYLHKFPLLSKSSRLQRLVASINEEKNDEVDISDIPGGPSAFEICAKFCYGMIVTLNAYNVLAARCAAEYLEMFETIDKGNLIYKIDVFLTSSVFRTWKDSIIVLQSTRSLVPWCEDLKVISHCIDSIASKASIDPSEVEWSYTYNRKKLPSENGIDSHWNGVRMQPMVPTDWWVEDLCELEVDSYKRVIMSIKAKGSTPAVVVGEALRAYAYRRLLGSLEDAVSNGVDCAKPRAVLDAIVSLLPAEEGSVSCGFLLKLLGAACLLESDLVMAIVEEFHVVTE

SEQ ID NO: 49591 - protein, 156 aa, Zea Mays
MKGVGGGAASPGDYVYFKSVVPLHKISIGSKLWRYYDFGPKVVPPLVCIPGIAGTADVYYKQIMSLCMKGYRVISIDVPQVWNHHEWIHSFEKFLDSMNIHHVHIYGTSLGGFLAQIFAEHRPRRVKSLVLSNTFLETHKFAAAMPWSPVNPRWSP

SEQ ID NO: 49592 - protein, 857 aa, Zea Mays
MKNSLAQSASGQVVPKLFPSPINLRFFGKSDELLSSRNFEQPPSLTLDSRNDDIAFVNKSNHLFMVKGIEAGQSSNILRQKEIENGSRQIKWEQPTLSFGDMGRPFLTRSQSALESPQCTRRDDNKDPTTDSTSESFSEACLSMSLGIANNVNRMEATSTAERPVLLSTTAIAEGRELATTLSPFQHAQRARHFLTRPPRIGEGAAFDPTRDMFPHLRVARPPADGRGRNQLLPRYWPRITDQELQQISGDSNSTIVPLFEKVLSASDAGRIGRLVLPKACAEAYFPPISQPEGRPLTIQDARGKEWHFQFRFWPNNNSRMYVLEGVTPCIQSLQLQAGDTVTFSRIDPGGKLVMGFRKATNTVSLPDSQISAIANGSLLSETLFSTANENIGVVSGYPGFLHSIKGAADLHPNSLYDHHMNLVDGDVSWNKADKFGSRPDEGSLQFLQKRSHNIGSKSRRFLIDAEDAMELKLTWEEAQELLRPAPTAKPTVVMIEDYEFEEYDEPPVFAKRSIFTIRATGEQDQWIQCDDCSKWRRLPLNVIVAPKWTCTDNSWDSKCCSCSAPEELTPRELQSVLQQYEEMRRRKGSYGLKLNVAEMDASSLDAFATAAVFGEVGNQGSASVATTTKHPRHRPGCTCIVCIQPPSGKGPKHSPACTCNVCMTVRRRFKTLMMRKKQRQSEREEAEAGKKIAWVNRDEPEGSSLSRSPQTLDSTRDNSDVTATMLDKVSDVNKQGHIDVDLNLHPAAPAVQAAQQQPRPVSMMGLLEVAGRPLDNYMKQNGLTSLVGEQGGGSSSTATVPPPALVESEERTSNEGLVPSASAEREPNAMAVDEAGENQQDKAADDDDDAVAAAAT

SEQ ID NO: 49593 - protein, 196 aa, Zea Mays
MQRNGVVECSVCRSRVVVPSPRSVSRAYDKHRNKMSSKFRALNVFLVVGDCILVGLQPILVFMSKVDGKFQFSPISVNFLTEVMKVIFAVVMLIIQSRKQKVGEKPLLARSTFIQAARNNVLLAVPALLYAINNYLKFIMQLYFNPATVKMLSNLKHQSTPNCTCGQHSIWSSCHCYCVHIYIDFCNCSFSGFCLQ

SEQ ID NO: 49594 - protein, 334 aa, Zea Mays
MLEQQGVLGFDVTVARVVFHEISEDAIKKALMSPRYIDMDLVNAYLARRSLDYLIGFGISPLLWRKLPGCQSAGRVQSAALALVCDREAEIEQFKAHEYWTVQTDFKIQSADPSNATCIPFCIKHLNSKKLDQLSIPSQEEAQAIEKMIHSSTFEVLGVKRSKIHKNPPLPYITSSLQQDAANKLHFTAGYTMKIAQNLYEGINLSSEETTGLITYIRTDGFHISDGAVEDIRSLVKERYGQKYVSEDIRKYLKKVKNAQEAHEAIRPTSIRRPPSSLVGILDDDSLKLYTLIWKRTMACQMEASRTEMIQVDVGIPEGEMNFHSTASKLDFKG

SEQ ID NO: 49595 - protein, 116 aa, Zea Mays
MEAGPPCEPAPTVANGRDWSELSLDALVLVFGRLGPVEILMGSGLVCRSWLQAAKEPELWASLDMASHRAVEEMGGDVLRGMARVAVGRSRGRLEVFSGKHFVTDDLLNYISGPRV

SEQ ID NO: 49596 - protein, 504 aa, Zea Mays
MLRQASNLAHNMFDDMSFTEVVWDDEGALFDEMHCTDVIWDEETHHGFDSHGLLQHHAEAMDNQMQGKEKLAQSGDYYDERKVNIEPDINNLLIHVNDHFSMLVIGADSRRSDVVWDEDMLSDLDTHGGLLQLLACCKDDELNQDRDTPFLLGLGMDQVDEMLASPSSLGMNEDLPSVPETHGSLLQQVAWDRKHFAYEMCTLIAEMVLEDVLTDVGNLAFSIDSSMQISDQPSKYALVIDAYLLKTQYKKPYISISQWDPGIWCKGTMAHEQQQLEIYRMFEKQWDSVILKWFRNPFVLLQSCNGEDLNEQGTVPVNDIFDVLAAGQELNFGNVTLIIYGGCQGAMGLQVLFAELHPWHHNVFTSIELAIQSWRINGFSPGSCKLNRQSILVATNLQFNYKASKFVSFTDTYQIYKNTCICIGELEPASWRDTCWLPEISHANVSTLASEEIDNMLFQVGDFHPGESEQLELYMITLIQWDLGPVEFYKSNCRCPAAELIGWC

SEQ ID NO: 49597 - protein, 169 aa, Zea Mays
MLSSRSKASSIQEVREDGLREYADLKQSLLLYDASIVITGFSTFILASNDSAAYSFLIGGIGGFLYLLLLQRSVDGLPVIGSPSEAGGAQPSVKSFSGVRRPWLILSLVLVAGAVALKYGAGGDSFALTPTDLFVGTAGFLANKVAVLLAAFMPMLSDSKSEDGSGDSS

SEQ ID NO: 49598 - protein, 115 aa, Zea Mays
MECFLRLAELNTAKNLETCGILAGTLKKRTFYVTTLIIPKQKSTSDSCQATNEEEIFEVQDKGSLLSLGWIHTHPTQTCFLSSIDLHNHYAYQIMLPEAIAIVMAPTDTTRYYFH

SEQ ID NO: 49599 - protein, 220 aa, Zea Mays
MLEHLALSLPFFNWLSVITHDIILVVSNYFNVSLQFMTEMKETAFIMQNVSSRSLVVVDELGRATSSSDGLAIAWSCCEYLLSVKAYTVFATHMERLSELSTMYPNVKILHFEVDLRNDRLDFKFCLKDGIRRVPHYGLLLARVAGIPTSVIDTSTSITSQITEQEMTRMNANCEEYWSLQMTYQVVQRLICLKYSNHGDDYIREALQNLKESYSAGRLT

SEQ ID NO: 49600 - protein, 285 aa, Zea Mays
MEGDATGADGGGGGGSGERSSFVIGLIENRAKEVGVAAFDLRSASLHLSQYIETSCSYHNTNTLLHFYDPMVVIVPPNKTAADGMVGVSELIDKHYPANKKVTMARGCFDDTKGAVIVRSLSARDPSALGLDTYCKQYYLCLAAATATIKWIESEKGVFITNHSLSVTFNGSFDHMSIDSTSVQTLEIIDPLHTELWGTSNKKKSLFQMLKTTKTTGGSRLLKANLLQPLKDIQTINARLDCLDELMSNEELFFGLTQGLRKFPKESGFEGGKEFSSSQHLSDCM

SEQ ID NO: 49601 - protein, 804 aa, Zea Mays
MEGDATGADGGGGGGSGERSSFVIGLIENRAKEVGVAAFDLRSASLHLSQYIETSCSYHNTNTLLHFYDPMVVIVPPNKTAADGMVGVSELIDKHYPANKKVTMARGCFDDTKGAVIVRSLSARDPSALGLDTYCKQYYLCLAAATATIKWIESEKGVFITNHSLSVTFNGSFDHMSIDSTSVQTLEIIDPLHTELWGTSNKKKSLFQMLKTTKTTGGSRLLKANLLQPLKDIQTINARLDCLDELMSNEELFFGLTQGLRKFPKESDKVLCHFCFKPKKVTDKVLKPANGRKSQMLISDIIVLKTALDAIPFLSKVLKGAKSFLLHNIYQTVCENPKYANMRKRIGDVIDEDVVHSRAPFVACTQQCFAVKAGIDGLLDVARRSFCDTSEAIHNLAKKYRDDYNMPNLKITYNIRQGFYFIIPQKDITDRLPNKFIQVVRHGKNLHCSSLELASLNVRNKSSAAECFSRTELCLEGLIDKIRGDIAILTLLAEVLCLLDMIVNSFAHTISTKPVDRYTRPEFTDDGPMAINAGRHPILETLHTNFVPNNIFLSEASNMVLVMGPNMSGKSTYLQQICLIVILAQIGCYVPAQFASLRVLDRIFTRIGNGDNVENNSSTFMTEMKETAFIMQNVSSRSLVVVDELGRATSSSDGLAIAWSCCEYLLSVKAYTVFATHMERLSELSTMYPNVKILHFEVDLRNDRLDFKFCLKDGIRRVPHYGLLLARVAGIPTSVIDTSTSITSQITEQEMTRMNANCEEYWSLQMTYQVVQRLICLKYSNHGDDYIREALQNLKESYSAGRLT

SEQ ID NO: 49602 - protein, 162 aa, Zea Mays
MEEYLESMKSLRSYMNDLEDDAAKRSVEEQQQRTAIDAHDSDVALVMAQAKQASEEAERLATARAKVGMQMAEKQGRIATLDIECATLKQTLELLRQETASTFVKLCEKRLFYTKRTETLTVKLQEQQEWFSMKNKITRQEPHVAKSQSKQNFIEVFNQTGK

SEQ ID NO: 49603 - protein, 466 aa, Zea Mays
MAASAKGRLVPVLAVAAALAAVLLYRAPFSKSLGGEGCSLLPHDHFWIASDRVVTLGRVGPAAVEVKGGLINAIAVGDYRSFVLRRPLLDYGDAVIMPGLIDVHAHLDEPGRAEWEGFSNGTRAAAAGGITTLVDMPLNSFPSTVSEETLKLKLEAARDKLYVDVGFWGGLVPENAFNPSALEGLLKAGVLGLKSFMCPSGINDFPMTNSTHIEEGLVTLAKYKRSLLIHAERIPEAEDHDLQEDELDPRSYMTYLKSRPPSWEEAAIRDLQRAMKDTELGGRSEGAHIHIVHLSDAKTSLELMKDAKRSGASLSIETCPHYLAFSSEEVPDGDTRFKCSPPIRDDTNRENLWKALLDGHIDMLSSDHSPSTPDLKLMEEGDFLRAWGGISSLQFVLPVTWSYGRKYGVTLNQLASWWSERPAKLAGQKNKGAILPGYHADIVVWKPETEFQLDNNHAIYHKHQRI

SEQ ID NO: 49604 - protein, 209 aa, Zea Mays
MVARRFVVRHGPAAGGSAEAAEEQQHEVEYDTEHGLDVLRLQIFSLTAVPPDLQKIVVEADGSVVDDGTDLEAVSERLRLLAIGEEGEDDGAAARAQEKSDEEFARMLQAEEEALLLQQYNIQNDGGDVFRQRVEPYMHQYEDSVGQEAAQKTVPICELEEKALVSLAKEGNFNPSKDEEKHAFLLQLLFWFKQSFRWVNAAPCDSCGP

SEQ ID NO: 49605 - protein, 224 aa, Zea Mays
MECISSDKDAEGKQKVNHVTVFERPGLHEFLQKTSEFADLILFTAGLEGYARPLVDRIDVHNRFRLRLYRPSTVTTEYREHVKDLSCVSKDFGRIVIVDNNPFSFILQPLNGIPCVPFSAGQHSDDQLMMVIFPLLKHLSLQKDVRPVLHERFHMPEWFQKHGIPQTNQSVLTGRIIDERRRRLKSDVVEMLTCIKNWEDAEARMQHMVDDKELEETFENVYLD

SEQ ID NO: 49606 - protein, 389 aa, Zea Mays
MALGEGGDHGAALPLIADQAKHAAAGGIVRSGSNSSWVCMLLQHTALFGYGIAYTITASISCRAILKANCYHEHGHDAHCDYDGNYYMLIFGGVQLLLSFIPDFHDMAWLSVVAAAMSFSYAFIGLGLGLARTIANGTIKGSITGVRMRTPMQKVWRVSQAIGDIAFAYPYSLILLEIQDTLKSPPAENKTMKRASMISILVTTFFYLCCGCLGYAAFGSDAPGNLLTGFGLYGPYWLIDFANACIILHLLGGYQVYSQPIFQFAERLLAERFPDSGFVNGGSYTVRFACLRACRVNPLRVCLRTLYVASTTAVAVALPYFNEVLALLGALSFWPLAIYFPVEMYFIQRNVRRWSARWVVLQTFSVVCLLVSAFALVGSIEGLISKKLG

SEQ ID NO: 49607 - protein, 596 aa, Zea Mays
MCSMPQWIRYYGMLVNMHMRTRFSQEGALSSILLHRKMAFLGSRRVLRASMIPLVLDMDAIVYPLALFLSYFLSGMAVARDINGRKNRIVTVISNWTTMAGQVYEAMGHAGFLDSNMVVILNDSCHTLLPKADGGAKMSVNAFSSALSKIQSSKGFRRFREAAKGLAKWFGKGMHEFAAKVDEYARGMIGPHGATLFEELGLYYIGPIDGRNIDDLICVLKEVASLDSTGPVLVHVITGTENDTGGIIGSEINAVEEGPSNSSPDLLKFLGTGLSRTYNDCFVEALTAEAENDKRIVVVHGGMGIDRSLRLFQSRFPDRFFDLGIAEQHAVTFSAGLACGGLKPFCIIPSTFLQRAYDQIIEDVDMQKIPVRFAITNAGLVGSEGPTNSGPFDITFMSCLPNMIVMSPSNEDELIDMVATAAMIEDRPICFRYPRGAIVGTSGSVTYGNPFEIGKGEILVEGKEIAFLGYGEVVQRCLIARSLLSNFGIQATVANARFCKPLDIDLIRTLCQQHSFLITVEEGTVGGFGSHVSQFISLDGLLDGRTKWRPIVLPDRYIEHASLAEQLDLAGLTAHHIAATALTLLGRHRDALLLMK

SEQ ID NO: 49608 - protein, 213 aa, Zea Mays
MHPYVSIPPSLPPPSSFLRLFRRLHAAYATSPSPPAVRPDPSPRPHLAEDWIAGGYIPLLKETFKFPQSLGILGGKPGTSTYIAGVQEDRALYLDPHDVQMAVDIAPDNLEADTSSYHCSVVRDLALEQIDPSLAIGFYCRDKDDFDDFCSRASELAEKANGAPLFTVMQSVQPSKQMYKQDDGLCCCSGSSMANEDYDLDASGEAGEEWQIL

SEQ ID NO: 49609 - protein, 96 aa, Zea Mays
MTNIEQAMDRNPRDFCRWDVNMQQLKGTCSSIGACRMKNECTSFRNRCGDENVEGCMRSFQNLKREHGVLRQKLESYFQLLRQAGPAVTATRPRGM

SEQ ID NO: 49610 - protein, 165 aa, Zea Mays
MTKQPLLLFSGKHMFTRACSRWRVIAGEWRVANPSGGYVKETRNYGAPAIGAGRGRCSFCGGRMGPRREFGEGNGNGVEGGYGGGGFGDSGFPRREEGDGKAMGRGHGPRQPYRGGGRRGGYTDSEAGDESGRPPRRAYERHSGTGRGYGMKCEVRWPWHLGNCD

SEQ ID NO: 49611 - protein, 195 aa, Zea Mays
MTKQPLLLFSGKHMFTRACSRWRVIAGEWRVANPSGGYVKETRNYGAPAIGAGRGRCSFCGGRMGPRREFGEGNGNGVEGGYGGGGFGDSGFPRREEGDGKAMGRGHGPRQPYRGGGRRGGYTDSEAGDESGRPPRRAYERHSGTETVETEGAPAVAEAENKLEEAPQSEVEKGKEGESTEVEEPEDKVVDIFKW

SEQ ID NO: 49612 - protein, 196 aa, Zea Mays
MTKQPLLLFSGKHMFTRACSRWRVIAGEWRVANPSGGYVKETRNYGAPAIGAGRGRCSFCGGRMGPRREFGEGNGNGVEGGYGGGGFGDSGFPRREEGDGKAMGRGHGPRQPYRGGGRRGGYTDSEAGDESGRPPRRAYERHSGTETVETEGAPAVAEAENKLEEAPQSEVEKGKEGESTEVEEPEDKVQAILFIS

SEQ ID NO: 49613 - protein, 185 aa, Zea Mays
MKVGKAYLVIKQTLQQIVEKQYNLSDVFSELIDEVLRAESGDNEDVYDVQKTTTKSDDILPQSAESCPDEADIDPLGKHGDVGKNMPTNTNVTPQATPHTESCSPIFDATPQIKVSVETDPATNTPQVDQISLDSEMQTVLALREYLCDTQSDTSRTIIDYGEYCSTASDIYESFADGKCLDNVF

SEQ ID NO: 49614 - protein, 356 aa, Zea Mays
MHYLHHDPWYVEVNMNSGATVWPLFNSLQAFWPGLQVLAGDVDPAIRTHAAFFSVWKKYGFTPEGFNLATSTVQNGQRSYPLRPELIESTYWLFKATRDYRYLDVGRDILASLQYGARCPCGYCHISDVETHKQDDHMESFFLAETVKYLWLLFDLAAGPDNIVENGPYKYIFSTEGHLLPVTPEIALEDEHCSYFGAFCNGGADHGYGASASSTKHRNGNYTQLDDIQTPSSHYSMSNVLFTPGYIKGVCPGLTHAQKFGISYSDEEDNFIEQTSESLDHHGESAIESSVQDQSSSIILISHPVASQQDEAFESESGSQDHANIVVTSDSDSDSTSRDNTVGSPGMNSEELMDDI

SEQ ID NO: 49615 - protein, 235 aa, Zea Mays
MGQCYGKAGGASSRRADHDDHAHAVAPPSPLPANGAPPPQPATPGRRKSGSATPVHHQAATTAWPSPYPAGGASPLPAGVSPSPARSTPRRFFKRPFPPPSPAKHIKATLAKRLGGGKPKEGTIPEEGGAGVAADSAEAERPLDKTFGFANNFGAKYDLGKEVGRGHFGHTCSALVKKGEYKGHAVAVKIISKAKMTTAISIEDVRREVKILKALSGHNNLVKFYDAYYVKVESC

SEQ ID NO: 49616 - protein, 370 aa, Zea Mays
MSKFSRNELQRTKCFCLHYSLIHLPIKKLDKLKEEETEECCHGHYTYGDLGDRCFGTIGRCLTETLVLVSQAGGSVAYLIFIGQNLHSTFSQLMSPAGFIFAILLPLQIALSFIRSLSSLSPFSIFADVCNVLAMAIVIKEDLQLFDHPFSNRSAFNGLWAVPFTFGVAVFCFEGFSMTLALEASMADRRKFRSVLSQAVAAIIAVYVCFGVCGYLAYGEATKDIITLNLPNNWSSAAVKVGLCIALAFTFPVMMHPIHEIVETRFRSNRCFRKLSHNDGGAEWIGLHASRVLVVAVLTVVASFIPFFGSFISFVGSTMCALLSFVLPALFHLSIVGSSIPLWRRVLDYGILLFGLAFAGYGLVTALSSH

SEQ ID NO: 49617 - protein, 236 aa, Zea Mays
MAMLCRATRVLRKVCGLGPAAAARRLSAAEAFAACEGSLLRPLPGLDLPPCLPDNLSRSPTRITTLPNGLRVATEDVPGPSACIGFFVDSGSIYESGETTGVSHLLERMAFKDTKHRSHLNIVSELELAGGNVGASASREQMVYSYDTLKGYMPEALEILIDCMRNPLFLQEEVERQLVLAREEVNELQKNPEKFLHEQLNLVGYSGALANPLIAPEDALARINDKIIQKFYHICC

SEQ ID NO: 49618 - protein, 166 aa, Zea Mays
MADASSRTDTSTVLDMDDKNQRLENGQSGAMALASNSSDRSDRSDKPMDQKVLRRLAQNREAARKSRLRKKAYVQQLESSKLKLASLEQELQKARQQGIFISSSGDQTHAMSGNGAMTFDLEYSRWQEEENKQINELRTAVNAHACGKHLLKGASCGLGVSVRLSF

SEQ ID NO: 49619 - protein, 192 aa, Zea Mays
MADASSRTDTSTVLDMDDKNQRLENGQSGAMALASNSSDRSDRSDKPMDQKVLRRLAQNREAARKSRLRKKAYVQQLESSKLKLASLEQELQKARQQGIFISSSGDQTHAMSGNGAMTFDLEYSRWQEEENKQINELRTAVNAHASESDLRLIVDGIMAHYDEIFRLKGIAAKADVFHILSGMWKTPAESSL

SEQ ID NO: 49620 - protein, 299 aa, Zea Mays
MAMSWIRSVVRRALIAPKPRGSRQFTVTAAGGGATQTERVAAEMVRYALGGAVHRSSPEEAMRILEQGASNLQGGGEGSAEAVGLLMLAMSTLLYRSGRRQDAVEKLKATQQVAPSAVFRVAAWEALMGLHMEAGQEMSYLISPNDSVDLSIKYDSKWSDQDHLKFRVNAVRGLVTLLNGETESAAQLFDGWCRDFSRGENQTENAAVSYGEYLHCVGDFQMAAQVYEKILEAFCMDDMSGNLLAAGNMVPEEASLGATCSYGQLLSHSGLLRQRIISQELYRRLKNNLVQTTQRSALY

SEQ ID NO: 49621 - protein, 283 aa, Zea Mays
MAKPSVAVPEVGVPAAQASCTCPGTLLAYPPPRGAGVAAAVRRKCLQVELGAGAGLLGGAGAWGVESMRASSPTHARAAAALAAGGGVDVDVDEERAASWMARHPSALGRFERIVAAAEGKRIVMFLDYDGTLSPIVDDPDAAFMSETMRMAVRSVAKHFPTAIVSGRCRDKVFEFVKLAELYYAGSHGMDIKGPAAAKASSSSRHAAKAKGVVFQPASEFLPMIEEVHERLVQTTRCIPGAKVENNRFCVSVHFRRVDEKVMEFLLRLVEWKRLSRARLRLQ

SEQ ID NO: 49622 - protein, 238 aa, Zea Mays
MPPWPPCLQPTLTTARRATVFSRTRCLSSTPASPTYEQGQHEEEPSLVVVGGGAAGVYASIRAKTLAPHLNVAVVEKGRFLSKVKISGGGRCNVTNGHHLEPMGLARNYPRGNKELRGSFFTAHGPQDTMRWFTDHGVKLKTEDDGRVFPVTDNSASVVDCLLNEARRLGVSLQAGKTVSSASVAQDGKFVLKVEKRTADLVDYINANYILVATGSSQHVRKFFFAPLVANSYLFTIS

SEQ ID NO: 49623 - protein, 63 aa, Zea Mays
MVSDAVTIPVIASSGAGAVQHFSEIFEKTNASAALAAGIFHRKEVPILAVKEHLVNAGVEVRV

SEQ ID NO: 49624 - protein, 135 aa, Zea Mays
MKQAGRKHLKLFGFPPFVLYNGEPLEGPIPHLDARLCMLLALIPLSIAANLQEESDMFGVEGNKILPQRQGLISSLQNLIQYSGLLVPPSSVVNAANVAASKAAIFKANYKAGVGNTSMMDQTDSSMKAGKRSQK

SEQ ID NO: 49625 - protein, 150 aa, Zea Mays
MSRLSLRLIKIAVLSLRVVSSKPSRKITMQRANLIQSSPQNKSKGYFCCLSLLVHLNLFQIITLEKGATMKNEGSHAILKKGGLLKQRVGHDLMRKGALRLDMFLLRIHTGHHAMLQFLLTLSMAILWLVITTDIINQHLHLSLGSFLLF

SEQ ID NO: 49626 - protein, 377 aa, Zea Mays
MAHWSLVIICIPAKESISGPIILHLDSLAMHPSTKILNTVERYLEKEWCQLSSWEDFKNNIHKQSVEVPRQNNEYDCGIFMLYYIERFIKEAPERFTIDKLDMFNRSWFKPEEASGLRRRIRELLLEEFESAKLDDALPGADASERDDSINDGELKPDASSDSSEMVVEVVGGLGGTDKSNEGIKVVASEEASGESGDAGKSTEGTVAASEEKSIEGINVAEPEDACESIGGIYVAESDEASGEFGEIGKTNKGTKVAVSEGASVSGYTDKNMEDISDSEVAVLDKAPTSSYRRGEKTTACVLSEAASLSDSVKDEQGMVKPDSGSSKAEREGDLIVIASPERSEGNDEIIGSMPITDVVCDSCDSDTETKILVMIF

SEQ ID NO: 49627 - protein, 133 aa, Zea Mays
MSLTTMIRCNLQGSASSVLLACDKLKVVPNCLDNDLMRLSAAMKTWYLVDYFIGYSAVYDPMSYFGVCAPIEDSRYWLCLSPKHCSSLSHGIINGCVLHSFYFCLLSCLRQNGMSCTVRYASVIPFMQRRLQM

SEQ ID NO: 49628 - protein, 240 aa, Zea Mays
MTTITTWTCRWGARRGTKGAALTTAAAEEAAATTRPRTSASPWRSTSTGRRPRPGARKQSWTRAPSNPRPRCCLLRLLLSCESPTSCRCRSVPGIRKWVSASDFLHVFPPLLGAARAGWLADALFCLVCKSRQSQFLSNGGDPGTSGGLSLAIGGAGGGHWPPQLQHLQQQRLHGAWANGGGTSWPPPPHPHPHPHPPPPSTAATAAAASSRFPPYVVTTTQGPAGWAQKNGFHSLARPT

SEQ ID NO: 49629 - protein, 292 aa, Zea Mays
MASKAIKRRPISAETDTTGEKQMDTALSDPVTEPLLGNTPQEEKSKTYEPITRSGFWDGTAQECLRWTHLLAAFVAQSARNIVNVLSEFGYLLARLFGCSSASKSSQNGQTLPVNLSPLQEERLRLLRQRIDVPYDCSSVKHQDALKELWKLAYPNRQLPPLKSDLWKEMGWQNSDPSTDFRAAGFMSLENLIYFARNYPDSFHRLLHKADGKMRTKAGVHFVQLLDDDGVAFDNLFCVAFQVLDSQWLARRASYMEFNEVLKSTRGQLEQELTIGGISRIQDMPSFRMLRR

SEQ ID NO: 49630 - protein, 206 aa, Zea Mays
MASKAIKRRPISAETDTTGEKQMDTALSDPVTEPLLGNTPQEEKSKTYEPITRSGFWDGTAQECLRWTHLLAAFVAQSARNIVNVLSEFGYLLARLFGCSSASKSSQNGQTLPVNLSPLQEERLRLLRQRIDVPYDCSSVKHQDALKELWKLAYPNRQLPPLKSDLWKEMGWQNSDPSTDFSWVHVLGESNIFCQKLPRFLSQATA

SEQ ID NO: 49631 - protein, 213 aa, Zea Mays
MASKAIKRRPISAETDTTGEKQMDTALSDPVTEPLLGNTPQEEKSKTYEPITRSGFWDGTAQECLRWTHLLAAFVAQSARNIVNVLSEFGYLLARLFGCSSASKSSQNGQTLPVNLSPLQEERLRLLRQRIDVPYDCSSVKHQDALKELWKLAYPNRQLPPLKSDLWKEMGWQNSDPSTDFRAAGFMSLENLIYFARNYPLILHAGFLSQATA

SEQ ID NO: 49632 - protein, 880 aa, Zea Mays
MDRSINFRGIAGSAGNIMQGMGKFVFGNEGIESKEDSYVERYLYRISNGTIPDDRRSAMTELQSLVAESRSAQMSFGAMGFPILLNILKEDREDVELVRGALETFVSALTPIETSQGPNTEVQPALQEAILLIPRGITVLMDMLMDREVIRNEALLLLTYLTRDAEEIQKIVVFEGVFEKIFSIIREEGYSDGGVVVQDCLELLNNLIRHNASNQMLLKETMGFDPLISILKIRRGSAFNFTQQKTVNLLGALNTVELLLMGGPSGEAGKDANKNANQTALAQKNILDHLLLLGVESQWAPVVLRCMALRCIGNLVLRNPQNLDSLARKQVGEEPHVQPALNAIFSIILRTSVAQEFVAADYVFKCFCERNPNGQALLASTIVPHPNQGNMHEPAIDMPFGSVLLQALVSSDVNGDMEACCRASSVLSHIVKDNMQSKDRVLQIQLETLTPSLGRTEPVLHRIVTCLSIAASTEGENNQNNQPEEPYIQPVILRLLIIWLVDCSNAVNCLLESAVHLNYIIELASSKRYTACVRGLAAVVLGACILYNASHEKGRDAFAVADAISQKIGLTTYFLRFDELRRSLAHPLPEQHHRKELSRSSANSMSDFQEIEEDETNKDDQHPVLSEIFDSQFVNFLSKLEADIRENIMDIFSRTKTATALLPTELEQKNGEVDGEYIKRLKSFVEKQCNEMQDLLARNAMLAEELVRTGGGTTTDTSQRPNNGRERVQIEALRQELEGARRQIEALETDKSQIEAEANNQRNLAVKLESDLKSLSEAYNSIEQANYRLDAEVKTLRQGGSVPYPDVEAIKAQAKEEAEKDSEAELNDLLVCLGQEQTKVEKLSTRLAELGEDVDALLQGIGDDTAIPDDDDDDDEDSEE

SEQ ID NO: 49633 - protein, 641 aa, Zea Mays
MLLKETMGFDPLISILKIRRGSAFNFTQQKTVNLLGALNTVELLLMGGPSGEAGKDANKNANQTALAQALRCIGNLVLRNPQNLDSLARKQVGEEPHVQPALNAIFSIILRTSVAQEFVAADYVFKCFCERNPNGQALLASTIVPHPNQGNMHEPAIDMPFGSVLLQALVSSDVNGDMEACCRASSVLSHIVKDNMQSKDRVLQIQLETLTPSLGRTEPVLHRIVTCLSIAASTEGENNQNNQPEEPYIQPVILRLLIIWLVDCSNAVNCLLESAVHLNYIIELASSKRYTACVRGLAAVVLGACILYNASHEKGRDAFAVADAISQKIGLTTYFLRFDELRRSLAHPLPEQHHRKELSRSSANSMSDFQEIEEDETNKDDQHPVLSEIFDSQFVNFLSKLEADIRENIMDIFSRTKTATALLPTELEQKNGEVDGEYIKRLKSFVEKQCNEMQDLLARNAMLAEELVRTGGGTTTDTSQRPNNGRERVQIEALRQELEGARRQIEALETDKSQIEAEANNQRNLAVKLESDLKSLSEAYNSIEQANYRLDAEVKTLRQGGSVPYPDVEAIKAQAKEEAEKDSEAELNDLLVCLGQEQTKVEKLSTRLAELGEDVDALLQGIGDDTAIPDDDDDDDEDSEE

SEQ ID NO: 49634 - protein, 293 aa, Zea Mays
MFGFSRRRVKLGRSKGDPSDPLNSSRSSVGPSKHLSLPNGNDATMTSVSGHADDLSYRCSSDTFDPQGRTFDISENWTVLSTEGDKPIPRFYHAAAIVSSKMVVFGGDSGNRLLDDTKILNLEKLTWDSAPPKVCPSPNGCSMKLPACKGHCLLDCCLSFGCFGMNFTYSINVFLLEAGYVMLLWKIVCWTLCLTYLHFDIIQNSKYYKSMIYHSKKAMIVHDDGLFVCTALLLEKYLYMCDVQVPWGNSVILVGGKTEPASDHLSVWTFNTETELWSLIEAKGDIPLEADTR

SEQ ID NO: 49635 - protein, 214 aa, Zea Mays
MFDLKSSTWLPLNYKGTGPSPRSNHIATLYDDRVLLIFGGHSKSKTLNDLYSLDFDTMVWSRVKTHGPHPSPRAGCSGTLCGTKWYIAGGASKKKRHAETWVFDVLQCKWSVCVVPPSSSITTKKGFSMVPFYHKDKIALIAFGGNKKEPCNKVEVLVVLQNEHSFSWRSAPEVDTMVYEYSPSNKELADHLHKCAPLYSNSSIASWITQKSAA

SEQ ID NO: 49636 - protein, 462 aa, Zea Mays
MFDLKSSTWLPLNYKGTGPSPRSNHIATLYDDRVLLIFGGHSKSKTLNDLYSLDFDTMVWSRVKTHGPHPSPRAGCSGTLCGTKWYIAGGASKKKRHAETWVFDVLQCKWSVCVVPPSSSITTKKGFSMVPFYHKDKIALIAFGGNKKEPCNKVEVLVVLQNEHSFSWRSAPEVDTMVYEYSPSNKELADHLHKCAPLYSNSSIARHSLTSVIEHPPRREPLSESLLKQSSLGTSLHTQLDHAEECSLGQKLQKPIDDDRYDDVDDSSSCQDSTPKGPYSKRTGPGFQNGAENMVTGGSKVRRIARCSSDVGQSHLYNTKIADLIRRNTTLEDQLATALASKDQLDKSLASVIHSRGQLEKMLANKDKEAEMLKEKIACLELAQEESNSLSNTVHADNVRLEREVAFLKAVTGETQKELHSTRRVLAGEQSRAFQLQVEVFHLKQRLQILEGRSGTPNKQPL

SEQ ID NO: 49637 - protein, 372 aa, Zea Mays
MKLVRHPNVVRLFEVMGSKARIFIVLEYVTGGELFEIIATNGRLKEDEARKYFQQLINAVDYCHSRGVYHRDLKLENLLLDAAGNLKVSDFGLSALTEQVKADGLLHTTCGTPNYVAPEVIEDGGYDGATADIWSCGVILFVLLAGYLPFEDDNIIALYKKISEAQFSCPSWFSAGAKNMITRILDPNPTTILEHPWFKKGYKPPVFDEKYQTSLDDVDAAFGDSEDRHVKEETEDQPTSMNAFELISLNQALNLENLFEAKEEYKRETRFTSQCPPKEIITKIEEAAKPLGFDVQKKKYKMRMENPKAGRKGNLNVATEVFQIAPSLHVVELKKAKGDTLEFQKFYRSLSTQLKDVVWKCDGEVDGNSAAA

SEQ ID NO: 49638 - protein, 279 aa, Zea Mays
MSYLSPYLEAVGSDFTGGANFAISGSSTLPRNVPFALHVQVQQFLHLKQRSLDLAAHGGTAPVDADGFRNALYLIDIGQNDLSAAFGSGAPYDDVVHHRIPAIVSEIKDAIMTLYYNGAKNFWVHGTGPLGCLPQKLAAPRPDDSDLDYNGCLKTLNDGAYEFNGQLCAACDGLRSQLRGATIVYTDVLLVKYDLIANHTAYGFEEPLMACCGYGGPPYNYNANVSCLGPGFRVCEDGTKFVSWDGVHYTDAANALVAAKIFSGQFSTPQMPFDYFCQA

SEQ ID NO: 49639 - protein, 334 aa, Zea Mays
MTLKQCIEQLESAGRVRISLINQLKEALSEQESKSIILRDQLQVARAEAEHAIQLRQQLGRVLVTNDTQSTSSPLMITPPDQTAAMMHGSGVRSTPPHSQPLNPAVSLPPTVSAVGDESKRTAAAMADKLASLSAPVQVLTSILSSFAAEQAASINGGSPSGELSGVPPGFHIDKRPRLEKTGQAEAGAPPFFGQASQVQQQVGAVPTSFGGTHPPTPGPFPPPPPPLPPLLPPLMQQFGQNTGGMMGMRGPFGMMAGSMPPPPPLSNILPAGFPGLSGPPPPPPLPPAQSQPQQQQTSQAPQQSPTSAGFFQSSGMGFFPPVQVQQSQPAQRQ

SEQ ID NO: 49640 - protein, 113 aa, Zea Mays
MVHGSAIVSSPRRTPPSPPPHPPPHAIGTAIIRSGPRRLCPTRPSRRGTLLPASGVHAHLRLTSAPESSHAFEVASIPAPASRTIYSSQLCSSQFSLCIPPSLPSSPSTVLLA

SEQ ID NO: 49641 - protein, 68 aa, Zea Mays
MTFKMESSLYARVCLTEFVIGSEHLRREVDCLPHCHLSMMEIILANISTQDAGIQVCAHEETCTLTAG

SEQ ID NO: 49642 - protein, 373 aa, Zea Mays
MARPGWGSLFGCFSSSSSSRGDGKKKQGKGKGKGAGNKMKKKQKSKQQQKVAAGSGGGSRPRSLQSRMSFTELSLSGMVSPEDLSLSLVGSNLHVFTIAELRAVTRDFSMTHFIGEGGFGPVYRGYVDDKTKRGLAAQPVAVKLLDLEGGQGHTEWLTEVFFLGQLRHPHLVKLIGYCYEDEHRLLVYEFMTRGSLEKHLFKRLQGEAVGFRSSQRRAGRRRDARVDPGDGDPRIRRAGVHHDGPLDGEERRVRLRRGAAGAAVGAEGGGQEPPPAGAEPGGVGAAVPDGRAPPGPRHGPQPGGPVLQPGRAQGRRRGAPVRRPQPQVPPTHVRRRRSARAAPRARRLPRRALRLHRTAGDDDRQRGRSGAGE

SEQ ID NO: 49643 - protein, 277 aa, Zea Mays
MAAITAPPAPPPASTSCRLLRRRAPLTRFAASSSPSSRFRPSSSSFPAAAGSSSGGGGEILHVSPPPPPAAPPGVPVYVTLPADAVDPGGRVARRRAMGASLAALAAAGVAGVAVELWWGVVERRSPGEYDWAGYLELAAMARRHGLRVRAILAFHQCGAGPHDLPWIPLPQWVLEEMDKIPDLSYTNRYQKRNKEYISLGCDILPVLKGRSPMQAYSDFMRSFHNTFEDYLGDTITEVQVGMGPGGELRYPSYPTEKLNQPGSSSELGEFQCYDKV

SEQ ID NO: 49644 - protein, 398 aa, Zea Mays
MAYLYLPVLIFQFMVCFCQSVDRLTPAKPLLHGDVLISNGGVFALGFFSLKNSTSSSYVGIWYNNIPERTYVWIANRDNPITTNAPGKLVFTNSSDLVLLDSTGHTIWMTKNNITAGEGGTAAILLDSGNFVVQSQNGTDIWESFHYPTDTMVPDVSFSLSSSDVAKRLVAWKGPDDPSSSNFSMGGDSSSDLQIVTWNGTRPYWRRAAWGGEVTFGTFEGNTSFMVYETIVDTGDGYYMKLTVSEGSPSIRLTLDYTGMLTFRRWNVNTSSWAVFGQFPRCRRKEELKCGGGDKFLTLPSMKTPDKFLYIKNRSFDQCTAECSNNCSCTAYAYANLQNVDTTHDTTRCLVWMGELIDAEKLSNTFGENLYFRVPTSPVSKKKSTVLKIVPVATGTWD

SEQ ID NO: 49645 - protein, 684 aa, Zea Mays
MAYLYLPVLIFQFMVCFCQSVDRLTPAKPLLHGDVLISNGGVFALGFFSLKNSTSSSYVGIWYNNIPERTYVWIANRDNPITTNAPGKLVFTNSSDLVLLDSTGHTIWMTKNNITAGEGGTAAILLDSGNFVVQSQNGTDIWESFHYPTDTMVPDVSFSLSSSDVAKRLVAWKGPDDPSSSNFSMGGDSSSDLQIVTWNGTRPYWRRAAWGGEVTFGTFEGNTSFMVYETIVDTGDGYYMKLTVSEGSPSIRLTLDYTGMLTFRRWNVNTSSWAVFGQFPRCRRKEELKCGGGDKFLTLPSMKTPDKFLYIKNRSFDQCTAECSNNCSCTAYAYANLQNVDTTHDTTRCLVWMGELIDAEKLSNTFGENLYFRVPTSPVSKKKSTVLKIVPVATANLGLKNLDLPSVSFEDIITATNNFSEHKLLGEGGFGKVYKGVLEGGKEVAIKRLSKGSVQGIQEFINEVILIAKLQHRNLVRLLGFCIHEDEKLLIYEYLPNRSLDAFLFDMCPKISDFGTARIFSGSEQQVNTTRVAGTYGYMSPEYAMEGSFSVKSDTYAFGVLLLEIVSGLKISSSLMNFPSLIAYAWSLWKDGNALELVDSSISVSYSLQELVRCVQLGLLCVQDPPNARPLMSSIVFMLENETAPLPTPEEPLYFTVRNYGTDRSNEYMQRSLNNMSITTLEAR

SEQ ID NO: 49646 - protein, 201 aa, Zea Mays
MARPRAKKRTTPQAAATDSVEPDATVGASSKLEEAAAEPATRERGKRVKAPPKPKPETEYFDEKGNFEDLWLSAFPVGTEWENIDKIKEFNWSFENVEEALEEGGELHGKTLYMFGSTEPQLLYVNGESKIVLIPIVVAVDCPFPPSDKIGINSVQRENEEIVPMKAMKMAWVPYVPLEDRLSRIDIFKTKIFTLGCTQRR

SEQ ID NO: 49647 - protein, 226 aa, Zea Mays
MGRPFICLEAPSVDCPFPPSDKIGINSVQRENEEIVPMKAMKMAWVPYVPLEDRLSRIDIFKTKIFTLGCTQRRSALKHLKIERVKKFDYCMPYYMPLQPLEDEENTTINFLYPLEPPIVDEFDWEMDDYEDFADQKVQEGSLPEGEKEKFKEFLKEKVRERKRELRQAKEARKKAIDDMDPAMKEAFENIKFYKFYPVKTPDTPDVNNVKARYINRYYRNAHYLK

SEQ ID NO: 49648 - protein, 207 aa, Zea Mays
MHAYNPPNADSLVDHLGLHKALCVLMGWDYTKVPENFKGYQSLPSDLVQASREDLIVWPPTVIIHNTSTGRKKDGRLEGLGNKEMDKKMTELGFSGGKSKSLYGKEGHMGLTLIKFANNSSGLKEAERLAEYLERQDRGRIGWSRAHASRSVDSDQNPLLVETDTRTAEKKRILYGYLAIASDLDELDSDSRKRASLQSRREFDPNE

SEQ ID NO: 49649 - protein, 165 aa, Zea Mays
MGSWHDANEQTCQAVKRTEGEAPTNPTDQHSQGPGSEFPSHSPSMDIPTAVIHRLQSSLREAIFAPSVEDAPAPPFPSVSDAVAAFDSGAASVSAEFRCVGCGSAGGLLRGAQSALCAYCGCPRRGEEAEGGGSGGIAFRNSAAYRCLLGSLGLDGSHKRNAADG

SEQ ID NO: 49650 - protein, 276 aa, Zea Mays
MSGAQIAAVFKIGNSKELPPIPDYLSEHCRDFIRKCLQRDPSQRPTAVELLQHPFIQNGISLEKSVTPNHLEHLAAISCRTKPKVAVQTRNASLGFEGQTIYQRRGVKLSSKHSDIHIRSNTSCPVSPCRSPLLKARSPQHTSGKMSPSPISSPRTTSGTSTPLSGGNGAIPFNHLRYATYSSEGFGTTSRGLDDHFSNCHKDLNLGHFAEAHQVSQGPRERVVSEADILSPQFRKKLGNVFDLRERLSPSEHFTRRALVDHVELNPSNPGLKRGK

SEQ ID NO: 49651 - protein, 639 aa, Zea Mays
MPTWWGKSSSKDVKKTTKENLIDTFHRLISPNEQKGSTKSKRNCRRGNNTAAEKVCKSTTVSRPTSPSKEVSRCQSFSADRLHAQPLPIPGVRPRVTRAVADVNVSKPILEKRGKPPLLLPLPKPNPLHRGPGSSDIPSEIVVASVSSNCSADSEDRADSQLQSPVGNDTNNVKKVSSKNKSSNVCKDHSGAITTKTTKEILKPAANAFLSNHTQSAPPRGISADNNQLNLQNPQPVVFESAPNSLMSSPSRSPRPICPDHILTSAFWAVKPHADVTFLGSGQCSSPGSGQTSGHNSVGGDMLSQLFLQPTRGSPECSPVPSPRMTSPGPSSRVHSGSVSPLHPRSGGLAPESPTSRHDGGKKKQTHKLPLPPLSIAHSPFFPNNSTPSSPISVPRSPGRTENPSSPASRWKKGKLIGRGTSGHVYVGFNSDSGEMCAMKEVTLFLDDPKSKESAKQLGQEISLLSRLRHPNIVQYYGSEMVEDKLYIYLEYVSGGSIHKLLQEYGQLGEPAIRSYTLQILSGLAYLHAKNTVHRDIKGANILVNPSGRVKLADFGMAKHINGQHCPFSFKGSPYWMAPEVIKNSNGCNLVVDIWSLGCTVLEMATSKPPWSQYEGSTEPQIRCAITLTPREQNPTLGE

SEQ ID NO: 49652 - protein, 115 aa, Zea Mays
MDLSAVQAALSDKSYTAVASLCDELLLQAASKGTNTDEWPYSVHLLAHLYINDLARFFWKSLPQEVKDTRPELAAVWRIGQCLWNRDYAGVNTAAQGFEWGPDLTEFITAFLEIW

SEQ ID NO: 49653 - protein, 409 aa, Zea Mays
MKADILSWKGNSLNSNRKLGLNRTAGSSSTVDANVDPTVLPLEPKGGQLPLFSSGDWMSDIDSGYEAAEIAASTQTSSGVTPSVSAGSVFGSSWMLVNHDQSDGPSTSAGTSSQQKVVPQSEHQRNLNRLPDLQEIPESKYLFADLVPSGDNKSKKTSVPFKGPDHRNNELQKRRENIVPNAGRPQQRLVMKNWSPYNDVSNNKQYNYVEDSFARRNVGNNAASSSSQMPRPAVRSNLNSGLHNDASYHNYDSIMAGTSAMKITSTAETGKVPERVLRGDLDKGQTNYRLEDQHVIVQPPQGRLPWGNPAEGRVPMNRVQSQAKQHLENMDAKQDHKKLLPDPKKSPLDRFMDTSLPSRNMDMRSQRLDFDDVSECEIPWEDLVIGERIGLGSSCKKILGSRFLWRCSG

SEQ ID NO: 49654 - protein, 560 aa, Zea Mays
MKDILSWKGNSLNSNRKLGLNRTAGSSSTVDANVDPTVLPLEPKGGQLPLFSSGDWMSDIDSGYEAAEIAASTQTSSGVTPSVSAGSVFGSSWMLVNHDQSDGPSTSAGTSSQQKVVPQSEHQRNLNRLPDLQEIPESKYLFADLVPSGDNKSKKTSVPFKGPDHRNNELQKRRENIVPNAGRPQQRLVMKNWSPYNDVSNNKQYNYVEDSFARRNVGNNAASSSSQMPRPAVRSNLNSGLHNDASYHNYDSIMAGTSAMKITSTAETGKVPERVLRGDLDKGQTNYRLEDQHVIVQPPQGRLPWGNPAEGRVPMNRVQSQAKQHLENMDAKQDHKKLLPDPKKSPLDRFMDTSLPSRNMDMRSQRLDFDDVSECEIPWEDLVIGERIGLGSYGEVYRADWNGTEVAVKKFLDQDFYGDALDEFRSEVRIMRRLRHPNIVLFMGAVTRPPNLSIVSEYLPRGSLYKILHRPNCLIDEKRRIKMALDVAKGMNCLHTSMPTIVHRDLKSPNLLVDNNWNVKVCDFGLSRLKHSTFLSSKSTAGTPEWMAPEVLRNEQSNEK

SEQ ID NO: 49655 - protein, 120 aa, Zea Mays
MVQSISSMTRMDRLSMLTRSLLRSELDVTAVSSRSYMSNLRWLAMAAIRLDFPVPGGPYRRSSMMDCFSFLSMASVSNVDGWWSSIGDQLPYSVMCIMRVLSWALMALAVAKMNGRQGTT

SEQ ID NO: 49656 - protein, 307 aa, Zea Mays
MVGFLRAFAAASAVPAAAAAAYALFSSSAPSSSKLRFPLPDSFLSAAASSTSGRAPNAVPPMATAAATADLSAADDKRDSALPELTTEFMVDMKCEGCVTAVKNKLQTLEGIKNIEVDLSNQVVRVLGSLPVKTMLDALHQTGRDARLIGQGNPNDFLVSAAVAEFKGPVVFGVVRLAQVNMELARVEATFSGLSPGKHGWSINQFGDLTRGAESTGNVYNPPDHLSDKPLGDLGTLEAGENGEAHFSGPKEKLRVVDLIGRSIALYATEDRSDPGIAAAVIARSAGVGENYKKLCTCDGVTIWESS

SEQ ID NO: 49657 - protein, 320 aa, Zea Mays
MLCVRAEDALAAAAAAAAASDKMRSVTLGGTIQRAVRRMAGGAGRRRPHALADSGTADSSASASASCSGDDISSTGSAKREAVQRCTMHRYRSQLEQEVNKLQRQLQEEIDLHMALTDAITYNAALILKASMKLPDKAHELLISISSLETAITKLEEDLHHLHYQLCDARNERLLAENKPECLLPTASDCQPSTACDCTREEPEQTLRYSRFKDYHQVEDGLSTEPEDQQDDEKDAEDGEHVSLNMLVEKHQDVSLTGLLEHILHTMQEACSMENEGKEDQKIDALTFSQPNFKKSDMSGNLWNNPNQLSEEMNVYLVQH

SEQ ID NO: 49658 - protein, 303 aa, Zea Mays
MYAFVMRPESLPKSYQEFILKTGPVAEPVYKVVKECCRGGPVDLTALSAHLSNKRNPDLINLTTNPSIIPCSVIHPDRASCLAQNVNVVSSTFKKTFPLYFSLTFVPFVVLRLQKFLESPTTTCWRALVGAVRSTTFLSAFVTVFQAAICLHRKVANKDHKLVYWFAGLMSGLSILLEKKARRAELALYVLPRAGDSLWYILINRHLLPNIKNAEVALFCMCMGGIMYFLEYEPDTMAPFLRGLIRRFLASKISNPSPPPPNRNASYSYLQTLNALDQSRTQPGVDNGLTTSEKYNLESIPGL

SEQ ID NO: 49659 - protein, 433 aa, Zea Mays
MGTSSGRESGGAVTTGSHARRTPRGTCARASCFRTVSASASASSSAPSSSCAAGPMARSSTLRILAGSVAGLAILALDDSSRRRTLSLYLLARLAQCAYNSAKSKNKFHFWGSHWRHGDALLFSLACAQVMYAFVMRPESLPKSYQEFILKTGPVAEPVYKVVKECCRGGPVDLTALSAHLSNKRNPDLINLTTNPSIIPCSVIHPDRASCLAQNVNVVSSTFKKTFPLYFSLTFVPFVVLRLQKFLESPTTTCWRALVGAVRSTTFLSAFVTVFQAAICLHRKVANKDHKLVYWFAGLMSGLSILLEKKARRAELALYVLPRAGDSLWYILINRHLLPNIKNAEVALFCMCMGGIMYFLEYEPDTMAPFLRGLIRRFLASKISNPSPPPPNRNASYSYLQTLNALDQSRTQPGVDNGLTTSEKYNLESIPGL

SEQ ID NO: 49660 - protein, 318 aa, Zea Mays
MESGLLDTAAAAGLCPVAAGRRRVGSTGTARCFLSCSCASRDCRVSASYSHSISRMLSGVRSAARKRLFRSDPAELLGVANWSETGGGGAGGHQHWWTALENNFVLEATDDEYGGVVVDADRLPADRAAFARSLAASLSYWKSVGKKGVWLKLPVDLAEFVPLAVKEGFKYHHAEEAYLMMTYWIPDEPNMLPANASHQVGVGGFVINDQMEVLVVQEKYRGSSLDGVWKLPTGFILASEEIYTGASREVKEETGVDTEFVDVVAFRHAHNVAFHKSDLFFICMLRPVSSEIKIDETEIQAAKIMNEVRDSDRSISLR

SEQ ID NO: 49661 - protein, 411 aa, Zea Mays
MEARAVSALDLSLHISLPSSAAGSASPAPELGGGGGIGRGAQPPAGADPWRRLNGSTASTELSLSPPLWQQDVAAGDVLPCRRLRPAAPNHYSSTADATTFVPVTVPRLISFDAAAGAEDEAARARPIEGVPVYSSSRAARRPFLGAGAGEYHRQGHHPKAAGLYNRPCHSSSRPSSLRSTTTTTSPAVAPPAESSYLSPSAYHRMLSSTSRLRLQGVLADTLRGYGGHHHQQQHLDSLAAARYMPRFLASRRGMRAPRMRWTSSLHARFVHAVELLGGHERATPKSVLELMDVKDLTLAHVKSHLQMYRTVKSTDKPATTSSGGPPVDGGGDDDDLPSARRAQSSSSSPAGRRDGSSPQAFTRHRSAASSEGAASLAGGDDVECSSSADDSDCGRARSASSSRYVSRVFF

SEQ ID NO: 49662 - protein, 158 aa, Zea Mays
MRCWASRGTCRRRPQSQRATAKGVAPPTRTAPTPRRCQPGPGRRGAERPAARPARRSGRSRPSRRWCTAPAAASAVAGAGARSPSSPATWCARRRRWSGGWSAPSRSSAAGATRRSGTPATSSPRTGKLSLTQKKGEKRSLYFERLRQSGYASGAVTV

SEQ ID NO: 49663 - protein, 351 aa, Zea Mays
MAMAGAAAAAAGRCLLLSRPSPLRLRLLHAALSTAAPTLGPTSTPAPPPRHELLLERLRLRHLKDASSPGAPRPTSRSSERSSQQGKGKRVEAAESFEELGLGEEVMSALGEMGISKPTEIQCVGVPAVLAGTSVVLGSHTGSGKTLAYLLPLVQLLRRDEAMLGMSMKPRRPRAVVLCPTRELTEQVYRVAKSISHHARFRSTMVSGGTRLRPQEDSLNMPVDMVVGTPGRILDHIKDGNMVYGDIKYLVLDEADTMFDQGFGPDIRKFLAPLKNRAAKPDDQGFQTAVQKLIDEEFEGIVHLRTSSFQKRVSTARHDFIKLSGAENKLEALLQVLEPSLGKGKQSYGVL

SEQ ID NO: 49664 - protein, 89 aa, Zea Mays
MENKKRVDALVFFSLLLLGYFAAHAHGKGHVTNDIGVSTLAKEGIMRGKGAQCAQGFLPCKDNKCYCCIGGRTHGQPDKSRCEVGAMAH

SEQ ID NO: 49665 - protein, 172 aa, Zea Mays
MALEAVVFSEGLFGCWTMAAPAENIAAAAEIPSPLPLPAAARRKRRRTRNAKNRQEVESQRMTHIAVERNRRKQMNEYLAVLRSLMPPSYAQRGDQASIIGGAINYAKELEQLLQSLEARKRHDGLHAAAAPLAAFHYSKLINIRRPPYLRRRPTRPSKISLCPTATKGPRK

SEQ ID NO: 49666 - protein, 56 aa, Zea Mays
MALTLKDQSILVNGDINEGLLRLCHKLHRLRKEYAYTFESTSLSYQCSEVSRILQG

SEQ ID NO: 49667 - protein, 90 aa, Zea Mays
MLNIDDSSLSEQEKVKLEKEPMGQFVDDDIRDLPRSPWRRSTPPSPPRTTSTSASSGSASSTATSTSVHPLILHPLQWLLLLLVGATPRA

SEQ ID NO: 49668 - protein, 130 aa, Zea Mays
MEEIDAAKPTKDNVDVRLKWLGLFHRYKHQCTPTDSTPPAMVVVAVGRSDPASVTQTKQPSVPVQTTYLVSRFFMALTLKDQSILVNGDINEGLLRLCHKLHRLRKEYAYTFESTSLSYQCSEVSRILQG

SEQ ID NO: 49669 - protein, 167 aa, Zea Mays
MEEIDAAKPTKDNVDVRLKWLGLFHRYKHQCTPTDSTPPAMVVVAVGRSDPASVTQTKQPSVPVQTTYLVSRFFMALTLKDQSILVNGDINEGLLRLCHKLHRLRKEYAYTFESTSLSYQCSEVSRILQDLWLLLLQGLMCDCLAFNPSGMPLISKIASTQYLLDNL

SEQ ID NO: 49670 - protein, 230 aa, Zea Mays
MRNWTKEEFVHILRRQSTGFARGSSKYRGVTLHKCGRWEARMGQLLGKKYIYLGLFDSEIEAARAYDRAAIRFNGPDAVRNFDSVSYDGDVPLPPAIEKDAVVDGDILDLNLRISQPNVHDLRSDGTLTGFGLSCNSPEASSSIVSQEAPMQEEENRSEPACPQPFPSWAWQTQGSRAPVLPATTAASSGFSTAAATGVDAATAGHSVPPPSGSLRQFSGYHQLRFPPTA

SEQ ID NO: 49671 - protein, 563 aa, Zea Mays
MVLLRPWHILFFLTCFSPSFVHPMEPGTYRCSNVSIPYPFGVAVDTKPQYRHVVLEWSVNGSSCEEAKLSGSYACAENAYCYNSSNGIGYRCNCSSGFEGNPYLQGPNGCTDINECITRNPCTNRCSNTIGGFQCTCPAGMSGDGLKEGSGCNGVSTLVIAIVAGLALLVLLLILGFWTHWLVKKRKLAKTRQRYFMQNGGLMLKQQMFSEEAPLHIFTSSELDKATSNFSDDNIVGRGGFGTVYRGILSNQVVVAIKKAQRVDQTQTEQFINEMIILSQANHKNVVQLLGCCLETEVPLLVYEFITNGALFHHLHNTSVPMSWESRLSIAVETASALAYLHLAAKMPIIHRDVKSSNILLDDNFTAKVSDFGASRPIPHNQTHVTTLVQGTLGYMDPEYFQTSQLTEKSDVYSFGVVLIELLTRKKPIMDDIAEDIRSLALQFSMLFHGNKLLEIVDPVVAEEAGVRHVETVSKLALRCLRLKGEERPRMIDVAIELEALRRLMKQHFILKNESLLQESCCNEEMSIDAPSSLFLGVDGISDDEGMEIIPLTCPSKILTSYP

SEQ ID NO: 49672 - protein, 298 aa, Zea Mays
MVSGAGHGGYGGGDDGQAVDFRGNPADKSRTGGWLGAGLILGTELAERVCVMGISMNLVTYLVGELHLSNSKSATVVTNFMGTLNLLALVGGFLADAKLGRYLTIAISATIAATGVSLLTVDTTVPSMRPPACLDARGPRAHECVPARGGQLALLYAALYTVAAGAGGLKANVSGFGSDQFDGRDPREERAMVFFFNRFYFCVSLGSLFAVTVLVYVQDNVGRGWGYGVSAVAMALAVAVLVAGTPRYRYRRPQGSPLTAVGRVLAAAWRKRRLPLPADAAELHGFAAAKVAHTDRLR

SEQ ID NO: 49673 - protein, 254 aa, Zea Mays
MQLLIANFTEFQLATVITFLLHETVFFLSGLPSLLFERFGLFAKYKIQKRSNTSAYQNRCVLRLILYHVSVNLPVMILSYPAFKFMGLRSSLPLPHWTVVVSQVLFYFVLEDFIFYWGHRALHTKWLYKHVHSVHHEYATPFGLTSEYAHPAEILFLGFATVVGPALTGPHLFTLWLWMVLRVLETVEAHSGYHFPWSPSNFLPLYGGSDFHDYHHRVLYTKSGNYASTFVYMDWLFRTDNGYRKAKRPLRSKK

SEQ ID NO: 49674 - protein, 266 aa, Zea Mays
MFKSTYESITKGNPMWNELPVSTSTLYPWDPSSTYIHEPPYFKDMKMSPPGPRPVKDAYCLLNFGDSITTDHISPAGNIHPDSPAAKYLKERGVERKDFNSYGSRRGNDEIMARGTFANIRLVNKFLKGEVGPKTIHVPSGEKLAVFDAAMKYKNEGHDTIILAGAEYGSGSSRDWAAKGPMLQGVKAVIAKSFERIHRSNLAGMGIIPLCYKAGEDADTLGLTGHERYTVHLPTNVSEIKPGQDVTVTTDNGKSFTCTLRFDTEV

SEQ ID NO: 49675 - protein, 328 aa, Zea Mays
MPRRAFDYVCNLVRDEMMVRSCSYTFLDGTVLCLEDRVAIALRRLNSGGSLVTVGSSVGVNHSTVSLITWRFIEAMEERASHHLRWPDSIEMEKIKSKFEKIHGLPNCCGVVDTTHITMCLSSAEPNCKVWLDQEKNYSMVLQAVVDLDTKFTDIVTGWPGSMKESSILHSSGLFKLCEKGERLNGSKLKVSDGSEIGEYLIGDSGYPLLPWLLTPYQEKDLTESSAEFNIRHSSARTVAPRTLAKFKDTWKFLQGEMWRPDKHKLPRIIHVCCLLHNIIIDLQETAVDEAQAWPSDHDAKYRQQVCQLADENGVRVRDKLSQHLISK

SEQ ID NO: 49676 - protein, 380 aa, Zea Mays
MAKALVPFYPLAGRLGNNSDDGRTEISCNGEGALFVVAHADDELTIDDVKKLKPSPELRRLFVPRIEPSSIMLAIQVTFLKSGGVVLGTALHHAAIDASSAFHFFQTWSAFCKHGDRAAVELPCHDRTLLRARSPPTVHPGTLLTLQPRLTLSDLEGPLAIEVFTISKDQVASLKHLCGGTSTFCAVSALIWQCTCVARRLPPDSQVRMVFPAELRRRMRPPLPNHYFGNAVFRLYVTGAAGDIGTAALGSVATRIKGAIKRLDDELVRSAIDYFENEKAAEMNKRRALRGTLPKTFLNITSWLGRPQYDADFGWGKPQFMSLAESFCGGFVHLMNDERTTYYGGATGDVRMIVCMEAVDMKELGRLLYVKLKQAACAMH

SEQ ID NO: 49677 - protein, 482 aa, Zea Mays
MEIWGKSRHPNVELRAFCSKHSAVGYTSSVENSNLASELNPRKSGPDNTTLNSGKIPILRFTRKNKDKFTNCGTSTSSSGNLIRVKTIEQGALANTVRNANTQPIQIWERGTGHPSVGGDHMGSSGDIAVVLRKLIDSGKISVSDIASEVGISSESLEAALVGETTTFSHGLTLKIMKWLQNYVQMHSAQGDVCKGSSEVVQESKSDRLVTTDTVDVKNPLVLDDDKGVGVLVDLLDSSVTEPAQTRSESNSKILNENSATCATGVTILQNGKKNMVKEGYNPECSAKEFANESTQDFSPISNKYVLKDEHGILILNATSGNKEFGTSTEIPNENQGRELLALENEHTTDPRPDTLTVMGAPLVATRKEEFLNKICRRPDACLLLPNKNSKKATPPSPTTSAAAPRRSRRVAGAGVEFSMQDWGGRATKKAMKALQIITEDEGISQESLKAYAELFKHPLSQLQVEALSALFGWPTPPAGPV

SEQ ID NO: 49678 - protein, 227 aa, Zea Mays
MATSGAGDHGQGQGQGHGRFASSLTARYSDWVLETLDELPGSFLLTDPALPGHPIVYASRGLAALTGYAPRDVLGRNARLFQGAATDRATVAGVREAVRAHRPHQAAILNYRRDGAPHWVLLHLAPLFHARDGTLLHFLAVQVPIAPAAVARGATCHTTGHLLAACRDEASRVAEDFPCATHAGKVFVDMDKRGLETEEPRVPSDSEKDMAIRRDVTRLASQHSVRR

SEQ ID NO: 49679 - protein, 507 aa, Zea Mays
MAAGVLSTVRWSTACAVLLNAIAASTGAAVAAVAFGRCGGGAIGPAAAAASAALAARLLASAVAGFAQGAAASAIAAGAIGAHVDSERDLRQLSRLRYKRWLWWTRFGMIITVLQFVLAIYLMCIILRDVLAGGSPTQCFSGQNQKSDGRRILLIAFLVTMWVSTIVQCATGSDVLRWRSFYASHDFAWRAHYREVFDHGIREVLCCLGRVKYSSVLEDDDICIVAKLLGDLMAYRASGTGHLELVAGLSLLQKSKSSTIISKELVEAPQNLIQEALLFHPFAEAAYTGPLLDFGRNPLMFPCVWLNRQGVLTPWTRARRPVLEGDNWWRGHAAAFLKYANVAPEVLRKGRVNQTKRETAYFVVVLHYLSTVVIAVRGTETPEDVITDGLCKECSLNIDDLDGLINSDHLSPQVKNAVLSSPHYGHAGIVESARELYTELEGHPIHEDKSGTMKTGFLSSLLGDGCECHGYNIQIVGHSLGGSVAALLGIKTHARWEYSLLSSPWKF

SEQ ID NO: 49680 - protein, 446 aa, Zea Mays
MPSHEACCGTMFWVYLMSCVGLVVFAGLMSGLTLGLMSLSLVDLEVLAKAGTPKDKLNAARILPVMKNQHLLLCTLLIGNSLAMEALPIFLDTLVPPYVAILISVTLILAFGEIMPQAICTRYGLSVGAKAAPVVRLLLILFFPVAYPISKLLDRLLGKGHFALMRRAELKTLVDMHGNEAGKGGELTRDETTIITGALELTQKIAKDAMTPISETFSLDINAKLDLHTMGMIMTRGHSRVPIYSGIPSNIIGLILVKNLITCRAEDEVPIRNVTIRKIPRVADDLPLYDILNEFQKGHSHMAVVVKRTKEAGVSTENQKSTTADYKINPKDAHADGSSPSYANNTAGSRRFNIEKHGDGRSCNKKSEKKRENILDFNTDPLPSYSMDEAAVGIITMEDVMEELLQVAHICNQVPMVWNKYLHCSQHKMSTMLSKYALRSPANDAV

SEQ ID NO: 49681 - protein, 721 aa, Zea Mays
MAATLGCSTPCPRRSTFRPFRPRCRRRGRAATRIILPCGWTRLPCKTTARASPPAVNLKSTEVIEHPYVQIFNEGHQNVLVEMLEIITVICEELKLPIAQTWVPCKYQNLLIHCGGENKSCFDIHESCAQELCMSTSAVMFHIIDAHMWGFRDACVEHHLKKGQGVSGKAFILRRPCFTKDVTRFSKMEYPLVHYARMFGLAGCFSICLQSAYNRNEDYVLEFFLPPDCREDGEQKVLLDSILALLRQYLNRLQVATDEGSNEVYLQVDAITIIENGDIKNAHVQHMNCEGGIHASDERNMHVIHESDSQKRISPTESETCPSPDNTKCNDKLFARQNGGCISDSLLLENNSKHSGRRQGKEEKTFSLEVIQQYFTGSLKNAAKSLGVCPTTMKRICRQHGISRWPSRQISKVNRTVSKLKKVIESVEGHEGAFTLTSVTGPLPVAFGPSNPISIKNQSQINVSGLPIPSVQENRDSSSQSKLLENDIHRSTLVPQKSFLANINRQIEAEKASNSRNSSKDCRTHSGRSEESYPVSPANMTFVSTLLEPQQNMYIQDGFTKESFQKEDLRFHGMFVNGSGSLKDCMNHITSAVNGTIIGHPGSLTTAQNSGIITCPGSLISAQNSRIVTVKARYKEDLLRFRFPCSGSFITLKDEVAKRIQMDGVLFDIKYLDDDHEWVKLTCDTDLEECMEISRASGSNVLRLLVTDIAPVLGSSCGSTG

SEQ ID NO: 49682 - protein, 104 aa, Zea Mays
MFSRQVQLLPDFTLLIFEDLEVPSHKTKNIVQYIRQMDDSKKVLLVDGGDIDKKLKLATQNLHYVNVLPSIGLNVYSILQHDTLVMTRAAINRIVERMHTPINR

SEQ ID NO: 49683 - protein, 70 aa, Zea Mays
MQPLLDFVKRGNLQTELFSVGLNQHLVTSIHENWFCARCINSTKPEGEGVIVMQIGACLLVTIFASNGGC

SEQ ID NO: 49684 - protein, 59 aa, Zea Mays
MHPASRIPHRGPVQQPFAPSCPSPPLPHRGLGWWGVGTGGSRHAAVHSFVTHRSSNTSR

SEQ ID NO: 49685 - protein, 226 aa, Zea Mays
MAKTSLPPGFRFHPTDVELTVYYLKRKLLGKHLRCNAITEIDLYKFAPWDLPERASLESNDLVWYFFCPRDRKYSSGLRTNRSTGVGYWKATGKDRPVVYNSRTVGMKRTLVFHLGKPPRGDRTDWVMYEYRLEDEEIAASGVKLDACVLCKIFQKSGPGPKIGAQYGAPFNEEDWNDASNVECSPCVPSVAPCAPESSRGGLNSAGQRLAVSYDVKVSLGSSAEG

SEQ ID NO: 49686 - protein, 325 aa, Zea Mays
MDPLSVLRDYAGRNELDKIIFSGDEIHFGSDYTFPASTPTAFASKQSGRPYPLSAAVFLAQHHDLKHTDFIQAARLRRIPPVSLPDRKTFLDFLRFGHNSLPSADPLLPSAFQPQEPHLHPPSPPPEDPAATEEATTGKQIRALERPFKDRNSILDARGRDFLAVFHAAVRRQDEQLKGGGKDAAPSSRPNSGSVAAALAKPKVLDRSLGDGVVPIILVPSASQTLITIYNVKEFLEDGVFVPSEERMRATKGGKPESVTVQKKLIRTERAGGAGGAVSFEVRDKPASLKSDDWGRVVAVFVLGKEWQFKDWPFKDHVEIFNREE

SEQ ID NO: 49687 - protein, 164 aa, Zea Mays
MAGYSILCYLLQVKDRHNGNLLIDEEGHIIHIDFGFILSNSPGGVNFESAPFKLTRELLEVMDSDAEGTPSEFFDYFKVLCIQGFLTCRKHAERIILLVEMLQDSGFPCFKGGPRTIQNLRKRFHLSLTEEQCVSLVLSLISSSMDAWRTRQYDYYQRVLNGIL

SEQ ID NO: 49688 - protein, 495 aa, Zea Mays
MVRLLGLRSLSFGPEDSPREIPSTADVAPPVGSSGWLVRFFDSAFFCEWIAVSYLYKHDHAGVRDYLCNRMYTLPLPGLEAYLFQVCYMLVHKPSPSLDRFVIDTCAKSLRIALKVHWLLAAELELEDADDLDGIDKVQEQCQVAATVQGEWPPLVRPSPPSPAASPRGNPMLSRIRSSKQRLLSLASSPSLGLSPPAGGGVNVAEDAMGTGGKQPATPSSEDNKLLKRLSIGPKMRDALLFRRSGEKDEEQDRDGFFKRLLRDSRDKEEEDGDREGFFKRLLSREKDNEEEESDRDGFFRRLLRDSKEEDMELTPSSDGLLKRLFRDKEDRQGEDDEKEGFFRRMFKDKNEERRDSSHARHGNEERLGKSVEDDDREGFFRKIFKDKNEERKDEGHQKPDEREKVGANIEDDKRDGFFRQLFKEKNDEKKEGSTPSKKEEDDKGHKNADDDNFFRRLFKDKNEEKKGIVHDRNEDDKCEEGCLECTQKILRVGT

SEQ ID NO: 49689 - protein, 595 aa, Zea Mays
MPELARESSDVTDEMESYSLQLQEPDDKSPLEVKKMSHNALAALVKYLQKKRSGIIERATAEVTEEVVSGAVHHSLKLSEPYKSKKLSKKRAQTHTSSIAREMATVLDTCLLQALILTGQSSGAIELLKGLNYCDLKICEEFLKERREYMVLLELYKSNEMHRDALQLLNQLVEESKSEMENTYFNKKFNSQMILEYLRPLCRSDPMLVLESSLYVLERNPSETIELFLSENVPADLVNSYLKQHAPNLQSTYLELMLSMNDTGINPNLQNELVQLYLSEVLDWYKILKEEGNWTEKTYSPTRKKLISTLESNSGYNTDALLKRLPQDALFEERAILYGKINQHLRALSLYVHKLQMPERAVAYCDRVYEEREQQPSKSNIYFNLLQIHLNPRKAEKEFEQKIIPVASQYSGIQKASATKPKGGRVGKKVVEIEGADDIRFSPSGTDSGRSDGDGDDVNDRGPIMLNEALELLSQRWDRINGAQALRLLPRDTKLQDLVSFLEPLLRNSSEHRRNYLVIKNLILRANLQVKEDLYNRCQAVVKIDGDSTCSLCHKRVANSAFAIYPNGQALVHFVCFKESQQIKAVRGANSVKRR

SEQ ID NO: 49690 - protein, 632 aa, Zea Mays
MEQFSDSHVDITYVLSLYPSIVLPQTNIIGDHDKLLDMPELARESSDVTDEMESYSLQLQEPDDKSPLEVKKMSHNALAALVKYLQKKRSGIIERATAEVTEEVVSGAVHHSLKLSEPYKSKKLSKKRAQTHTSSIAREMATVLDTCLLQALILTGQSSGAIELLKGLNYCDLKICEEFLKERREYMVLLELYKSNEMHRDALQLLNQLVEESKSEMENTYFNKKFNSQMILEYLRPLCRSDPMLVLESSLYVLERNPSETIELFLSENVPADLVNSYLKQHAPNLQSTYLELMLSMNDTGINPNLQNELVQLYLSEVLDWYKILKEEGNWTEKTYSPTRKKLISTLESNSGYNTDALLKRLPQDALFEERAILYGKINQHLRALSLYVHKLQMPERAVAYCDRVYEEREQQPSKSNIYFNLLQIHLNPRKAEKEFEQKIIPVASQYSGIQKASATKPKGGRVGKKVVEIEGADDIRFSPSGTDSGRSDGDGDDVNDRGPIMLNEALELLSQRWDRINGAQALRLLPRDTKLQDLVSFLEPLLRNSSEHRRNYLVIKNLILRANLQVKEDLYNRCQAVVKIDGDSTCSLCHKRVANSAFAIYPNGQALVHFVCFKESQQIKAVRGANSVKRR

SEQ ID NO: 49691 - protein, 395 aa, Zea Mays
MLLFHFSFSVLVCLLLEWNLPTASETVCLYPSSAPPPNNLSAHVGLFQYFLSVQPIYYFFFVTYGVETQNRPIPSINGPAPVQPAPRDGPNSRWLLRTGTGPAPAPPVQFPNSRIRSAGASCGPERERNPTRRTGSASFSSPRFASAPSSFPTPHMATAVPAACLRAPCSSPAAVARRLGAGGPSLRKRHCAVAPVAAACGPAPPRLLDNEEAVCSVRRRVLVAGAAAFLSRPNPAASEAKKGFLPVVDKKAGYSFLYPFGWEEVAVQGQDKVYKDVIEPLESVSVNSIPTSKEDIRDLGPPDKVAEALIKKVLAPSTQKTKLIEAKENDVDGRAYYTFEFTAQAPNYTRHALGAIVIANGKFYTLTTGANERRWEKMKDRLHTVVDSFKIENRI

SEQ ID NO: 49692 - protein, 202 aa, Zea Mays
MDTAVNRKDLGVPVGDTLFGKTILILGFGAIGIEVAKRLRPFGVKILATKRNWSSDTLPSYVDELVDKKGGPEDMYEFAGEANIVIACMTLTSETIGIVDHKFVSSMKKGSYLVNIARGRLLDYKAVFDHLESGHLAGLGIDVAWMEPFDPEDPVLKFPNVILTPHVAGVTEYSYRTMAKSVGDTALQLHLGEAFTEVEFVN

SEQ ID NO: 49693 - protein, 386 aa, Zea Mays
MAGAIVGRLGRHPTSLLLLTLPRHAAAHHRLHSPSSSQVARAGLPGQYSKMGDPSERNGHGALTRVLFCGPYWPASTNYTREYLQDYPFIQVDEVGLEQVPDVIHSYHICVVKNKRIDSDIIAKATQMKIIMQYGVGLEGVDVNAATEHKIKVARIPGSTTGNAVSCAEMAIYLTLGILRKQKEMDTAVNRKDLGVPVGDTLFGKTILILGFGAIGIEVAKRLRPFGVKILATKRNWSSDTLPSYVDELVDKKGGPEDMYEFAGEANIVIACMTLTSETIGIVDHKFVSSMKKGSYLVNIARGRLLDYKAVFDHLESGHLAGLGIDVAWMEPFDPEDPVLKFPNVILTPHVAGVTEYSYRTMAKSVGDTALQLHLGEAFTEVEFVN

SEQ ID NO: 49694 - protein, 575 aa, Zea Mays
MGGCFSVHGDVRGGMEGVGGGARTQGGAASSSAQQGGPNDAVDYFFQTRGLRGLYTPIELSFSASKLRNTDSFSKSDPMLVVYTNIKGKLEEIGRTEVILNSLEPSWITKVTMSYQFEIVQPLIFRIYDVDTKYHNTPVKTLNLTQQDFLGVACCNLSESDCGHGLHGTMTVHAEESDSSRMAVEMTLRCVNLENKDVFSKSDPFLRISKLVETAGPIPICKTEVVPDNLNPVWRPITLTSQQYGSKDNPLLVECFDFNSSGDHELIGAFQTTITQLENLYTSKSAAIFYNHKGQRKMKEQLFVDKFQETVQHTFLDYISSGFELNFMVAIDFTASNGDPRVPQSLHYIDPSGRPNSYQQAMLGVGEVLQFYDNDRRFPTWGFGARVHGYVSHCFNLNTATNDSEVVGVEGIMSAYTSSLYSVSLAGPTMFGPVINKAADIASQSLQYSNNKYFVLLIITDGVLTDIQETKDCIVRASDLPLSILIVGVGNADFKQMEILDADNGKRLESSTGRIATRDIVQFVPMREVQGGEISVVQSLLEELPGQFLQYMRTRGIKPQRAPGLASAPVYPPQQ

SEQ ID NO: 49695 - protein, 113 aa, Zea Mays
MGCPALMHMLWLQGQKKDCLPMIVMMWRRCLQVLRTSKLEKEMAFTSSESNEADITSNSSDSSDSSDWMCEAAAIAAYAMLDCGTSSGKKQKISAGDWLSVGSEASQLSRELL

SEQ ID NO: 49696 - protein, 627 aa, Zea Mays
MHIDDLRALAPLWLSKTEEVRQDKSHWSTNITGDIYGMGWISEMYGYSFGAAEVGLRHKINDDIMIYPGYTPRPGIEPLILHYGLPFKVGNWSFSKLEHHEDGIIYDCNRLFDPPPFPREVEMMESDPNIKRGLFLSIECINTLNEGLLLHHASAGCPKPQWSKYLSFLKSRRFSELTKPKYWKGEQVDSIMTMQHVALSKANNEYPKIHTLFSTECSSYFDWQTVGLMHSFRLSGQPGNITRLLSCTDEDLKNYKGHDLAPTHYVPSMSRHPLTGDWYPAINKPAAVLHWLNHVQTDAEFLVILDADMIMRGPITPWEYGAKRGHPVSTPYEYLIGCDNILAKIHTRNPSACDKVGGVIIMHIDDLRRFALLWLHKSEEVRADKAHYATNITGDIYNSGWISEMYGYSFAAAEINLRHIIRRDIMIYPGYVPLPRAKYRVFHYGLRFGVGNWSFDKADWRNADVVNTCWAKFPEPPDPATITKQDLDARERDFLSIECGRALNKALYLHHKRRNCPRLDTISSTSKKTDQVSASNKIVSVAQKSRSISRGNIESMDEGRLKTVKRTAASVQPLHRSRRLARSSRMWIIAVWALSIVVFLLVISMFFTEQRRNASRSRVSRSLKAHV

SEQ ID NO: 49697 - protein, 144 aa, Zea Mays
MLCRPAQDQSGYTRPDAHEVVESYHSYAFIACRSIHAVNKLNPSFVYRLLEKFFKDQSYSGTVDEITKNLVVPIIGETNLAAFRAGFNDSHSDQATRISFKNGCARGVTGTPYFFVNGIPINDSGSPLEYKDWISILGPLVGKM

SEQ ID NO: 49698 - protein, 108 aa, Zea Mays
MDLAMMMGRPMRTKAATTHHKAHQRSLRLTTTQPRSTYLSFFLASGGPSSQLCCVSSSSWCCRADSAPRSRSMLRLWSSSAAPSAISNEPPQWLAEYMAGAGRWVKVR

SEQ ID NO: 49699 - protein, 175 aa, Zea Mays
MIGVECLEEDCDGKCFFDCRRRGRCSSRRKQPSWRYLIPILYVSVELVKALQAHIINWDIHMFDEEIGNTTQAGHQSMEPKDHHTIHPEFPTKAFKAHKVYYLNEGGKFDHADRLFQSIESAYINRLSNTSDVKELIPEFFYMPEFLENSNSYHLGVKQDGELIGDVALPPWAKA

SEQ ID NO: 49700 - protein, 199 aa, Zea Mays
MGTNAYSGSRSGMNVRRGLDSVSSDNRMARNERSNDQAGPRRGWDKGQGPFRFGEGPSARSAWRASKDEATLEAIRVAGEDNGNSRAAARVAIPELDGEALNDGNQGDERGPLWEAWTRAMDAVHLDDMDSAYAEVLSTGDAELLVKLMEQTGPIIDQLSNEVANEVLHAVGQFLVEESFYDVALNWLQQNPGFSFGLE

SEQ ID NO: 49701 - protein, 500 aa, Zea Mays
MMELHEVQPSKSICLYDSKEGLPTSGCMLDTGSVPIVDVQNLQESEVCAPVKDTVVCLSIQDEKNDPLASNSQLNMRSYSPEGDGVIKESNRVVTDKENDKSLFLSLDNDQKVHSQAEAEVQDIMVRTSCSISEILAQKITSKEQPSQKSIEVGDECFRPSQDMDYVMMFDSSKDENGPNPERLTAEGDCGDPHERLDLVTVGDIGKMVVDNAIIEDVKSNNTTANNVNHGELHVSLQLPEGNTDNGMTGVSTASSLDIKEGNNDKVVADASAHEGDINDNGSSELKIGNTNSGITGVIAASSDLKEENIDKVVAGDCAHESDINAKDCTELNIGNTDNSIAGDSTVSPEVSAENTDQIIAGDCGNETDLKADGEGADKFLATDSALPCEDDATCMDGANVIVSLDVPRSTKNDTFSKNTSSDAEMPLPVGTCELVDRPSSENDMSEHTSFDGKRPADDRTLEENEMVMPGDEKTEVHYKRRKVLASEKQSSFSGATSTD

SEQ ID NO: 49702 - protein, 542 aa, Zea Mays
MDHAEVSGLLCIGTRETDGGEESYAAEYPKMDQDTNATTKFDVVMETSAMYTDQINTNACLDEYHMSGKQPMEEMGFGSAHPFELPSEGMVADSGEESMPSSPDTSTSNYDAPGYTEQNLQHIYNSYDALVDKDGVVLTPAFMICDKTLYLEPHLTFSLDGIKIEYLDLDSFEDEKLSALQWEISNIISISCKWTRSVGSALITLLVGSTAETGNAGPVRARFSLDDSQWPRRQQRIWELGPRYQEIWKDIPSDDFALENWSIEPCLFFPRQYFSSTEDFEDVIYPQGDPDAVSISKRDVELLLPETFVNDTIIDFYIKYLSTRIESTKKRRCHFFNSFFFRKLADLDKDQGRAPEGRAAFLRVRKWTRKINVFDKDFLFIPVNFNLHWSLIVICYPGEVATFEDGDAKLSAKLPCILHMDSLKGSHTGLKDIIQSYLWEEWKERHPESASDNSDKFLNLRFVSLELPQQDNSYDCGLFLLHYVELFLTDAPSNFNPLKIDVFSGFNHPKLACGGEQLDERHQRCSNPGEPETVCTVDDGTP

SEQ ID NO: 49703 - protein, 390 aa, Zea Mays
MKERSTIAVIGLSVHTAPVEMREKLAVAEELWPRAIQELTSLNHIEEAAVLSTCNRMEIYVVALSWNRGIREVVDWMSKKSGIPASELREHLFILRSSDATRHLFEVSAGLDSLVLGEGQILAQVKQVVRSGQNSGGLGKNIDRMFKDAITAGKRVRSETNISSGAVSVSSAAVELALMKLPKSEALSARMLLIGAGKMGKLVIKHLVAKGCKKVVVVNRSVERVDAIREEMKDIEIVYRPLSDMYQAAAEADVVFTSTASETSLFAKEHAEALPPVSDTMGGVRLFVDISVPRNVSACVSEVGAARVYNVDDLKEVVEANKEDRLRKAMEAQTIITEELRRFEAWRDSLETVPTIKKLRSYADRIRASELEKCLQKVAPEVRRQRQPHP

SEQ ID NO: 49704 - protein, 122 aa, Zea Mays
MRLPQHTERAGSPKTCSIFQAWLPRHLRCPGPVSQLLVLCAVPGCPRRRCHGHLIALFLNGIKAPVLVFTKQAPQTPTSTHNHSHNGGRRVSQGQGGRLGQVRLATPWLGAGGRSAAALHPA

SEQ ID NO: 49705 - protein, 317 aa, Zea Mays
MYMDHNLDRSDEFVLVLDLDMYQKQLKQSTQYIIADEHVAVAESLSIGVNYGQIANNLPSPAQVSWLLRSMRVSKVKLYDADPNVLRAFLGTGVEFVVGIGNEYVPAMVSPAAAQAWLQQHVVPYLRSGARITCVTVGNEVFKGNDTALQAAVLPAMQSVHRALGALGLQGRINVTTAHSLDVMGVSFPPSAGAFAPAALAHLQPFLSFLSATRSPFLINCYPYFAYKDDPARVPLDYVLFRPNAGVADARTGLRYDNMLYAQVWTPCTRPSRGSGTRTWRSRCRRPGGRREATPTNPAPRPSTRGPTSGTCCSGSR

SEQ ID NO: 49706 - protein, 134 aa, Zea Mays
MEAPRAERIRETRRHRQAASSQAPTRARLPDPTYCPQLQANEATDESTRRGTERSEPDYPPRPSGMRGSEMLTAAGGAGTAPSTVSSGAAAAADLVAGAGGTGAIGAGGGGGNFPLAVALLAFAFANFVNLVSI

SEQ ID NO: 49707 - protein, 322 aa, Zea Mays
MEAHLSEFWVFDLHQILEATDNFSEENKLGEGGFGPVYKGQLPEGVEIAVKRLASHSGQGFVEFKNEVQLIAKLQHRNLVRHLGCCSQEEEKILVYEYLPNKSLDLFIFADEDRRSLLDWNNRLAIIEGTAEGLLYLHKHSRLRVIHRDLKPSNILLDSEMNPKISDFGLAKIFSSNDVSSEGGTTTRRVVGTYFGVLVLEIISGKRNSGIHECGDFINILGYTWQLYEEGRWRELVDASLLSMQHHSDEIMMVIMRCMNIGLLCVQENAADRPTMLDVVAMLSTKTKVLDKPNHPAYFNVRVGNEEASTTATTMSCSVSMR

SEQ ID NO: 49708 - protein, 669 aa, Zea Mays
MAAGVLFIILGFLLVLPSATAIGQVCGNAGNYTANSTYQSNLASLAAALPANTSTSPQLFATATAGQSPDAVYALALCRGDTASSSNLTGCAACVKNSFAYAQRTCPHAKAASVYDDDCLLGFSSSDILIPANNMSTLFQYWNPASIPGGDASMVSADVKDLLTQTARAAASSPRRFATAFMDASGSSIPTLYSLAQCTPDLSAGDCLACLQRLVSLLNATTSVRLGGRVLVLRCNFRFENMMFYDGAPTTRVTTPSSSGPPAPPFPAPTTTDKRAAGTKPWVVAVSVLCSTSSSGSSSTLLRLVLPLAKQKVHKSSRGGDEVDWEMEAHLSEFWVFDLHQILEATDNFSEENKLGEGGFGPVYKGQLPEGVEIAVKRLASHSGQGFVEFKNEVQLIAKLQHRNLVRHLGCCSQEEEKILVYEYLPNKSLDLFIFADEDRRSLLDWNNRLAIIEGTAEGLLYLHKHSRLRVIHRDLKPSNILLDSEMNPKISDFGLAKIFSSNDVSSEGGTTTRRVVGTYGYMAPEYASEGLFSVKSDVFSFGVLVLEIISGKRNSGIHECGDFINILGYTWQLYEEGRWRELVDASLLSMQHHSDEIMMVIMRCMNIGLLCVQENAADRPTMLDVVAMLSTKTKVLDKPNHPAYFNVRVGNEEASTTATTMSCSVSMR

SEQ ID NO: 49709 - protein, 57 aa, Zea Mays
MMTYSVMDATAFFVFVFAFRYFSFLIVLHVPTRNEKSFCWSNLNFMCVSGVPKRVDM

SEQ ID NO: 49710 - protein, 1401 aa, Zea Mays
MHLDGVDDELGGGSCAPSPARFELQEDPSFWKDNNVQVAIRIRPLSGSEVSMQGQKRCVRQDSSQSLTWIGHPESRFTFDLVADEHVTQEGMFNVAGVPMVENCIAGYNSCMFAYGQTGSGKTHTMLGDIENGTRRNNVNCGITPRVFEHLFEKELRRDEKLMFTCKCSFLEIYNEQILDLLNPNSVNLQIREDARKGIHVENLTEHEISNAREALQQLIEGAANRKVAATNMNRASSRSHSVFTCLIESKWESQGIKHHRFSRLNLVDLAGSERQKSSGAEGERLKEATNINKSLSTLGLVITNLIAVSNKKSQHVPYRDSKLTFLLQDSLGGNSKTTIIANISPSSCCAAETLSTLKFAQRAKYIRNNAIINEDASGDVLSMRLQIQNLKKVISRLQGQLGSDKTESIASHGFVCESPSTFKWDQGHGMFTPLTFDKRATQRNDCDAALVAAFRREQEKEAQLKAVIDAKQTAEQLVAQKTEEVRSFKMRLKFREERIKRLEQVASGKLSAEAHLLQEKENLVKELEVLRGQLDRNPEITKFAMENLQLKEELRRLQSFVDEGEREMMHEQIIVLQDKLLEALDWKLMNEKEPINKGLSLFGESAGDEENEFLRLQAIQNEREIESLRKKMTFCLEAKDNLERHVNELTTELELTKKHNNTYKEFKAAQLQEQGEADLHNLSDAQMELKTLVDAIASASQREAEAHETAIGLAKENEELRLQLKVLIEDNKRLVELYEHTVVNVEANQDGNPVDDLLNAQPAATSDFHAHNSSSVAQESKIVDEKCTNEDNFSRVTSVELRLQLEEMHEENDRLMGLYEKAMQERDEFKRKILEQSDSEAVKHIQLDEKDVEMSEAAENPEVKHIHDSTIAALKEVLQIVRSKLELVQDKVVSAQDAVKYFKALEIASGKAEELSARIELQRLGAQRGQEEITFLKSVLSESQKKKNAFEGKYFLPAASCWNLVLKTKSLAESKFDASFGSMNQKKEQLNHLQTRKIELSAARTRARESETELKSKIDGLKAKLRAHEAQRKEEEKVLFAIDNLDTSTTLMHKPKNYGKATDLLKSEEDRMKLLCELQKAREQRSMVHKEIRSMNECDYIDREIGVLEAEIEDSCISILETDIEKFVRDNTLAEIWEGSAKDLEALLVDYQDCVFQVNLKEEEIKVCSESLQYQARDMDKLQSKLNQAIRELGELLQDRRSLTACSLDEPTLPVGEKVCQPAATCAGSAKGSRKESAAGSRSGRGAGRMREHWHGDGDGDGEDEHEPQPGCGEGAGQAAANCAAVCCCCPLALLDVLLLVTVRLPAGVMRRVRRRRRRRRGHGGAGANRKRPAPASPSGSSGKAMIGAATLDIDEEARGEVESAAAAELEREIMSSHFYGAGFWRSVSSNSSSSSRRYQ

SEQ ID NO: 49711 - protein, 1244 aa, Zea Mays
MHLDGVDDELGGGSCAPSPARFELQEDPSFWKDNNVQVAIRIRPLSGSEVSMQGQKRCVRQDSSQSLTWIGHPESRFTFDLVADEHVTQEGMFNVAGVPMVENCIAGYNSCMFAYGQTGSGKTHTMLGDIENGTRRNNVNCGITPRVFEHLFEKELRRDEKLMFTCKCSFLEIYNEQILDLLNPNSVNLQIREDARKGIHVENLTEHEISNAREALQQLIEGAANRKVAATNMNRASSRSHSVFTCLIESKWESQGIKHHRFSRLNLVDLAGSERQKSSGAEGERLKEATNINKSLSTLGLVITNLIAVSNKKSQHVPYRDSKLTFLLQLPFHFESYTFDISRFLSSCAAETLSTLKFAQRAKYIRNNAIINEDASGDVLSMRLQIQNLKKVISRLQGQLGSDKTESIASHGFVCESPSTFKWDQGHGMFTPLTFDKRATQRNDCDAALVAAFRREQEKEAQLKAVIDAKQTAEQLVAQKTEEVRSFKMRLKFREERIKRLEQVASGKLSAEAHLLQEKENLVKELEVLRGQLDRNPEITKFAMENLQLKEELRRLQSFVDEGEREMMHEQIIVLQDKLLEALDWKLMNEKEPINKGLSLFGESAGDEENEFLRLQAIQNEREIESLRKKMTFCLEAKDNLERHVNELTTELELTKKHNNTYKEFKAAQLQEQGEADLHNLSDAQMELKTLVDAIASASQREAEAHETAIGLAKENEELRLQLKVLIEDNKRLVELYEHTVVNVEANQDGNPVDDLLNAQPAATSDFHAHNSSSVAQESKIVDEKCTNEDNFSRVTSVELRLQLEEMHEENDRLMGLYEKAMQERDEFKRKILEQSDSEAVKHIQLDEKDVEMSEAAENPEVKHIHDSTIAALKEVLQIVRSKLELVQDKVVSAQDAVKYFKALEIASGKAEELSARIELQRLGAQRGQEEITFLKSVLSESQKKKNAFEGKYFLPAASCWNLVLKTKSLAESKFDASFGSMNQKKEQLNHLQTRKIELSAARTRARESETELKSKIDGLKAKLRAHEAQRKEEEKVLFAIDNLDTSTTLMHKPKNYGKATDLLKSEEDRMKLLCELQKAREQRSMVHKEIRSMNECDYIDREIGVLEAEIEDSCISILETDIEKFVRDNTLAEIWEGSAKDLEALLVDYQDCVFQVNLKEEEIKVCSESLQYQARDMDKLQSKLNQAIRELGELLQDRRSLTACSLDEPTLPVGEKVAADLEAVRIHVDEAKQLLILDNQANS

SEQ ID NO: 49712 - protein, 873 aa, Zea Mays
MRMLLVMFLACVYRSRTLRKVISRLQGQLGSDKTESIASHGFVCESPSTFKWDQGHGMFTPLTFDKRATQRNDCDAALVAAFRREQEKEAQLKAVIDAKQTAEQLVAQKTEEVRSFKMRLKFREERIKRLEQVASGKLSAEAHLLQEKENLVKELEVLRGQLDRNPEITKFAMENLQLKEELRRLQSFVDEGEREMMHEQIIVLQDKLLEALDWKLMNEKEPINKGLSLFGESAGDEENEFLRLQAIQNEREIESLRKKMTFCLEAKDNLERHVNELTTELELTKKHNNTYKEFKAAQLQEQGEADLHNLSDAQMELKTLVDAIASASQREAEAHETAIGLAKENEELRLQLKVLIEDNKRLVELYEHTVVNVEANQDGNPVDDLLNAQPAATSDFHAHNSSSVAQESKIVDEKCTNEDNFSRVTSVELRLQLEEMHEENDRLMGLYEKAMQERDEFKRKILEQSDSEAVKHIQLDEKDVEMSEAAENPEVKHIHDSTIAALKEVLQIVRSKLELVQDKVVSAQDAVKYFKALEIASGKAEELSARIELQRLGAQRGQEEITFLKSVLSESQKKKNAFEGKYFLPAASCWNLVLKTKSLAESKFDASFGSMNQKKEQLNHLQTRKIELSAARTRARESETELKSKIDGLKAKLRAHEAQRKEEEKVLFAIDNLDTSTTLMHKPKNYGKATDLLKSEEDRMKLLCELQKAREQRSMVHKEIRSMNECDYIDREIGVLEAEIEDSCISILETDIEKFVRDNTLAEIWEGSAKDLEALLVDYQDCVFQVNLKEEEIKVCSESLQYQARDMDKLQSKLNQAIRELGELLQDRRSLTACSLDEPTLPVGEKVAADLEAVRIHVDEAKQLLILDNQANS

SEQ ID NO: 49713 - protein, 200 aa, Zea Mays
MVCSEHLVTLLAIVPKYSQKDWLSSYESLDTFVVPRSSKQLYEDNEYALYTITLFAKVVDNFKVRAREKGFQVRDFEYSPEAQESRKQEMEKLLLEQEVMRTSLLQWCYASYSEVFSSWMHFCAVRIFVESILRYGLPPSFLSAVLAPSTKGEKKVRSILEDLCGNVHSIYWKGEDDVAVAGLGGESEVHPYVSFTINFV

SEQ ID NO: 49714 - protein, 737 aa, Zea Mays
MLVALLCLLACCAGAGAAGAAAPNARPCASPYSTSAYPFCDASLSIPARARALVSLLTLDEKIAQLSNTAGGVPRLGIPPYQWWSESLHGLADNGPGVNFSSGPVRAATDFPQVILSTAAFNRSLWRAVAEAVATEALGMHNAGQAGLTYWAPNINIFRDPRWGRGQETSGEDPAVAAAYSLEYVKGFQGEEGEEGRIRLSACCKHYTAYDMEKWEGFSRYTFNAKVNGVPMCAHKDLLQKTRDEWGFQGYITSDCDAVAIIHENQTYTKSGEDSIAIVLKAGMDINCGSFLVRHTKSAIEKGKIQEEDIDRALFNLFSVQLRLGIFDKPSNNQWFSQLGPNSVCTKEHRELAAEAVRQGAVLLKNDHNFLPLKRSEVRHVAIIGPSANDAYAMGGDYTGVPCNPTTFLKGIQAYATQTSFAPGCKDASCNSTDLFGEAVEAAKRADIVVVIAGLNLTEEREDFDRVSLLLPGKQMGLIHAIASVAKKPLVLVLLGGGPVDVSFAKQDPRIASILWLGYPGEVGGQVLPEILFGEYNPGGKLPITWYPESFTAIPMTDMNMRADPSRGYPGRTYRFYTGDVVYGFGYGLSYSKYSYSISSAPKKITVSRSSDLGIISRKPAYTRRDGLGSVKTEDIASCEALVFSVHVAVSNHGSMDGSHAVLLFARSKSSVPGFPIKQLVGFESVHTAAGSASNVEITVDPCKQMSAANPEGKRVLLLGAHVLTVGDEEFELSIEL

SEQ ID NO: 49715 - protein, 180 aa, Zea Mays
MAAGLAFPVASFPLACVSSPPHPGHRICCAIPSSSSRRTVKSSPLRATTVLSRERRGTGRGASVVCAVQGQDTTIQDVTKSTWQSLVIESELPVLVEFSAAWCGPCKMIEPVVGKLSKDYEGKLKCYKLNTDESPDIASQYGVRSIPTTMIFKDGEKKDSVIGAVPESTLVTCIEKFVER

SEQ ID NO: 49716 - protein, 554 aa, Zea Mays
MPLLHSLSVLFLPVTVIELLKFPPPTIYPLRLPYLATVPHPHLPRPSSFRTRCEIRNGHATSTIVGPHCRGGRRAPRADDDVRGGRALAGAAARRRARPAAAVVAVPGERDARGGDRAAVRGVGAVRGRAPAQHVPARGRPRVPLLLARGGQGPRARRLHDHPGRRRLAPGHQPRPRRHQGQRRHLHGEGDRLGDARVHHPGGRRRGQDGRAVGRHRGLADRAQGPAPRHVQLGVLRRERAVLPGKEHHFQEHVAGAEAWGGGEAGGGAAGVGGQRGVRGVQVPGRAGHAVRPLGPPLLQGLLHPRVRGLHLRQRAVAVRGLPRARDRAGLRGADGAEPAEHAGGHGVLVRQLPGDGVRRALPGPRLGHLLPRRLRLHPHGRHHRPQRVVQLGRPQPRADGVLRAVQVHGPGRDLCRPGGVVARAHRRRGQALHLAQLHRWHRVGQAVAVNLAAAHATTPHTVKKQSKTVYTDFILSVPRPSPKLWSLDAASRWNELLPKTRTRQIRAGLLDTRGILLLFKLKSKMISLHRSRDSCSPNHPHGKKSPLHRSRDP

SEQ ID NO: 49717 - protein, 164 aa, Zea Mays
MRKLEEIRQGKEAAAAVTAGTAVATTATPTVNAGATTADANPKSGRSGERGRGGRKKAKVPTEQSVPVPVPLPPIDLELPVDPNEPTYCLCNQVSYVQNRVVSLWLCGRQGATQGKVVLPKLHRIPEEAKRQVICSPQAAVLVCPCLLIVLLMLGNKCSSSCCL

SEQ ID NO: 49718 - protein, 231 aa, Zea Mays
MEEQKHCVRIADEKVALATQTYDLVDAHIQQLDQFMRKLEEIRQGKEAAAAVTAGTAVATTATPTVNAGATTADANPKSGRSGERGRGGRKKAKVPTEQSVPVPVPLPPIDLELPVDPNEPTYCLCNQVSYGEMVACDNPNVCDMPFVYSSFDKFHFSCPCFGCISLSYPFGSAKSSGITMAVWASRSNPRESGIAQTASDSRRSEKASDMQSTGCCASVSLLVNCVADVG

SEQ ID NO: 49719 - protein, 722 aa, Zea Mays
MRRWWPAALLGCAVAVSVLVAAVECAVTYDKKAVLIDGQRRILFSGSIHYPRSTPDMWEGLIQKAKDGGLDVIQTYVFWNGHEPTPGNYYFEERYDLVRFIKTVQKAGLFVHLRIGPYICGEWNFGGFPVWLKYVPGISFRTDNEPFKTAMQGFTEKIVGMMKSENLFASQGGPIILSQIENEYGPEGREFGAAGQAYINWAAKMAVGLGTGVPWVMCKEEDAPDPVPTMWTEAWSGWFTEFGGTIRQRPVEDLAFAVARFVQKGGSFINYYMYHGGTNFGRTAGGPFITTSYDYDAPIDEYGLVREPKHSHLKELHRAVKLCEQALVSVDPAITTLGTMQEVGVQTSQMQMWGDGASSMTWERYDEEVDSLAAAPLLTTTGLLEQLNVTRDSSDYLWYITSVDISSSENFLQGGGKPLSLSVQSAGHALHVFVNGQLQGSAYGTREDRRIKYNGNASLRAGTNKIALLSVACGLPNVGVHYETWNTGVGGPVVLHGLDEGSRDLTWQTWSYQVGLKGEQMNLNSIEGSSSVEWMQGSLIAQNQQPLAWYRAYFETPSGDEPLALDMGSMGKGQIWINGQSIGRYWTAYADGDCKECSYTGTFRAPKCQSGCGQPTQRWYHVPKSWLQPTRNLLVVFEELGGDSSKIALVKRSVSSVCADVSEDHPNIKNWQIESYGEREYHRAQSALKMCTWAVHFRNQIRKLWDTYGNLWRFPARRLPLS

SEQ ID NO: 49720 - protein, 772 aa, Zea Mays
MRRWWPAALLGCAVAVSVLVAAVECAVTYDKKAVLIDGQRRILFSGSIHYPRSTPDMWEGLIQKAKDGGLDVIQTYVFWNGHEPTPGNYYFEESGFPVWLKYVPGISFRTDNEPFKTAMQGFTEKIVGMMKSENLFASQGGPIILSQASIIFSLDLIENEYGPEGREFGAAGQAYINWAAKMAVGLGTGVPWVMCKEEDAPDPVINACNGFYCDAFSPNKPYKPTMWTEAWSGWFTEFGGTIRQRPVEDLAFAVARFVQKGGSFINYYMYHGGTNFGRTAGGPFITTSYDYDAPIDEYGLVREPKHSHLKELHRAVKLCEQALVSVDPAITTLGTMQEARVFQSPSGCAAFLANYNSNSYAKVVFNNEQYSLPPWSISILPDCKNVVFNSATVGVQTSQMQMWGDGASSMTWERYDEEVDSLAAAPLLTTTGLLEQLNVTRDSSDYLWYITSVDISSSENFLQGGGKPLSLSVQSAGHALHVFVNGQLQGSAYGTREDRRIKYNGNASLRAGTNKIALLSVACGLPNVGVHYETWNTGVGGPVVLHGLDEGSRDLTWQTWSYQVGLKGEQMNLNSIEGSSSVEWMQGSLIAQNQQPLAWYRAYFETPSGDEPLALDMGSMGKGQIWINGQSIGRYWTAYADGDCKECSYTGTFRAPKCQSGCGQPTQRWYHVPKSWLQPTRNLLVVFEELGGDSSKIALVKRSVSSVCADVSEDHPNIKNWQIESYGEREYHRAQSALKMCTWAVHFRNQIRKLWDTYGNLWRFPARRLPLS

SEQ ID NO: 49721 - protein, 169 aa, Zea Mays
MKRKENSAHSAPPLNRPRGKRKALAELPKSNGLNMNHDSAPRPSKPRTRSAARAEAEAEAAMKRRKAGDAARWPMDTRQPDAEAAVAPYVGDIDRYLRSLENLSLEQSTGYRVFDLQKSIYVIHELQLTIRCPNQVAIREKYKDPKFGCVSTMVSPREIPTSFLEGCHK

SEQ ID NO: 49722 - protein, 187 aa, Zea Mays
MKRKENSAHSAPPLNRPRGKRKALAELPKSNGLNMNHDSAPRPSKPRTRSAARAEAEAEAAMKRRKAGDAARWPMDTRQPDAEAAVAPYVGDIDRYLRSLEVEPLRRPSHSYFQDIQKNICPKMRAILVDWLVEVAEEFKLHAETLHLAVSYVDRFLTMNVVARNKLQLLGVTALLVAAWSRWRLTY

SEQ ID NO: 49723 - protein, 345 aa, Zea Mays
MKRKENSAHSAPPLNRPRGKRKALAELPKSNGLNMNHDSAPRPSKPRTRSAARAEAEAEAAMKRRKAGDAARWPMDTRQPDAEAAVAPYVGDIDRYLRSLEVEPLRRPSHSYFQDIQKNICPKMRAILVDWLVEVAEEFKLHAETLHLAVSYVDRFLTMNVVARNKLQLLGVTALLVAAKYEEIESSKMKVVKMETDLLKSLSFQIGGPTVTTFLRQFIASCRGGNSASRGKLEFVCSYLAELSLLDYDCISYLPSVVAAACLFVARFIIHPKTRPWNLSLEQSTGYRVFDLQKSIYVIHELQLTIRCPNQVAIREKYKDPKFGCVSTMVSPREIPTSFLEGCHK

SEQ ID NO: 49724 - protein, 213 aa, Zea Mays
MKRKENSAHSAPPLNRPRGKRKALAELPKSNGLNMNHDSAPRPSKPRTRSAARAEAEAEAAMKRRKAGDAARWPMDTRQPDAEAAVAPYVGDIDRYLRSLEVEPLRRPSHSYFQDIQKNICPKMRAILVDWLVEVAEEFKLHAETLHLAVSYVDRFLTMNVVARNKLQLLGVTALLVAAKYEEIESSKMKVKRYTDITDNTYTKQWSRWRLTY

SEQ ID NO: 49725 - protein, 324 aa, Zea Mays
MLAVSPRRTRSHIVIKLPEPLQDIDKIFLKLESEFEEQWANEGILGWGNKGTEKESEIDLDYYSTVEELVELGPEKLKQALAARGLKSGGTVQQRADRLFLLKVTPLEQLDRKHFAKVPHTKDGSNTAPNGNAFKEDMKKEIALMEVKMKRLCELLDEAFVRTKENAEKKLTLTYEEMEAEREEEEVQVDTESDDEEQQIYNPLKLPMGWDGKPIPYWLYKLHGLGQEFKCEICGNHSYWGRRAYERHFKEWRHQHGMRCLGIPNTKNFNEITSIEEAKALWEKIQARQGVNKWRPDLEEEYEDQEGNIYNKKTYTDLQRQGLI

SEQ ID NO: 49726 - protein, 405 aa, Zea Mays
MPPPTLHAGSYKRGLTSRHTARSTSLTPSLAPPPLLAFLGRIKNTSRKEKRRSPIRARQPISICTITVRAPDYQNPAEGNGAEQLRDGGFHPAVRRGQQQHPGPRSGGPGGGGGGAAGAEQDARGAQRGLPRAVRGMRRRFRGGGGGAHAAGGLRREAARRGHGSPRPDGRHRLDLEGSRVLRFRPSHRLLGRQLPGPLPLALPASGRQVLDDAAAVRGVLVPGCQDGGDLRSSVSGPAGRGRAVRVRGEDGAEDGAAGPQHAQMEDASGHPLLVHRLLPPPAQRRRCAEQTRRPPIRGAHPARRERNVLPGFQALGGRRGCRRRRGRRGARRGYRQGLHPPRARGTACACPRPLLASLVVRFNAMRCNTLSVYRMDPNPSRRRGCRDASKRSRPPWPCWRLHSR

SEQ ID NO: 49727 - protein, 372 aa, Zea Mays
MYVLGFQEVVPLRARNVLGADKKRVGMRWIELTRAALNRSSSSHAQRGGGSGGGSGSGDGGGGGRQKVHPVRDGGGGGGLACRDYRCVVSKQMVGVLLTVWVRSDLRRFVRRASVSCVGCGVMGCLGNKGAVSVRFWLHETSFCFVCCHLASGGRDGDEAHRNADATEILSRTAFPRGQALNLPLPHKILDHDRVILLGDLNYRISLPEAKTRLLVERQDWKTLLENDQLRAEVRRGGAFQGWSEGPIAFSPTYKYCPNSDAYYGCATASATADARRHKRRAPAWCDRILWRGEGIRQARYGRCESRLSDHRPVRAVFTVEVGAPAPGSNLNSLRSFFMSERFDGAGSRSPAADQLLRRDDDVNSARFSDAL

SEQ ID NO: 49728 - protein, 104 aa, Zea Mays
MCREGSRTIVCSRIDFLSHTGSLRYGKSGTFRMDSFLSHRSLPRGTGGGSARPAQPQSQSSRRSERATGKTRPPLVESTPATSPATAQLSGTGTPYTNPSDLWA

SEQ ID NO: 49729 - protein, 733 aa, Zea Mays
MEQDQSPAVDSADSGAAAFDFATGNAPSSAVTSGSAVAPDGGAQAADTSAYQAEHTELNGTTGDMSNYQSAGAAENGTAVTEIGEPVPEPSYEEAVLSAEEARLWSVVTANCLDFNAWTTLIEETEKNAENDILKIRKVYDSFLTEFPLCFGYWKKYADHEARLDGVNKVIEVYERAVLAVTYSVDIWYNYCQFAISTYDDPDIVRRLFERGLAYVGTDYRSNILWDEYIKYEESLEAWSHLAVIYTRVLEHPIQQLDRYFNCLKELASKHSFSEILTAEEASVYVVTSETSAQAPDGDTHPDDIDKAGQPELSSLADAENLAKYVSMREEMYKKAKEYESEIIGFELAIRRPYFHVKPLDNPELENWHSYLDFIEKEEDINKVIKLYERCVIACASYSEFWIRYVQCMEDKGSLDLANNALARATHVFVKKQPEIHLFSARFKELNGDISGARAEYQHLYSDLCPGFLEAIVKHSNMEHRLGDKELSCSVYEKAIAAEKGKEQSQLLPTLLIQYSRFLFLAIRDLEKAREILTVLHEQLNAVIHLESIFPCEKRIDFLDSLVEKFVTPESSQGEVASLVDKEEISSIFLEFLDLFGDAKSIKKALTRHTTLFSCKRSILPSKKRKADDTVVSDRDKFAKTVVTQSATGTDPNASNPPVWPATSEASGQQWGASYAQQAAYPAYGTYDYSHQMPQPAPQAAAYGAYPPTYSAQSSLSTGIQLRNQELGLRVSI

SEQ ID NO: 49730 - protein, 750 aa, Zea Mays
MGCGQSKIDQEEAVFRCRERKRLMADAVASRNGFAAAHTGYTVRLKSTGGALSDFAQGEAPDPSLVSSHTHHAPAVATSSVSTPPGPSAASVNSPSPPPPPFADFSHSSLQRSSSTPNIPMPEPRAAAKNRPPADASIREEDEDEDEEEQDGHIKIDSDDDSDDDSDEDDDHHEHDDVSVDDMVHGQQSKRILMSSVGSSPVTPPPPPRLNHTPPTLATATPPPPVLESQMATWDYIFGPTPTPPPTLEQPAADTLWMERRDKEPVAEVKAPVAKTVVSKPAATEERPPETAVEKDKAIEEMMANLPPSKPIVRKPPKAPGPSQEAAHYQHASSMGAVEIRKGKVMVASGTASLLQIVTRLDDNFLRASESAHDVSKKLEATRMHYHSNHADSRGHIDHSTKIMHVITWNRSFKNLPDHEDLNDNFEIDDRFETHAAVLDRMLAWEKKLYDEVKAGELMKTDYQKKVSLLQKQKKRGVKLETLEKTKAAVSQLHTRMAKMWSSMYRHHRSQFLIISGIRGFEIPPIPRETTDSHYIQTCELRDIVREWHTQFEKLMDNQKAYIRALNAWLKLNLIPIESNIKEKVSSPPRLVDPPIKHLLHAWHDELERLPIELAKTAIKTFAEVISTIVHLQEEEVNLRRRCDETRRDLNRKKAQFEDWHQKYLERQTAETQNIDPVEDRKRTIEELEIRLREEEGHHLRHARQVREKSLANLRTHLPELFRNMSDFAYFCKDMYNNLRKTAALSKDEV

SEQ ID NO: 49731 - protein, 295 aa, Zea Mays
MGTSAQESPLWKRIDDAEYYLVSGSFDQAVLTALSVADEIHMASLESASDQDELLEMLESAGMVLVQALKELRRASEMFAQLKMMFGSVPSVPARVFLTGATIQMAEGSISDLRPIFEEYLANWRYTDDEDLLKKLHAVQLAANKKLSTVEGVKQTAERNLSTSTNDSTPSPHEDPPKIVPACDGLKKVLLKSAQQAQHVANHFDPFFWWFHSIRLKFGKIHIVLPSGKLVFLFSLLFSAMYVLRRKTAGLKRAVFQQAASLRRAFFDALQLAFSVQMNPLAAVQQVPQAPRGSW

SEQ ID NO: 49732 - protein, 206 aa, Zea Mays
MARGVTGDAAGSSAADERGRGEAAPPQSATWQRVRRAGQGVAAHALLLCFTALLALKLDGVLSLSWWALFIPVWLFHAVAARCLFSLPAPSPESCQRVPFHSIVATPLLVAFELLLCVYLEGLNHNGHVEPFIIDLKLVFLPLLALEIITLVDNFRMCGALMPGHGETITEEAIWERLPYFWVAISMVFLLAATSLMLLKLCGYSI

SEQ ID NO: 49733 - protein, 235 aa, Zea Mays
MARGVTGDAAGSSAADERGRGEAAPPQSATWQRVRRAGQGVAAHALLLCFTALLALKLDGVLSLSWWALFIPVWLFHAVAARCLFSLPAPSPESCQRVPFHSIVATPLLVAFELLLCVYLEGLNHNGHVEPFIIDLKLVFLPLLALEIITLVDNFRMCGALMPGHGETITEEAIWERLPYFWVAISMVFLLAATSLMLLKLCGDAVTLGWWDLFINFGVLHLMHVLSQFELFFYP

SEQ ID NO: 49734 - protein, 203 aa, Zea Mays
MDIMGPVRKTTDSNGVECIRSTDGKEVNLFQPASEFLPMITEVYEKLGESVKDIDGARMEDNKFCVSVHYRNVAEDDYKKVFHRVTAVLEGYPCLRLTHGRKVFEVRPVIDWNKGKAVEFLLESLGLSESEDVLPIYVGDDRTDEDAFKVLKASNRGFGILVSSIPKESDAFYSLRDPAEVTHSTVATTTNFCFEYFLGQKEN

SEQ ID NO: 49735 - protein, 203 aa, Zea Mays
MRRNISRRFGPVSAHLWRMKDRESEKGQNRREQEDGERRRGGMEPDKAGEAAKEPTETEAGDSVDPRELVSSDDEIDYSVEPDFYDPDLDDVDERWVSRQRKGRTSDAVLSCPACFTTLCLDCQRHEKYVNQYRAMFVRNCKIKTDQVLREGKSKRKKRRGGRAGDPAAASEGESKGQSYHPVCCEVCSTEHDAVLKGGLREL

SEQ ID NO: 49736 - protein, 825 aa, Zea Mays
MAQPLVVKKDDDLDEEEYYSPFLGIEKGAVLQEARVFHDPQLDARRCCQVITKLLYLLNQGDTFTKVEATEVFFATTKLFQSKDAGLRRMVYLMIKELSPSADEVIIVTSSLMKDMNSKTDMYRANAIRVLCRIIDSTLLTQIERYLKQAIVDKNPVVASAALVSGIYLLQTSPEVVKRWSNEVQEAVQSRAALVQFHALALLHQIRQNDRLAVSKLVTSLTRGSVRSPLAQCLLIRYTSQVIRESGVYQGGDRPFFDFLESCLRNKAEMVILEAARAITELNGVTSRELTPAITVLQLFLSSSKPVLRFAAVRTLNKVASTHPLAVTNCNIDMESLISDQNRSVATLAITTLLKTGNESSVDRLMKQMTNFMSDIADEFKIVVVEAIRSLCLKFPLKYRSLMNFLSNILREEGGFEYKKAIVDSIIILIRDIPDAKESGLFHLCEFIEDCEFTYLSTQILHFLGNEGPKTSDPSKYIRYIYNRVILENATVRASAVSTLAKFGALVDSLKPRIFVLLRRCLFDGDDEVRDRATLYLKLLGGEATVGETEKDVNEFLFGSLDVPLVNLETSLRNYEPSDVPFDISSVSKETKSQPLAEKKSTGKKSAGPASAVSGSVSTVDASYEKLLSSIPEFADFGKLFKSSAPVELTEAETEYSVNVVKHIFDRHVVLQYNCTNTIPEQLLEQVIVLVDASEADEFLEVASKPLESLPYDSPGQTFVAFENPEGVIATGKFSNILKFFVKEVDPSTGEAEDDGVEDEYQLEDLEIVSADYMLKVGVSNFRNAWENMDPETERVDEYGLGVRESLAEAVSAVISILGMQPCEE

SEQ ID NO: 49737 - protein, 90 aa, Zea Mays
MDAEPPLFSAFLYSPCVAVRVRCLYKCSRGVPCHGQLFWRRRMFDVLCIPSTTPSTIGEDSFLLCHFIDRRLFANMNCVYVPMCVEERNP

SEQ ID NO: 49738 - protein, 113 aa, Zea Mays
MWVSVHATARKKGCWMRRPPCPGRCCLCLIVCAPKRTSYPAWPCLPLWNLAAGATAKAKGRKREDFSKGQQQNMQAELRGVLSEEDAAAAGAVNGFMMAVPVPAGPHLSSPCQ

SEQ ID NO: 49739 - protein, 438 aa, Zea Mays
MANVMDSEVVQVVESSFVVPSEPTPSEGLWLSPLDLILANRGHTPTVYLYSSSSNAVAAADGFFDVARLKEAMAKTLVAFYPLAGRLGVNNDGRAEITCTGEGALFVVAHADLTVGDIEDDFRPSPELRRLFVPRIEPASVVLAIQVTFLKSGGVVLGTALHHAAIDASSAFHFFQTWSALCKHGDRATVELPCHDRTLLRARSPPTVHPDALSRFHPKLTFSDPSGPLAFQVFAISKDQVTSLKRLCGGTSTFCAIGALVWQCALVARRLPPDSEARLTFPANVRRRVRPPLPNRYFGNALIRLGVTGAVQDIASEALVSVAGRIKDTIDRMDDELVRSAVDYCEMAEMDSRPVKGTLLETELMLISWLGMPMYDTDFGWGKPAVMSRAESIRGGFVYIIDDGPTNGVGSGSGGVRVLMCMEAANMKELERLLYAKL

SEQ ID NO: 49740 - protein, 208 aa, Zea Mays
MQVYLKNAGSIFCLFGKLTPFNTSVCSIWTVDLAYLLNKFSVSFSFCTVTLGANPQYSAESFYREQLQEDIDRVDELFGKALDAGISIQCRSITAYDIAFLLLSGHCIAIALVDKSKLNLPCMSDHDVQQHNDEPDYMGHYVVICGYDADDCEFEIRDPASSRKRERVTMKSLDEARKSFGTDEDILLVSLTGKSGMKLSRKLLACSM

SEQ ID NO: 49741 - protein, 342 aa, Zea Mays
MLSRVKNYLQDQLLGFALVPLPEVVAADGGTLARDFPLTTSDLFQTPSGFLQLELSYIGVVPEVVPISPTPKPALADPEEPENNAAGNGKEYEKIEFPDLNLVEENQIMVSEYTRLPCAAVETQSSDSLLTSEHGDGATTLGHDAGVRLVESFSTDNSTADSVSTFRSDTPVSSVSTTESPAAAAFPATPQSNFSSEPSGNAHSSADRKEKPALETTDAEVASSRTVQEVPAANSPGAASEAAVDKPVISVNIEQEVKVDGNQIMDMYMKSMQQFTDSLAKMKLPALDLDIDNGSSGRSSPAAATTDAESTGADSIAVKKPAAAGKQDKPSPKVFYGSRAFF

SEQ ID NO: 49742 - protein, 191 aa, Zea Mays
MAGAEVGEDKYRSFIHGEGERDTVWRYGAPPNYDVVNKLFEEERTQVWPEGSLEEKVQRLLKSWEMELVHKARPEDQKTVNSEKYSASTNGMSALTRAEVMAIGGYNNFLRTKLPPEHRIYDPDSETVESAMATFTTAFPRGFAIEVLDVYSGPPRIAFKFRHWGYMEGPFKGHPPHGQRVELFGVCIFHT

SEQ ID NO: 49743 - protein, 394 aa, Zea Mays
MSKSSTTSSRSRSGTGTFPSPGTPSCNRHCAGSMQYSKGWSSERVPLGTGRNRRYGGSGVVLPFNNGRKLPSKWEDAEKWILSPVSCDGLGRMSAPAPHHRRPKSKSGPLGHPAGIPGAYAAVSPLVPCFDGVLAAANFAAHSPFSAGVLIPEHGRIGDFSSGRDRCGDDGSSRSYSAEKESYILRSASIHAWTETLMEASAFANISEETVQDDKLQRQTEATSMISSPIIKKDIGTQMSPEDSISSPKVDDQVTVTRWSKRHVTRGSDKRSTNIIEWRKKTTETRTPSFDEKERERCMSQCKREEAKITAWENLQKAKAEAAIRKLEMKLEKKRSSSMDKILGKLRSAQKKAQDMRSVVSSSEGQCSVRATKKTSSSVKTGRPFSCCFTYRAC

SEQ ID NO: 49744 - protein, 549 aa, Zea Mays
MLRPEPALGFPAAGPARAPERRRKKQPPTRRRRPAGATTVGLGPRGAADPDPAHSSALLPLTSGGSGSGFASRGTVAPDEEEGRDGASSAESQEVAEAANDSFSYSLRECQKQRRLKSERSALVRPPASHKLNNAGGIELLVLSPRCLIGGNPGGMSKSSTTSSRSRSGTGTFPSPGTPSCNRHCAGSMQYSKGWSSERVPLGTGRNRRYGGSGVVLPFNNGRKLPSKWEDAEKWILSPVSCDGLGRMSAPAPHHRRPKSKSGPLGHPAGIPGAYAAVSPLVPCFDGVLAAANFAAHSPFSAGVLIPEHGRIGDFSSGRDRCGDDGSSRSYSAEKESYILRSASIHAWTETLMEASAFANISEETVQDDKLQRQTEATSMISSPIIKKDIGTQMSPEDSISSPKVDDQVTVTRWSKRHVTRGSDKRSTNIIEWRKKTTETRTPSFDEKERERCMSQCKREEAKITAWENLQKAKAEAAIRKLEMKLEKKRSSSMDKILGKLRSAQKKAQDMRSVVSSSEGQCSVRATKKTSSSVKTGRPFSCCFTYRAC

SEQ ID NO: 49745 - protein, 540 aa, Zea Mays
MAGGGTGIRKYMGALKDTTTVSIAKVNSDYKELDIAIVKATNHVENPTKEKYVRDIFYHLSPGRPRADVAYCIRALGRRLSKTRNWAVAMKTLIVIHRALREVDPAFREELISYGRSSSHMLYLSYFKDDSSAEAWDYSAWVRNYALYLEEKLESFRVLNYDVEKDPLLPALQQLLFRLLGCQPQGASSYNVIIQHALSMVALESVRIQTAINDGILNLVDKFFEMQRDDAIRALGMYRRAIEQAEQLSEFYEVCKSIHIGRGERFLKIEQPPASFLATMEEYVSNAPLASTVQRNQAVLAIEDSKKSEVEESQPTLPPPHSPAQESGPEPVQQVPPAADPTDLLGINEPTPATSEIDQKNAGALAMVPQDNAPKAPASTTSSGSVETSWELALVTAPSSNGTAVTPSKLAGGLDLLTLDSLYNEAHRRAQQNASYNPWETNPASGPVMQQQMYDPFYASNHPVAAARNVQMAAMEQQQQQQHAFVLQQQQQQQMIVMMMAQQQQQQASSNPLYTAAAAHTYGAGVQLHAGNAYSGAGMM

SEQ ID NO: 49746 - protein, 252 aa, Zea Mays
MAPKRGGRAPVPAKKKTDKVTNPLFEKRPKQFGIGGALPPKKDLHRFVKWPKVVRIQRQRRILKQRLKVPPALNQFTRTLDKNLATNLFKMLLKYRPEDKAAKKERLLKRAQAENEGKTVESKKPIVVKYGLNHVTYLIEQNKAQLVVIAHDVDPIELVVWLPALCRKMEVPYCIVKGKARLGSIVHKKTASVLCLTTVKNEDKLEFSKILEAIKFDEVRKKWGGGIMGSKSQAKTKAREKLLAKEAAQRMT

SEQ ID NO: 49747 - protein, 61 aa, Zea Mays
MPCLSTAFLNFFFFSLLEGPYSFFEPLSLSLSKVYTNTFFILCLSLSDLRRRSRKPWEEMA

SEQ ID NO: 49748 - protein, 959 aa, Zea Mays
MVFRIMFNTAFIRSNILMLNRDHIDMLWNAKDQFPKDFRFEVIFSDMDIVTSHVTTEPVIHQEKQGLGVEEFAKVLDIFNHLDWLDGKKDTVPHTTQLKISAITDEPETFFDTREELESESSSGEIYSSSVVLKVGNELDMLVSTKPRHIPQDSSSANVQSKSQTTVQSPSRMRRTALLSPSKVKVSKTSASPMELSSSTIMPQQSSSPVQPRRVMSDSAVKFLSEITESASGEMSCSQTPVEHEPSSLMENNPAPTASLLPLCTPPPLPPPPPTVSLLPVPTKLPINTSTSTINISLRATVRSSPPSEPSVPPKDLLRTEELGKSQEPSYETRGKLQTDSTTGSNDFILSPAASSSLDEELSNARASLPTDLPAVPQNPDTRPFAIQATRSETMPPPPPPPPPPPSKSGMTLFPLTHGEEVKITIEKVVPHQPPHPPAAAASFSSSNPDAVSVILAPQKRARSPPPPPLPPPPGLAKPPFSSLRSRSSPEVSLSQPQFLDNKDSATMEYPDTPSLTPTFSQSVTRVQTLHVPPPPPPPSRTPPVPPPPPRTPPVPPPPPPSSRTPPVPSPPPGTPHVPPPPPHSSQTPPTPPPPPPSSQSFPSLSRRNRVAAPHPPPPPAPLSSRVTSAPSVPPSPPLPPPKLAVANNTSQKSPTIRPPPPPPGPLHKLTKGSVANSNPPPHPAFSFGAKDRSTARSKSPRSLRANQASKRTPLKPLHWVKVSRATQGSLWAETQKSDEISRTPEIDISELESLFSVTMPNMEAKRQRQQQHPSVATKQEKVHLIELQRAKNCEIMLRNIKMPLPDLMGLVVALDDSVVDGDQVDYLIKFCPTKEEMELLKSYTGKKENLGNCEQFFMEMMKVPRVESKLRILSFKIKFVTQVADLKSNLNTINLVAEEVRSSVKLKRVMQTILSLGNALNQGTARGAAVGFRLDSLLKLSDIRARNNRMTLMHYLCK

SEQ ID NO: 49749 - protein, 1108 aa, Zea Mays
MVFRIMFNTAFIRSNILMLNRDHIDMLWNAKDQFPKDFRFEVIFSDMDIVTSHVTTEPVIHQEKQGLGVEEFAKVLDIFNHLDWLDGKKDTVPHTTQLKISAITDEPETFFDTREELESESSSGEIYSSSVVLKVGNELDMLVSTKPRHIPQDSSSANVQSKSQTTVQSPSRMRRTALLSPSKVKVSKTSASPMELSSSTIMPQQSSSPVQPRRVMSDSAVKFLSEITESASGEMSCSQTPVEHEPSSLMENNPAPTASLLPLCTPPPLPPPPPTVSLLPVPTKLPINTSTSTINISLRATVRSSPPSEPSVPPKDLLRTEELGKSQEPSYETRGKLQTDSTTGSNDFILSPAASSSLDEELSNARASLPTDLPAVPQNPDTRPFAIQATRSETMPPPPPPPPPPPSKSGMTLFPLTHGEEVKITIEKVVPHQPPHPPAAAASFSSSNPDAVSVILAPQKRARSPPPPPLPPPPGLAKPPFSSLRSRSSPEVSLSQPQFLDNKDSATMEYPDTPSLTPTFSQSVTRVQTLHVPPPPPPPSRTPPVPPPPPRTPPVPPPPPPSSRTPPVPSPPPGTPHVPPPPPHSSQTPPTPPPPPPSSQSFPSLSRRNRVAAPHPPPPPAPLSSRVTSAPSVPPSPPLPPPKLAVANNTSQKSPTIRPPPPPPGPLHKLTKGSVANSNPPPHPAFSFGAKDRSTARSKSPRSLRANQASKRTPLKPLHWVKVSRATQGSLWAETQKSDEISRTPEIDISELESLFSVTMPNMEAKRQRQQQHPSVATKQEKVHLIELQRAKNCEIMLRNIKMPLPDLMGLVVALDDSVVDGDQVDYLIKFCPTKEEMELLKFFMEMMKVPRVESKLRILSFKIKFVTQVADLKSNLNTINLVAEEVRSSVKLKRVMQTILSLGNALNQGTARAVGFRLDSLLKLSDIRARNNRMTLMHYLCKVLSDKLPEVLDFSRDLANLEPASKIQLKELAEEMQAITKGLEKVEQELATAEKDPSETEIFYRKLNLFLDDAQAEGRSLASLYSSAGKSADSLAHYFGEDPVRCPFEQVVSTLLSFTKTFERAHAENVKQMELEKKRAQAEAEKEKAKLTAHKKRESLELGISGR

SEQ ID NO: 49750 - protein, 363 aa, Zea Mays
MIFPPAFLQDSSSWNDNQQQQHHHQQQGHGHLQIAVSGSGDANHELLQQPIMGGALPDGGGGGGGGGQVGGPAKPMSMAERARLARIPLPEPGLKCPRCDSTNTKFCYFNNYSLTQPRHFCRACRRYWTRGGALRNVPVGGGYRRHAKRAKPKQQQQQHAAAGTGAATGAMQQPPAGSMASSAAACTATTTMTTNALHAGPGGGMLPMLPPLLRLADFDAMSLGSSFSGISSMGKPGSIGAACYPHSVGGLEQWRVQQMQSFPFLHAMDQGPLGPPLAMAMAAPGGMFQLGLDTTSDNSRGGGGGGEDGSSAGEALHMMQATKRESYPAAPRAMYGDQQHNHLAAAGGYTSYSTNAAAGNHLL

SEQ ID NO: 49751 - protein, 63 aa, Zea Mays
MEWCASKGNIPYFETSAKEDYNVDNAFLTVAKLALEHERDQDIYFQSVADPVPETEQRSGCAC

SEQ ID NO: 49752 - protein, 226 aa, Zea Mays
MPGPGAHLLYALSGGAALSRLAGPDRRFGPHHCAVYAANAFLGPDLGSFAEWLCSFLPSASAAGDLAMAAVHHPFYYPLLLGLPLAWAYAWLSRRLLRAGVLDSPSGVPLRKRQCFLLISAGSLSHFFLDHLFEENGHSTMYTWILSTGWWKGRAPINPDAVLVVGLLCTCLMGGYVYINRVNHGRSAAEKSKPIFLSHSDDSHPVLYVVCQSDIPAATPSTCHSA

SEQ ID NO: 49753 - protein, 302 aa, Zea Mays
MSIKEIYTATENLSPSNVIGQGIAGKVYRGVLTNGWPVAVKHIVKNEHAETFLREVKSLSHVRHPNLVSLRGYCDGQEECFLVYELCINGNLSEWLFGKDKNLPWIQRLQIALGSACGLWFLHIYPEGCIVHRDIKPTNILLGVDMEPKLSDFGLSRVIDLGVSHVSSEVRGTFGYVDPEYRHNHRVNAAGDVYSFGMVLLQLLSGRRAINIMNTAMPMSLDKMASTLIQDGNVSEFADPRLNGEYSTEAFDLSLKLALLCTGHKKQRPSMEQVVSRLEKALEISMRDDAKHNNISIVESLA

SEQ ID NO: 49754 - protein, 764 aa, Zea Mays
MKGRVVKLREAHKAGSPALCSASWGPSGQHVVTASAADTAVLIHDAATVLAGGRGSGSSALATIRLHKDGVTALAVAPGPSGSLASGSIDHSVKFYTFPEGQFQSNVARFTLPIRSLAFNKKGTLLAAAGEDDGIKLISTIDNTISKVLKGHKGSVTGLDFDPRNDYLASVDSFGTVIYWDLCIGAEARTLTRIAPTFRSDNSVRNVLCWSPDGQTLAVPGLRNNVVLYDRDTGEEVCTLYGDHEQPVSSLCWSPNGRYLASAGLDRQVLIWDVKSRQDIERQKFDERICSLAWKPNGNALLLIDVMGRVGIWESVVPSTMKSPNEGIPDLNSNMVPLFDDNDDEPDTSVGLEDDVDDTFSDSITFNHKRPRRKSTFDGDSENEDLIHQLEYTKRMKDKQNKNEDAGKARGDSATPVTLVTSTMQAAFQPGSTPPQPGMRNFLAYNMLGSITTIQNEGYSHVEVDFHDTGRGPRVPSMTDYFGFTMAAMNGSGSVFANPCKGDKNMSTLMYRPFGSWAGNSEWSMRFEGEEVKALALGAGWVAAVTSLNFLRIFTEGGLQMHILSVSGPVVTAAGYEDQLAIVSHASDCLPSGDQVLDVKVFNISEGTQSMSGRLVLTPLSRLSWFGFSENGQLSSYDSKGILRVFSNQFGGSWLPLFSSVKARKSEDESHWVVGLDANNIFCILCKTPQSYPQVMPKPVLSILELSFPLASSDLGANSLENEFLMRKLQLSQIQNKMEEMAALGLDTTSYDDESFNMEAGLDR

SEQ ID NO: 49755 - protein, 172 aa, Zea Mays
MRRKKDEEREAQERQLEEEARARKAKEEAAAALEFEKWKGAFSVDAEGTTESETQDDGQGLLHNFVEYIKKQKCVPLEDLAAEFRMRTQDCINRIVTLESMDRLSGVMDDRGKFIYISTEEMKAVAEYIRKQGRVSISHLANNSNQFIDLEPKAQYEVESQQDDSAEAGTEA

SEQ ID NO: 49756 - protein, 85 aa, Zea Mays
MFYLEVRPHFLEVVFGHVQTISTYVEKVFIQLVLSLSYNICHHSGLDPILYGHKSNARYTILQHLYIEHVVFFVGQHFAPYNIAS

SEQ ID NO: 49757 - protein, 116 aa, Zea Mays
MKMEVELRAVHEMRAELAQVRMDIQNLGAMRQELMGQVQGLTQDLAQSAEDLHKVSALQAETQEIKHETQHLRSGIELEKKGYAQSYEQGQDMQIFLFISVASFYRTRRRTAHLIY

SEQ ID NO: 49758 - protein, 88 aa, Zea Mays
MRADFHPVWRNFELRLVTRRRGHGPLCLQAIKVILEAMGTLRPIMLQTLLTLGMALIKQVLPLIMVPSMELVQRMVLGCLRLAKGTRT

SEQ ID NO: 49759 - protein, 159 aa, Zea Mays
MVVRRLGGAGRALLTLPNIRRRASNSWAAVCDTFFSTKQVFENHRIVFTVGTSIASVLTAWAGYSLRHVQQSRIEQRLESIESSVRGRLARWCLVRSKGLEKRATKAGGDGSHEVARQMALAALQQAQEQQVSLQEQARRRPSKHRGPLDVKQRGLCGR

SEQ ID NO: 49760 - protein, 190 aa, Zea Mays
MASSLARLGAALPRARPRAATRTLPPPRWDAAALGASRRAAPNVCRCLVHSDVKVAPTSDFKDSSKSETWRIKMLYDGDCPLCMREVNMLRERNKSYGAIKFVDISSKDYSPDDNQGLDYETAFRKLYEEVGLGWVYAVTKYEPVASMANAVYGLWAKYRMQITGRPPLEEIMASRRAAGECKDDKVCKM

SEQ ID NO: 49761 - protein, 70 aa, Zea Mays
MHLTLEFGGGLELLLENSTKVHKVEVTTPKDGQGKVTMKFLLSWVKENLIKERPEMFLKADSGGLGFLSL

SEQ ID NO: 49762 - protein, 415 aa, Zea Mays
MKLRAKGIGLLLLLVLLALCSTIEVGEARRGKHWRSSRSSPGSSQLKKGKGKKSSSHRQYGANRPGPKPPVSSTPSSGAGKGNHQNPYQPSPSPSPNAPDIPPMPSPANGSRHSTPEPPAPSCGKGQQQPSQPPPATSQGAVFNVVDFGAKGDGVTDDTKAFEGAWAAACKKGACTVLVPPELEFLVGPISFSGPYCKSNIVFQLEGTILAPTSAKSWGSGLLQWLEFTKLNGMVIQGNGIINGRGQQWWTYSDTEDEDDDDTYDVEFERMPQIKPTALRFYGSFNVVVAGITIVNSSQCHLKFDNCQGVMVHDLTISSPENSLNTDGIHLQNSKDVSIHHTNLACGDDCISIQTGCSNINIHNVNCGPGHGISIGGLGRDNTKACVSNVTVRDVNMFRTMNGVRIKTWQVSLRT

SEQ ID NO: 49763 - protein, 826 aa, Zea Mays
MACHLSPLFNLRLLLLLGAVLGNAVLVRAGGAEASDRAEPDPYSILTWHDYSPPSPPLPPPDPASSTATCEGDLHGKGDFRTHCEVFEEVELGDDIYITGNGSLVLLSGASLTCEKVGCVISANLSGEVHLSRGVRVRAGRVSLVATNITVADTVVVNTTALAGAPPDRTSGVPTGTHGDGGGHGGRGASCFVKEGQTQEDSWGGDAYAWSDLEHPWSYGSKGGSTSVEKDYGGAGGGIVWLFADDLVMNGTVLAAGGDSNEKGGGGSGGSIFIRAASMYGGGKISASGGDGLAGGGGGRVSINVFSRHDDTQIFVHGGRSSGCPDNAGAAGTLYEAVPKSLIVSNNNLSTQTDTLLLEFPNQPLWTNVFVRNRAKVAVPLLWSRVQVQGQLSLLSGAILTFGLTGYPYSEFELMAEELLMSDSIIKVFGALRMSVKMLLMWNSRMEIDGGGDSIVATSLLDASNLIVLKESSVIHSNANLGVRGQGVLNLSGDGDTIEAQRLILSLFYSIQVGPGSVLRGPLVNRSSDDVAPKLNCEADSCPVEIIHPPEDCNLNSSLSFTLQVCRVEDIDVWGVVQGTVIHFNRARSVTVHTSGTISATGFGCRSGVGQGKMLRSGVCGGGGHGGKGGNGFYKGDLAEGGAIYGNADLPCELGSGSGNDSTELSTAGGGIIVMGSWDYSLPSLALYGSVESNGGSYASGSVGGPGGGSGGTILLFVHTLSLAESSVLSSVGGFGSTGSGGGGGGRIHFHWSNIPTGDEYVPVAAVKGSILTSGGVSKGLGYSGGNGTVTGKACPKGLYGTFCKDVNRAKGRFFFQAFWVKLEGF

SEQ ID NO: 49764 - protein, 205 aa, Zea Mays
MEGTHFTGNDSQKLDKDVQHKRIKKKVAKVTSALYGWSHEVYGHVMFMAMVPKFSEESKELELEPEILPDITRCMSTSGKRDDAPSAKRLKPKLQEPKALQVQDLSNTVKGSPSLCSHEAVKNPVKIFTVEETKKCHESANDVSEGTHFTGNDRQKLDKDVQGDKTQLVEDSPTDDELDDYPFLDNSPVKFELKDESVIPDIGAI

SEQ ID NO: 49765 - protein, 134 aa, Zea Mays
MVIGPLLQPTLNTSAEAILKLINGSSSTYPNFCFGWVNVKDVALAHILAYEVPSSNGRYCMVERVVHYSELVNIIRNMYPTLPLPDKCADDKPFVPPYQVSKEKIKSIGIELIPLETSVKETIESLKEKGFASF

SEQ ID NO: 49766 - protein, 683 aa, Zea Mays
MARLGRAGCRSGPARAFFSGIPEDTLRNFMSNVLPAVLILEFLSGTNLIVQTFALEVVAPAMPPFQVQHTRHLATAAPAHVDADPPDAASNSSAAPLGLVQPPVSPHSGCCAPNMVQKRGTRDCHCVYPVRIELFLRNVSLTSNWSNKFLQELASQLNLRVNQFEIVNFYVVGASGLNITMDIAPYTGISFAADQVKAMNYSLTLHTVRIDPVLVGDYNLLNLTWFRSLAPAPAPAFTMAPRASPSTASTFPRQSEGPSKNRHASLITVVIICVGSLIGVLLIVLTICFCTFRKGKKRVPHVETPKQRTADAVSTVESLPRPTSTRFLSYEELKVATNNFEPSSVLGEGGFGRVFKGVLGDGTAVAIKKLTNGGHQGDKEFLVEVEMLSRLHHRNLVKLIGYYSSRESSQNLLCYELVPNGSLEAWLHGTQGASRPLDWDARMRIALDAARGLAYLHEDSQPCVIHRDFKASNILLENDFHAKVSDFGLAKQAPEGRTNYLSTRVMGTFGYVAPEYAMTGHLLVKSDVYSYGVVLLELLTGRRPVDMSQPSGQENLVTWARPILRDQDRLGELADPRLGGQYPKDDFVRVCTIAAACVSPEANQRPTMGEVVQSLKMVQRSVEFQESVPTPPARPNVRQSSTTYESDGTSSMFSSGPFSGLSPFETETIPRTAVFSEDLHEGR

SEQ ID NO: 49767 - protein, 126 aa, Zea Mays
MQPNEVADKAIVIMQHAAKQVLGTCKEKLHLGKPLSVFEVKELKEALEAIAEALDQDSLLCQVALDAGAPSLVEDHWDDEGGEAVVAGLPWPESPRPEDFMSLEKHIETYWSVEYDSDNMLPSLSD

SEQ ID NO: 49768 - protein, 472 aa, Zea Mays
MKVSPSQQPQGINVCDHPEKNPCTYIKYCIDLEGVVSCACPEGMSGDGRKNGRGCCFSCQKHFPLDTVLGVSLVLMVTTTTAASCYCWAVKKRELGRKRAELFRKNGGLLLQQRFSTITSQGEDQYSSKIFSAEELKAATDNYSESRILGRGGQGTVYKGILPDQTVVAIKKSKVFDESQVEQFVNEIAILSQIDHPNVVKLLGCCLETQVPLLVYEFISNGTLFQHIHNRNATRPLTWEDCLRIAAETADALAYLHSASSIPIIHRDIKSSNILLDGNFVAKIADFGASRSVPFDQTHITTLIQGTIGYLDPEYFQSSQLTEKSDVYSFGVVLAELLTRQKPISAARPEDSCNLAMHLVVLFNKGRLLQEIEPHILAEAGEDQCYAVAELSVRCLNVKGEERPAMVVVASVLQELRRSFTIDQAVGIKDESIQENSEQEEKHLHESRSIPSLQSSEVSTQCSMEAKMSSFC

SEQ ID NO: 49769 - protein, 538 aa, Zea Mays
MPPPAGLPPWPTPSTTRLATPTPTRPPPRTTHVRPPPPPYTRVRLPPPPPATTPLPPRLEPAAPKPAAVATLLPPSTASAASSSSTCLDCVHFGKCSGCTHEVDLDKPPVLQEVANFFKGHGVGDFTFSRGRLSQWRCRAKLAVRGTPENPLIGLYQEGTHAVIDIPECRAHHPSINAAVKLLRQGITELSIQPFDEDAGAGELRYVQMAVTTYNTSIPVDKRYEQGKVQVSLVWNSRDERSQNAEKLTSIIEYLWTNGGPKSSVHLIHSIWANFQTSTSNIIFGHKWRHLKGERDMWERYGGVDISLDPCSFGQANTLLNKYVPRSSTVVDLYSGAGVIGLSVAASRKCRSVKCIEINKQSKMSFETSASRLPANLGCTITWHNTDASVEPSHWLEGSSVVIVDPPRKGLHPSVISALQKVALSERKAYKAKSSLAKVKDEKRPWILRAREAAVHVDNTTTEEGNETWPETLIYISCGWESFKRDCKSLISSKAWQLENAHAFNFFPGTDSIEILAIFKRESEAGQKKKKKAKKKAK

SEQ ID NO: 49770 - protein, 429 aa, Zea Mays
MLGICCRHCCCPHHTYKYSRTAYALSLILLILFTCAAIAGCAMLYDGQGKFHKSTTTTLKFVVSQANYTVDNLRNLSDSLSAAKKVDIAQSFLLPPNVQNEINEIQGKLNSSATDLAIKTTDNAAKIKKVLNRVRLALVVIAAVMLLLAFVGFLLSIFGLEFLVSVLVIIGWILVTGTFILCGVFLLLHNVVSDTCVAMEEWVAHPTEHTALDEVIPCVEPATANESLYRSRQVTFELVNVVNQVITNVSNRNFPPQLTPLYYNQSGPLMPLLCNPFTPDLRDRNCSRGEVTLDNATQVWKKYECQSTTVSGGAEICATVGRVTPSIYGQMTAGVTVSQGLYQYGPFLIQLQDCTFVRDTFTTINQGYCPGLERYSKWVYVGLVMVSLAVMLSLIFWVIYARERRHRVYSKQHQPYPVEDKPAATVPGA

SEQ ID NO: 49771 - protein, 428 aa, Zea Mays
MQDVDLLYLVLYGACPLHATRELEDIEEDHFRLPPPHKVNPRAVKRRGPRKQPKVIDDYLEESSAVHALFFPDQMTAVDPTKGGNDSMYFYPGRVWLDTDGNTIQAHGGGIMYDHKTARFYWYGENKDGPTYQARPKGTQRVDIIGVSCYSSKDLWSWTHEGIVLRGEPSNVIHDLYKSKVLERPKVIYNDRTEKYIMWMHIDDANYTKASVGVAVSSSPTGPFTYLYSFRPHGCESRDMTVFKDDDGMAYLFYSSRDNTELHVSPLTEDYLQITAAMKRILIRRHREAPAVFKHQGTYYMITSGCSGWAPNRALAHAAESIMGPWETLGNPCVGGNRFYRLTTFLSQSTFVLPLPGLSGAFIFMADRWSPSNLRDSRYVWLPLFVGGLADEPLDYSFGFPLWSRVSIYWHKKWRLPEDWKIANTANT

SEQ ID NO: 49772 - protein, 295 aa, Zea Mays
MADAAADRERDKGKDDRRRWAARCGFAVLGIMSTLLVYGVLQEKIMRVPYGADKEFFRYSLFLVFCNRITTSMVSAMVLLASKKSLDPVAPLHKYGVVSISNILTTTCQYEALKYVSFPVQTLAKCAKMIPVMIWGTIIMRKKYGGKDYFFAVIVTLGCALFILYPAMMDVSPFNKGRESTIWGVSLMFGYLGFDGFTSTFQDKLFKGYDMEIHNQIFYTTVCSCLLSLSGLILQNHLIPAVDFMFHHPDCFSDVLILSSVTGDFLHRKGLSDALPIKVFKEHETENLLELLNFS

SEQ ID NO: 49773 - protein, 208 aa, Zea Mays
MFDYTTGGDDSGTEEEQAAFMKELERFHREKMLEFKPPKFYGEGLNCLKLWRQVTGLGGYDQVTSCKLWRQVGESFKPPKTCTTVSWTFRNFYEKALLEYEKHKIETGEFQVASSALPDRFGSESQVGGSHVSGSGRARRESATRAMQGWHSQRLLGNGEIADPIIKDKGHIVLKKDKTPKSSGSAKRKRTLSLEDDRVIPYKSDQLQ

SEQ ID NO: 49774 - protein, 520 aa, Zea Mays
MDEPAGSGLLKWNRELSLRLRMEGAGKDGNPLRNYRIGKTLGIGSFGKVKIAEHISTGHKVAIKILNRRKIRGMEMEEKVKREIKILRLFMHPHIIRLYEVIDTPADIYVVMEYVKCGELFDYIVEKGRLQEEEARRFFQQIISGVEYCHRNMVVHRDLKPENLLLDSKCNVKIADFGLSNVMRDGHFLKTSCGSPNYAAPEVISGKLYAGPEVDVWSCGVILYALLCGTLPFDDENIPNLFKKIKGGIYTLPSHLSGAARDLIPRMLVVDPMKRITIREIREHDWFKILLPRYLTVPPPDSAQQVKKVDEETLREVLGMGYDKNLLVESIQKRLQNEATVAYYLLLDNRLRTTSGYLGAECQEAMDSSFSNIASYETPSSARGNRQQIFMESPVGLRPHLPAERKWALGLQSRAHPKEIMSEVLKALQELNVYWKKIGHYNMKCRWSPGFPAQIHNNHNFSAGSIETDSLSERLSLIKFEIQLYKTRDEKYLLDLQRVSGPQLLFLDLCAAFLTQLRVL

SEQ ID NO: 49775 - protein, 369 aa, Zea Mays
MATMFNNTKYVVGMSLRNELRGPKQNVSLWYRYMQLGAEAVHAANPNVLVILSGLDFDNTLSFLFKEKVRLSFSGKLVYEQHWYGFSDGGNWETQNQNDVCGMVVDFIWAKGLFLLQHGWPLFFSEFGFDMSGTHIGDNRYLTCFLSVAAEMDLDWAIWALQGSYYIREGILAYDESYGLLTWDWCTARNPSFIKRINSLQSAFQGPGLPNTQQPYYIIFHPQSGLCVLARSSKLLELGPCDESNAWNYTSAYELVVKSTGQCLQAQSVGKNAKLGTDCSKPSSKWHLISDSKMHVSAELAKNGTRVCLEASPDGAIRTNQCKCLSVDPTCDPESQWFKVILSSRDIPGGDSILQLPSLGPWPPTSLSS

SEQ ID NO: 49776 - protein, 634 aa, Zea Mays
MEASSSLRFQVSRFSSFKIWLCLFLVLVLQNCSPALSDSPYLVGMGSYDITGPAADVNMMGYANAEQIASGIHFRLKARAFIVAEPNGKRVVFVNLDACMASQLVTIKVLERLKARYGDLYNENNVAISGIHTHAGPGGYLQYVVYIVTSLGFVRQSFDVIVNGIEQCIVEAHNNLHPGKIYVNKGDLLDASVNRSPSAYLNNPAEERGKYKYNVDKEMTLIKFVDDESGPIGSFNWFATHGTSMSRTNSLISGDNKGAAARFMEDWAEQNGIPKQAAHVNHDGLESSHMTSRLPRRVSPIIPEPNEITDDLVQLASSYEASGGRRLSSSSITKRIRSTQQNRPKFVSAFCQSNCGDVSPNVLGTFCIDTGLPCDFNHSTCNGKNELCYGRGPGYPDEFESTHIIGNRQFQKAVDLFSSASEEIQGKIDYRHTYLDFSKLEVNVRTSTGSQQVVKTCPAAMGFAFAAGTTDGPGAFDFKQGDVKGNPFWRLVRNLLKTPGKEQVECQAPKPILLDTGEMKEPYDWAPAILPIQIIRIGQLAILCVPGEFTTMAGRRLRDAVKAVLTSDNSGEFNNIHVVLAGLTNTYSQYITTFEEYEIQRYETPGCIIASCFNRRGPLIFSVTKGQFYIFFIF

SEQ ID NO: 49777 - protein, 240 aa, Zea Mays
MASFNPAGASAANHNPNKSFEVTPAPGDSVSSLSFSPKANHLVATSWDNQVRCWEVMAGGACQAKASISHDQPVLCSAWKDDGLTVFSGGCDKQVKMWPLLSGAQPTVFSGHEAPIKELAWVPQMNLLVSGSWDKTLRYWDIRQPQPVHVQQLPERCYALSLCYPLMVVGTADRNVIVFNLQNPQAEFKRITSPLKLQTRCLAAFPDQQDWVYRRTSWCSSCGRVSARKKLYIQVSPRWQ

SEQ ID NO: 49778 - protein, 295 aa, Zea Mays
MEERYEALKELGAGNFGVARLVRDKRTKELVAVKYIERGKKIDENVQREIINHQSLRHPNIVRFKEVCLTPTHLAIVMEYAAGGELFEKICSAGRFSEDESRYFFQQLISGVSYCHSMEICHRDLKLENTLLDGSPTPRVKICDFGYSKSALLHSKPKSTVGTPAYIAPEVLSRKEYDGKVADVWSCGVTLYVMLVGSYPFEDPEDPRNFRKTISRILGVQYSIPDYVRVSSDCRRLLSQIFVADPSKDHDPGDKASPVVLEEPPEGDLGEGEGQLQGRGCRRAGAGRGRDHADC

SEQ ID NO: 49779 - protein, 609 aa, Zea Mays
MNQDNYLEESLKMRNLLQEFLTEHGVRRPSILGVREHIFTGSVSSLAWFMSNQEHSFVTIGQRLLANPLKVRFHYGHPDVFDRLFHLTTGGVSKASKSINLSEDIFAGYNSTLRGGNVTHHEYVQVGKGRDVGLNQISKFEAKIANGNGEQTLSRDIYRLGHRFDFFRMLSCYFTTVGFYFSTLLTVVTVYVFLYGRLYLALSGLEEGLSQGRLIHNHPLQIALASQSLVQLGFLMALPMMMEIGLERGFGQALSDLIMMNLQLATVFFTFSLGTKTHYYGRMLLHGGAQYRGTGRGFVVFHAKFAENYRLYSRSHFVKGIELMILLIVYQLFGQSYRSTIAYIFITFSMWLLVLTWLFAPFLFNPSGFEWAKIVDDWSDWNKWISNRGGIGVSPDKSWESWWEVEQDHLKYSGTIGRFVEIILAIRFFIYQYGLVYHLHVTHNKSILVYLISWLVIVAVLLVMKTVSVGRRTFSADFQLFFRLIKFLIFVAFIAILIVLIVLLHMTFRDIFVCFLAFLPTGWGILLIAQACKPLARHVGLWGSVRALARAYEIIMGVLLFSPVAILAWFPFVSEFQTRMLFNQAFSRGLQISRILGGQKKERSARNKD

SEQ ID NO: 49780 - protein, 91 aa, Zea Mays
MKKFQVDRGAIKFVLSGANIMCPGLTSPGGALDDEVEEETPVAIMAEGKQHALAIGYTKMSAKDIRTINKGIGVDNMHYLNDGLWKMERLE

SEQ ID NO: 49781 - protein, 188 aa, Zea Mays
MAENPQLFGNGMPVPFYSEIAPGGHVKTKGTIYLSNIRMVFVANKHVGNFFAFDMPLLFVHGQKFNQPIFHCNNISGFVEPVVPDNQNRALYSTHTFKVLFKDGGCGTFVPLFLNLTASVRRYNQFETQSAASMAPRVDPLQAVQTPVDDMMRHAYVDPNDPTKIFLQQPAPESQLRRRNYHGPADAN

SEQ ID NO: 49782 - protein, 62 aa, Zea Mays
MFVRVRFHSRSMMCRQPFLFTALCMVRWARGLAFSETALLVAARDEGDAVGFVDVVSSVYAY

SEQ ID NO: 49783 - protein, 244 aa, Zea Mays
MADLWSCGVILFVLLAGYLPFEDSNLMTLYKKISNAEYTFPPWTSFPAKRLLTRILDPNPMTRITIPEILEDEWFKKGYKRPEFDEKYDTPLDDVDAVFNDSEEHHVTEKKEEEPVALNAFELISRSAGLNLGNLFDSEQEFKRETRFTSKCPPKEIIRKIEEAAKPLGFGVQKKNYKLRLEKVKAGRKGNLNVATEVAPSLHMVQVRKAKGDTLEFQKFYKNLSKTLKDVVWKSEDLQMRAAS

SEQ ID NO: 49784 - protein, 258 aa, Zea Mays
MSAAATKVKRRVGKYELGRTIGEGTFAKVRFAKNTETGEPVAVKILDKEKVLRHKMAEQIKREISTMKLIKHPNVVRIYEVMGSKTKVYIVLEYVTGGELFDTIANQGRMREGEARSYFQQLINAVDYCHSRGVYHRDLKPENLLLDSYGNLNVSDFGLSALSQQIKDDGLLHTTCGTPNYVAPEVLEDQGYDGAMADLWSCGVILFVLLAGYLPFEDSNLMTLYKKISNAEYTFPPWTSFPAKRLLTRILDPNPMTG

SEQ ID NO: 49785 - protein, 314 aa, Zea Mays
MAPEARGEAALVYRDALAPVEERVRDLLGRMTLREKAAQMAQIERTVATPRALTELGAGSVLNAGGSTPCEQASPADWAAMVDGFQRLAISSRLGVPILYGTDAIHGHNNVYGATVFPHNVGLGACRDGELARRIGEATALEVRATGIHWTFAPCVAVCRDPRWGRCYESYSEDPEIVRSLTTIVSGLQGQPPADHPHGYPFLASPRENVLACAKHFVGDGGTDKGVNEGNAICSYEDLEAIHMTPYPDCIAQGVATVMASYSKWNGEPLHSSRYLLTDVLKGKLGFKIGRALTGSVSHKSLEGLIIAIALHNQ

SEQ ID NO: 49786 - protein, 117 aa, Zea Mays
MAAGDDGSAVRRLYLSVYNWVSFFGWLQVLYHVTLALLGSGHQAVYAAVKLPLLFSQTAALAEILHSITGLVRSPISATLPQVGARIFVTWCIVWSFPETQSHVLVTSLVLSWSITE

SEQ ID NO: 49787 - protein, 95 aa, Zea Mays
MFQAVKATTLKPWAAASQGLRLPPCSASMAAGDDGSAVRRLYLSVYNWVSFFGWLQVLYHVTLALLGSGHQAVYAAVKLPLLFSQTAALAEVNWS

SEQ ID NO: 49788 - protein, 770 aa, Zea Mays
MGDYYAHPEHYTPVFHERIAPYASVIVNCMYWEKRFPPLLNMDQLQQLMETGCPLVGVCDITCDIGGSIEFINKSTSIERPFFRYDPSKNSYHDDMEGAGVVCLAVDILPTEFSKEASQHFGNILSRLVASLASVKQPAELPSYLRRACIAHAGRLTPLYEYIPRMRNTMIDLAPAKTNPLPDKKYSTLVSLSGHLFDKFLINEALDIIETAGGSFHLVRCEVGQSTDDMSYSELEVGADDTATLDKIIDSLTSLANEHGGDHDAGQEIELALKIGKVNEYETDVTIDKGGPKILILGAGRVCRPAAEFLASYPDICTYGVDDHDADQIHVIVASLYQKDAEETVDGIENTTATQLDVADIGSLSDLVSQVEVVISLLPASFHAAIAGVCIELKKHMVTASYVDESMSNLSQAAKDAGVTILCEMGLDPGIDHLMSMKMIDEAHARKGKIKAFTSYCGGLPSPAAANNPLAYKFSWNPAGALRSGKNPAVYKFLGETIHVDGHNLYESAKRLRLRELPAFALEHLPNRNSLIYGDLYGISKEASTIYRATLRYEGFSEIMVTLSKTGFFDAANHPLLQDTSRPTYKGFLDELLNNISTINTDLDIEASGGYDDDLIARLLKLGCCKNKEIAVKTVKTIKFLGLHEETQIPKGCSSPFDVICQRMEQRMAYGHNEQDMVLLHHEVEVEYPDGQPAEKHQATLLEFGKVENGRSTTAMALTVGIPAAIGALLLLKNKVQTKGVIRPLQPEIYVPALEILESSGIKLVEKVET

SEQ ID NO: 49789 - protein, 377 aa, Zea Mays
MNSPTRLIEQVLPFARETVDMVLDGLASMPMIISPSDLDEFSNFLKVMCQQARRWISDEGPIPSIFYSRESQHGDTWIWRFHIMSMYMLKRLDECLKTLEMDLPLSSESIGVMESQTIWAARSHILVMLTELDFIAAIYEDVGHNLQLVLLAHKAPLNALVRCSKRNERLHWLVKHKNLLCFEARRSLVFMMLPEGKDDFGELHEMLIDRSHLLDESFNYIAQAEQAELHGALFMEFKNEEATGPGVLREWFCLVCQALFSPKQVLFSPCPEDKRRFYLNETSAVDPLHLKYFTFAGRIIGLALMHKVQVGVVLDRTLFLHLAGRSITLEDISVADPVKYASCKKILEMDAAEIDNLYLTFSRGAHELANPFCGRIC

SEQ ID NO: 49790 - protein, 643 aa, Zea Mays
MGDARMRLQRSYRLWDHLSSNLHLYVHAKSASSKDDVKSTHSAARGLPVHSVTSSMQVNHEPEAETQKTVVTHKKRDWGHQKRDWGTIDRGQSEAVPLRSVVANVSHVDEKDFHKSHADEKAFHKSHSLRRTRSPDMHNHRKRSREADVQSTKRSSHPVVSAPRRLLQFAVRDAVRTVQPVTSSSESDSKRIRSVVSTLASDSTLDITHIRLQKTNSDLRVPGATAALRAAAEAAGDALKDSFSRSVFSRLGRMPTINSTEQSPYHREQDLKGKEYGNIDNIQAENQVEFDERNQHGGSDVYMRDQRTEEATGFIPNIDEYDQNSAVRSNGLGSRQSALPASGGKESLVLGYVRGASEIRSRRLIAQGPHAGSGPRPSEKTQNVSGNTNMQKLPIHVTGDAVAFDHQVPMEKVADARKSHVKTAQANDVSMMTDKSKDLIQPSSMLQAQKASGAAGSNTTGQPEGGPDSRTVFVSNVHFGSSKDALSRHFNKFGAVLKTHIVTDGVTGQSTGSAYIEFLHKESAEQALTLNGTSFMSRILKVVRKSSTEVTQLPVLPRASWGSPFASRLIRTAYPRPNYPGAIRGRLSLRGAARSLQWKRGVADSGDVGKPSPTAPGNQLVTPATRNFTYTRTEPKTNAGAMA

SEQ ID NO: 49791 - protein, 275 aa, Zea Mays
MSDTLRAKRELAQQTTPACSAAIQRSEATNPRNLQRRHRHCVMPVPPLLSPLRLPSPAPPLHRNGAPWRRPTQLRAALRVPPPLHLGLAAARGDGVRRFVGTLGSKRARAVGAIRVSAISGDGGGGAGGTGIAAAAAATVVFAVMNRVLYKLALVPMKNYPFFLAQFATFGYVLVYFSILFIRFRAGIVTREMLALPKPQFMLIGLLEALGAASGMAAAAMLPGPSIPVLSQSFLVWQLILSALILGRKYRANQILGCLLVTAGVILAVAGCVLE

SEQ ID NO: 49792 - protein, 201 aa, Zea Mays
MPVPPLLSPLRLPSPAPPLHRNGAPWRRPTQLRAALRVPPPLHLGLAAARGDGVRRFVGTLGSKRARAVGAIRVSAISGDGGGGAGGTGIAAAAAATVVFAVMNRVLYKLALVPMKNYPFFLAQFATFGYVLVYFSILFIRFRAGIVTREMLALPKPQFMLIGLLEALGAASGMAAAAMLPGPSIPVLSQVIHLHMPLGHF

SEQ ID NO: 49793 - protein, 83 aa, Zea Mays
MRLWRAERRYTWSLNLLMEVNSGRLGEDESRIYFHQLINAIDYCHSRGVYHRDLKPQNLLLDSNGALKVSNFGLSAFAPQTNV

SEQ ID NO: 49794 - protein, 1829 aa, Zea Mays
MASIARKICSSVDLTWGGSTQLLLHVLKTVTDSVVRLKDDLPKSVNELLVFVAYFCRFILSANRDLSVGASELLYKQGGYFSEVSSPTASMLLLYATGLYLSAQQAESEIPPYLSVGIPKDQKYLHALEKGLGTLARCPHDNTSLVTYLDSLEFISKILSQQVNTLWKDFSEGKPTHYSGNMDYVLTALHQFIDSSFTSFSCRQMSQGDNERQHEQHGTLLTVLVSAIKFSFLTKKDIQKSLGFIVCAISSKWFTLEELKFLIPSLGNIGVTLHNTGHVKEAPKALELCCQTIWAHISLFYYRLSSRTKGNDIMTDLSMDTLKDMDIILDAFSRIAKMVDALCRCGTEIETPLVIVAKSLSIMLPDGDNSEYNKCSFILIKAWVKAVHKDFRDTKVDDAPLLYPFLLKYRSPWPIKLIGLIVEQELLAYGLTEARSIEFCSKMQIRIIDVLLHKIYCTKEHFLERSRVLIRKAGALRASGVENIKNCLESLRDAISLLEDKLGGEVIFDSAEKALNLWLDMEAFDHSSSDMVLQQPSKTIVPLICFLVDLLSMKGCFELQFKLCKVMIMIWKQEKLPIEKLLSLLRTLPSALFIPQSCKHPFGRQFSFVTSVDEVSKVASSLVSGDTSNEQSTFLAGCLYYDLSEKVFSRGQLFQAFSYGNKALHLRKKLLKKKFKINSGISGNMERQHCGQDISLEVCGPTIVEIWPNSSSSVNTKDFFLTPWNVLRCYLESTLQVAMMHELIGNGAEAEVLLQTGKEISNFHGLSVFCIVFTSFLGQLYCKRQLWDEAESELNYARDLVKNDATISCKLCSLTLGISVDMQVGDLSWSLFEKKIHKQITAGLSNTLGMYQSAIDKLNSTNLEYCNGSFDRHTTGYLVCSKDCIPSKYEACNLGAEPLTSNDGLLSPCSVCMVIQVRRKNSGNAEAGPPLDAKARRSSRNSSRLAKGQNVETLAKTRTRSSKRNACMKSEKVLTELNSKNNVTGSKELAADASVCGEAECFPDGIDHSKDDLCNMFGCWSCLFIKSLNSGCIQNILQLRLDYVHRHYLVSLLLKKARALGSHSNGDCEVHSVYWKCISLLFFRSLPQDCCRTYGPYLIGLIMDRSIGDFLPLECAEILFNMSFFLLKSPLSEQSRDICCIFSSVTMADVVPWLLKAFVLSRESPSLVQEVCKLLACIFLLSTTDSSIQLPLGSHKESLSLNHWATYFHQVSVGTNLNCHYFASLQASSEEKVPKDTYKDFRNETDDNVSKFLRLSSRDIKYIEKHMTEFFQKLPDVPVLCISMLGGDYVNALLKFHCHPPFFPAWMLLSRFDSTNEPTTLLLPVDSISAEMQFEDSCTKDLGNPTRVLDKWQCPWGYGITDYVAPVFRNILEENFMSLSSATLTIDDVNADRVRWWSHRMKLNNYLANTLKDIEDSWFGPWKCLLLGHQLSDEHIETASSMIITGLDTEFEFEVNPMLIKAILGGAVSVDEVQECFLQLILYKGYFGRGGCCGKDRLKAFSSCQMDDGSMETLKRIITDASYELPQPADRDPVILVLDVNVQMLPWENLPVLRNQEIYRMPSMGSIFLALSRTNNDYKDHSSPFPVIDPFNTYYLLNPSGDLSSTQEEFVQLFRNYEWKGVAGNSPKADELVLALTNHDLFLYFGHGSGTQYISSKEVEKIDNCAAALLMGCSSGTLHCKGSYAPRGAPLSYLFAGSPAIIANLWDVSDKDIDRFSKALLNSWLHDKSLDGNNCSKCCQLTMELESMSIASKENGKARRQGTRGKKQQHINDSTKCCSCKQRRIASYISEARRACRLPLLIGASPVCYGVPTIIRKKVMTDSTTREMT

SEQ ID NO: 49795 - protein, 2104 aa, Zea Mays
MEAAAADLIAALSSPSSFAGLYSRFAAYLQPFTPYLHSSNPNTKPPQKRATKQNKQPPPPDAATLRPLAKRFLPFLGRALHLLPPLVRACPVSGDKGGEAADELLEIYGLLLDCLEAISPCLAGKPYSVLLQRGRFICCLESRGHFARASAEAAATLDALRSALSPPTTSTKSRRGAAGVDPVLLPDPGSAGEAGTDPEVTLLAVELTVCLANCSSKGKVKEPTPYERLISLFKQLKPWLRILTNEVSRKYLPLLMNAMSRCTLFLVSESSLFNTDLVHGFCRYTMQECVGEGMIELLPAIARKICSSVDLTWGGSTQLLLHVLKTVTDSVVRLKDDLPKSVNELLVFVAYFCRFILSANRDLSVGASELLYKQGGYFSEVSSPTASMLLLYATGLYLSAQQAESEIPPYLSVGIPKDQKYLHALEKGLGTLARCPHDNTSLVTYLDSLEFISKILSQQVNTLWKDFSEGKPTHYSGNMDYVLTALHQFIDSSFTSFSCRQMSQGDNERQHEQHGTLLTVLVSAIKFSFLTKKDIQKSLGFIVCAISSKWFTLEELKFLIPSLGNIGVTLHNTGHVKEAPKALELCCQTIWAHISLFYYRLSSRTKGNDIMTDLSMDTLKDMDIILDAFSRIAKMVDALCRCGTEIETPLVIVAKSLSIMLPDGDNSEYNKCSFILIKAWVKAVHKDFRDTKVDDAPLLYPFLLKYRSPWPIKLIGLIVEQELLAYGLTEARSIEFCSKMQIRIIDVLLHKIYCTKEHFLERSRVLIRKAGALRASGVENIKNCLESLRDAISLLQKISHDSTRTNTTANNQLAIAYCLYAQCAQEDKLGGEVIFDSAEKALNLWLDMEAFDHSSSDMVLQQPSKTIVPLICFLVDLLSMKGCFELQFKLCKVMIMIWKQEKLPIEKLLSLLFTSGRLSHACCYLPLDERFLSIAKEHLGVCCHDIEFWINCFKGDHPSLCMFLQRTLPSALFIPQSCKHPFGRQFSFVTSVDEVSKVASSLVSGDTSNEQSTFLAGCLYYDLSEKVFSRGQLFQAFSYGNKALHLRKKLLKKKFKINSGISGNMERQHCGQDISLEVCGPTIVEIWPNSSSSVNTKDFFLTPWNVLRCYLESTLQVAMMHELIGNGAEAEVLLQTGKEISNFHGLSVFCIVFTSFLGQLYCKRQLWDEAESELNYARDLVKNDATISCKLCSLTLGISVDMQVGDLSWSLFEKKIHKQITAGLSNTLGMYQSAIDKLNSTNLEYCNGSFDRHTTGYLVCSKDCIPSKYEACNLGAEPLTSNDGLLSPCSVCMVIQVRRKNSGNAEAGPPLDAKARRSSRNSSRLAKGQNVETLAKTRTRSSKRNACMKSEKVLTELNSKNNVTGSKELAADASVCGEAECFPDGIDHSKDDLCNMFGCWSCLFIKSLNSGCIQNILQLRLDYVHRHYLVSLLLKKARALGSHSNGDCEVHSVYWKCISLLFFRSLPQDCCRTYGPYLIGLIMDRSIGDFLPLECAEILFNMSFFLLKSPLSEQSRDICCIFSSVTMADVVPWLLKAFVLSRESPSLVQEVCKLLACIFLLSTTDSSIQLPLGSHKESLSLNHWATYFHQVSVGTNLNCHYFASLQASSEEKVPKDTYKDFRNETDDNVSKFLRLSSRDIKYIEKHMTEFFQKLPDVPVLCISMLGDRVRWWSHRMKLNNYLANTLKDIEDSWFGPWKCLLLGHQLSDEHIETASSMIITGLDTEFEFEVNPMLIKAILGGAVSVDEVQECFLQLILYKGYFGRGGCCGKDRLKAFSSCQMDDGSMETLKRIITDASYELPQPADRDPVILVLDVNVQMLPWENLPVLRNQEIYRMPSMGSIFLALSRTNNDYKDHSSPFPVIDPFNTYYLLNPSGDLSSTQEEFVQLFRNYEWKGVAGNSPKADELVLALTNHDLFLYFGHGSGTQYISSKEVEKIDNCAAALLMGCSSGTLHCKGSYAPRGAPLSYLFAGSPAIIANLWDVSDKDIDRFSKALLNSWLHDKSLDGNNCSKCCQLTMELESMSIASKENGKARRQGTRGKKQQHINDSTKCCSCKQRRIASYISEARRACRLPLLIGASPVCYGVPTIIRKKVMTDSTTREMT

SEQ ID NO: 49796 - protein, 1860 aa, Zea Mays
MSFWYLWRIFAGSFFLPIGIYLLALQNYFINKVSSPTASMLLLYATGLYLSAQQAESEIPPYLSVGIPKDQKYLHALEKGLGTLARCPHDNTSLVTYLDSLEFISKILSQQVNTLWKDFSEGKPTHYSGNMDYVLTALHQFIDSSFTSFSCRQMSQGDNERQHEQHGTLLTVLVSAIKFSFLTKKDIQKSLGFIVCAISSKWFTLEELKFLIPSLGNIGVTLHNTGHVKEAPKALELCCQTIWAHISLFYYRLSSRTKGNDIMTDLSMDTLKDMDIILDAFSRIAKMVDALCRCGTEIETPLVIVAKSLSIMLPDGDNSEYNKCSFILIKAWVKAVHKDFRDTKVDDAPLLYPFLLKYRSPWPIKLIGLIVEQELLAYGLTEARSIEFCSKMQIRIIDVLLHKIYCTKEHFLERSRVLIRKAGALRASGVENIKNCLESLRDAISLLQKISHDSTRTNTTANNQLAIAYCLYAQCAQEDKLGGEVIFDSAEKALNLWLDMEAFDHSSSDMVLQQPSKTIVPLICFLVDLLSMKGCFELQFKLCKVMIMIWKQEKLPIEKLLSLLFTSGRLSHACCYLPLDERFLSIAKEHLGVCCHDIEFWINCFKGDHPSLCMFLQRTLPSALFIPQSCKHPFGRQFSFVTSVDEVSKVASSLVSGDTSNEQSTFLAGCLYYDLSEKVFSRGQLFQAFSYGNKALHLRKKLLKKKFKINSGISGNMERQHCGQDISLEVCGPTIVEIWPNSSSSVNTKDFFLTPWNVLRCYLESTLQVAMMHELIGNGAEAEVLLQTGKEISNFHGLSVFCIVFTSFLGQLYCKRQLWDEAESELNYARDLVKNDATISCKLCSLTLGISVDMQVGDLSWSLFEKKIHKQITAGLSNTLGMYQSAIDKLNSTNLEYCNGSFDRHTTGYLVCSKDCIPSKYEACNLGAEPLTSNDGLLSPCSVCMVIQVRRKNSGNAEAGPPLDAKARRSSRNSSRLAKGQNVETLAKTRTRSSKRNACMKSEKVLTELNSKNNVTGSKELAADASVCGEAECFPDGIDHSKDDLCNMFGCWSCLFIKSLNSGCIQNILQLRLDYVHRHYLVSLLLKKARALGSHSNGDCEVHSVYWKCISLLFFRSLPQDCCRTYGPYLIGLIMDRSIGDFLPLECAEILFNMSFFLLKSPLSEQSRDICCIFSSVTMADVVPWLLKAFVLSRESPSLVQEVCKLLACIFLLSTTDSSIQLPLGSHKESLSLNHWATYFHQVSVGTNLNCHYFASLQASSEEKVPKDTYKDFRNETDDNVSKFLRLSSRDIKYIEKHMTEFFQKLPDVPVLCISMLGGDYVNALLKFHCHPPFFPAWMLLSRFDSTNEPTTLLLPVDSISEMQFEDSCTKDLGNPTRVLDKWQCPWGYGITDYVAPVFRNILEENFMSLSSATLTIDDVNADRVRWWSHRMKLNNYLANTLKDIEDSWFGPWKCLLLGHQLSDEHIETASSMIITGLDTEFEFEVNPMLIKAILGGAVSVDEVQECFLQLILYKGYFGRGGCCGKDRLKAFSSCQMDDGSMETLKRIITDASYELPQPADRDPVILVLDVNVQMLPWENLPVLRNQEIYRMPSMGSIFLALSRTNNDYKDHSSPFPVIDPFNTYYLLNPSGDLSSTQEEFVQLFRNYEWKGVAGNSPKADELVLALTNHDLFLYFGHGSGTQYISSKEVEKIDNCAAALLMGCSSGTLHCKGSYAPRGAPLSYLFAGSPAIIANLWDVSDKDIDRFSKALLNSWLHDKSLDGNNCSKCCQLTMELESMSIASKENGKARRQGTRGKKQQHINDSTKCCSCKQRRIASYISEARRACRLPLLIGASPVCYGVPTIIRKKVMTDSTTREMT

SEQ ID NO: 49797 - protein, 143 aa, Zea Mays
MREHERRVWSVDFSIMDPTKLVSGSDDGSVKLRDMNQAGSIGTIKTRANVCFVQFQPDTARSIAIGSADHKIYCYDLRHIRAPYCTLVGHTKTVSYVKYLDASTIVSASTDNSLKLWDLSMSTGRIIDSPVQTFKGHTNTKVG

SEQ ID NO: 49798 - protein, 622 aa, Zea Mays
MAQAAVEPALNGGSLIGRQPVVPRMKRKTPSELRRRTSEKLGDDLLPSATLDRSNNGLRNTEQQKISKYINTRVTEVFPVRKARNLGKENSKDVLQNNEKVSKFVNGTPASNFASSSLLCGHGDTAKLDTLVPTMEAAKPGFKKVEKCSENALRSVSELHVGDEKQTGSNKFDMEKVLKGFGARDAFVASGLNGPNGQVGGTVSKPSDICPSKITVPGEKAPLDFTLKTSLQFVSSSSVKWCHKLNTSFGRSSITGAIGQSCPRGCQNLECSKLESKKEFLFSKALQSWVYPQSLLPSSIISAMLSSTAGESDFLLKRHQDWEDSFQNLYYMLRKNMLNIFYVYTTQFVALFISGSCLEKKQSSNAYLSQSTRGLRSLLRKHGVCFSMPLCSTEVEQATEDDLIELSEIERRNVGQALHLDALSDVDNTTQSLLSFTGNENVHGLYDVLLNYKSLLNSLSAVDVPVLYSPQPFQNGCLHIPEVKCREMRRADMSSGGFDTEQGSAFASTAGNVCYSMEVKDAVLPPWVVSGLCAAMSLDATSFDLTIATEPSSMGLNVALDSMGTTTTDVQPEGSTPSSCSAPTTPLVGAVPDAALVPALHSASLRRLTYTDGGGYVAHTTV

SEQ ID NO: 49799 - protein, 601 aa, Zea Mays
MGPCLPWALGLLLPSLWEAKVAFSATALLIAALILFLLTTDQHAKSTATGGNRPASSARSSATAAYHRVAGRRRTRARGEAASDDITCAQGGGGYVVKLELLSAKYLIGANLDGSSDPFAVISCADQKRFSSMVPSQRNPLWGEDFNFLVEQLPVEVTITIYDWDTVCKCKVIGSVTIVVLTENESGASWYELDSKFGQICLRLRSTKAFPDSDSSFEECNGAESPRKMILNKQRQAMIEGIGPLQIIYKLPHDEIVHQSYSCALDRCFLLHGRMYISQWHLCFHSNVFSKQLNVIIPLQDIDEIKRSQHSLINPAITIFLNAGAGGHGTPRACSQNGRIRYTFASFWSRNRTFRALEAALQSYEATLEAEKQVRAHVLLQIENNSVFSSKTDNTKTPEKNIEKAIKFQPFINDHVLADITSKFFPGTPEKFFSTILGDSSMFFQQYRDARKDTNLKLSRWCASEEYGGKVREVTFRSQCHSPLCPPDTAVTEWQHASFSRDKRNLIYETKHQAHDVPFGSYFEIHCRWSLRTTSNSTCQVNIKIGVNMKKWCILQSRIKSGATDEYRREVCKILEAACDYFLKSEANSHDSDEIVMVSSP

SEQ ID NO: 49800 - protein, 421 aa, Zea Mays
MAIPVRSAAAPRRLVPSIPPASSGHVRGLACFGTRTGPRGARGLSMVVADSTSRRAKQADGGDGVLGAPVLGGLGMEGLGDQLSVVMKFGGSSVSSAARMAEVAGLILTFPEERPVVVLSAMGKTTNNLLLAGEKAVGCGVIHVSEIEEWNMVKSLHIKTVDELGLPRSVIQDMLDELEQLLKGIAMMKELTPRTSDYLVSFGECMSTRIFSAYLNKIRVKARQYDAFDIGFITTDEFGNADILEATYPAVAKRLHGDWIQDPAIPVVTGFLGKGWKSGAVTTLGRGGSDLTATTIGKALGLREIQVWKDVDGVLTCDPNIYPHAKTVPYLTFEEATELAYFGAQVLHPQSMRPAREGDIPVRVKNSYNPKAPGTLITRQRDMDKVVLTSIVLKSNVTMLDIVSTRMLGQYGFSGKGICYI

SEQ ID NO: 49801 - protein, 1210 aa, Zea Mays
MKEKLKQEVVSGELDQFPDHCVTLPDSNSVIEEFIHFKKQNDDSHVDQKMALDGDQLMDDRPMEITILRSLFSPEACSTLAVRNEPTEAHLRSGGRASSEYVDLPDNNNHCISVGIDYQGGCSASSIPTSHGSINQEFSTGDDRNIEHAKGDIIANPSMVPGSATSLVVINAENDSTVAADPDHLESHILASVTTLQHPTSEEPSDTLHAMAVQDLQTEMQTTCPTLGAQHQKVCPDDSSKMNHEPDTTTGMLQEGTTSDHLGDSSKVNVEPDITTGMSQEGKTSDHLDDSSTGVKEKNIDTVIADPLNSENQSYIAMPEAWVAEIQSDQSSMPAQHSTSLPTQRKLPVLGHPPEEANPSSNLDTEAAQKPDIQPSSSTLDADSSETRHQPETTTVLSQVGSKNHDVGTFHAQKAQSDSPILAAPQSTAMLSLPLEAGTPANVSSTSSLQSNGVSSRHTPAVSESSGMLGTQPEQDLHHDLGPSMSLLGVPLQRMLPDDRSQTVCQPDRGTDLSGKGETEYLACTTSDLSTLPLSGEAETENGQASMPAQEITSPHAQHSLALATSQHPVGDLQPPTLILSEETERAGLLCTSASQDLQLSMITQEDVPLERTDLSGMPVTQSTTVLQSVEPSCDPHAEEAGTWGMLSAPDLQSRMQSSSQLQDQIAEAEGAGIFGTIPAQNLQPETWSSTSAQHISPLRTHPDERIQIGLQPNTTPVPELLGQLSTLTPAGLLSSNEPLMNELEKLKYCNAVLCKNHEQKKSQLQTECNQEIEKVKEKYELLRQEEDSVYHRLTTDLNRIYTKVLVNQSLAEFFKASLVQERSARPTIWQAPQSSQHAPCGTTAAQATLLPVASSLATRPTVLMSYHTTGPHLPPSQVARPPASGAIQLQPVLPGNHSRAAPSPVGSMHPRHGIYRAVGAQSRGPAPHLQQLRMPAPFAMVHRDGQHPPSIMNPGVIPSRQSVHGNFESSASGNALAGISFASMAPSSGHQAMSSTSDSHPVFPASSLLPGSGPGSMTNFVRSSTRIPVVMASEQAPRLNPYVHHIGGGPLNAAPAGIQQARAHIGRTPQAASDQSQDVLHRLLLQLPEVMAPSLAQPTASSSHPAPMAARQQAGLLNPAPDNVACPLNAVAGVGRPGARIGSQSYQVSASLLEWEATLRVGLIRGHQGTYPLGQGCSDLAGGPPGTSAAQGCGSGASREVVCLSDDEE

SEQ ID NO: 49802 - protein, 1072 aa, Zea Mays
MVQSIRNIEHAKGDIIANPSMVPGSATSLVVINAENDSTVAADPDHLESHILASVTTLQHPTSEEPSDTLHAMAVQDLQTEMQTTCPTLGAQHQKVCPDDSSKMNHEPDTTTGMLQEGTTSDHLGDSSKVNVEPDITTGMSQEGKTSDHLDDSSTGVKEKNIDTVIADPLNSENQSYIAMPEAWVAEIQSDQSSMPAQHSTSLPTQRKLPVLGHPPEEANPSSNLDTEAAQKPDIQPSSSTLDADSSETRHQPETTTVLSQVGSKNHDVGTFHAQKAQSDSPILAAPQSTAMLSLPLEAGTPANVSSTSSLQSNGVSSRHTPAVSESSGMLGTQPEQDLHHDLGPSMSLLGVPLQRMLPDDRSQTVCQPDRGTDLSGKGETEYLACTTSDLSTLPLSGEAETENGQASMPAQEITSPHAQHSLALATSQHPVGDLQPPTLILSEETERAGLLCTSASQDLQLSMITQEDVPLERTDLSGMPVTQSTTVLQSVEPSCDPHAEEAGTWGMLSAPDLQSRMQSSSQLQDQIAEAEGAGIFGTIPAQNLQPETWSSTSAQHISPLRTHPDERIQIGLQPNTTPVPELLGQLSTLTPAGLLSSNEPLMNELEKLKYCNAVLCKNHEQKKSQLQTECNQEIEKVKEKYELLRQEEDSVYHRLTTDLNRIYTKVLVNQSLAEFFKASLVQERSARPTIWQAPQSSQHAPCGTTAAQATLLPVASSLATRPTVLMSYHTTGPHLPPSQVARPPASGAIQLQPVLPGNHSRAAPSPVGSMHPRHGIYRAVGAQSRGPAPHLQQLRMPAPFAMVHRDGQHPPSIMNPGVIPSRQSVHGNFESSASGNALAGISFASMAPSSGHQAMSSTSDSHPVFPASSLLPGSGPGSMTNFVRSSTRIPVVMASEQAPRLNPYVHHIGGGPLNAAPAGIQQARAHIGRTPQAASDQSQDVLHRLLLQLPEVMAPSLAQPTASSSHPAPMAARQQAGLLNPAPDNVACPLNAVAGVGRPGARIGSQSYQVSASLLEWEATLRVGLIRGHQGTYPLGQGCSDLAGGPPGTSAAQGCGSGASREVVCLSDDEE

SEQ ID NO: 49803 - protein, 268 aa, Zea Mays
MADSMVASFWGPVTSTTELCEENYAHSSYIAEFYNTISNVPCVLLALIGLVNAFRQGFEKRFSVLHISNMILAIGSMIFHATLQLVLQQSDETPMVWEILLYMYVLYSPDWHYRSTMPTFLFLYGAAFAVVHFFARFQFVFKLHYIGLCFLCIPRMYKYYIQTKDVAAKRLAKLWVLTLTLGTLCWLVDRIFCKKLSHCAGGRRESPTFLDFCLMSRSRNQRRRGNDLSLLNTDATQSTASKLMSIPHPIPHPMCADKLWHFCIWASK

SEQ ID NO: 49804 - protein, 119 aa, Zea Mays
MDPLDEFFESSSDDDVEDIELVLLSSTVQIVSRKFATSRMRHSAMSQRVIHRDHRAGEYLIKHHYFGDNTVSPGNPAHVFRRRGVVVRTSRGHSECYRHDGQCCVVPRMDGIEITLKKQ

SEQ ID NO: 49805 - protein, 440 aa, Zea Mays
MEGNNLPSGSLMQGTPYSNVDLQHHKHMQMPAPSSGNQAFNHSQVPGNFPICLNQVTDSDQLPEFQFGEHGKVNHHHHPHHHKQHATNSMSDDEEHGVHEDATDSQIGKGKKGSTWHRMKWTDSMVRLLITAASYTGEDPGADLGGGRRSCAMMQKKGKWKAISKVMGERGCLVSPQQCEDKFNDLNKRYKRLTDILGRGTTCRVVANPELLDGMANLSDKMKDAARKILSSKHLFYEEMCSYHNNNWFSLPEDPALQRSLQLALKCKDEHDARKRASGDADEDDQSADTDYEEENDDEHPITHANKGTLLTRKRLRYMPADMEDVGFGNSSSSHDCSWRSDPHSIAVDINKASPDGTNLASVQKDLATQSAEIEKQRMEIEVEALELAKQRLKWEAFSKKKDRELEKMRLENEQMKIENKRLELEELGIHNYSRQSSMC

SEQ ID NO: 49806 - protein, 613 aa, Zea Mays
MARPAAGAHDVGMALRKAEEAAARRCEAARWLRQMEPAAAESLPERPSEEDFCAALRNGLVLCKVLNRVNPGAVPKVVENPVITVQTFDGPAQSAIQYFENMRNFLVAVSAMNLLTFETSDIEKGGSSMKVVDCILCLKGYHEWKISGGIGIWRYGGIVKIASSSKRPASHLNRGGGSDQQMLEFVHLLSEVSLEESRVEEAQHSLFQRFVLQVVRAFLLEWGEAEDLPLDDMVIETVLEQACKEFTILLASHRNQVRSLLRKMMKDDNGTLSKMDLIETITKCLKENGECMSSSLRLPRGSHGHLDDVGLLENQQEGLEKLKMSFNEMKLQVESTRAEWEEDLRRLESYFEAQNHNAYQKLLEENRKLYNQVQDLKGSIRVYCRVKPFPKAQSDQRSTVDHIGENGEILIANPQKQGKDGRKIFTFNKIFGPSTSQSEVFADTQPLIRSVMDGYNVCIFAYGQTGSGKTYTMSGPDVTAEETWGVNYRSLNDLFEISQTRADSITYDVKVQMIEIYNEQVRDLLMTDGANKRLEIRNNSHVNGLNIPDANIVPVKCAQDVLDLMKVGQRNRAVGSTALNERSSRSHSSCTRKGGNFRLNSKRVSSSSGSRGK

SEQ ID NO: 49807 - protein, 450 aa, Zea Mays
MNEVAAHTVHVQGKEVISGSTLRGCLHLVDLAGSERVDKSEATGERLTEAKHINKSLSALGDVISALAQKSSHVPYRNSKLTQVLQDALGGQAKTLMFVHVNPETDSFSETMSTLKFAERVATIELGAARANKEAGQVKDLKEEIAKLKLALDEKENEVAQFKDLANRVTSEMRNARTRSPLTASMSLKPEVSQESSVDTCTSEIRSSSSGKQRRFRSPLSVRELDDKSPVISRELYLSARKYKTPSPPVRSSLSVERGSFAKIVENTGSIDCTPISKVEVPPKVWSSNSKTTPSSVLTAQSLRKFRDSEENRTKIPPAVRQSMAKNRSESTPKTHNEEKPANRHHSGTKARSEARNTRDSSEIENEFAGDEPTFHFNRTAKKLPTKVMSRQSQNIDVSVRASVRGEMEPLTEGRQRRNWSKPPHAERTNMPLPDIRRSVSLPRGKNPLV

SEQ ID NO: 49808 - protein, 588 aa, Zea Mays
MPEATNMDMRHCYPCKDTGIVQTKDGTFCSCMLRNSIVCTPHNGMFYAVCGFLDLNANSLLHRSDGSFLSYKTYFKERYNLDLRCEDQALLEARKLVEVRNFLHKCNYKKEKERSGKSVVELPPELCIVVMSPMSAITLRSFTFIPSIMYRIQCMLLSMNLKMQLGPSMQQFDIPALKILEALTTKNCQEEFSQESLETLGDSFLKYITTQHFFVKYKHQHEGMLTKMKKNVISNAALCQLACSNNLVGYIRSEAFNPKTWIVPGVGYDICDRSLRKLKSKRIADSVEALIGAYLSTAGEQAAYIFLKSLGMDIEFHKMPIERVITIKAEEFINVKSLELLLDYSFNDPSLLMEALTHGSYQIAGTTPCYQRLEFLGDAVLDHIFTDYFYHQYPECTPELLTDLRSASVNNSCYAHAAVKAGLHKHVLHSSSALHKRMADYLDKFEQSFSGPSHGWEAGISLPKVLGDVVESIAGAIYIDAKHDKGVVWRSMKRILEPLVTPDTLQNDPVKELQEFCDSKGYTLEYTVTRDNGVSSVVAEVRTEGTTYKATRTGFSKLDAKKLAASSVLRDLKAADTKQYSANGISCT

SEQ ID NO: 49809 - protein, 654 aa, Zea Mays
MREESQRLESTCCQPLLNTLCNEEFYGVESTGAIVTLNSSIQLINFFCSKLPSDEYFKPLPRFKIDKALGTCTLHLPMSSPVQTIYAEGKVSIIKKVVCLKACRELHAVGALTDYLLPESSVPCEDEPDIVVDKYKNGQPDYFPEQLVDNWSSFSRRGFYYCYMVSLEGCSKTTPAEIVLAVKCDMGSDFISNSFKLWGVQDYLSFTMRYVGIIHLNQEQVIAARRFQTTILSLLISNDLSEVSNYIKNLLEMPASPGAVYLLLPVVSGKIDWRSIKFSASEMPEATNMDMRHCYPCKDTGIVQTKDGTFCSCMLRNSIVCTPHNGMFYAVCGFLDLNANSLLHRSDGSFLSYKTYFKERYNLDLRCEDQALLEARKLVEVRNFLHKCNYKKEKERSGKSVVELPPELCIVVMSPMSAITLRSFTFIPSIMYRIQCMLLSMNLKMQLGPSMQQFDIPALKILEALTTKNCQEEFSQESLETLGDSFLKYITTQHFFVKYKHQHEGMLTKMKKNVISNAALCQLACSNNLVGYIRSEAFNPKTWIVPGVGYDICDRSLRKLKSKRIADSVEALIGAYLSTAGEQAAYIFLKSLGMDIEFHKMPIERVITIKAEEFINVKSLELLLDYSFNDPSLLMEALTHGSYQIAGTTPCYQI

SEQ ID NO: 49810 - protein, 897 aa, Zea Mays
MREESQRLESTCCQPLLNTLCNEEFYGVESTGAIVTLNSSIQLINFFCSKLPSDEYFKPLPRFKIDKALGTCTLHLPMSSPVQTIYAEGKVSIIKKVVCLKACRELHAVGALTDYLLPESSVPCEDEPDIVVDKYKNGQPDYFPEQLVDNWSSFSRRGFYYCYMVSLEGCSKTTPAEIVLAVKCDMGSDFISNSFKLWGVQDYLSFTMRYVGIIHLNQEQVIAARRFQTTILSLLISNDLSEVSNYIKNLLEMPASPGAVYLLLPVVSGKIDWRSIKFSASEMPEATNMDMRHCYPCKDTGIVQTKDGTFCSCMLRNSIVCTPHNGMFYAVCGFLDLNANSLLHRSDGSFLSYKTYFKERYNLDLRCEDQALLEARKLVEVRNFLHKCNYKKEKERSGKSVVELPPELCIVVMSPMSAITLRSFTFIPSIMYRIQCMLLSMNLKMQLGPSMQQFDIPALKILEALTTKNCQEEFSQESLETLGDSFLKYITTQHFFVKYKHQHEGMLTKMKKNVISNAALCQLACSNNLVGYIRSEAFNPKTWIVPGVGYDICDRSLRKLKSKRIADSVEALIGAYLSTAGEQAAYIFLKSLGMDIEFHKMPIERVITIKAEEFINVKSLELLLDYSFNDPSLLMEALTHGSYQIAGTTPCYQRLEFLGDAVLDHIFTDYFYHQYPECTPELLTDLRSASVNNSCYAHAAVKAGLHKHVLHSSSALHKRMADYLDKFEQSFSGPSHGWEAGISLPKVLGDVVESIAGAIYIDAKHDKGVVWRSMKRILEPLVTPDTLQNDPVKELQEFCDSKGYTLEYTVTRDNGVSSVVAEVRTEGTTYKATRTGFSKLDAKKLAASSVLRDLKAADTKQYSANDPAPPSAGHLCPVTPTMADVQHGRVPREVGHP

SEQ ID NO: 49811 - protein, 412 aa, Zea Mays
MSITCCLPVVECVYCLACARWVWQRCLHSGGYDSETWGVASAEEFEPVPRLCRIILSVYEDDLENPQWAPPGGYGMEPRWVVQRRIYEDTHGHAPTYLLYVDHQHSDVVLAVRGMNMAKESDYAVLLDNKLGQRRFDGGYVHNGLLKAAEWVFDAECDVLKDLLERNPGYTLTFAGHSLGSGVVSMLALLAVHNRELLGGIDRKRIRCFAMAPARCMSLNLAVRYADVINAVILQDDFLPRTDIPLEDIFKSLFWVPDVVLFVQLTMPSMWKMPNRHICGRYPPIVRTAVPVDGRFERIVLSCNATSDHAIIWIEREAQRALDLLLESEKTMQAPAVERMSSEITVTRDHDEEQQEALRRAIMLGVADVNMPSTYAEASPLLSDSGRRRAVWEEWIARIFEKDESGQMVPRR

SEQ ID NO: 49812 - protein, 269 aa, Zea Mays
MSITCCLPVVECVYCLACARWVWQRCLHSGGYDSETWGVASAEEFEPVPRLCRIILSVYEDDLENPQWAPPGGYGMEPRWVVQRRIYEDTHGHAPTYLLYVDHQHSDVVLAVRGMNMAKESDYAVLLDNKLGQRRFDGGYVHNGLLKAAEWVFDAECDVLKDLLERNPGYTLTFAGHSLGSGVVSMLALLAVHNRELLGGIDRKRIRCFAMAPARCMSLNLAVRYADVINAVILQDDFLPRTDIPLEDIFKSLFCPLCTAYHAFYVEDA

SEQ ID NO: 49813 - protein, 395 aa, Zea Mays
MKHPSYYSLWMVRQAGLVAADIEISDWLRRNYSDKCILLAVNKCESPRKGQMQALDFWSLGFSPLPISAITGTGTGDLLDLVCSELRKFEVLDAVEEEKNKVPAIAIVGRPNVGKSSILNALVGEDRTIVSPVSGTTRDAIDTEFTTADGEKYKLIDTAGIRRRTAVISAGSTTESLSVKRAFRAIRRSDVVALVIEAMACVTEQDYKIAERIEKEGKACVIVVNKWDTIPNKNHESTTHYEQDVREKLRILDWAPIVYCSATNGTSVEKIISAAALVEKERSRRLSTSILNQVIREAIAFKSPPRTRGGKRGRVYYTTQAAVGPPTFVLFVNDAKLFPDTYRRYMEKKLRSDAGFPGTPIRLLWRSRRRPDKRGKSADSRAQSPGTPSEVALAA

SEQ ID NO: 49814 - protein, 371 aa, Zea Mays
MGQSYVTAGKHEETPEAFPLPRGVAIVRADAGWAHCVAITDEGDVYTWGWKECVPTGRVIGDQSSVGTKEKDERQMAMATDQGVSPRSQVSRTSSGAASGPSESRGTDDSTKRRRLSSAKHGPESSTSSDESLSAPPCVVTFNTGVKIVSVAAGGRHTLALSDLGQVWGWGYGGEGQLGLGSRIRTVSSPHPVPCIESALYSKDRPSAMKDSGALLTFGWGLYGQCGQGNTDDVLSPTCVSSILGSKMQDVAAGLWHTVCTSVDGDVYSFGGNQFGQLGTGSDQAETVPKLVDATSLENKNARSVSCGARHSAIITDEGEVFCWGWNKYGQLGLGDSMDRNVPCSVPVDAYHPLNVSCGWWHTLVLADSPT

SEQ ID NO: 49815 - protein, 277 aa, Zea Mays
MLERSMAQGSVDQALLVEESIKHAKEAIMLDIRDGNSWYNMGNAYLTSFFVGGAWDHTKLHHSVKAYQNAEKDKTMNLNPDLYYNWATADKYLENYERALRGFEVAALKDPGLGANTEVQKIISLLDKLDNAMKGQLRSKRLASFVSSLSGVKLKSSHKKATISTLSVGLNKAVAVLGKVILFIRHDNVAPLYYLICDLERSYFILSVYGLHNDAIKDGDQVVLFEPYYRILDASCKDKHYQFKSIRVDFPEQILVNERVPAPHHVARASIHAHNKS

SEQ ID NO: 49816 - protein, 218 aa, Zea Mays
MVPCQNTRTSQGAICKPDIRCCVSGREGSGSHLLRPPQQDAPEEAKQAALVFVACGSRRWPAAAAAMMMACALAVAQPAASLAPPSGKRTLSGGRPPRLPPPRLSGKLIRSRAVVAKAAQDGSESSGTGSIVKYVTSSFSTAEDIFALAGIGFAAVAALWASVNLIEIIDKLPVLPLLFELVGILVAWLFIYNNLLFKPKRKEFLENIKSSGSRILGQ

SEQ ID NO: 49817 - protein, 612 aa, Zea Mays
MFSRFQSIVNKMRANKAQLPYDDHERALKLLHALDRRVWEVKVSAIIESPNYETLTVDELFSKLKSTEIDHQTRAKIENSGAPTMALVSGGGSASNPSPVLFALSSLLTITDDQVESLGDEELALVASRFTRFHNNRMSRRRGGSKDGCYNCGDPDHFVASCPKKGKLEAGPRDHHSGRRKGKRDTSSKHKSKGGFDKEALKRKYRQKAKIKERAFLASLSDLDHDSDESASASSDEEVERHVEDKLNGLCFFAGTAGGLCTMALGEDAVGTSNDKDIGDDTTSEVLPFADDLAAEVEELTAALASQDKLLRQAARDRREFRSKYESTLRELESARASVVVSDETECDECALHMSNITTLQTKYATLLDERDELRSRSSLLGVCTVCPGLQTELAERDARIALLEKASSVSAPAPVQCALCEGLQSALESCRHDKTRIEEENTYLRSVLSWVSCSEPQLGMMVSQFKRGTGGPGLGFAAKDGSVARFGKVGECSGLTPSEKPSSTPKLIKITPPKPITPVRDGVIEEPRRPARPRGALPLAARPQGVRPRGGHARRGAGRVPYGQGPRDRGFGSYFPSNHNFLLVGQMPQHWYSSQFTYPSAVPFAHPVSYC

SEQ ID NO: 49818 - protein, 487 aa, Zea Mays
MSERNSRANEAPSWPSSWDVVADRNNPPRRWNGRPASSNARSVTKSYDQGPNACRWTNNFSASREESYRTRFQHGEPLRSGHYNNQSRVAPANQNRFNNYNASSEWHGSVEGYRGWPKQHVGPEPHARLSHECSSSFQEGDVRHTPRSAYGEESHGQISVLGSWQAPGTYYNCGPQNRTVCPEFQNRGSFQQRFGSYGAADSGFGRANGDRQFNSLERRVPYGRIGGQGRGRTSCQGRGDTRGWHERFVCRWTEPHCQVQNGGLEIASHKLLAPGQQGTKRNWCKAESSDSPQQDNTKRILGSVDQPPGPGPVCHGGSGAPSPEQHASRQGAVKRGVCEAESSDLPIQDESSEVTLKQSADKPLCTTEDGNSGAGSCELPVPEQGGVGIDLREAGPPDIPCQVPDGSSEAFLELLVPEHRGMEAGLCKVEPSDAPYQGQDGSPGTASHEQPVPEQRGMGRADSCATEPLSVHQDSTENKPETVEQDS

SEQ ID NO: 49819 - protein, 630 aa, Zea Mays
MSPCLRFRRLALSHIFGMQEVSDPPETVRKAETKNITSIGKDVIFEQDPCSSYQLWGSMKFEEDGHLLSQAKRDLSHLDYRAQSADTKYVTELGSHACLKDPLPMGRDYHRQKLQFSTSDCSFEKASALEAASSSPDALGTMRTKIKSSTLSASPDYLSSYPTAAPCMRKCPGAVELDHGLGHSEHSNRRSDQFTLFSSRNGRSVEKCKEMVQYARGFHHADEINHVPFQWCFEDEGPSVSRGLQYGDEIPSLSRKKYNVAPSRSSQWHYGPQTALSSRRPDYGDEIPSLSLHYGYRDRTHLRSGNWCHDAEARIPSRYQQGTSHGNGHSRNCFSRINTNEQAKVITSKHTFAKPRMINRNCSDQHRINMKGNRWRNSEDLMDQVRGPRANKLNNASVSSTVKDITSPLIRRNQYNRSDFSVQYNQAKFFMIKSYSEDDIHKGIKYNVWASTPNGNNKLDAAYHEAQNLMDSGERCPVFLFFSVNTSGQFVGLAEMLGPVDFKKTMDFWEEDKWSGFFPIKWHIIKDIPNRLFKHIILENNDNRIVTFSRDTQEIGLPQGVQMLKIFKEQPQGTSILDDFDFYEEKANARRTQKRGNSESTYGARFSDDSKSIENLEANMESWSLFETLE

SEQ ID NO: 49820 - protein, 257 aa, Zea Mays
MVETAVKQVYAALLPRTMVVADLGCSAGPNTLLFISSVLSSIAAAAAAERCKPPSGGGDDDDHHVELQFVLNDLPGNDFNHLFRSVEEEFRRAAGCERGPPPPPYYVMGLPESYYNRLFPRQSVHLFHSSYCLHWRSQEPEGLEAWRKPCLNEDNIYIARTTAPSVAKLFQEQFQKDFSLFLKLRHEELVHGGRMVLIFLGRKNEDVYSGDLNQLFALVATALQSLVSKGLVEKEKLESFNLPIYGPSVGEVKDLVT

SEQ ID NO: 49821 - protein, 604 aa, Zea Mays
MRRSSHAMGAQAFRLLLLLLLAAAAAEARFVVEKNSLMVTSPTSLRGRHDSAIGNFGIPQYGGSMAGAVVYPKDNAKPGAMPTFLLIDRGECLFAKKVWNAQNAGASAVLVVDDKDEPLITMDLPREDDEASKYIQNITIPSALIDEKFGDQLKKAVKDGEMVNVNLDWREAVPHPDDRVEYELWTNSNDECGPKCDMLMNFLKEFKGAAQLLEKGGYSQFTPHYITWYCPQAFVISKQCKSQCINHGRYCAPDPEQDFSTGYEGKDVVVENLRQLCVFKVANENKKPWVWWDYVTDFHIRCPMKEKKYNKKCAETVIKSLGLDVKKVDKCMGDPNADSDHPLLKMEQDAQIGKGSRGDVTILPTLVVNNRQYRGKLERKAVLKAICAGFEETTEPNVCLSDDIETNECLNDNGGCWQDKSANVTACRDTFRGRVCECPTFNGVQFKGDGYSNCEPAGPGKCLINHGGCWHETRNGKTFSACQESGDGKCLCPAGFRGDGVKKCEDIDECKEKKACQCPECNCKDTWGGYDCTCSGDLLYIREHDTCISKTAVQAKAAWAAVWGILIVVAVVAAGSYVVYKYRLRTYPDSLICMKNHMYDQLDL

SEQ ID NO: 49822 - protein, 1159 aa, Zea Mays
MWVNVVLKNVPLYVFSFLIIGIPGLEFSLLNEQNVVIIPEAIFSLCAGFSSPVINSSDILQLFGHCKIHSKMSLEDDNWVLKDELPYSVEALSEITLDTCTKVMSHKCHLIHLPGTIQQPMLLELMEFMKGFVASNEQFEKVDLNNLVLVCSLLCNLIHCALLSRTMEEKSSLLQETVDYVTNILKHIVSFVVKKNDELSHGLTNISSALDTMGSAFSSIKSLLSSPIFNLSRVDNGVCSVVIKSITELLDELLVAISQLFCQISSLVSNFDAESTGKMLPTSSINLEDLNPVLDCKSSVADMDLDVMDSSEVDSVTASASGSMGSFLRPLEWKLDLVCIISTFFSVSSLHTWEILYSLVDKEGDVKVRQAILLNLCRNISASSKTVSLVVHFIVDMRDRGASSLLGPAECLTHIHALLKALIAIHGGQNADGKQPGREVFFSENQDILFDLLNRATDISSVDWFSRIKFIDCVSSFVCLFPDVAQDLIGCLLDMLHDADYRVRLYLARQIVVLFQTWEGHNELFNDVCSSIGAKMVKFSNISPVTAREVLAVGPQSVLVIETALITLAHLAVHSEDVEVECLFMISAAAAIEPSQRELAFALFDSISRRLGYASRSKYLDQVMGPILFRWVACEMNLISLVEVQEMFGYGSAEPNNFVEHCSSWLLPFLILRGDGADMNWISKILSQPLSIIIKRYFVPIFGMCIAVRCGTGPEKDLAETVLCESVLQLGEISELERDDLIKKHMVAIVAFLLSVSSSAHGPQIPYFSKKNVALSVRMVVDGFVDTMDDNLADTVVSDKVNIFRADRVFKFLLSIHQQVADASHSRHMGHRLCAIEVLIDVLGHRVVLESTCFYIISIVGNYIQQKPLQGQCCNILSKLLAAFDGNTSAETLQVLGRQLQVVVPKLIFSCLINEKEERSGTEDSSRVLSLLHQLTVEIDPLLYDYIRELEPLPDLDCLKDVQEFHASLSASHSSRNQFLKFVNKAPYLPPELFLLSLRAYHKKLFLGEIIRRSDLSAADTNMVSCWHSDPDVISAVWALVDICSSSSVANEASWVLADFISRAGISDAHQVIFRLPTTTENYSLQLHTGSASKEDKLSTNYGISDDVLVGLLKLLKTYLSDESVEIIDAASQTLRIGEKRLESPSQVSVTVARRRRRT

SEQ ID NO: 49823 - protein, 410 aa, Zea Mays
MYVVKRDGRQETVHFDKITARLKKLSYGLSQDHCDPVLVAQKVCAGVYKGVTTSQLDELAAETAAAMTASHPDYASLAARIAVSNLHKNTKKSFSETIKDMYMHFNKRSGLMAPLVAEDVYEIIMKNAARLDSEIIYDRDFDYDYFGFKTLERSYLLKLDGKVVERPQHMLMRVSLGIHKEDIESAIRTYHLMSQRWFTHASPTLFNAGTPRPQLSSCFLICMKDDSIEGIYETLKECAVISKSAGGIGVSVHNIRATGSYIRGTNGSSNGIVPMLRVFNDTARYVDQGGGKRKGAFAVYLEPWHADIFEFLDLRKNHGKEENRARDLFYALWVPDLFMQRVQNNGEWSLFCPNEAPGLADSWGEEFDNLYKKYESQGKAKKVVPAQTLWFDILKAQIETGTPYMLYKEK

SEQ ID NO: 49824 - protein, 326 aa, Zea Mays
MARALLLLRVAVARYPPLPASPALLQPQPLLRCHAPSQYKSQLRFLSSLSSSVPNSSDAPSDGGGDRDGEEDGAKSGSHVDYLGMSDEELMEQCDMGTFKASGPGGQHCNKRESAVRLKHLPIGIIAQAVEDRSQHKNRASALSRLRTLIALKVRRPINLEDYTPPVELLQILPLKSSVRGNDVGPQIGPNNSKFSPGMQALLDLLFAVEDSVSDAAKILGLSTGALSRLILSDDSLRTAANELRASKGTGAVLRAPDVAGQRAQGLLRRRRGRCSSRRQQPSWRRCKHISLTGIFICLMRRSAIPLRVASLTMQIVCSKALRTLT

SEQ ID NO: 49825 - protein, 407 aa, Zea Mays
MARALLLLRVAVARYPPLPASPALLQPQPLLRCHAPSQYKSQLRFLSSLSSSVPNSSDAPSDGGGDRDGEEDGAKSGSHVDYLGMSDEELMEQCDMGTFKASGPGGQHCNKRESAVRLKHLPIGIIAQAVEDRSQHKNRASALSRLRTLIALKVRRPINLEDYTPPVELLQILPLKSSVRGNDVGPQIGPNNSKFSPGMQALLDLLFAVEDSVSDAAKILGLSTGALSRLILSDDSLRTAANELRASKCFFDCRAPVLYYVLLTLQDSVHKVFYAVVEAAAVRADNSHLGGLARYPVSATLPQIGSRLFLTWGVFWSFPEMAPFTSTNRYLIPILYVSVELVKALQAHIINWDIHMFDEEIGNTTQGGKFDHADRLFQSIENAYINSLSNTRWGTYRRCCSPSMGKG

SEQ ID NO: 49826 - protein, 68 aa, Zea Mays
MEMEVEARRKFVITKEADADLTVEDDTQNIFVHLGFLVPYYKKGNSIQHFLIPSEKIYYTFLILRIFQ

SEQ ID NO: 49827 - protein, 113 aa, Zea Mays
MNIEEEPTNKEDHILNVSHTEGHENLLISPGDKHGTSLREDVNIEEEPTIKEDHILNVSHIDGHKNLLISPGDKYATFPHEDVNIVEEPTIIKPFYSLWLKMICLLVLSYMMT

SEQ ID NO: 49828 - protein, 79 aa, Zea Mays
MRRRPLALAPRAVAPWPVALAPRAAALWPMALALGAAAPWAVALSIMPEHRPPASWQPAAATAPRVRLPRGHASSSVLA

SEQ ID NO: 49829 - protein, 290 aa, Zea Mays
MARNINSDYIDFSHLGGFDMGINFDEFEENVKKLMEYLDSAHDKAVEFIEDVHAKFYGPFTDDEVPNNDQSSRYVITESSPTSIEKELVGPNTELSTPPACFITMENSSTGCDTDAHKTQSESFSTKSTDILIHTTDFCNALLLEDSSTNYEMTVCLQPYQATLPGTQANRPEVHMVSTISYSANSPVESTIHGTCTSHDSSTSASSCADDPSMSTDSMVKSVDMDGQKHMKNDKIKKMLLRNLSRKLRWSKAQADTHQTMAPGSQGAEDPGYPLVSPSDDDLEDSWEIL

SEQ ID NO: 49830 - protein, 229 aa, Zea Mays
MVLHSANDPVGVTVHENGVRVLADSTTLTQEYHVSYTLHMEQMIEQAGLHCSGHSDILIHTTDFCNALLLEDSSTNYEMTVCLQPYQATLPGTQANRPEVHMVSTISYSANSPVESTIHGTCTSHDSSTSASSCADDPSMSTDSMVKSVDMDGQKHMKNDKIKVHLAPQPENASFKKMLLRNLSRKLRWSKAQADTHQTMAPGSQGAEDPGYPLVSPSDDDLEDSWEIL

SEQ ID NO: 49831 - protein, 453 aa, Zea Mays
MARNINSDYIDFSHLGGFDMGINFDEFEENVKKLMEYLDSAHDKAVEFIEDVHAKFYGPFTDDEVPNNDQSSRYVITESSPTSIEKELVGPNTELSTPPACFITMENSSTGCDTDAHKTQSESFSTKSTGLSSMNHVYPENNLSEGAHIDSNDLCIRIYDSSEEVILWNPVSSVKPQQSHELTTIPQDDHALHALETEVTEQVGLNCSGHSDSSVCSGVSPLENSCANCEEKMVLHSANDPVGVTVHDSTTLTQEYHVSYTLHMEQMIEQAGLHCSGHSDILIHTTDFCNALLLEDSSTNYEMTVCLQPYQATLPGTQANRPEVHMVSTISYSANSPVESTIHGTCTSHDSSTSASSCADDPSMSTDSMVKSVDMDGQKHMKNDKIKVHLAPQPENASFKKMLLRNLSRKLRWSKAQADTHQTMAPGSQGAEDPGYPLVSPSDDDLEDSWEIL

SEQ ID NO: 49832 - protein, 285 aa, Zea Mays
MLLLCSLLVVCRLLALVLRCPTPASSPQSAPADPTTAQALTQHLSVSRGKEHLRVTSAIARSTSPPAAAARPRRMLGHRFPTALRLPHGLLQRRSIMARRGLTIMAGGEAEGPLAGFFDYMERLRNYERSGVPRGAGTDSDDGFDLGRMRRLLRRLGDPHTHFPAVHIAGTKGKGSTAAFLSNIMRAQGYNVGCYSSPHLLTIRERISVGNDGGPVPVRLLSDLFDEAKKAIDEAIESENGSLTHFEVVFTALSFLLFSQQNVDIAIIEVLVELGMQQMLFEVLN

SEQ ID NO: 49833 - protein, 320 aa, Zea Mays
MLLLQPSAVPAPALRGRPRPRRRLVPPPLASAPASIVVSSDEDAFTRCSGYLFEEGAATESELPTAYDLPGIAAVYRRRPLLVLRRSLQIGTSFGRWFALRYLDRVNERADDMFELRAAQLRRILLELGPAFVKIAQAVSSRPDVVPPAYLDELSLLQDRIAPFSNDVAFNIIEKELGLPLDMVFSEITPEPVAAASLGQVYQARLRSSGKIVAVKVQRPGVQAAISLDIYILRFLASLARKAAKLNTDLPAVLDEWASSLFREMDYREEARNGLKFRLNSSSIRQENCLGNLEMCRFLKCIWNRQEGESLSWNGSRCSL

SEQ ID NO: 49834 - protein, 342 aa, Zea Mays
MMGEFRQELRDGFIEACLHLVNRDFDALAKDFVTLGLLPPTAQKGEVTKALTGVFENAVNRGVQNISFGDLSGNLGRTMYKFKFQIPSYFSLVIRSLAVLEGIAISFNPKYKVLGSSYPWIARKVLTDSSPKLRSTLQTLLYKDGTFQIDRLESLLTESLRARTEQSLVRNEQDVDSTRYAIKQVLSFTLADQGAFVKDLLLQEIAKGIDALGVATLSSATSAAASRLPFGGGPSPLTSLDDEDATNLRNLYRLLLLLSKVSQKENPSPIPEYNSAIEKEGGSTDELALALYGMTSLPEFLPVLSVIPELPPESQQQLLLLPADLTNRILSRALARTIRRLM

SEQ ID NO: 49835 - protein, 212 aa, Zea Mays
MPIPSVSPVSSSPLAAAPLRASVPNSNLPRSSASSENPDASPPAQCSPCACSAGEASATSAAGAASPRLRARFHRRQLRRGRIHQVLRVPVRGGRGHRVGAPHRVRPPRHRGRVPPPPAPRAPPLPADRHLLRPVVRAAVPRSRQRARRRHVRASGGSAQEDTLGAWPGMSHFLLPYLMIIKFIDVPFLITGICEDRTSSFVTAGCCSTCIP

SEQ ID NO: 49836 - protein, 665 aa, Zea Mays
MPGHPTPADALLGGGTSRHHAELLLHSGDDGVSVKDLRLRRVVPPAAGSLDTFPECAAPVKPGFVEITPLEAVSAATAAAAGDFDRKLAPPRSKLVRDPRSFGYRRLLPFLNELTKNDSSIGKEVFPQDTAAHSKDVLGGSDSRLADEAIGVSHCEPEAMVVNTGGDTDVKDACNNVSEEIKIAPHDLTNKPLLAGCTRSRFVHHPSSFSYKRMLPFLMENDISAQECNRVKIRKIAEERQLASNENDVSASGQHCLAASDDSSQECNRGQVETMEEEKPAKADENNVLGGRQLQPPVLEAPPPDFSVVEMQNVMQHEASASSQVPLTSFEGELTSAGDSVQAVGEHQLVASEESLDEHKRDEVKRSIHDAVKSDGGYALDSREFQLAASEVSPENSMAEVQGAAQEESLPLDGVEERSDKGDFVSTEQAQLCVTNESLAAQLQGNVEFAEVPQCQNLDPGCHDVGFGSRTKRVIPLLHRHCAQQPQDSVVSLDDQLLDDDIQMICRPDSRAVDRYLSVEEMSGCIMLTESASNKAGISRPRGAHSMEKGSLSPKKPSPKKGILKRNTRGCKGICMCLDCCTFRLHADRAFEFSRKQMKEADDIITNLLKEVASLRSLLEKPAGQQESTQAACRHASRVEEVARNSCQQMFVDLNSHCRIPAGKS

SEQ ID NO: 49837 - protein, 617 aa, Zea Mays
MLQKKDPKLCSHIFHNQPQYDEHHDSSPVLVSKYHRWDCSRCLDSVEVSGHRPTSENVSMQQNGMNDGCSISIVWILPNSVDSRRLFSCTHQSSQGNDRLTLSKTAQECNSKCSSPGNKAITAMNVPVAEENVPEALVDTRVPSIEVLQASPNSIDLSANILNAVSKNVSDLPDDVEENGTQNPHSLKPCVAPNEDENNIANDDLNEPNVCKPVSGHKSKQVCNMGPRRASSKRNVESDGKRKRNKSTKLPGISDLKFCQRKPKKTRLLSELIGSEQVGVSGDAVQVDHTNSVDLCEGGKRKMHLEVGKGNDTTNQQVDKIQSRAVKNKAKYTGVDKLEDGSSLMNWLKSTNKEVRTKKKDSEHKNLDSSSISRSYPDIVASNDMHHDFLPSVGDVGQADVPSTTSAKHGNGNAQNDKLEQNMQKMDGLCENESRNLKQRFFSNEKSTILLKRKVLSTSVVHDENIENSNIKRDMLRSDDLPQKEPEVSVQRYLAKVSLGKQKIQNVSGLHKKNIPKNKKGKQKVHEKQNVIDDFPMDIVELLARNQHKRQLMTDTNSLENCHTQPKVAQVDCAAFAAKGCPTNASNEFNTNFQKSLASESKQKSLQSVKQRENHFF

SEQ ID NO: 49838 - protein, 560 aa, Zea Mays
MPESPASPAKPPSQPGSPLNAATPSPASALLRGSVLLIAFLVLQLVLLWNILGLPSSRFLPVPGQRDTTWPNGAVNGGACDEGLIYVYDLPSELNHDLVDDCESLWPWYSFCPYLTNGGFGEAAATLPVFFNVTRNVSLPSWYNTDQFQLEVIIHRRLLSHRCRTTDSSLATAFYVPFYVGLDVGSHLWGDNSTAADRDRAGLRLLRWLKNQTSFQRSGGWDHFITLGRITWDFRRYGDDGWGTNFVVLPGIANVTRLGIEADRLDPMEVGVPYPTGFHPRTAADVRAWQRHVLSLKRSKLFGFAGAPRSGFRDDFREVLLEECEDAGSEHCRSVDCRGTRCTDNGAAVLELFLDSSFCLQPRGDSFTRRSLFDCMVAGAVPVLFWRRTAYDQYRWYLPPGPRGEEGEWSVFIDRQALRVGNVSVRDVLEGLSERRVRRMRERVVEMIPRLVYASSSDGLGDGMEDALDVALRGVLERFRRRRASTAPVGVSAKHSPGRFVARSVDGKSTPPPPSDGKNGSVATVSKDDSGTNPSPPASSHIKTVVSIASASTGTSLQKS

SEQ ID NO: 49839 - protein, 630 aa, Zea Mays
MWRGRCAPGISVAALALLAVAAAAGAAAGDPDPDDLERAFPIVEPDHRHTKLRLSEQGLEAIRRIETPIAVVGVIGPYRSGKSFLLNQLLSLSCDKGFGVGHMRDTKTKGIWIWGTPVEMDVDGSKVSVLYLDTEGFESVGKSNVYDDRIFALATVLSSVLIYNLPETVREADISRLSFAVEIAEEFYGRVKGQDVAFEPAKLLWLIQRDFLQGKSVQQMVNEALQRVPNDNGDRYINEVNQIRDSLAVMGNHSTAFSLPQPHLQRTKLCDMEDKELEPLYVKRREQLKQLVSSIVKPKIVQGRTLNGKDFVSFLQQILEALNKGEIPSTGSLVEIFNKAILDRCLKVYREKMDSLNLPVPVDELQKLHEMTNGEARILFDKQHFGKHHAAQSALKLEDEIKEVYRNFLLANEYQSSKLCEARFSECEDKMDHLQVLKLPSMAKFNAGFTHCNQSFVKDCVGPAKESYERRMSKMLAKSRALFIKEYNNKLFNWLATFSLVMVVIGRFVIKFFLLEIVAWVMFIFLETYTRMFWSAESLYYNPAWHIIVSSWEMIVYSPILDLDRWAIPIVIMLSLGVLYWRCFGRRRKRDGTKHLLIEEATLPVLLDGHVLMLPCLWISNCFLVDEERQ

SEQ ID NO: 49840 - protein, 184 aa, Zea Mays
MRAEKRSRKAWLAAMPVLFGATKGAEVCSFKCQIAHWRQGHKDECHPPSVNTRHDDEEEKAEVGRAAKENVSVGVKQVAEMNKPDVGSETSDANHDLKSSNGKSKHMPSKAVCSSVEIPGGHKSNNTVEISQNVQSVDSSKMGSSIKHANFVEDGSSTEDLNEEYQRAKDATVVEDCSQTNSTR

SEQ ID NO: 49841 - protein, 1302 aa, Zea Mays
MASRQHNAQFHKSKTLDNKYMLGDEIGKGAYGRVYKGLDLENGDFVAIKQVSLENIPQEDLNIIMQEIDLLKNLNHKNIVKYLGSLKTKSHLHIILEYVENGSLANIIKPNKFGPIPESLVALYIAQVLEGLVYLHEQGVIHRDIKGANILSTKEGLVKLADFGVATKLTEADINTHSVVGTPYWMAPEVIEMSGVCAASDIWSVGCTVIELLTCAPPYYDLQPMPALFRIVQDVHPPIPEGLSPEVTDFLQQCFQKDAMQRPDAKALLMHTWLQNLRRALPGSLRQPTPLRNIDGDDEGSRGDNSLGFCDTPGDIQTTITSNVDQENGSKEPIMDSTVQSKSEELHDGNLKLTEGSSSNSVALMKDNVVLNKGPTLVLHEKLPVESSSGGADLNGKVMAHELLQGGPPGKVELENKESSSSDVFSFQAGRQNIGFQKVVEPSVVEGPKQLSRFSDKPEDASLEDLFPPNDKWGDNGAEPSTSTTVQELKYNGVQNAFLKGLNARVEKQKENDNESMNGGKLIEFAMQLENIDALGFGEHIPGESLFPVQSVEYNKIVAQLRPGESEDVILLACQKLLSIFSYRPEQKHIYMAQNGFLPLMELLEIPRNRILCSVLQLINNIVKDSTCFLENACLVGLIPVVMNFAEPNRPKDVRVQASLFLQQLCQASTLTLQMFVACQGIPVLVSFMEPDYAKYRDMVHLAIDGIWQVFKLQHSTPRNNFCRIAAKNGMLPRLVNTLYSLNEATRFASVSGSGASVTQNGSTPRRRSGQLDPSVLESCKARLDHHHSSGSLQSLQTDADKHHILMDSSSPRFSDKTGSNLERNDNDLVIRPQRLSVSAGRTSTDRSPKHVELVSNGHISGQNDQVRPLLSLLEKEPPSRHISGQLDYVCHITGLERHETILPLLHTSTERKTNGELDLMMDFAEVSRHGRENGHLDSSIKVSNRVHSMKYAPSTSASNEGASTSGAASQTASDVAREYLEKVADLLLEFAQADTVVRSLMASQSLLTRLFQMFNKIEPPILLKILRCINHLSGDPNCLETLQRTDAIKHLIPILELCDGPLVFQIHSEVLNALFNLCKINKRRQEQAAENGIIPHLMNFVMSDSPLRQYALPLLCDMAHASRNSREQLRAHGGLDAYLNLLEDDVWACTALDSIAVCLAHDNDHRKVEQALLKKEAIQKLVKFFQDCPEQYFVHILDSFLKIIMKSSRLNTAMATNGLTALLIARLNHRDAIARLTLLKLIKVVYEHHPRPKQVIVENDLPQKLQNLIEERRGGQRGGHQVLVKQMATSLLKALHINTVL

SEQ ID NO: 49842 - protein, 696 aa, Zea Mays
MNKPAVGSETSDLNHNLKSSNGKSKHTLSEAVCTSAKVPGGHQSNSTVEISENVPVSVDSSKMGSSMKHANANFGEDGSSTKDLNGVSPYRSGSTANNLATSLKKMVRQQTAPKVVRHYPSESTLFPYELFVRLYVKVELRPFGLHNLGNSCYANAVLQCLMFTRPLTTYLLEGLHSKNCSQNGWCFMCEFEKLIVEGKRRKIALSPTGILSHLNDIGSSFGPGKQEDAHEFLRYAIDAMQSVCTKEARKGGVLRSAEETTLVQLIFGGYLRSKIKCSRCHVSSEQCEPMLDLTVEIDGDISSLDEALVRFTSTEALDGENKYHCSRCKSYERAKKKLTIEEAPNILTIALKRYQSGKFGKISKAIRFPETLNIVCYMNPDTDDISPVYSLYAVVVHHDVMNAAFSGHYVCYVKDTHGKWFKADDSQVKPVSLDNVMSKCAYMLLYARCSPRAPSSVRQAISDPARPKKAKQKVVPGGTTWRGGSFNRHQDGQRHSNHTADDLTHAFDEYRNAPYSPSDSPSPSESSSLFSNSDAGSHSTVSTDSSESTRNSTSTEEYEYVFGAADQMYPGGPMGGAPVESDQMYPGGPMGGAPVESDYSTYSRSRSSLNTSSSGRDAYSAASSADHKHQVVGSGGQVEGDESTSLLYTDRSNQQLSSKLTDQYRQLDGSGHDPGETRGGVLLRRPSRDRTAQTFY

SEQ ID NO: 49843 - protein, 176 aa, Zea Mays
MAIVADFMLVWLPAPTVSLQPPLAMNSGAIAKFFYNCPDNAFQVALSGTSYSLLQRVGAILRNGAKLFAVGTSASLIGTGVTNALIKARQAASKDFAGEVENIPILSTSVAYGVYMAVSSNLRYQVLAGVIEQRMLEPLLHQHKLVLSAACFAVRTGNTFLGSLLWIDYARWIGVQ

SEQ ID NO: 49844 - protein, 67 aa, Zea Mays
MDDRYPHHQSSMATPAAASKMSKKLQGGGDRSSGSSSRGSGNSDKQQVPAAAMRKGPWTEEEDAQLV

SEQ ID NO: 49845 - protein, 95 aa, Zea Mays
MSHPMEGARMLQHSNNANELLLRRKLEEQQQAAELQHAIELQSRRLMGLQLLDLKARAAATAAAASALPTPVANAFASSHPLSTMAVESPLESGE

SEQ ID NO: 49846 - protein, 909 aa, Zea Mays
MSRHCVTLLVIIFGLLQMAVALYSNPSSTHPNCTERCGNVSIQYPFGFGSGCFRQPDFSLTCDGGGGGNQPPKTFLHDGITEVLPDSGVTVGLSRLIDVAISHTIFMAPGIPSYNFSWNLSSFTMLDGSFNVTGCDFDIYRQEPGKNGSIPRCTNSCPQNITETVARQNCNGTGCCRLYVGEVVPDFQLKFVLHNNDTRGDHDALSNGSTLWNTINITSNWAQILWDIDDQPTCSRAKDKNINYACVSNYSHCFDAELFDIGYRCGCNSGYVGNPYVVDGCKRDEGYSPNQLKENCSRSCGNISVPYPFGLEEGCSARKLFKLNCRNATASMLQFDDDRVVAFINVAESLVGIRFTSHFEDDQLGIYVPGEPDLFMGLGESVVSMHWAAANLTCDEALKNKSQYACVSSNSKCLGVNSKDGYIGYRCKCLDGFQGNPYTISDGCEDINECKTQHICKENEVCNNVVGSYYCTNCPDKTEYDAATNQCKATKQLGLVLGVIIGLCVGFGILVSCLGGMLVIRRWKRDIQKQLRRKYFRKNQGLLLEQLISSDENARNNTKIFSLEELKKATNDFDTSRILGRGGHGMVYKGILSDQRVVAIKISKIMEQGEIDSFINEVAILSQINHRNIVRLFGCCLETEVPLLVYDFVSNGSLFEILHAAEASNDFQLSWDDCLRIALEAAGALYYLHSSASVSIFHRDVKSSNILLDGNYTAKVSDFGASRLVPIDQTHVVTNIQGTFGYLDPEYYHTGQLNEKSDVYSFGVVLVELLLRKKPVFTNETGTKQNLSNYFLWEKKMKPVTEIVASQVLEEATEEEINMVASLAEKCLRLRHEERPTMKLVEMTLQFLRAERLNSSSDVPASKQEVEELLGTSTSYSDTLLDNKAATTSQQSKGYYSLEQEFASTTLPR

SEQ ID NO: 49847 - protein, 879 aa, Zea Mays
MINFYYQRVFHFGKGKSEGNKTMKELLGGKGANLAEMASIGLSVPPGFTVSTEACQQYQDAGCALPAGLWAEIVDGLQWVEEYMGATLGDPQRPLLLSVRSGAAVSMPGMMDTVLNLGLNDEVAAGLAAKSGERFAYDSFRRFLDMFGNVVMDIPRSLFEEKLEHMKESKGLKNDTDLTASDLKELVGQYKEVYLSAKGEPFPSDPKKQLELAVLAVFNSWESPRAKKYRSINQITGLRGTAVNVQCMVFGNMGNTSGTGVLFTRNPNTGEKKLYGEFLVNAQGEDVVAGIRTPEDLDAMKNLMPQAYDELVENCNILESHYKEMQDIEFTVQENRLWMLQCRTGKRTGKSAVKIAVDMVNEGLVEPRSAIKMVEPGHLDQLLHPQFENPSAYKDQVIATGLPASPGAAVGQVVFTAEDAEAWHSQGKAAILVRAETSPEDVGGMHAAVGILTERGGMTSHAAVVARGWGKCCVSGCSGIRVNDAEKLVTIGGHVLREGEWLSLNGSTGEVILGKQPLSPPALSGDLGTFMAWVDDVRKLKVLANADTPDDALTARNNGAQGIGLCRTEHMFFASDERIKAVRQMIMAPTLELRQQALDRLLPYQRSDFEGIFRAMDGLPVTIRLLDPPLHEFLPEGNIEDIVSELCAETGANQEDALARIEKLSEVNPMLGFRGCRLGISYPELTEMQARAIFEAAIAMTNQGVQVFPEIMVPLVGTPQELGHQVTLIRQVAEKVFANVGKTIGYKVGTMIEIPRAALVADEIAEQAEFFSFGTNDLTQMTFGYSRDDVGKFIPVYLAQGILQHDPFEVLDQRGVGELVKFATERGRKARPNLKVGICGEHGGEPSSVAFFAKAGLDYVSCSPFRVPIARLAAAQVLV

SEQ ID NO: 49848 - protein, 133 aa, Zea Mays
MAVILRYVNNQGHVMERFLALKHVKDTTSDALKEAIFGLLDHHGLSISKIRGQGYDGASNMRASVERIFSAMNIIKRELRNKIENDWMNDLMVCYTEKEIFKSLDDETITRRFQRLKTRRMQLPRVTTTRLTT

SEQ ID NO: 49849 - protein, 1191 aa, Zea Mays
MDSRFRECWFLLLRQFGLQVLAPQSSNINFMEWWHEANEAIQGPFRDGLNSLIVLGAWALWNHRKTHASLMVLLRKLSQFLDPIGGKFLHFRHYSDNSKSPFLYRCRLEGTVSEYEALLLTERQQNEAANAAVAESQARSEALVSKLEDAVKQNDLLHEAAQRFEEATKNLESSLTFEKQRHQANLIELDEAREKIEELQREVGDTDEKSTLLQTSIQSLEERLGEKDALLTTERLESEATKKSLNESEDRNKDLLMKIEVAEKDIAHFQETVQRNEENMAALETSLRSERQQKDAIMKQLAESQGEIGELQRKLEDADARNGLLQDSLQRLEESTADKDSLLATERHENSETKKELAGSQKKIAELLTEVQDTGAYIAELEGSVRRLEQDVSAKEVLLLTEKQAHEATRKTLTEVQEKSEELLKKIHDNDKHILQLQFTIQRLEETTVANENLLLREREQNDTTTKAHNESQEKYEELLKKFIDVDRKIDLLQGTIERLGENTTAKDSLLLSERHEKAAIKKALTEAEEKNEELLMKVEDANEKIGHLQTKINMLEDNVAAKDVSLEAAIKENDATRKSLTEAQERNGELLKKISDSDYRIHLLQDTVQKLQVDAISRLSSFVMEKQESDIAKRAVTEAHERNEDLLKRNEDLLKRNDDLIKKIEDSSKIVTQLQEALQRLEGKASNLEVENQVLRQHATSTPPSTAKSPASRSKISRIHRSPENGHILNGDIRQTEMKPSTGTSAAITSVANVPDLGDQKEFEHGEKLQRIPKQKYQPSHNQQPQDDQQWLVTCISQYLGFSGSKPVAALLIYQCLLHWKSFEAMKTGVFDSILHAINSATEVQNDMRTLAYWLSNLSTLTVFLQRSFKTTRTTISTPQRRRFSSERMFGNQTSNAGLAYLSGQSVGSAGLLQVEAKYPALLFKQQLVDLIEKVYGMISDSVKKELNPLLELCIQDPQTSQSSIAKGNLNGMGQQNQLTHWLGIVKILTSYLDVLRENHVPSILVHKLFTQMFSLIDVQLFNRLLLRRECCSFSNGEYIRAGLAELKHWSDNATREFAGSAWEALRHIRQAVDFLVISLKPMRTLREIRTDVCPALSIQQLERIVSMYWDDVNGTNTISAEFTSSLKSAIRDESNMATNFSILLDDDSSIPFSLDDITKTLPVIELADDDFLPFVHENPSFAFLLQRGE

SEQ ID NO: 49850 - protein, 70 aa, Zea Mays
MTWLLLLYAGFSPNYIIFSWLVDGFCKKNNADAMLATPDELTERGLPPDKAVYRYLIPRLCRKGLVDQAQ

SEQ ID NO: 49851 - protein, 482 aa, Zea Mays
MKYEWDDDMSLQRKDRHKLEFAFLRSLRMMLPVYSTLAVCFLACHIAREAILPSDIYRWAMEGNIPYVAAFTEVDRFLGSSFQDCPLDARQLFRPVRVIGAWQLEAAAGSIAQRVALRLPSVNFYAIAQRCLKDLLLPIDRILPHACQIYEWAMPAELWLSSNPARVPTRVCVMAILIVALRLLYNINGQGIWEKICEEGRNPSESHYDANSSTSRKLEASNSEEFGTRELLCAISVAYDKINTSHDYSSDLRSYLKYCKEVVFAGITSSDEQTHLIEIFWDMYKAREDDNIEDHVKSQSHSMADIPITNGVRKHYRDGAFVKASSFSASSGHDAMQMLKSEMQDHGFHYMPPRKPRKSDGYLRYRRRRLSGGFIFVAHADYYLLLRAFAKLAEIDIRIMHIRIPPPFLLEKNMWCHCVTVVLKNIRSLIPQELRASFCGLLALVSNLSTRTGQDVGLYLLKQYVPRIMPPFFRTDIIISGS

SEQ ID NO: 49852 - protein, 344 aa, Zea Mays
MDSDINLSLVADDKKPDEMKYEWDDDMSLQRKDRHKLEFAFLRSLRMMLPVYSTLAVCFLACHIAREAILPSDIYRWAMEGNIPYVAAFTEVDRFLGSSFQDCPLDARQLFRPVRVIGAWQLEAAAGSIAQRVALRLPSVNFYAIAQRCLKDLLLPIDRILPHACQIYEWAMPAELWLSSNPARVPTRVCVMAILIVALRLLYNINGQGIWEKICEEGRNPSESHYDANSSTSRKLEASNSEEFGTRELLCAISVAYDKINTSHDYSSDLRSYLKYCKEVVFAGITSSDEQTHLIEIFWDMYKAREVMMQCKCSSQRCKIMDFIICHLGNQGNQMVIFVIGGGG

SEQ ID NO: 49853 - protein, 500 aa, Zea Mays
MDSDINLSLVADDKKPDEMKYEWDDDMSLQRKDRHKLEFAFLRSLRMMLPVYSTLAVCFLACHIAREAILPSDIYRWAMEGNIPYVAAFTEVDRFLGSSFQDCPLDARQLFRPVRVIGAWQLEAAAGSIAQRVALRLPSVNFYAIAQRCLKDLLLPIDRILPHACQIYEWAMPAELWLSSNPARVPTRVCVMAILIVALRLLYNINGQGIWEKICEEGRNPSESHYDANSSTSRKLEASNSEEFGTRELLCAISVAYDKINTSHDYSSDLRSYLKYCKEVVFAGITSSDEQTHLIEIFWDMYKAREDDNIEDHVKSQSHSMADIPITNGVRKHYRDGAFVKASSFSASSGHDAMQMLKSEMQDHGFHYMPPRKPRKSDGYLRYRRRRLSGGFIFVAHADYYLLLRAFAKLAEIDIRIMHIRIPPPFLLEKNMWCHCVTVVLKNIRSLIPQELRASFCGLLALVSNLSTRTGQDVGLYLLKQYVPRIMPPFFRTDIIISGS

SEQ ID NO: 49854 - protein, 273 aa, Zea Mays
MAGPRRLLLLVPLLVLLGAHPPQCGSAEEGTKVSLELYYESLCPYCSRFIVNRLAGIFEDGLIDAVHLRLVPYGNARVASNSEISCQHGPYECLLNTVEACAIDAWPDLDVHFSFIYCVEDLVVKRQYKDWESCFEKLGLDPKPVTECYKSEHGHKLELKYANQTDALEPPHRYVPWVVVDGQPLLEDYENFEAYICKAYKGTPPKACQGLGRLQMALETAAEARNGVSYNSGVSKLATAEDEGGEHKAMTLSGVWRRAHRIGTTTAHGMRSL

SEQ ID NO: 49855 - protein, 278 aa, Zea Mays
MLPPCLAASALPIKEAVTEIEQLKVRVEDVSRRNSRYSLISDSGSKPIMQQQTAPKTIFGTMVLDMMVEARDTAKRQQGLGDLTQLLTKEQADLGVISVWGTGSELGTTSIIRKAYQDPELCQKFECRGWVKLTQPFNPHEFLRSMVAQFYANSCLQNGMVINVDELKRIEEMATTGGGLIGAFMDKVNENRYLIVLENLSTIGDWDTIGTYLPDRKNGSRVIVSTQQCEIASLCIGHSYQVAEVKQYSAEHSVCVFFEEATTLTMDDLLANERNEFE

SEQ ID NO: 49856 - protein, 1055 aa, Zea Mays
MADLVVGLAKTVVEGALTKAQSAIEEETKLQQSVQHNLVFIAGEFEMMHSFLNVANEERVKNNVVRTWVRQRQMLPPCLAASALPIKEAVTEIEQLKVRVEDVSRRNSRYSLISDSGSKPIMQQQTAPKTIFGTMVLDMMVEARDTAKRQQGLGDLTQLLTKEQADLGVISVWGTGSELGTTSIIRKAYQDPELCQKFECRGWVKLTQPFNPHEFLRSMVAQFYANSCLQNGMVINVDELKRIEEMATTGGGLIGAFMDKVNENRYLIVLENLSTIGDWDTIGTYLPDRKNGSRVIVSTQQCEIASLCIGHSYQVAEVKQYSAEHSVCVFFEEGLQGNGDKSMESDRVVDNNNEMSMQDEITHGTGFLSDRIPTSKRKDASDWVKNFQLVERKSEMNQLDNEGVVFNVKGLEDKAALKLFKKQVHRQKPSSPIKDSIDEELQELILKCGGLPKVIVAVANFLAPKTVSWMDSASSMNLKFMQELESSPEFACLQPLFGWLHSYFRTCPDFLKPCIFYLSIFPRDHSIRRRRLVRRWIAEGYARDTDKISAEERGEQFFCRLLDLSIIMQKPYSVTTGFRDSRMTLCQVNSFVREYIISRQMEENLVFELGGSCTLTSQRMGRHLIILKSWDRDRIVFESIDFSRLRSLTVFGEWKPFFISDRMRLLRVLDLEDASDLKDEDLKQMMKLLCRLKYLSLRGCTGIYSLPNSLGCLRQLETLDVRHTAIATMPRTITKLKKLQYLRASTTKPTKEQPTPDTAVTPKPTKKQPNPHTSVSWTSSLFHRHRQLEGVVVPTGLEKLTALLTIGVVNVNSARGRSILKEVRKLTQLRKLGVSGISRNNSKDFCLAISSRAHLDSLSVKLKKDNQDCLCVTPDGYLPPKNLQSFKLYGLADSFPKWINQLENLRKLVLEMTILTQDTIKGLKDLKVCILRLITKQLPDGKLNFCVMLHGQQLRCYETVKILEISCSSSLDVAFGSQSLQNLELLKVSCCSGSGSVMKLSGLEKLSESELKEVQIKGSDDFIVKTDVEEQLARHPKKPVLKVEKVLSSTGDFEL

SEQ ID NO: 49857 - protein, 892 aa, Zea Mays
MLPPCLAASALPIKEAVTEIEQLKVRVEDVSRRNSRYSLISDSGSKPIMQQQTAPKTIFGTMVLDMMVEARDTAKRQQGLGDLTQLLTKEQADLGVISVWGTGSELGTTSIIRKAYQDPELCQKFECRGWVKLTQPFNPHEFLRSMVAQFYANSCLQNGMVINVDELKRIEEMATTGGGLIGAFMDKVNENRYLIVLENLSTIGDWDTIGTYLPDRKNGSRVIVSTQQCEIASLCIGHSYQVAEVKQYSAEHSVCVFFEEVHRQKPSSPIKDSIDEELQELILKCGGLPKVIVAVANFLAPKTVSWMDSASSMNLKFMQELESSPEFACLQPLFGWLHSYFRTCPDFLKPCIFYLSIFPRDHSIRRRRLVRRWIAEGYARDTDKISAEERGEQFFCRLLDLSIIMQKPYSVTTGFRDSRMTLCQVNSFVREYIISRQMEENLVFELGGSCTLTSQRMGRHLIILKSWDRDRIVFESIDFSRLRSLTVFGEWKPFFISDRMRLLRVLDLEDASDLKDEDLKQMMKLLCRLKYLSLRGCTGIYSLPNSLGCLRQLETLDVRHTAIATMPRTITKLKKLQYLRASTTKPTKEQPTPDTAVTPKPTKKQPNPHTSVSWTSSLFHRHRQLEGVVVPTGLEKLTALLTIGVVNVNSARGRSILKEVRKLTQLRKLGVSGISRNNSKDFCLAISSRAHLDSLSVKLKKDNQDCLCVTPDGYLPPKNLQSFKLYGLADSFPKWINQLENLRKLVLEMTILTQDTIKGLKDLKVCILRLITKQLPDGKLNFCVMLHGQQLRCYETVKILEISCSSSLDVAFGSQSLQNLELLKVSCCSGSGSVMKLSGLEKLSESELKEVQIKGSDDFIVKTDVEEQLARHPKKPVLKVEKVLSSTGDFEL

SEQ ID NO: 49858 - protein, 586 aa, Zea Mays
MDSASSMNLKFMQELESSPEFACLQPLFGWLHSYFRTCPDFLKPCIFYLSIFPRDHSIRRRRLVRRWIAEGYARDTDKISAEERGEQFFCRLLDLSIIMQKPYSVTTGFRDSRMTLCQVNSFVREYIISRQMEENLVFELGGSCTLTSQRMGRHLIILKSWDRDRIVFESIDFSRLRSLTVFGEWKPFFISDRMRLLRVLDLEDASDLKDEDLKQMMKLLCRLKYLSLRGCTGIYSLPNSLGCLRQLETLDVRHTAIATMPRTITKLKKLQYLRASTTKPTKEQPTPDTAVTPKPTKKQPNPHTSVSWTSSLFHRHRQLEGVVVPTGLEKLTALLTIGVVNVNSARGRSILKEVRKLTQLRKLGVSGISRNNSKDFCLAISSRAHLDSLSVKLKKDNQDCLCVTPDGYLPPKNLQSFKLYGLADSFPKWINQLENLRKLVLEMTILTQDTIKGLKDLKVCILRLITKQLPDGKLNFCVMLHGQQLRCYETVKILEISCSSSLDVAFGSQSLQNLELLKVSCCSGSGSVMKLSGLEKLSESELKEVQIKGSDDFIVKTDVEEQLARHPKKPVLKVEKVLSSTGDFEL

SEQ ID NO: 49859 - protein, 1193 aa, Zea Mays
MADLVVGLAKTVVEGALTKAQSAIEEETKLQQSVQHNLVFIAGEFEMMHSFLNVANEERVKNNVVRTWVRQRQMLPPCLAASALPIKEAVTEIEQLKVRVEDVSRRNSRYSLISDSGSKPIMQQQTAPKTIFGTMVLDMMVEARDTAKRQQGLGDLTQLLTKEQADLGVISVWGTGSELGTTSIIRKAYQDPELCQKFECRGWVKLTQPFNPHEFLRSMVAQFYANSCLQNGMVINVDELKRIEEMATTGGGLIGAFMDKVNENRYLIVLENLSTIGDWDTIGTYLPDRKNGSRVIVSTQQCEIASLCIGHSYQVAEVKQYSAEHSVCVFFEEGLQGNGDKSMESDRVVDNNNEMSMQDEITHGTGFLSDRIPTSKRKDASDWVKNFQLVERKSEMNQLGNYIAKARVYGLQILSVWGIAGVGKSALVRNMYFDRIHRNDQLFEKYGWVDVTHPFNLRDFSRSLLLDFHSEPVQAMGIKDPTQECHKILEDNRCLVVIDDLQSIEEWDLIQAALVSRPSRSIIIVITTEASIATYCADNEGVVFNVKGLEDKAALKLFKKQVHRQKPSSPIKDSIDEELQELILKCGGLPKVIVAVANFLAPKTVSWMDSASSMNLKFMQELESSPEFACLQPLFGWLHSYFRTCPDFLKPCIFYLSIFPRDHSIRRRRLVRRWIAEGYARDTDKISAEERGEQFFCRLLDLSIIMQKPYSVTTGFRDSRMTLCQVNSFVREYIISRQMEENLVFELGGSCTLTSQRMGRHLIILKSWDRDRIVFESIDFSRLRSLTVFGEWKPFFISDRMRLLRVLDLEDASDLKDEDLKQMMKLLCRLKYLSLRGCTGIYSLPNSLGCLRQLETLDVRHTAIATMPRTITKLKKLQYLRASTTKPTKEQPTPDTAVTPKPTKKQPNPHTSVSWTSSLFHRHRQLEGVVVPTGLEKLTALLTIGVVNVNSARGRSILKEVRKLTQLRKLGVSGISRNNSKDFCLAISSRAHLDSLSVKLKKDNQDCLCVTPDGYLPPKNLQSFKLYGLADSFPKWINQLENLRKLVLEMTILTQDTIKGLKDLKVCILRLITKQLPDGKLNFCVMLHGQQLRCYETVKILEISCSSSLDVAFGSQSLQNLELLKVSCCSGSGSVMKLSGLEKLSESELKEVQIKGSDDFIVKTDVEEQLARHPKKPVLKVEKVLSSTGDFEL

SEQ ID NO: 49860 - protein, 398 aa, Zea Mays
MYLPERVMRQFGLRQCIPPPFRPTLQSLHRISRRGKERENWEETHHEYIQEWEARRQRIFRDTEQYDPSSYEEYLRWYSGATRRYLVPATSDDGEAGPSAPTDDFSDLQYQAKSPIIRKAVDKLESMVKKAKRAMTTTADTTTQALVAEFLLGFEDVLQDLGEIQNNSGSTVPPFHLDSPHFDAAASQQTPQLLLEAEENLGTNQEAQLEEDEELNTVERASLALETVEEENDFSNDVLPGNLSLGVEEDCDSATPANGICDAATPMTDLVVPRSDEGLHQDQHLEDHTEIEPATLMVEPKCEEGDGSSFVLPPSPPELMLEEQDDSGLIALGTGSCTEQQSLGVGEAEDQENPRTGTAQHGIMIVERTGEENSSCNGVYSSCPPSSVIVESSSDYLC

SEQ ID NO: 49861 - protein, 385 aa, Zea Mays
MWVFYLISLPLTLGMVVVTLRYFAGPAVPRYVVATVGYAWFCSLSIIILVPADIWQTLTASAKGGIGFFWSWSYWSTFILTWAVVPTIQGYEDAGDFTVKERLKTSIHMNLLFYSIVGAIGLIGVILLLIMHRAWDGGIVGFAMACSNTFGLVTGAFLLGFGLSEIPRNIWKNAYWSHRQKVLSHRVAKMAVKLDNAHQEYSNAIVVAQATSNQMSKRDILRPYMDIIDNMLSQMLREDPSFKPSGGRFGENDMDYDTDDKSMATLRRQLRRAHEEYYRGKSEYMTCVMEALKLEDTIKNYERRDASGWKYVSSFRDRRSGTLGPILDTIGCCFCTLDVYVHLHILFIIQDWYVDVLFPDSKTNQLCQLAYDLFNGCKICTSYLL

SEQ ID NO: 49862 - protein, 183 aa, Zea Mays
MNGACFHPQDGGIVGFAMACSNTFGLVTGAFLLGFGLSEIPRNIWKNAYWSHRQKVLSHRVAKMAVKLDNAHQEYSNAIVVAQATSNQMSKRDILRPYMDIIDNMLSQMLREDPSFKPSGGRFGENDMDYDTDDKSMATLRRQLRRAHEEYYRGKSEYMTCVMEALKLEDTIKNYERRDASGW

SEQ ID NO: 49863 - protein, 572 aa, Zea Mays
MWVFYLISLPLTLGMVVVTLRYFAGPAVPRYVVATVGYAWFCSLSIIILVPADIWQTLTASAKGGIGFFWSWSYWSTFILTWAVVPTIQGYEDAGDFTVKERLKTSIHMNLLFYSIVGAIGLIGVILLLIMHRAWDGGIVGFAMACSNTFGLVTGAFLLGFGLSEIPRNIWKNAYWSHRQKVLSHRVAKMAVKLDNAHQEYSNAIVVAQATSNQMSKRDILRPYMDIIDNMLSQMLREDPSFKPSGGRFGENDMDYDTDDKSMATLRRQLRRAHEEYYRGKSEYMTCVMEALKLEDTIKNYERRDASGWKYVSSFRDRRSGTLGPILDTIEFIWQCILRKQLQKAFAVILGCMSAAILLAEATLLPSVDLSLFSILIKVVGKQEVLVQVAAFVPLMYMFICTYYSLFKIGMLMFYSLTPRQTSSVSLLMICSMVARYAPPISYNFLNLIRLGGNAKTTFEKRMGNIDDAVPFFGRGFNKIYPLIMVVYTLLVASNFFGRVIDFLGSWKRFKLQQEEENIDGLDPSGMIIVQKERSWIEQGCKVGEHVIPLARNFNGVNTDIESQNVPLSCVD

SEQ ID NO: 49864 - protein, 53 aa, Zea Mays
MVEIFKLCCSHSRTSAGEFIASGSDDGRWFIWEKRTGRLIKMLAGDGAVVNCI

SEQ ID NO: 49865 - protein, 367 aa, Zea Mays
MKFVTRWIEVTREWQMERARLQALEMQPRPGDGRREPVPGRHTAGEARAVHAGEPPRVHPQLRGAARVRRIRRGVPRRVPERGAGGRQDPQQHAGPARRGAVHGGGGHRGAHLPHQPRPPLRLLLRRHDQGAGVRVPREGLAGPRALRPRGRRARLRRAVRHRGRHGARGAVPARGVPAPDHPLRHQARQRAAHRGLHPQGGRLRPRQALQPRQHPPHDDRRAGHARVRGAGAVAAAARHAQVRRVQLRHAGVRDPREAAQPGAAAPRRDREPGVVPQVGVAEVRPGEVRRRHGSVGDPRQGRGEGGADVQGGALVRAVPAGGEAVHEQRRQDAGRRGGDCAARQSVHVHGERAHGFQLQQRRRRRR

SEQ ID NO: 49866 - protein, 911 aa, Zea Mays
MGTRRYYQKECSEGTTLILLISSILMVTICLLSLFILLITLAKFLLRGARVVIMRFGLSFASFFSKAQTRLVLLSCQCVFPRMIGKDVATQYVEGWDWMCPIRDRNTGIWDEVSISISGPVNITDPHLVSTFHDDFKRSYLHCTLQLENKSSWIADCTLKIQVSTELEGNICLVEHLQSYAITVPPQSDIEYTIPSLFFYKPNLWWPNGMGKQSLYNIEISVDVKGFGESDSWSHYFGFRKIESTIDDSTGGRIFKVNGEPIFIRGGNWILSDGLLRLTKKRYMTDIKFHADMNFNMLRCWGGGLAERPDFYHFCDVYGLMALKLPVLVPIMTESTFPKWWKKSKKVWQEFWITGDVDGRGIPVSNPNGPLDHDLFLLCARDTVKLLRNHASLALWVGGNEQVPPVDINKALKNDLKLHPMFVSYQTSKSEVIYLSEESTDPSKYLDGTRVYVQGSMWDGFANGKGDFTDGPYEIQYPESFFKDSFYKYGFNPEVGSVGVPVAATIRATMPPVGWSIPILKKRIDGYIEEVPNPIWDYHKYIPYSKPGKVHDQIELYGAPKDLDDFCEKAQLVNYVQYRALLEGWTSFMWTKFTGVLIWKTQNPWTGLRGQFYDHLQDQTAGFYGCRCAAQPIHVQLNLVTYFVEVVNTTADELKDMAVEISVWDLDGACPYYKVTEKIVIPPKKVKQIIEMKYPKMKDAKPVYFLLLKLFRLSDNGTISRNFYWLHLPGQDYKSLEQYQQKKIPLKIDSDVSVSGTRHKVRMTVENISKKSVVDSTRSVSAMDLGDASGSHSTRKETTRKGNGSDGLWRKIRSGLGVARPSDNRRTLEVSGTDSGVAFFLHFSVHTSESSTDGEEYNDTRILPVHYSDNYFSLTPGENMAVDISFEAPQGSSPRVVLRGWNHHLDHAVMI

SEQ ID NO: 49867 - protein, 251 aa, Zea Mays
MQCPRLALLVPLPCRESSPPTSSPEISPPETRPRHGCRSFRPACPPRPPLPRGCCQNWWVDDLSVVKVDHSQVSAVSAYFRSGLPAAIDGSAVSVHFRRMSVFASTRPVAAALGAAAFEEVLTLVPGLLLPRRQGRRQVRAPRLSCLRRRLHSRPREQHRGGEVAGLRRGSMARAVSVQVPTPLPARSRGVRVLHEVLPSLRSARPVPSSVADGGPDARKEEVAAPDCTEEGSPEAKHCTSVEPVFVSFGG

SEQ ID NO: 49868 - protein, 813 aa, Zea Mays
MASPRRIPSVPARSGNKENISQDGEAPLDFATLPKEGPATTRRKKKLAGFNLRKSIAWNPAFLTEEGVLDNSELSVLTGSQPMANRSPGSGVSSIMSPSCQSGRYGNTYVRKEAAGNSHGKLPARYHRAESQGRKLFSSAKTPQGDNQKESAGTQNRSSARIIQICTPRVPAGSIYPNEVLGRIEQALKFFPLITMSRIPKQLRPSLPKVPRSTSSVTNNLESHKKIAPVKAELVHRVTGFPARLKINPVSSGPSIEKAVVPAVTAIHEEATVKCKKNPAHPQISPSTPFDSTVSKLAKPSALRLPSPSLGFFTQEKAHVPHGDAAKRNVGRCFSSNTSALDRPPRYRQSEESRLHLAKQLSTNGTVASNLVLPVTREGHLKSLVVPENESSSKVIITYLEKSGNVNNQAMPKADFLLAGTGATDTTQPMNLEKKDDAGNSETLLVEGMDDIKEIEPLDNFYAPEAICSSTIRPVEDSFSLEASYSSTKPIVESKLSLSCISSKVHSSSELSCQGKSVSDPSAAMDMENSNVGDTALSASLSKGRSCTPALDLLQGFYSFDRQNIECPMLMESVSTICADQLPHCDSLSDETPALAGSHSDLNDSLCDEAKPALSKEPNTEGEMELQTNSTIAVKETPLLDVGCGHIHNYRTTDCSTRLEAPTPCVERRHALLVEPNMEEKMVLDTNRLSAIQYTPHIEKNKALERSPANTIRKDHLKNLIPFTEEWLAVMESCGQEVLEQKTGAVQNSPPDKTPPEPSPWSPVKRKAQDVGPFDCTKYSKSIRTSGQLKQLETEQLEQPRPVALFCPSNSDE

SEQ ID NO: 49869 - protein, 593 aa, Zea Mays
MSRIPKQLRPSLPKVPRSTSSVTNNLESHKKIAPVKAELVHRVTGFPARLKINPVSSGPSIEKAVVPAVTAIHEEATVKCKKNPAHPQISPSTPFDSTVSKLAKPSALRLPSPSLGFFTQEKAHVPHGDAAKRNVGRCFSSNTSALDRPPRYRQSEESRLHLAKQLSTNGTVASNLVLPVTREGHLKSLVVPENESSSKVIITYLEKSGNVNNQAMPKADFLLAGTGATDTTQPMNLEKKDDAGNSETLLVEGMDDIKEIEPLDNFYAPEAICSSTIRPVEDSFSLEASYSSTKPIVESKLSLSCISSKVHSSSELSCQGKSVSDPSAAMDMENSNVGDTALSASLSKGRSCTPALDLLQGFYSFDRQNIECPMLMESVSTICADQLPHCDSLSDETPALAGSHSDLNDSLCDEAKPALSKEPNTEGEMELQTNSTIAVKETPLLDVGCGHIHNYRTTDCSTRLEAPTPCVERRHALLVEPNMEEKMVLDTNRLSAIQYTPHIEKNKALERSPANTIRKDHLKNLIPFTEEWLAVMESCGQEVLEQKTGAVQNSPPDKTPPEPSPWSPVKRKAQDVGPFDCTKYSKSIRTSGT

SEQ ID NO: 49870 - protein, 699 aa, Zea Mays
MPTTAPPVDAEPPECPVCLSPFDAASVVPRVLPCGHSLCGSCIAALPPASAAAGASSLRCPLCSQCVPYARALGPSSLPKNLALLTLLPSPSHALSAATLVTAPLPHPHPLHAAHSRLLSRFRHAVLPESASPLGSEPSPVHLAFGSLGSDLGAPWFCARGRPVSLLPIETQPVPPTKQEAEFYRPSHATRVLAAVDALSDATKEELAGLIASSARLARMVSRLYGVWMSPHAPPLWMVSERHPRTVSQLLEEEIINREETVVRAGFLVMEACEVIMGLHSEGLVLGCLGLDCFCLDRFGHCMLDLNQALALCRGVQAGASSNSVRAFIAPEVAAVLGDTLRTEGRDFDGLVGCTSDIWSLGCVFVALLTRDEQLVPVAGWNSEGLYDDWEKEVVTRLDATLLGTILEPLAAVIASCLRYDPKSRPEIADVWKCIRGLLTKFGDVTLAPDDDVAAQKSFRCLLLGELSSMFVDSGAVESDDKTQLSRGADGNSSNQDHGSNDGFLNNSGNDLSGIDGPQSVGVFKSSTLLAHRDCVTGLAVGGGFLFSSSYDKTINVWSLQDFSHVHCLKGHEHKITAIVVVDNDSHSLCISGDSGSGIFVWRVDSTLKEEPLNKWYEHNDWLYRGVNCLAVSGTGYLYTGSRDKTIKAWSLEVINQLCLALQWPVVFFTVEVGMVPFVYGGSLIIHHCLSWKMMQQEA

SEQ ID NO: 49871 - protein, 759 aa, Zea Mays
MDESRKRAVSTANGKNISSSLDEDFGNDFLSSWKLPKSGKDTIDFSVDSVPKSSKKFSFDNLDDFGLNGAFDKLPSFQMGMSDLDFSSPDKKKVKHTSSNADLFEKKKETDKDNFSFSFDFNELGKFSLDGKLGIEEKSTNRFNGKSDPVSSEVKKDTQRGLLAKGNAILEENNSKDKMHTLDTRTSRPSHLTNHENVKNASQPTSNIDVADSSDKMQEHTSVNPATMEQTKVDSVLNDNPGEHPKEIYAMKAAVNIPSQDFSCGAISSEDPTQGPADHVNSKDAPIVNCGKVHVSRESNDDEQSNGLQSRDTSIINSNVSRRPSGQFNSQNEVLEESVSLNEGSQDNQSFSGAPKKFLKKTSHGTTNTEEEISGPKILSCSVQREIRSVEPAPMKERGSFSLLSKSVHMKATRVELTSETALNQSSSASKVIKKMTTHPTDLKREHMQANAVPHKSKTALSKTYSKLASNGLLATSMNAKVDTNAKLGLEPPISGKSSLLNARSSTPHSAGHKVVASHVLLKASNTSDSLQGVPSKDNKSSTISQLTGARITKLGIRSLKSDMALEKESVQVSGTKCSPVTTSRILDSIPEGKPALPSPSIMQKVPEESALNPKAPKVLKHIMRSPAVRKSPRTVPELGNEMILGSGTPKAHVDNAISSRMPPGMGAISDLELPVLENDGNIEKAEACRKELEDICILLKRKHAEAKELAVRAIVNNNTMLMLNHPMIEEKIYSIQKFANDLKSKKYLFEEVGTINSH

SEQ ID NO: 49872 - protein, 707 aa, Zea Mays
MPSSTSAGGGAIPAGPPSTLSPNAAPYTFLARQSRAPPGRLQDGDAPRLIDNNFVLYGEDNSSYSVPLAAQSGMKQSDTVYSSSSHGTHQGQPSSARGIPVGVYPSPTSSIAIVSEPSVTIGSDFNQHLVPLTSGKGSRQPRVTIRSPPNKTSETNNTIFGSVSKLAIRKNDESNKETGKHVSFSRNLQLGSPAHGNGNSNGAMALSKELNPDFGVKPLVLSACTSPCVTMADDLNPDPSECSVDSPCWRGTASRLSPFDGLPTSIVQSVKQELVPIDAGKEQSSTTDCEAPTKLQNLVCSKSTQNHSQSHVKLGLSKEPGDICANITQYSHRKKHFAEHSAVNCNADQHCLAVIDDCIKRSGLNSAAPDFVPLAVRKSNTSDGSCSSSGTNVSGILKEINSLSEVLCNNYSDEIKLEEHDHSLLQSVIGNLQSYLHKASKVPAMVDSDKSGGLKACYAQNAVSKPVAGDYNGSFTADNGKGISISNLGDSSPLVGDLRKKSVTGYQPALSNFPKELSWEERSQALIYKKLWFDAERTNCALKYQLKQTRVEIDLESSTAHIGGGPRNSSFHLCDVGVDPSSSYGSAITCPPMMLKGHPGERKSHNLLSAADHIQSGDSSALSRPKGYIAVPENIEDGYFLSGPEETGVRRHARPGLQSRPLGRLNTSTSDGMSSSYVTGRDDILRGSCEFGSSDWEHVLKEEIGST

SEQ ID NO: 49873 - protein, 291 aa, Zea Mays
MGSLYGKMILRVCLFFPMPTWSRVSDLISEHGRSLSQWIHLGGVKAFLDGSLGSSSALFHEPYEGDPDNYGLQMTDLDSLLNRTLESDKSGLQVAIHAIGDKANDILLDMVDKIVDLNGAKDRRFRIEHAQHLAPGAANRFGKHGTIASVQPDHLLDDADHAWSKIGVERSERSSYTFRSLLDGGAQLAFGSDWPISDINPLQAIRSAVFRKPPGWEVPWIPAERLTLDESLKAHTMSAAYACFLDHAVGSLSEGKYADFVVVPSTSWDEFSSDLPGHVLATYVSGRQAYP

SEQ ID NO: 49874 - protein, 216 aa, Zea Mays
MPLPSAAQSALVVAAVAIATATVLLPFPRTPPRDRFADMVLANGTIYTADPARPFADAMSVRGGRVLRVGTYESVKELKGPRTRELNLSGNVVLPGFIDSHVHFIDGGLQLARVPLRGVRSKDDLVARVKEAVRDKQPGQWILGGGWNDDFGGDGLPAAVWLDDISPDNPVWLSRMDGHMGVANSLAMKIAGIDKNTNDPIGGTIIRTTEGGNTTN

SEQ ID NO: 49875 - protein, 344 aa, Zea Mays
MKPIFDVIQNVSNHERREALLRASRHALMRGVTTVVDVGSYFPGASAEKTWQDFAELEGFTCLVFIYDLICTPGILTQDLISEHGRSLSQWIHLGGVKAFLDGSLGSSSALFHEPYEGDPDNYGLQMTDLDSLLNRTLESDKSGLQVAIHAIGDKANDILLDMVDKIVDLNGAKDRRFRIEHAQHLAPGAANRFGKHGTIASVQPDHLLDDADHAWSKIGVERSERSSYTFRSLLDGGAQLAFGSDWPISDINPLQAIRSAVFRKPPGWEVPWIPAERLTLDESLKAHTMSAAYACFLDHAVGSLSEGKYADFVVVPSTSWDEFSSDLPGHVLATYVSGRQAYP

SEQ ID NO: 49876 - protein, 726 aa, Zea Mays
MQNLLTSSPLLNLSDYTSISSLLLGTDVPGSSTGFVEPAFISARPIYVLQPQCKSGDSVTIPITVGSVNAQKAEIKCVQGLPLWRNSSITINEETFRGYRKGKTAKGINEIAMGYDFQDSNENHFNVLTLYNSTYENASFIPMPFALLRIPHSLNAVSNAYLQLIQGSGVKMLLDFTKEMPKQATRLTFDFSAVAGVNFFKINDYSIQFVFFFSFINLQIVLAFLASSFFSKVNTAQAIAYLYIFGSGLMAGYLIRNFIEGGKFPRHWITVLEIIPAFSLYRGLYELGQYAVRSSETGSPGMRWSDLNDHMNGMRDVLIIIILEWLVLLPVAYYFDYASSVGHRSSPLSIIKHLLKKDPTWRRITANEIDGKDVHIEMEKVDIIKEREAVDQVLQQQQTSGYAVVCDDLRKVYHGKDGNPDKFAVQGVSLALPYGECLGILGPNGAGKSSFISMMIGFVKPTSGNAFVRGFSIQNDMEKIYSSMGVCPQNDMLWETLTGREHLQFYGRLKGLSGSSLDLVVDESLRSVNLLHGGAPDKQVKKYSGGMRRRLSVAISLIGDAKVVYMDEPSTGLDPASRKSLWSAVKQAKQDRAIILTTHSMEEAETLCDRLCIMVDGKLQCIGTPKELIARYGGYYVLTMTTLPEFEQEVEDLVRRLSPSSRKVYHLSGTQKHELPKQEARISDVFMAVESFKKRVEVQAWGLADTTMEDVFVKVAKGAQSSEELS

SEQ ID NO: 49877 - protein, 95 aa, Zea Mays
MLLEPYNQIDHPECKSRPDSGLSAITELDPGYITAGSVRVNGPVTDSRYPAHQQIPQAYGYRQMPARLDSTNPSQAMGGYTLQSQKETLFEELPF

SEQ ID NO: 49878 - protein, 74 aa, Zea Mays
MLHIHAKSLRCCKTTETECFMSFIMVLAETFCAQICLPDELISRLFMWLLILTPLRHIYTGLVVMGDMGTLVWQ

SEQ ID NO: 49879 - protein, 106 aa, Zea Mays
MLFSAVNCWLKCMLLEPYNQIDHPECKSRPDSGLSAITELDPGYITGSVRVNGPVTDSRYPAHQQIPQAYGYRQMPARLDSTNPSQAMGGYTLQSQKETLFEELPF

SEQ ID NO: 49880 - protein, 87 aa, Zea Mays
MLLEPYNQIDHPECKSRPDSGLSAITELDPGYITGPLSSVWKEWVKWCVEFGIEANAIIAVPYDWRLPPSMLEERDLYFHKLKISKS

SEQ ID NO: 49881 - protein, 152 aa, Zea Mays
MCVTKAGFELTRVTLIDIKGLVVLDRLVKPANSIIDYNTRFSGITAEMLADVSTTLQEIQEEFVGLVYKETILVGHSLENDLMALQISHGLIIDTAVLYKYKRGSRCKIALRVLTRKFLGREIQNTGSGHDSVEDAKAALELAILKIKHGRN

SEQ ID NO: 49882 - protein, 195 aa, Zea Mays
MSIIIRTSNLMILGTYFLFAIAKSNHVNFIVPIGAMSMYSYFCPEPLCKGKWKEMDWHTAGWIFLNTFIDRRRRRRRSSTSRLSTADRSFVSLAPGCMNAQYMLQHRRPWPCRLRRSLPCALRGPREWPTRTFIVLFLAEGSPAPVVVSEGANTMDVGRPVLVQNAPRTRLDAGTWGTMGIGLGYCIAAAVAEPE

SEQ ID NO: 49883 - protein, 488 aa, Zea Mays
MSCLGNSSEETSGAGTRASMERVKHENFCRAVAEDNTALLLSAVGNFRKEALCRIRKGSDASRVLDQEMSVRLLHLACKHDAVECATLLLEGGSGITAAPIDARDQLTRTPLHVAAETHSARCIELLLSKNARTDLRVVDGRPLLPLEIALMSRRVQTNWSVDNPIEDLLSFLKQRDLNAVRLLAEKTRVVGELAYRYAMEGCVPALTMLLLVVEEKISSQVSVVIEGVRTKRSIYNSIVDEALSTGDTSARDGHERRKALLCEIQLLNQFGSASWRDHNDKRTLPPLLRAAKVGDMNVIKMLLMGNVDVNEADSEGNTALHWCLSGASCTKEPRIVWLLLKNGARVFQGNKLGLTPVHSAAAKGNYKALQSLLLHAQDCVDIPTKTKETPLFFAVKNGSVDCAKLLLRFGADTKARNLRKQRPIDVATSQDMRFILSSANVLLFSGNHNSPQKNRVMRKEIYKELGDEFDDFDKDSCDESYTGLKTS

SEQ ID NO: 49884 - protein, 278 aa, Zea Mays
MAEDDMELWKWVLLPRIRTVTTMLMRIERNKFLIDFLSWEVATTLQVVGTQKNRCTINPGDSCKPKWYSPVGRSFYSPNLGRRQKLGEGLESWRGFYQSIRPTQMGLSLNIDMSSTAFIEPLPVIDFVAQLLNRDISVRPLSDSDRVKIKKALRGVKVEVTGNMRRKYHISGLTSQATRELSYVSFIAGMRFPVDDRGTVKTVVQYFMETYGFSIQHTTLPCLQVGNQQRPNYLPMEVCKIVEGQHYSKRLNEKQITALLKVTCQRPQERELDILQDS

SEQ ID NO: 49885 - protein, 593 aa, Zea Mays
MECGAGKEGYDAYKPGHQAVGGSRGKFMGARVTVKMACGLQVLRKKQLVSLGNKGQCANIKEEGVSAGLRIQFEEWVEKEEVIGDHYLYLKFGVGHFGMDENGDEVENDLNSSEEKENKYGVEDFIEKEDDSSSKRNNKKVKCNADTKGVFIHASVNGEFMEILKKKANEILDLAVDKALGKIVDRVLKEPFDITGFESWLIAAFQRYLIRDLKVAKEEQDIGFYAGFVGATYFLGRTISAVPWGIFADKYGRKPCIVISILSVIVFNTLFGLSTTYWMAIVTRGLLGLLCGILGPIKAYASEVSRKEHQALGISFVTSSRAIALVIGPSIGGFLAQPAQKYPKLFSEESIFGRFPYFLPCFVISVLAVGSCIACIWLPETLHFHDDEKAECIQELESQVGGSKSTENLLKNWPLMSAIILFSIFSLHDTAYLEIFSLWAVSSRKFQGLSFTSQDVGTVFAFSGLSVLVYQLTIYPLLSKYFGPVKIFRPAVILSIILLITYPFMSNLHGLELKILVNIASILKNVFAATITIACNILQNTAVTQKQRGTANGISVTMMSMFKAAAPAAAGIIFSWAQKHIYGLFLPANPMKH

SEQ ID NO: 49886 - protein, 599 aa, Zea Mays
MECGAGKEGYDAYKPGHQAVGGSRGKFMGARVTVKMACGLQVLRKKQLVSLGNKGQCANIKEEGVSAGLRIQFEEWVEKEEVIGDHYLYLKFGVGHFGMDENGDEVENDLNSSEEKENKYGVEDFIEKEDDSSSKRNNKKVKCNADTKGVFIHASVNGEFMEILKKKANEILDLAVDKALGKIVDRVLKEPFDITGFESWLIAAFQRYLIRDLKVAKEEQDIGFYAGFVGATYFLGRTISAVPWGIFADKYGRKPCIVISILSVIVFNTLFGLSTTYWMAIVTRGLLGLLCGILGPIKVTSSRAIALVIGPSIGGFLAQPAQKYPKLFSEESIFGRFPYFLPCFVISVLAVGSCIACIWLPETLHFHDDEKAECIQELESQVGGSKSTENLLKNWPLMSAIILFSIFSLHDTAYLEIFSLWAVSSRKFQGLSFTSQDVGTVFAFSGLSVLVYQLTIYPLLSKYFGPVKIFRPAVILSIILLITYPFMSNLHGLELKILVNIASILKNVFAATITIACNILQNTAVTQKQRGTANGISVTMMSMFKAAAPAAAGIIFSWAQKHIYGLFLPGNQILFLTLNMVSIIGLVLTFKPFLSQPIQ

SEQ ID NO: 49887 - protein, 448 aa, Zea Mays
MVPGRVARTTGRHGGGRRAAGGTSGGRRRRAARRRGDRGGLRVRDVGLVAAGQVRLRHLRLGPRRPAQPVSLCPLAPPQDLSNKVLLNAVRAFSPPLLLRLGGSLQDKVMYGYGAGRPCAPFVRNASEMHGFSQGCLPLRRWDDLNAFFRRSGAKVVFGLNALNGRVPLPDGSMGGPWDYTNAASLIRYTANKGYRIHGWELGNELSGTGVGARVGADQYAADVIALKALVDDVYRSEPSKPLVVAPGGFFDQAWFTELVVKTGPDLLSVVTHHVYNLGPGRDTHLIDKILDPSTLDGMVSTFSDLQRLLKSTGTSAVAWVGEAGGAYNSGRHLVTDAFVFSFWFLDQLGMAARFDTKSYCRQSLVGGNYGLLNTTTFQPNPDYYSALLWHRLMGTKVLAVTFSGTNKIRAYAHCARDSVSNSAALFFHLLENSRSLDVASSQESLCC

SEQ ID NO: 49888 - protein, 194 aa, Zea Mays
MFPREVTVPGYTHPLVAVGTGYREKFFVKVYAAAFYVDYSLRLDTEQWKAKTGIESFDSSSVFDSIFKAPVVKSLSIILVRAVDGKTFVNALNDVIARQIKNPNAEEESSLSTLQNTFLGRNLKQGTSIYLTWLEPKRMLISISEDEDPRQVDAEIKSATVNYALYDGFFGKSTVCPSLRSSTAQLLDALLLAK

SEQ ID NO: 49889 - protein, 262 aa, Zea Mays
MALSPNIMRDTSDKVLTHGQPGEEVSLELILRVVADVGLVGLPNAGKSTLLSAITLARPDIADYPFTTLMPNLGRLGGDPALGALQFSSEATLADLPGLIEGAHLGKGLGRNFLRHLRRTRVIVHVVDAAADDPVNDYKIVREELRMYNPQYLERPYVVVLNKIDLPKAQDRLSALVLEISSIGCEEGHEQSGSKDNLNGRVSDHQVLSEAKAEGVEKELGDYPRPEAVVAASVLRHIGIDEMLKEIRAALRKCFDHKLPEH

SEQ ID NO: 49890 - protein, 328 aa, Zea Mays
MFGNWFVQPGFSSLKFAHQFWRSAYCDVSMPPEGLQEFLPHLIPTLLSNMVYADGDESLDDAEEDESFPDRDQDLKPRFHDSRLHGSETGDDDDDADAVNVWNLRKCSAAGLDVLSNVFGDSILPTLMPLIEQNLARTDDDSWKERETAVLCLGAIAEGCISGLYPHLPQIVAFLIPLLDDKFPLIRSITCWTLSRYSKFIVQSLDHPNGRGQFDKILMGVLRRILDTNKRVQEAACSAFAILEEEASEELVPHLEVILQHLMCAYRKYQRRNLRILYDALGTLADAVGAELNQAKYLDIFMPPLITKWQQLSNYDKDLFPLLECFTS

SEQ ID NO: 49891 - protein, 726 aa, Zea Mays
MAASALWQPQEQGLREICAHLEAHISPNSDQARIWQQLQQYSQFPDFNNYLLFILARGEGKSIEVRQAAGLLLKNNLRTTYISMQSSSQHYVKSELLPCIGATNRAIRSTVGTVISVLFQIVRVAGWIELFQALHKCLESNDLDHMEGAMDAIYKICEDVPEELDVDVPGLSERPINVFMPRILQFFQSPHASLRKLSLGIINQYIVVMPSALYMSMDQYIQGLFNLAKDSSADVRKLVCSAWVQLIEVRPSILEPHLKNVTELILQANKDSDDEVALEACEFWSAYCDVSMPPEGLQEFLPHLIPTLLSNMVYADGDESLDDAEEDESFPDRDQDLKPRFHDSRLHGSETGDDDDDADAVNVWNLRKCSAAGLDVLSNVFGDSILPTLMPLIEQNLARTDDDSWKERETAVLCLGAIAEGCISGLYPHLPQIVAFLIPLLDDKFPLIRSITCWTLSRYSKFIVQSLDHPNGRGQFDKILMGVLRRILDTNKRVQEAACSAFAILEEEASEELVPHLEVILQHLMCAYRKYQRRNLRILYDALGTLADAVGAELNQAKYLDIFMPPLITKWQQLSNYDKDLFPLLECFTSIAQALGPGFAQFAEPVFQRCINLIHSQQLSKIDPTAAGAVYDREFIVCSLDLLSGLAEGLGAGIESLVSSCLCIWYHFPFQVHFRHDHTNTPLTYPHGCVRGGVQLFNHWVQSYYHIGAMLNMYLEEEFAIVKGEL

SEQ ID NO: 49892 - protein, 571 aa, Zea Mays
MEAVKKLHAHLVVSGLHNCQYAMSKVIRLYALHQSDLVSAHKVFKQIESPTTFLWNTLLRGLAQSDAPKDAIVFYKKAQEKGMKPDNLTFPFVLKACAKTCAPKEGEQMHNHVIKLGFLLDIFVSNSLIYLYAACGALACARSVFNEMLVKDVVSWNSLIGGYSQHNRLKEVLTLFKLMQAEEVQADKVTMVKVISACTHLGDWSMADCMVRYIEHNHIEVDVYLGNTLIDYYCRIGQLQSAEKVFSQMKDKNTVTLNAMITAYAKGGNLVSAKKIFDQIPNKDLISWSSMICAYSQASHFSDSLELFRQMQRAKVKPDAVVIASVLSACAHLGALDLGKWIHDYVRRNNIKADTIMENSLIDMFAKCGCVQEALQVFTDMEEKDTLSWNSIILGLANNGFEDEALDIFHSMLTEGPRPNEVTFLGVLIACANRQLVEEGLDHFERMKSVHNLEPQMKHYGCVVDILSRAGQLEKAVSFISEMPLAPDPVVWRILLGACRTHGNVAVAEMATKKLSELDPGNSADSMLLSNIYASADRWSDAMNVRRWTADNAVRKSPACSVVDSASSTNS

SEQ ID NO: 49893 - protein, 902 aa, Zea Mays
MGSTRAAGIKKALVFYSGKAPRGVKTDWIMHEYRVAQADHTLGKKGSQKLDEWVLCRLYNKRNNWDKVKVEEQELEAAPRRQHHLQSAEDSMSNSFQTHDSDIDNVFELQNCYGNNMVQGQAMTPRNDIGVVTVKEDNDWFTDMNLDDLQASYNMAHTTNHSTVTFQSFFLKLHPFCPHRTTGDAHVRAAGQCGPILHGLNLGSHEPSAPHSVTHQPPLRDEVSRVTQTAVLRLASGDLRPPSPAAVLCHGPWTVVRQQQGSSLCPTACPPPASATSASGLWAPVSRLCPRRSSSGLRHQALSYSSTAPVPATARSSTPPSRTALKLQEAVMEAVKKLHAHLVVSGLHNCQYAMSKVIRLYALHQSDLVSAHKVFKQIESPTTFLWNTLLRGLAQSDAPKDAIVFYKKAQEKGMKPDNLTFPFVLKACAKTCAPKEGEQMHNHVIKLGFLLDIFVSNSLIYLYAACGALACARSVFNEMLVKDVVSWNSLIGGYSQHNRLKEVLTLFKLMQAEEVQADKVTMVKVISACTHLGDWSMADCMVRYIEHNHIEVDVYLGNTLIDYYCRIGQLQSAEKVFSQMKDKNTVTLNAMITAYAKGGNLVSAKKIFDQIPNKDLISWSSMICAYSQASHFSDSLELFRQMQRAKVKPDAVVIASVLSACAHLGALDLGKWIHDYVRRNNIKADTIMENSLIDMFAKCGCVQEALQVFTDMEEKDTLSWNSIILGLANNGFEDEALDIFHSMLTEGPRPNEVTFLGVLIACANRQLVEEGLDHFERMKSVHNLEPQMKHYGCVVDILSRAGQLEKAVSFISEMPLAPDPVVWRILLGACRTHGNVAVAEMATKKLSELDPGNSADSMLLSNIYASADRWSDAMNVRRWTADNAVRKSPACSVVDSASSTNS

SEQ ID NO: 49894 - protein, 1381 aa, Zea Mays
MAERKLDRPSALGKGGLSLGIEEDRVAAAMGFVDHSKDQHHLDNSIPLSPQWLYAKPADGKISLPHGSSLELAEKEVRMLEGTVDRKERRRNAFDADSGLRWLEEERETSLLGRRERKKDVDRDVDNRKIDRRSDNVSARDITDPRAAPASERWHDGSTRGLGNEGRRDGKWSSRWGPDDKEKDSRSDKKVDAEKDETHADKLTFTGRLLSESDSRDKWRPRHRQESHSVGTATHRAAPGFGSEKGRVKDSTNVGFAAGRGRGNPNSVASFNRPSSAGSIGAPAVHGKFAKTAVSFCYPRGKLLDIYRQKNMMSSFDDVHMKLDEIPSVTLSTAAKPLAFVAPDTVEEALLEDIRKGKVISSEGINGIGNKKERAKELEEPASGIDDDMGKASFAIAGLGQEGSSGLISVNDASYVEGTLPSGVSTSLLKISLEENAISNQHGITDTQEGLKTAEIKENADHALGTKLPDDSNTLFEVPSFEHLQEPTRPYQSNNMDIKVGGHANYPEELTLYYLDPQGGVQGPFLGADIISWYEDGYFGLELPVRLSQFPDDVPFRPLVEVMPHLAQKTQSRIPLPCDGNSESLESSQSKFESSVPSTSSGRTDQFSIWDSESNAVDPKRGDHEASIPSRSGWLSSPETGKDISNTSNRQQHIPESVNQDAEVLYTGRPNSSMGQSLRDLENDRADFQSTPHDPHSVAGEANLLQHNVPRDSDLSPLGLLWSELEGRPKQPLSSNVLSVNERRNPKPTTPKDIPPVNMRQGPLSRMNEVSSVRDEWPANFGRLDNMNDANISGRIHQVEAEHHLNFDGHLLLQQIRREQQQQRQEQLMAHNNLEFSGAFPGQVFDPLNQHRQPMNQQIPDVEHLLRIQFELEQQQQRQLQQEQHQRQLQQQRQAQLLQRQQQQQQQQQQQMILEQLLQQQLQGSNFGPTSMVDQVLLREHVLNELHQQPHHLQRQHDAAIEQLIQAKFGHGLHREHHNDMLDVLSRSNQRQMLPLEQQLLLGLQHEQQLKSQQLANALRQHSGQEEERHLSGVWPMDAAAQFIRSGTSPNQIHSRFDLLENLQRSSSFDHHEHLDRSLSLHEQLHMGGQGIRSLERTGSLPGGGPGPNPDVINALTRHHGLSQLETHGDVYPLVQMPMLPSGVHPQQLRHQDQLPGSHIGRLERHWSDANGQLQNSLMESSHINQLQIEAEKERRNVEMNLSVDNPHAWGALMNKDRNTEQDLTDMIHKKLVLQSQQSRGFPDVSVPASFRRKDHFVQPVVESPLRSVDMSFEESLSERSLYAKSGQLAQEGSSNLGTLPNSIENTGKFNLRSGSGSMLEQKHFLGIDDVQSDFLETTGGRTSANQLVGSVNELTRGKRQGSSASLAGDDPNLADEGVSK

SEQ ID NO: 49895 - protein, 622 aa, Zea Mays
MGKQQQAPPARRSTAMSAPPPPKRRKKKGRPSLLDLQKRSLRLEQQLQQQQPKGRRSNRRSAGSADEDDDGPASGSGRREKKLRLVMGLHDGSPKQVEKTRKATDGHEEPSDSGPTTPLPNKKLLLFILDRLQKKDTYGVFSEPVDPEELPDYHDIVKHPMDFSTIRKKLDKGAYSNLEQFECLVKALRLIHAVMLEECHILFWNEYEYSILLLVFLQFCYKDDVFLISTNAMCYNSPDTIYYRQARGIQEIAKKDFENLRQDSDASDPEPEPELELEPEPEEPKPQPRRGRPPNKNNAKQKVGKPPTERATADFSGATLATAANIGRHAQADVDLSRRAMDKAMMDMLRASFANRRNEHNWSGERKFERFEECSGYRGTWSAKMGKRPILMEDSRRSTYCETQPSNSIYELPVSSSYNGTKKLLVPVGVQLQQSYSRSLARFAAQLGPVCWEIASRRIERSLAPGTKFGRGWVGDGETPNSFQPPVLAAFSETTTPQDRTAASGEQPCPSMSSPPATEACAGNDRSHLAGSQPDATPYASTSTTQRMSSEALASQQCGSLPQISINRAERTLEMMKGSPNNLHGHPGMQQTANGFNAVPGPMMFPHVAQLVVNQMQTHTAD

SEQ ID NO: 49896 - protein, 204 aa, Zea Mays
MASCSGKNQEDTETEDSAHLLREQQESNAAAAVSAEPPSLAPQSEITEEEVHGPPEAGDRDPSAATAAAAERKGDETMSLFRRGSEGGKPPLPPRPPSISRTRGPSSAGGKPPLPPRPPSASRTRVPSSSGGKPPSPPSPPRSIFHEVWGSSMAMRDGDRESRFDLKDVFDELMVECRRNGETDQKAEAEVISASKRDFESISG

SEQ ID NO: 49897 - protein, 291 aa, Zea Mays
MALASQVAANQPPPPTLSSPARRLPRASSNALLLLQPAAAVLGGRTLRLRPPGARRRALDAVVVARASSEAKAETAEAGGGGGGAEEERPYEEYEVTIEKPYGLKFTKGRDGGTYVEAIQPGAAADLTGQFEVGDKVLATSSVFGEEIWPAAGYGQTMYCIRQRIGPLYMKMERRFGKWDGAGDLTEKEIIRFERNSGVVSGRVREIQLQNYQRKMEQKMQREEDLRMGLKLYKTGSTRRRWRSSSRFWGRSRSPARPPSPATTSPAATRSWAGFSRGCAFCAGGCAQVRV

SEQ ID NO: 49898 - protein, 963 aa, Zea Mays
MARSNSWYVLHFCSTSLKSWPSSATDHPHLFPQIRCRLLSLPFLRRGIHSSVPTSVGAATDATLLGRLTRLLLLHRFSAVARLLSSSAPLTPALLHAALRRVRLDADAAVHLFRLAPFPPSLLAHAQLLHILVRARRSADARAILASLLSARPPAPPLFPHLVEVYKEFSFSAASFDLLLRALANAGQLDGALQVFDEMRTLGCRLSMRSCNSILNRLAQTGDLGATVAVFEQMQRAGALPDKFTVAIMAKAYCKVKGVVHALEFVEEMTKMGVEVNLVAYHAVMNGYCEVGQTNDARRMLDSLPGRGFSPNIVTYTLLVKGYCNEKNMEEAEGVVQEIRKNKQLVVDEAVFGAVINGYCQMGRMEDAARLLNEMVDSRLQVNLFVYNIMINGYCKLGRMVEAHNILHEMTGVGVRPDTYSYNSLVDGYCKKGLMNKAFETYNTMLRNGFAATTLTYNALLKGFCSLGSIDDALRLWFLMLKKGIAPNEISCSTLLDGFFKSGKTEKALNLWKETLARGLAKNTTTFNTVINGLCKIERMPEAEELVDKMKQWRCPPDIITYRTLFSGYCKIGDMDRASRILNELENLGFAPTIEFFNSLITGHFIAKQHGKVNDILFEMSNRGLSPNTVAYGALIAGWCKEGDLHTAYNLYLEMIEKGLVPNLFICSSLVSCFYRKGKFDEANLVLQNLVGTDMIPDISAPRLEIGKVANFIDTVAGGNHHSAKIMWNIVIFGLCKLGRIEDAKNLLADLKDKGFVADNFTYSSLIHGCSASGFVDVAFDLRDTMLSVGLTPNIVTYNSLIYGLCKSGELSRAVSLFKKLWTKGISPNAITYNTLIDKHCKDGYITEAFKLKQRMIEEGIHPTVFTYSILINGLCTQGYMEEAIKLLDQMIENNVDPNYVTYWTLIQGYVRCGNMIEISKIYDKMHIHGLLPTNVSGDVKQSCPAIHNPNRETCQMKMHSQC

SEQ ID NO: 49899 - protein, 342 aa, Zea Mays
MAPELYDEEYNELGEKPGSLAKIGDPEVKLFIEKCIAKVTERLSANELLMDPFLLDVSDEKIFYPVHPNINTTVESQRKDLNTIFLKLRIADPTGHAQNIHFPFDIEADTSISVATEMVVQLDLTDQDVTAIAEMIDAEIRSHIPDWAAEESIDNQGDEAAHSETHSSEGDEGTSELRDEIGASHNGFVQEQLPSGRKYWSDSPRRDGEISQSVVEHQIGDSSANGIPKRNKVDAMFERISSSVDLSNPSAVDSMSRDASVGGSPHSLDGEEEHNSDQHLAAGVTERLIDLLAQQQEELRALQRKHKADIEEMLKIVPAEDREETLTLCHLKAEQKNRAAEP

SEQ ID NO: 49900 - protein, 1529 aa, Zea Mays
MAENGGSPLGLAIFHSAAEILEVLVVDSTASSLESWIGFAVDLHKALHSSSPGSNRKDAPTRLLEWIDAGVVYQRNGARGLLRYSAILASGGDAHLSSGNVLVSDSMDVENVVADSNSRDGQVIDNLLGKLVADKYFDGVALCSTSVVQLTTAFRILAFISDDKPVASSLFEEGAITVIYVVLMNCKSMLERLSNSYDYLVDEGAELSSTTELLLDRTHEKAIVDLMIPSLVLLINLLHILRETKEQYRNKKLLSSLLQLHREVSPRLAACAADLSFMFPTFAIGFGVVCHLITSALACWPLYNWAPGLFHCLLENTEATNASVPLGPKAAFSLLCLLGDLFPDEGIWLWKVELPSLSAIRSLSTGAVLGPQVEKGVNWYLHPEHVTILLVRLMPQLDRLARIIDNFATSVLMVIQDMLRVFIVRVALEKIECAVVLLRPIFMWLDDKVDKTSLSERDTFKVHQLLQFTVKLSEHPTGKVRGFLLSTILGSCFSCGPFSFLLIQALLWRMGFTRILSKLLQNCSRASFPYDNQTFGRAHSKNDLMLKWRIPLFKSIAYIFSIDPCNNEKADVEESLNEKSVHECSSVMHDLMMFCQVLPVGREMLACSLAFKELVYSYTCRSAVTLILSQIHTSNKDVLEKDESDPNHNSPSLDGWNCFSSLFKCWKKLVKYVGSNERTDYLVETIYSLTLGAITLSQYGENLEGLLILRYLFGLPSDPSGSLESSGESPSEIELFMKTYEEKICQGIENSATAVGKTLLRKLLNSIKLLRSILENSGQSADTVQMVLEEGTDSLSEIARSVVMTAHLMPSLANVSVNDESPFLFSNMWKVIVDSEEPLDCQEGEFAKRLVWELPDSSLDRQLAPGQSARRKLALGESASRRVRDNQLPEPTGQFSRGLNTSNASSGHTRRDTFRQRKPNTSRPPSMHVDDYVARERNIDGASSASNIVNSTPRGTLSGRPPSIHVDEFMARQRERQNHAPAPTGDAPQAKSQTTSLDDSLRTKPENLRQPKTDLDDDQEIEIVFDEESGSDDKLPFPQPDDSLQSPPVIIGENSPGPVIDETENQENERVPFFQRATSIPKDDENLGIGISSQTAMLSEANSSLELKHSVSSPGKNSFRDHAEESNYDSIGVSGRPSLQADHQQLSRRHEKRSPRKFSETSLSNGFHGREHRHSNNHPPLPPMPPPISSVSMQNTDSVNRQSSSFSARDRPTPNPSGYPTQSFDSSMPSAFTGLQGQTQYMLAGAGSSSANELPNVEAKLLWNTFPANRIPLETFSSGLPARPMPPLTPYSAVATQHATMNSGSPANLYSQGSVVQPSPTASIISDSNLAMNSASGSMLASNLLPSFASQFLMSRPSMPTPFFGTPLQQVQFSSGLPQNISNPQPPVSIQPRPPPPPPPPQQPHPSQTLQQLGAIQLPHQDQQHSYPHSAILPQVTLQFPNQLPIPQVQLYHQSQQESGQTLRQVGEQSQLQNQGMQADSFSQQQQDSGINLNQFFSSPEAIQSLLSDREKLCQLLEQNPKLMQMLQL

SEQ ID NO: 49901 - protein, 1087 aa, Zea Mays
MYQISDVENLIPNLRSAVLSAISKYVTASTNHILHTLSQDSANAFINSDFDSQEINKILAEAGKELSEIWKNVHAVTESNLFNDNGFTIGVDEDLPTTKILIELFNHCFPYYKKLSLLDLQCPSQSKWLVLSLSLVLLLCSSKESCFYFVDTGGMEQIINLLCWRTPKSAATTLLLLGIVEHATRNGFGCEAFLGWWPRAEHTSIPVGSSDGYCSLLKLLLEKERHDIASLATYVLQRLRFYEILSKYESAVVKVISNIQADKLSTDGVPFLISASVELGEMLKLIIFCGPIEDPSPVATASRIFKSEHLEGLLSYKATIDLITSSKYSFLQYDTDPYLLSLIQERSFFPLSAALLSSPILHLPNGPAAEILMGIASSIESIILSLLFCRSGLSFLLSQPEATELILLSLQDAEKMNKSECITLRQAFVLLSKGFFCRPKEVGLITELHLKVGSAATRILSVPPNSDELLWVLWELCAISRSDSGRQALLALGYFPEAISVLLRSLSSYKDLDSVMAENGGSPLGLAIFHSAAEILEVLVVDSTASSLESWIGFAVDLHKALHSSSPGSNRKDAPTRLLEWIDAGVVYQRNGARGLLRYSAILASGGDAHLSSGNVLVSDSMDVENVVADSNSRDGQVIDNLLGKLVADKYFDGVALCSTSVVQLTTAFRILAFISDDKPVASSLFEEGAITVIYVVLMNCKSMLERLSNSYDYLVDEGAELSSTTELLLDRTHEKAIVDLMIPSLVLLINLLHILRETKEQYRNKKLLSSLLQLHREVSPRLAACAADLSFMFPTFAIGFGVVCHLITSALACWPLYNWAPGLFHCLLENTEATNASVPLGPKAAFSLLCLLGDLFPDEGIWLWKVELPSLSAIRSLSTGAVLGPQVEKGVNWYLHPEHVTILLVRLMPQLDRLARIIDNFATSVLMVIQDMLRVFIVRVALEKIECAVVLLRPIFMWLDDKVDKTSLSERDTFKVHQLLQFTVKLSEHPTGKALLWRMGFTRILSKLLQNCSRASFPYDNQTFGRAHSKNDLMLKWRIPLFKSIAYIFSIDPCNNEKADVEESLNEKSVHECSSVMHDLMMFCQS

SEQ ID NO: 49902 - protein, 370 aa, Zea Mays
MGQSKAEFLKQFGGDYGYPDAPRGIDELRAAEFKRLEGMVYLDHAGATLYSEAQMTDVARDLMSNVYGNPHSQNDSSMATIDAVTSVRHQVLKYFNASPRDYKCIFTSGATAALKLVGECFPWSRDSCYMYTMENHNSVLGIREYALSKGATVSAVDVEEVVDPSKNHESDSLFKVSKRSNQRRGDNVLLHNYQNGSLSAISGNNLNLFAFPSECNFSGHKFNLSLVKLIKEGKFMDFSSQQQGQWMVLIDAAKGCATEPPNLTLYPADFVVCSFYKIFGYPTGLGALIVKNEAASLLNKTYFSGGTVAASIADIDFVQKRKGIEQTLEDGTISFLSISSLRYGFKIIELVEEVHIMKIICTYLLTFVNG

SEQ ID NO: 49903 - protein, 425 aa, Zea Mays
MEITEEQRRRAEANRLAALEKRKRYAEAAAATAFPTSGASTFPAYDTAAAAEWRLAKCPRIAPPARQLPFVPLPPRPSPPPLPPTPPQPPVGFQVVLEVCGPDEFWVAVVPVEGRAYPGEAECLGAVQDCLAAASVVQYSATQSLSQSTHLRPVFKLVDYGVVLKCLKKLPGASVQEIPSSTKRIIQNIPRYHVQKWASDEEVHELLKKLPQQIKDALLPFQLEGVMFGLRRRGRCLIADEMGLGKTLQAIAIACCFKDEGSILIVCPAVLRYSWAEELERWDPSFMPKDIHIVFGRQDSLEHLNATPRAVIISYQMLSRLRESMVNRTWALMIVDESHNIRCTKKLEEKYETKAVLHLASKTERIILLSGTPSFSRPFDIYHQINMLWPHMLGTDKFDYAKKYCLLHVARSYQGKMFKDFSKGN

SEQ ID NO: 49904 - protein, 354 aa, Zea Mays
MATLRATVGMLLGRRGHAQVPGALPVDGPRRPHPQSRRATDRVQLLQDVRIPYQQKRMFGFVTFVYAETVKVILSKGNPHFVCDARVLVKPYKEKGKVPGRFRKLQHTHHGGAEFVGCASPTGLLDSRDPYALLLLSGAQNLFTAGTDTTSSTVEWALAELIRHPDVLRKAQQELDAVVGRDRLVSESDLPRLTYLTAVIKETFRLHPSTPLSLPRVAAEECEVDGFRIPAGTTLLVNVWAIARDPEAWPEPLQFRPARFLPGGSHAGVDVKGSDFELIPFGAGRRICAGLSWGLRMVTLMTATLVHALEWDLADGVTAEKLDMEEAYGLTLQRAVPLMVRPAPRLLPSAYAAQ

SEQ ID NO: 49905 - protein, 241 aa, Zea Mays
MFGRGSPRMNLIQAAAMQRVSPRSTTNKRKKRTSPKVGRLRANWNSGLEKGLIEILQDHNNDYYKGQNGWSSEAWNRIVKLFHEKFPYVTFTKCQIQDKEKELKRDYKALKEARQQSGVSWDERLCRIEAEEPIWNNLTTSNERLKKFRTKSFPLFEALGELHDEMKEKQDEVEKRATTNANEDDFPITTCIAIVDGMEELSDDEKVDAYDVFKDAQNRAIFMTAKDATRIKWLRKKIART

SEQ ID NO: 49906 - protein, 422 aa, Zea Mays
MLGRTRDQIRTTEQVKATIGTCQALKLDALVIIGGVTSNTDAAQLAETFAQLKCPTKVVGVPVTLNGDLKNQFVETTVGFDTICKVNSQLISNACIDALSAEKYYYFIRMMGRKASHVALECALQSHPNMVILGEEVSVSKLTIFDITKQICDAVQARAEKDKYHGVVLIPEGLVESIPELYALLQEIHGLHNKGVSVENISSHLSPWASALFEFLPPFIRKQLLLHPGSDDSAQLSQIEIEKLLAQLVETEMDKRLVLGHVCYHIVAAGLNGYMATVTNLKSPVNKWKCGAAPITRWSRGAATSQIGKPAVHMASVDLKGKAYELLRQNSSSFMMEDIYRNPGPLQFEGSGADTKPISLCVEDQDYMGRIKKLQEYLEKVKSIVKPGCSQDVLKAAVSAMASVTEMLTIMSSLSFSGQATI

SEQ ID NO: 49907 - protein, 448 aa, Zea Mays
MLGRTRDQIRTTEQVKATIGVTSNTDAAQLAETFAQLKCPTKVVGVPVTLNGDLKNQFVETTVGFDTICKVNSQLISNACIDALSAEKYYYFIRMMGRKASHVALECALQSHPNMVILGEEVSVSKLTIFDITKQICDAVQARAEKDKYHGVVLIPEGLVESIPELYALLQEIHGLHNKGVSVENISSHLSPWASALFEFLPPFIRKQLLLHPGSDDSAQLSQIEIEKLLAQLVETEMDKRLKEGTYNGKKFNAICHFFGYQARGALPSKFDCDYGYVLGHVCYHIVAAGLNGYMATVTNLKSPVNKWKCGAAPITSMMTVKRWSRGAATSQIGKPAVHMASVDLKGKAYELLRQNSSSFMMEDIYRNPGPLQFEGSGADTKPISLCVEDQDYMGRIKKLQEYLEKVKSIVKPGCSQDVLKAAVSAMASVTEMLTIMSSLSFSGQATI

SEQ ID NO: 49908 - protein, 1180 aa, Zea Mays
MGRKKRTSAPNPTPPPLDASRRSPAAAEKPAGIGREDAAVRAEVDKALACLQRGSHARAQRLTRDAIARHGEASPLLLRAHGTVHARAASVLDDHASRARHQRTALQAAQRAVQLAPDSIELAHFHAMLLFDAATDSRAYDEVVAECERGLSIEAPSDPAPHSLRLPGPDVDQVQSELRNLIQKANLASISSWVKNMGGAGDDKLRLIPVRRLADEPMEARLVPTAPSPRRPNEIKKATKTTEERRQEIEVRLAAMRLLQQQKEQSNDVVSATPASSRSHGDDAPSSSESSVGGHRADRRKGGSRKATGSSASERTDQVRAYWGSIPVEQRLAFLNTSISELKSHYASAMHKEKDAASAASDVLNEVIQFANKHDKWEFMVCGRCREQFTHVEAHRWHVMVEHVGLLSSELQEMVPQEIDADWAEMLSGCNWRPLDATAALKLFEEDQHNNLGPDREDESNSLDSWSNKAMDMSESSAWSHNEESSGFGVVVREGDTKWPFSDDDERAKILERIHSSFKILVKNHNLSVHNLNRVIRFAVEELRGLPSGSLLLNHSLDESPLCIRFLEASSLQKVDNFLQDLMQASGLNRNLQKAEGLGDGDSFIQNHDVLEKVTLNSDSSELIIDGHTFGGKFDSESVDTDALLSWLYAGSSIGEQLLAWNRMIDERSNQCVDLIRALGREFNNLQNSCERKLEQLRNEDAFTSVEGLFCEEQTRREQVGRYGFQTFEELLRKRQEFLEHNTEEQSDSNRSEIDAISAILKELHTSHFGYDEALTGMAPRFSDFDGGEEDEWRLHDFIHPNDSMVHMVVSKMKEHVTMEISKIDAKIMRTLSVMRQLEHKLGPVSALDYRMILLPLMRSFLQSHLEELVDKDARERSDAAREAFLAELALDAKKNASKGGDMKQSHEKSKDKKKFKDSRRAKEFKDSSWSDQSLIHQDSADEETTETFQILADCDDLDCKFSTSDDYFNEQEEELRHKVQLEAEERKLEETLEYQRRIEEEAKQKHLAEQCRSTYASSVIGTARLSSTGNQDNHESAINHSSRTYLEGIKFGDFRYTENNFSQKLNGLDSSDAHALTSSDMNAPRWTSTCKIAPYANHSYQTGKQNRLHVLPSDDLQFAHRDHAAGTEKPNFEKVGSGAIPSADLCIKDDFDKRFQEDLDEAVRQSLGISMISHLSPII

SEQ ID NO: 49909 - protein, 1181 aa, Zea Mays
MGRKKRTSAPNPTPPPLDASRRSPAAAEKPAGIGREDAAVRAEVDKALACLQRGSHARAQRLTRDAIARHGEASPLLLRAHGTVHARAASVLDDHASRARHQRTALQAAQRAVQLAPDSIELAHFHAMLLFDAATDSRAYDEVVAECERGLSIEAPSDPAPHSLRLPGPDVDQVQSELRNLIQKANLASISSWVKNMGGAGDDKLRLIPVRRLADEPMEARLVPTAPSPRRPNEIKKATKTTEERRQEIEVRLAAMRLLQQQKEQSNDVVSATPASSRSHGDDAPSSSESSVGGHRADRRKGGSRKATGSSASERTDQVRAYWGSIPVEQRLAFLNTSISELKSHYASAMHKEKDAASAASDVLNEVIQFANKHDKWEFMVCGRCREQFTHVEAHRWHVMVEHVGLLSSELQEMVPQEIDADWAEMLSGCNWRPLDATAALKLFEEDQHNNLGPDREDESNSLDSWSNKAMDMSESSAWSHNEESSGFGVVVREGDTKWPFSDDDERAKILERIHSSFKILVKNHNLSVHNLNRVIRFAVEELRGLPSGSLLLNHSLDESPLCIRFLEASSLQKVDNFLQDLMQASGLNRNLQKAEGLGDGDSFIQNHDVLEKVTLNSDSSELIIDGHTFGGKFDSESVDTDALLSWLYAGSSIGEQLLAWNRMIDERSNQCVDLIRALGREFNNLQNSCERKLEQLRNEDAFTSVEGLFCEEQTRREQVGRYGFQTFEELLRKRQEFLEHNTEEQSDSNRSEIDAISAILKELHTSHFGYDEALTGMAPRFSDFDGGEEDEWRLHDFIHPNDSMVHMVVSKMKEHVTMEISKIDAKIMRTLSVMRQLEHKLGPVSALDYRMILLPLMRSFLQSHLEELVDKDARERSDAAREAFLAELALDAKKNASKGGDMKQSHEKSKDKKKFKDSRRAKEFKDSSWSDQSLIHQDSADEETTETFQILADCDDLDCKFSTSDDYFNEQEEELRHKVQLEAEERKLEETLEYQRRIEEEAKQKHLAEQCRSTYASSVIGTARLSSTGNQDNHESAINHSSRTYLEGIKFGDFRYTENNFSQKLNGLDSSDAHALTSSDMNAPRWTSTCKIAPYANHSYQTGKQNRLHVLPSDDLQFAHRDHAAGTEKPNFEKVGSGAIPSADLCIKDDFDKRFQEDLDEAVRQSLVIMAYKAVSGRVP

SEQ ID NO: 49910 - protein, 1375 aa, Zea Mays
MGRKKRTSAPNPTPPPLDASRRSPAAAEKPAGIGREDAAVRAEVDKALACLQRGSHARAQRLTRDAIARHGEASPLLLRAHGTVHARAASVLDDHASRARHQRTALQAAQRAVQLAPDSIELAHFHAMLLFDAATDSRAYDEVVAECERGLSIEAPSDPAPHSLRLPGPDVDQVQSELRNLIQKANLASISSWVKNMGGAGDDKLRLIPVRRLADEPMEARLVPTAPSPRRPNEIKKATKTTEERRQEIEVRLAAMRLLQQQKEQSNDVVSATPASSRSHGDDAPSSSESSVGGHRADRRKGGSRKATGSSASERTDQVRAYWGSIPVEQRLAFLNTSISELKSHYASAMHKEKDAASAASDVLNEVIQFANKHDKWEFMVCGRCREQFTHVEAHRWHVMVEHVGLLSSELQEMVPQEIDADWAEMLSGCNWRPLDATAALKLFEEDQHNNLGPDREDESNSLDSWSNKAMDMSESSAWSHNEESSGFGVVVREGDTKWPFSDDDERAKILERIHSSFKILVKNHNLSVHNLNRVIRFAVEELRGLPSGSLLLNHSLDESPLCIRFLEASSLQKVDNFLQDLMQASGLNRNLQKAEGLGDGDSFIQNHDVLEKVTLNSDSSELIIDGHTFGGKFDSESVDTDALLSWLYAGSSIGEQLLAWNRMIDERSNQCVDLIRALGREFNNLQNSCERKLEQLRNEDAFTSVEGLFCEEQTRREQVGRYGFQTFEELLRKRQEFLEHNTEEQSDSNRSEIDAISAILKELHTSHFGYDEALTGMAPRFSDFDGGEEDEWRLHDFIHPNDSMVHMVVSKMKEHVTMEISKIDAKIMRTLSVMRQLEHKLGPVSALDYRMILLPLMRSFLQSHLEELVDKDARERSDAAREAFLAELALDAKKNASKGGDMKQSHEKSKDKKKFKDSRRAKEFKDSSWSDQSLIHQDSADEETTETFQILADCDDLDCKFSTSDDYFNEQEEELRHKVQLEAEERKLEETLEYQRRIEEEAKQKHLAEQCRSTYASSVIGTARLSSTGNQDNHESAINHSSRTYLEGIKFGDFRYTENNFSQKLNGLDSSDAHALTSSDMNAPRWTSTCKIAPYANHSYQTGKQNRLHVLPSDDLQFAHRDHAAGTEKPNFEKVGSGAIPSADLCIKDDFDKRFQEDLDEAVRQSLGYDAYPAGTISTSNETEVYGTGLKNAAGEYNCFLNVIIQSLWHIRRFRDEFLKTSSLHKHVEDPCAVCALYGIFIDLSKAAKGHGEAVAPTSLRIALSKSYPNSKFFQEGQMNDASEVLGVIFECLHKSYTSRTVCHGKPHEKNSIGSWDCANISCIAHSLFGMDVYERMNCHNCKMESRRLKYTSFFHNINASSLRTAKILHLMNF

SEQ ID NO: 49911 - protein, 96 aa, Zea Mays
MSLLKELNEKDNSLKDHRLRVNNLGEQLDLLQKDVQAREVTQMQLKDIVIRIETNIMDEVAKAFEIAMLRGEIRILSTHWTNKTKNLESQVWCIKK

SEQ ID NO: 49912 - protein, 88 aa, Zea Mays
MTSVFDALIKHVASGLLQPTAYRCKSVPGVLSVSSTPLPVSWRRLGDRRRSRRTGDRRRSRRIGDQVFLLALALRRRRAPARFASSLS

SEQ ID NO: 49913 - protein, 717 aa, Zea Mays
MDAAFREAALKGPLWDQVSRRLEAMGYKRSAKKCREKFENVDKYYKRTKDGRAGRGDGKAYRFFSELEALHGAAPAVASLARRPVAMAPAPPPPVTALVGASTGMAPTALHAEPPPMPQPAAPAPTGTGTGTGTGSVTATIAPPAGAAASDAAAAAACMMTPGDVSFSSGSDGEDTDETGGGSGKRKRDGGEDEDGFGGSISSKMMRFFEGLMRQVMERQEEMQRRFIEAIERREQDRMIREEAWRRQEVARLAREQDALAQERAMAVSRDAAVVSFIQRVTGQNIPMPVPSPVAPPPAFITALTHAPPLQPTPVASAAPAAPAPAQAQHQPPPPAHQLSPKKPQTVMPLTPQAPQQPQVQPRQAPSPSPSPATHPQGNKEIVVRAPPPAESQDTAGFGGGAPSPSRWPKAEVHALIQLRTEMETRYQDSGPKGPLWEDISSGMRRLGYNRSAKRCKEKWENINKYFKKVKESNKKRPEDSKTCPYYHQLDALYRSKALASSSSGPGAAPALPPPPPPPQRPDQQAAAAAPPVTVVLAPVPLSQTGPHGNGNGNGNGCAGRGSSDNGGGGSGGMQKQQASNGGVAAARFSAVDGAGGNGVATNKREEGIVRKEEAVAAETRPQPVSMNDSYVDSDSSMDDDEEDDFYDDDDEGDVGDGGNNKMQYEIQFQQQHQHVQPQQQQNQSGGGVRPNASGSAGAGAGPAATTSIILKLILYP

SEQ ID NO: 49914 - protein, 1888 aa, Zea Mays
MDAEPRREGSDRAPAADSSAAPDGDEAMARGVAAAEKPTAASEAGAGGDVAAAERGRDGETPAGDPGVVADEGGAVGDQCPAAPQASEVDEGGAAGKERSDGGLANGAVEGSSIAGEVPDVAPVVSEARMDEDGGCSTGNEYSEMKMEVDGGCVAEREGDGQEQEQECTAAAVESEVKTGEGDGGVVNQGTTAHAGGLQVKEEVGEGLVGRYIGRSAPGRTRILIGKVVSYDSTAGVYSLVFEDGHAEELGLPQLQELLMSDDNGALGMKVSCRKRKLDLLVSSGSALEVKEPPSTRQRVDGCEMSARPDELQHSASGSDMSEDVESSSNSSDFTREETSEPCPPVQAVELPPSSGDIPVPEESISSLLSVYNFLRSFSVQLFLSPFGLDDFVAAINCSVQNNLLDAVHVSLLRALRRHLESRSAEGSRSASNCLKYLDWTLLDALTWPNFLLEYLYVMCCIKNLGGKSFGRSLLVAEYYKLPVTMKLRVLQILCDDVIESEELKTELENRVGYNEEMEYEIESSAFLEAGSRSVSTRAAKASACKNTNDFHNLLESAPNVTNPETAPAVLSQDGNSDDCRICGMDGTLVCCDGCPWAYHSRCIGQNKAFLPQGDWFCPECMVNKLGPTSSRIERGARGAQMFGIDMCGRLFLGTCNYLLVIETASDAESYARYYNQYDVAKVLQSLAVSDAYVDICKQIKDYWKHLLGIIHNERSTTGKEVGAKVALPQTNAQQKFVANQSAMCSVECLEEQKCKSSLGVVTEKNAEVFKQTVSAQNNIHNAHRNGAFGPSVVSSVSHQNGSIVTGGSNIAQAQPAQSIFHPDPSTVSVTSGSFCPSSLGKHHLQMFPERSGNMSGVKAAKLSSFKPQAYMNLYNHGNIAASAAANIAVITSDDSKVSASQLTAKHRKKMAADNALQLKAFSSAATQFLWPSTEKKLMEVPRDRCGWCLACRSSAIGTKKACFLNMATSNAVKCSARILSVMRVIKNSDSHFPSIVAYLANMEESLRGLLVGSLQDMQQKERWHQQLQEASNCRTVIPLLLELESNIRGVAFSASWLKPIDDWPLESPGPSTGASRPAQYQKRGVGGRRGRRRSVASESGTATATDEDNSWTWWTGGNISKRTLQRGALLHSTRRKAARQGGKQWIAGLSYHEGSKFPRRSRQFVWRGCVGISQTSSQLALQVRYLDAHIRWKDFIPPDHIPSDGKSYDADFSALRNAVVCDKKIIDNKIRYALKFRNQKHLPVRVTKNILESEGDQDENSKLWFSENHVPLYMLREFELHAGDNSLPTPGISDSNCFTNLYPRRVKAYAGDVFSYLFHKGEVYPCTSCKKDVIYRDIVKCNTCQGNCHKECTSSSVVSKGSSATSSLICKLCLQKRNLMLTSYNTNASYIQPQQKGNGQQPVTALRVKFKVSSSHSAQPSAKVEAQSSMNVKARPVVNVKTQPFAKVEAQPIMNEKVQPTAKMEVQPLAKMVTQNITGVQALPKTKAKKSKSEKEKKPKKVQAITYFGLVWKKNKTDKDDGSEFRANDVILKSKDSIGSSIRPTCCLCDKAYSPDFLYVRCERCRNWFHGDALQLEEERIGELVAYRCCRCRRRAIPHCPHSDGYTKPEPELSEQTVAASSQSTMLSSEDTYALADQDPLLASYGIVEPIGDDTMDVGLSMNMSSFAPGSNQKLSIRRAQAKSTEYIDQGGRPVSEYNIQNQPPGIGNINLSHTNEISFSEVDSVDASELLGWDLPQGAAYATPLDFTANHQSNDTCCGSFGMDEYEPQTYFSFTELLEADDTQLDNAFGMSAGLQGDCNGTGSFVQQGDGLSFMVEDGASNMNFPTNDPTPDEVACSKCMHTQPPPDLKCAVCDLHIHRQCSPWDQGEEPVDSSNWSCGGCREWR

SEQ ID NO: 49915 - protein, 305 aa, Zea Mays
MIQYFKIAGWSVEDSQIEGKFPRNSNPKEIIVKIPNSMFLFCLINDYKMAVQFSMASSRKVRNANKRYTKINEDWQDKDETNVHKSKVRKKKLSDMLGSQWSKDELERFYGAYRKYGKDWRKVAGAIRDRTSEMVEALYNINKAYLSLPEGTATAAGLIAMMTDHYNILDGSNSDHESNDSPKASRKPQKRGRARFQSVSKTSDARYADLGQSQPSSSSYGCLSLLTKKCAGDLLVGNRPRAVGKRTPRVPGASIYYRDDRGVTDRRAKTVANNGDDEGAHVAALALAEVFQRGGSPQVSETSKW

SEQ ID NO: 49916 - protein, 629 aa, Zea Mays
MFLSPVKSSDRKNADSEMGSSKLHGFHLDADYPEGSLGSREAETGEYCKGSSFLTKNEGSGKPLKKGKKSQKRRKKAAHKTGDQFEDDREACSGTDEGHRSIKIKEDSELESLGWPSSTSNKRSRQLFFGESSAQIKDENKDVDSDDRPGMPAAVSVYEQKVNSKSTARKVKRQPEISNSEMVTRKKAKVTKDPHHDGSTTSDVKQQACTCGVKTEKKKRKSSTTKVIPKLLFVDHFCKEKYVSAEEGKVSSNIGTTTQGDTTQADLSSKGKSCRKIGIQQALIEECKSTKVANDTGSDKFSHSVNNVIDLKDKLSHCLSSRLLRRWCMFEWFYSAIDYPWFAKSEFVEYLNHVKLGHVPRLTRVEWGVIRSSLGKPRRLSKQFLHEEREKLSQYRDSVRQHYAELRSGVREGLPTDLARPLAVGQRVIACHPRTRELHDGNILTVDNNRCRVQFDRPELGVEFVMDIDCMPLHPMENESLRQKNIVNKYLSEVKLEDQMNDLGSGGAARFASNVNVNCGDAAFQIPSSHPVGTVDSIVQAKATVNEVAIAAQQAMYNQPCSLSQIQEREADIRALAELSRALDKKEALLVELRHMNEEVSRKQKDGETVRVEAFQDAICYGACAAKRF

SEQ ID NO: 49917 - protein, 613 aa, Zea Mays
MFLSPVKSSDRKNADSEMGSSKLHGFHLDADYPEGSLGSREAETGEYCKGSSFLTKNEGSGKPLKKGKKSQKRRKKAAHKTGDQFEDDREACSGTDEGHRSIKIKEDSELESLGWPSSTSNKRSRQLFFGESSAQIKDENKDVDSDDRPGMPAAVSVYEQKVNSKSTARKVKRQPEISNSEMVTRKKAKVTKDPHHDGSTTSDVKQQACTCGVKTEKKKRKSSTTKVSAEEGKVSSNIGTTTQGDTTQADLSSKGKSCRKIGIQQALIEECKSTKVANDTGSDKFSHSVNNVIDLKDKLSHCLSSRLLRRWCMFEWFYSAIDYPWFAKSEFVEYLNHVKLGHVPRLTRVEWGVIRSSLGKPRRLSKQFLHEEREKLSQYRDSVRQHYAELRSGVREGLPTDLARPLAVGQRVIACHPRTRELHDGNILTVDNNRCRVQFDRPELGVEFVMDIDCMPLHPMENESLRQKNIVNKYLSEVKLEDQMNDLGSGGAARFASNVNVNCGDAAFQIPSSHPVGTVDSIVQAKATVNEVAIAAQQAMYNQPCSLSQIQEREADIRALAELSRALDKKEALLVELRHMNEEVSRKQKDGETVRVEAFQDAICYGACAAKRF

SEQ ID NO: 49918 - protein, 618 aa, Zea Mays
MFLSPVKSSDRKNADSEMGSSKLHGFHLDADYPEGSLGSREAETGEYCKGSSFLTKNEGSGKPLKKGKKSQKRRKKAAHKTGDQFEDDREACSGTDEGHRSIKIKEDSELESLGWPSSTSNKRSRQLFFGESSAQIKDENKDVDSDDRPGMPAAVSVYEQKVNSKSTARKVKRQPEISNSEMVTRKKAKVTKDPHHDGSTTSDVKQQACTCGVKTEKKKRKSSTTKVSAEEGKVSSNIAMNIAGTTTQGDTTQADLSSKGKSCRKIGIQQALIEECKSTKVANDTGSDKFSHSVNNVIDLKDKLSHCLSSRLLRRWCMFEWFYSAIDYPWFAKSEFVEYLNHVKLGHVPRLTRVEWGVIRSSLGKPRRLSKQFLHEEREKLSQYRDSVRQHYAELRSGVREGLPTDLARPLAVGQRVIACHPRTRELHDGNILTVDNNRCRVQFDRPELGVEFVMDIDCMPLHPMENESLRQKNIVNKYLSEVKLEDQMNDLGSGGAARFASNVNVNCGDAAFQIPSSHPVGTVDSIVQAKATVNEVAIAAQQAMYNQPCSLSQIQEREADIRALAELSRALDKKEALLVELRHMNEEVSRKQKDGETVRVEAFQDAICYGACAAKRF

SEQ ID NO: 49919 - protein, 832 aa, Zea Mays
MKFKEAALSEKLTNFIQGSARNLESAYEFHNDCHPLNQTPTTAGDLSISEEIPLIEPIVDTKSPESLSDAITSDNSILDKSIRCLPGTTSRQYRQLEDGGFHTVRKLLQHFPRTYADLQNPQGPIEYGQYIMLSGTVISSRGIKVKSTLGLLEVVVGCSIIESELSSSVESSHSGAEQKRIHLHLNRFFSGARFSSQHFLNLMSAKHKEGDLVYVSGKIKKVLANGHYELKEYTIDAIEGEGEHSTMLARKPHPIYPSKAGLKPSLLGLSISRALKILSPDVDPVPPDVLVEFNLPNLFDAYMGIHKPKDRSEADFARRRLIFDDFFYLQLGRLFQMLEAVGTRVEKEELLYKCKSHELNTVGVDDWSPLTKKLLRALPYWLTPSQLDAVQEIIWDLRRPVPMNRLLQGDVGCGKTIVAFLACMEVVNSGFQAAFMVPTEVLAVQHYEHLTSLLEKFDGDEKPNIALLTGSTSTRESRIIRDGLKTGEIGMVIGTHCLIADKTEFSALRISVIDEQQRFGVVQRGRFNSKLYTSSSKLSGENTSSDEASDSETFMAPHVLAMSATPIPRTLALALYGDMSLTQITDLPPGRQPIKTLALEGNDVGFEAVFQMMRDELIDGGKVYLVYPIIDESEHLPQLRAATAGFDSIKQKFEGYPCGLLHGRMRSDEKEETLNSFRSGETRILLSTQVIEIGVDVPDASMMVVMNAERFGISQLHQLRGRVGRGERKSRCIFLASTSSTLPRLKVLEKSSDGFYLANADLLLRGPGNLLGKKQSGHLPEFPIARLEVDGGILQEAHLAALKVLVASNDLALYPRLKVELSMRQPLCILGD

SEQ ID NO: 49920 - protein, 239 aa, Zea Mays
MVGTSPAGQSYSEEIRPGCACVAVPRVLLREDVTEPKTGIKFPTLLKDNSNLTTEVLVGMGFRSMRIMRVKDLNLYAFGLYIQPDSVCKKLGPKYACIPDAELKDHPDFYEDLLRENIDMTVRLVVSYNGLSIGTVRDAFEKSLAFRLKKMNPNTDYDCLKTFGSCFNEYIRIPAGTKIDFRQTSDGQLITEIDGKQIGTVHSKYLCRTFFDMYIGDPPVSVETKHGIAQNVAGLMRRC

SEQ ID NO: 49921 - protein, 231 aa, Zea Mays
MKDWSIFSKFDHNGAYLPMLPIDSPISHDVGLGLISQVGNLVECSFQHPRHICATGSGTVQEAFSCLNKFAEAFYFWFSRASNPKLFQRLSAAAGSSSRVCRSHIKQVASCLQHLPGLQFGSQLRKDHAVQMLLARLASTTFGRLWTEVEEHHACNILMLAAATVVPPFENISPKMLAESMALRKDGGNIPCWTVILGRNPSRLCVCCCAKSTLARRCNRTENWHQVPHST

SEQ ID NO: 49922 - protein, 507 aa, Zea Mays
MPPSKGKKKNPSTSPRPSPRTPSSCPSAGSGTGDGERSVDLPSIAAAAAEQFPALVPRGGSGYFAGIVAEVAPRDGSRGGRLGRLWLSEAAMVGAGMRPGCFVSVSLISSSSDQLDGFPLINLFEECNRFFDLDLDNDLLYGEAGKNFVVATVLPSREVPKNGIKLSWDLACVLGHPFVGRSLFICPLCTLQAPKRSDDVHILRVMKCKNLYLSLVPPNVGSSKGIESESDYHPERSAMVMETPKRGPSTPLRKKESHHFASNNGSSMCLDPTTARSALADEKINELLHTSALWWLNGRHLLKGNFVPLSICGKLSLFVVMGAEPDSSSQDVLYENGNTLSNAEDSTKSQENPVLFLVDRTTKVHLSDSVCTKQLDSDKPGLPSEPHEYDDKRNADFNHSPTLGGLSKESATIKGIISFSLADQIGLPRYKGILLYGPPGTGKTSLASSCAYDAGVNLFTINGPEIISHYYGESEQSLYDVFTSAKQAAPAVECHPQDRGWTYFATF

SEQ ID NO: 49923 - protein, 513 aa, Zea Mays
MDGRRTILMGRYEIGKQLGQGTFAKVFYARNLTTGLAVAIKMINKDKVMKVGLMEQIKREISIMRLVKHPNILQLYEVMASKSKIYFVLEYAKGGELFNKIAKGGKLSEDAARKYFQQLVSAVDFCHSRGVYHRDLKPENLLLDENENLKVSDFGLSALAESKRQDGLLHTTCGTPAYVAPEVLSRKGYDGAKSDVWSCGVILFVLVAGYLPFHDTNLIEMYRKISRAEFRCPRFFSTELKDLLHKILVPDPSTRISISRIKRSAWYRKPVEAHAKKNEAETSENTCTGEGTTSVSTECSTSEGNQGPLSLPNLNAFDIICLSTGFNLSGFFEDKYGRREERFTTRQPVTTVFTKLKELAKRLKLRVKKKENGTLKLAAPKEGKKGMLELDAEIFEVAPSLLLVELKKTNGDTLEYQKLVKEEIRPALKDIVWVWQDDQHQCSQSPESLLSPPETQDELRLSLPQQEGQDFLEAPLPSLSLDQLKSPTAPEQAEQLPQPEQLQTPIAPEEQIN

SEQ ID NO: 49924 - protein, 406 aa, Zea Mays
MALATTAVSLHLFLTRPASVLRVGRGLPCLLLRATSSTSASPDFNITFAEPAPSKKAPSAQPLVPWIVRGEDGKPRLSTSPPPDVIQAIALAEAEAKKAAKKETLKGQNGAVAAAAAAASNASVKGKERKPAPTVPPKFSKAARRFYNENIKEREPQRLAKVLAAAGVASRRTSEELIFQGKVTVNGSVCTSPQTKVDISKDSIYVNGNRISKKLPPKLYFAVNKPKGYICSCGEESKSVVSLFNDYLKGWNKIQPGLPKPRLFTVGRLDVATAGLIIVTNDGEFAQKLAHPSSNVTKEYVVTIDGAVHKKHLIAISEGTKIDGVMCIPDLVEPLAAQSDTRKTRLRIVVHEGRNHEVRELVQNAGLQVYALKRVRIGRFRLPADLGIGKFVELKQADIKALDGNN

SEQ ID NO: 49925 - protein, 615 aa, Zea Mays
MRAPLLLWAAATWLAVSAVAHPGRRGGGGGEQPLSRIAVESAVLAVDDAAHVRASPLVLGLKGESSEWVDVEFFHPDPSSDDWIGVFSPADFSAAICEPENPRQSPPVLCSAPIKYQFATFKNDGYNKTGKGYLKLQLINQRGDFSFALFSGGLLKPKLIAVSNKVAFANPKAPVYPRLAQGKSWNEMTVTWTSGYDITEAVPFVEWGEKGGRRFLAPAGTLTFDRNSMCGAPARTVGWRHPGYIHTSYLKDLWPDSRYTYRLGHRLMNGTRVWSKSYSFRASPYPGQDSLQRVVIFGDMGKAEADGSNEFNNFQPGSLNTTYQITSDIENIDMVVHIGDICYANGYLSQWDQFTAQIEPIASTVPYMVGSGNHERDWPGTGSFYGNLDSGGECGVPAQTVFYTPAENRAKFWYATDYGMFRFCVAHTEEDWRPGTEQYRFIERCLSSVDRQKQPWLVFLAHRVLGYSSCAYYESEGTFEEPMGREALQELWQKYKVDLAFYGHVHSYERTCPVYQCVVDASDHYSGPFQATTHVVVGGAGASLSEFAASKIQWSHFTDFDHGFVKLTAFNHSSLLFEYKKSRDGNVYDRFTISRDYRDVLACSVDNCPRTTLAS

SEQ ID NO: 49926 - protein, 908 aa, Zea Mays
MLNNLASSFRSPITRGYAEIDVQSRKRQKADIYPAFILNFYCPRSTYDLHFEPTKTIVEFKDWRTVLLFFEQSVTNYWKKHQLQSPKVKLNKGLLKDHNVQNEKEYAHFESTQQTNAVKDTNSDMSSTRATRNSHCFSFVMEPSIQNVCFSGRITNSCRPDDNVASIDYKLGYKQMHYPENGSYKWLDDGPSHLNDDISSVNPTCWKRQRTEGIFHEYAYSGNLVMLEDVPTEGYFAHEQETELIGPEVEIPESCFRALNKPNGMTPDFVQNKTNLKAQTSGWDGLYDKFEKLNGDCLLDNGFYHDGGSTSKGTCRVLRKSSTSKKLGTAAGCVEGLEADAINQMNFPDIHALWNSDLIDRSSFKDTLNHFSHPSLLADTPCSHPRTLHTLNRTSDKCFRSWNYENIDSNVRFSNDSSIIFEGTKNFDNFNNEIQSLNYFNDKCGSTDQLGFEEDLTTWKSKFDMRLSVNISPETAGDNGCHLNVPSLNIANDNLFTQDLLNQHNSGLNQRLRTSKCSRFRSHSAPPFYRGKLKFSRLNVPLSKPSTDSDKDICVNNPEDNAPGPVDIPCISSTQPIPETDSSEFPDLNFSSVKMSEVACSDEIEDSTAQITKWQDDPVQHTALNLPHGPFGCYDDILSISSGALHLSCSSLIPECVDKNCFEEARVLLQLDKKFIPVISGETILLVDQHAADERIRLEELRSKVLSEGHGVSYLDSEEELSLPETGFQLFQKYAEQIQKWGWIISGGSNSSESFKKNMNILKRQVRLVTLVAVPCIFGVKLTGKDLMEFIWQLDETDGSSDMPPAVLRILNFKACRGAIMFGDPLLPSECCLIIEELKATSLCFQCAHGRPTTVPILNIASLHDELARLQMLSGRKAETWHGLGHHEPSLERAHMRLERLRKLRRGL

SEQ ID NO: 49927 - protein, 470 aa, Zea Mays
MSDILHLVEEAQTRAAPVQRLADKVAGNFTYGVMALSAATYMFWSILGSQLVPAAIQHGGAMSLALQLSCSVLVIACPCALGLATPTAVLVGTSLGATRGLLLRGGDVLEKFSDVDAVVFDKTGTLTIGRPVITKVIPSRGMGDANTKDLGANQWAEADILSFAAGVESNTNHPLGKAIMEAAGAANCVIMKANDGSFMEEPGSGAVATIGEKQVSVGTLDWIRRHGVIHNPFPEAEHFGQSVAYVAVNGALAGLICFEDKLRGDSRQVIETLSKQGISVYMLSGDKESAAMNVASVVGIQADKVLAEVKPHEKKKFISELQKEHKVVAMVGDGINDAAALASADVGIAMGGGVGAASDVSSVVLMGNRLSQLIDALELSKETMKTVKQNLWWAFLYNIVGLPIAAGALLPATGTILTPSIAGALMGFSSVGVMANSLLLRVRLSSRRKREPLKAISDEVEKNYSSKWST

SEQ ID NO: 49928 - protein, 1582 aa, Zea Mays
MEDPLATAPPPRRPHRERRHRRKASDAAAAALAAQAASSYGDVFGGPPRFAPPPAAFAAGAGTAPADYAEVFGGVAASCSIPYLDLPPAVASGVGAGGYGEIFGRFDFGEFAVPYEDMLSGAESLVEEIASPSGSSRSSTRKESVRLDTEPSVPYQQVPDAGSGRHSDDEQFHAVSFPPDGEQTFTMSYNKITRGRPDDLVEMTACIVEPSISYVVDSCNLSNDLEMDYVPVMDSGTNANVVKEKMNLPNIADSGLECADSAYVVDHQQHIPTCPPISENICQDENYNKRSSTHSVSSEEAPSPDYPFLRVSNINLPAAPIKVQPPPMPPSKLLNKKGSNENGDSDVNPNSVAAAAAMKEAMQFAEARLKAAKELMEIKGVSSKFRKRPVHHKSTKSTEIKEYNAPEKAHLFEEKLDMRRLVKEENQSNDIALLDKNTGSVALEHSDHDKKGIISPGKPKEMMQNDSELEQLGEWTSDADFYELVSNDQKCRTNGAECRDNGLMTNSLAKLDRSENEKLGGFAGESKRSRKLWDCNNRTCLRTEHVNQGKDGIGSLEVEQKNTRSPEVTEHVNQQKDAIDSVETEQKTPRSPEVSPCNERVTYEEPTKGNNDLMTNSSTKLDQSVKVKEGGFAGEPKRFRKLWGSNSTTVLRTVHVNQEKDAIAFVEAEEKAPRFSEVPPCDERVASQEATDSRLEQCLGVGNSLGHENGAQFETSCVNNLPSEVHADPEISSSFSECCSSGSHANGNENHSESTAQETAFVGNSSQNVNNKEELELPCIDGLPCTSARNQILQEHFNVINADENKEIEVKISKLEGSSKSYLNFEEEKLPSFVDESCLQNKNERENEVNSESPIHEKMTKFGFEDKGDAYEDFQEGDMDQVAGSAEEEGYVTSGSGIANESEYEEAEDDIFVGDMESNVRTCGSFDKDPYQRQESQGSWGPQDLDNRMDKISDTISHGKERETKESLLENVEKTAAEEVLNHDCREGQKSMETVDYIWPKYVCAEFNVSSDKDGNVFDSADELISDNGSDYAMNMSTMSNNLQASFSEACSSIQHLSQKPQSISAEKADESTPVLGNLEVDCGEAGRKIPSENCEVSEEGQNIGIEMEERKREDNISNIRFMDQQPFYLDSDIRPKAAEGTASETILKSREEDLNVQRTKVRNDIKEAEGELEKEVKVVEEKEKECKMGKEKEQDKERQRRELEEQKEREMERAKDRLAVQRATREAHERAFAEVRAKAERIALERITSARQRASAEAHEKEEKATAQAALEQASREARMKAERAAVERATAEARERAIEKAKAAADAKERIGKFRSSFKDSFKAPNQDNQHEASSQKTAYNKHGKSMDSCVEVVEVESALRHKAKLERHQRTAERAAKALAEKNMRDMLVQREHAEKHRLAEFLDPEVKRWSNGKEGNLRALLSTLQYILGSDSGWQAVPLTDLITAAGVKKAYRKATLCVHPDKVQQRGATIRQKYICEKVFDLLKILIIMQAFDFSFRMEHHILHSYPAIHILCSRHGYLLDGPIYGEYALRSHCWPIAVSFPSCSFLNVRLGISTILKSASGIGGSLSIVYGGQDIG

SEQ ID NO: 49929 - protein, 1071 aa, Zea Mays
MLEQESGFFFNMKYFEEKVHAGEWDEVERYLSGFTKVDDNRYSMKIFFEIRKQKYLEALDRHDRAKAVDILVKDLKVFSTFNEELYKEITQLLTLENFRENEQLSKYGDTKSARSIMLVELKKLIEANPLFREKLVFPTLKASRLRTLINQSLNWQHQLCKNPRPNPDIKTLFTDHTCSPPNGARASPVSVPLAAVPKPFQPPPGPSLAGWMANAAASSSVQSAVVAAASIPVPPNQESEQLMKRLRPGGHGIDEATYPAPTPQPAWSVDDLPRTVACSLSHGSNVTSMDFHPTRHTLLLVGSANGEFTLYEIGLRETLLSKPFKIRDINACSPQFQNAVVKDSSISINQVTWSPDGEMIGVAFTKHLIHLHGYQPPNETRHLLEIEAHSGGVNDIAFSRPNKQLCVVTCGDDKLIKVWDMHGHKLFTFEGHEAPVYSICPHHKESIQFIFSTSLDGKIKAWLYDNMGSRVDYDAPGKWCTTMLYSADGTRLFSCGTSKEGDSYLVEWNESEGSIKRTYSGFRKRSAGVAGVVQFDTAQNHILAAGEDNHIKFWDVDNNNMLICTDAEGGLPALPRLRFNKEGNLLAVTTADNGFKILANADGLRTLRALGSRPPFEAFRPQYEASSMKVSGAPVVASISPNIGRMDHLDRNSPAKPSPILNGGDTASRSIDIKPRISEEKPDKAKPWELMEVLNPQQCHVATMPETPDQARKVVRLLYTNSGVGLLALGSNAIQRLWKWSRNEQNPSGKATASVVPHHWQPNSGLVMTNDTADTNPEEAVPCIALSKNDSYVMSACGGKVSLFNMMTFKVMTTFMPPPPASTFLAFHPQDNNIIAIGMEDSTIHIYNVRVDEVKTRLKGHQRRITGLAFSTNLGILVSSGADAQLCVWTNDTWEKKRTVSIQMPAGKTPSGDTRVQFSSDQSHLLVVHETQLAIYDASKMERIYQWIPQDTLSASISHASYSCNSQLVFAAFTDGNLGVFDAENLRLRCRIAPSVINSNPPVHPLVVAAHPHEPNQFAVGLSDGSVKVLEPLESEGKWGAPAPADNGIIPNGKTPASSATSNPAADQIQR

SEQ ID NO: 49930 - protein, 1147 aa, Zea Mays
MSSLSRELVFLILQFLDEEKFKETVHKLEQESGFFFNMKYFEEKVHAGEWDEVERYLSGFTKVDDNRYSMKIFFEIRKQKYLEALDRHDRAKAVDILVKDLKVFSTFNEELYKEITQLLTLENFRENEQLSKYGDTKSARSIMLVELKKLIEANPLFREKLVFPTLKASRLRTLINQSLNWQHQLCKNPRPNPDIKTLFTDHTCSPPNGARASPVSVPLAAVPKAGAAYPPLTAHTPFQPPPGPSLAGWMANAAASSSVQSAVVAAASIPVPPNQAVSMLKRPALTDYQSAESEQLMKRLRPGGHGIDEATYPAPTPQPAWSVDDLPRTVACSLSHGSNVTSMDFHPTRHTLLLVGSANGEFTLYEIGLRETLLSKPFKIRDINACSPQFQNAVVKDSSISINQVTWSPDGEMIGVAFTKHLIHLHGYQPPNETRHLLEIEAHSGGVNDIAFSRPNKQLCVVTCGDDKLIKVWDMHGHKLFTFEGHEAPVYSICPHHKESIQFIFSTSLDGKIKAWLYDNMGSRVDYDAPGKWCTTMLYSADGTRLFSCGTSKEGDSYLVEWNESEGSIKRTYSGFRKRSAGVAGVVQFDTAQNHILAAGEDNHIKFWDVDNNNMLICTDAEGGLPALPRLRFNKEGNLLAVTTADNGFKILANADGLRTLRALGSRPPFEAFRPQYEASSMKVSGAPVVASISPNIGRMDHLDRNSPAKPSPILNGGDTASRSIDIKPRISEEKPDKAKPWELMEVLNPQQCHVATMPETPDQARKVVRLLYTNSGVGLLALGSNAIQRLWKWSRNEQNPSGKATASVVPHHWQPNSGLVMTNDTADTNPEEAVPCIALSKNDSYVMSACGGKVSLFNMMTFKVMTTFMPPPPASTFLAFHPQDNNIIAIGMEDSTIHIYNVRVDEVKTRLKGHQRRITGLAFSTNLGILVSSGADAQLCVWTNDTWEKKRTVSIQMPAGKTPSGDTRVQFSSDQSHLLVVHETQLAIYDASKMERIYQWIPQDTLSASISHASYSCNSQLVFAAFTDGNLGVFDAENLRLRCRIAPSVINRSIRSVIELTQGFRQLGCLFCLCNPPVHPLVVAAHPHEPNQFAVGLSDGSVKVLEPLESEGKWGAPAPADNGIIPNGKTPASSATSNPAADQIQR

SEQ ID NO: 49931 - protein, 564 aa, Zea Mays
MDGDKVKESAPDCASGAAEPTKKQDKRKRAYAEFDVVDKKSVSAEWQQEMDALYKYYKEVSGHQLNPEELSCTTNDSIIACLLEESSLSCAKLTDGIYKRMKLQYGVTESSVRTSVLNIGRRSSYGISAMDVNGLEDESDSSLWCWETEDLALLPLHLRSSLSIRRTARKLIHKRILVLSGKLATKDASNACSNQNSLMENAGEALDLDEIRSIIESKHKNDDDIKTEAQDFQAIRKAVKKQQMMVGHIQTEKNKKERELRHIYEKTEREAKRIERENKRLKKHQEEEERAKKKKEKEEAELKRKASIQKQANLMERFFKRKADSNIGSSDSHHMERTTCSKSTGNIEELAVAATSAMDCTLCKENHLSMEELRMIHVAKWRTLFQHNRLRHWGVRRSPKIQLFLELRLQKPSTPIASDSMSTPTKEQSSLESTGNLDITKLLDELEIPSRSQNSTSSSVLLVKKLLQFDNSSRPAYYGTWRKKSSTVSARQPFQRDEELNYDVESDEEWEEVDPGDPGERLSDYEEDDEKTMNEHDAMIDAEKETENSFIVPNDYLSDDEVIP

SEQ ID NO: 49932 - protein, 65 aa, Zea Mays
MEGFTPSKTTLLRRSHKHQAPRIMTLLKPFILLLCTFLRAFPHRTAKEISSISKVRSPSPMSDKI

SEQ ID NO: 49933 - protein, 190 aa, Zea Mays
MKKTVDIDNSDFLKELENFSKTWQSNPPGKLIVDFIDGDLPPGLGSPLERLGLFMKNDLEDEVEQEVEDSASPSMDVDMRKDLAGHEMQDSISPVKVIGTKDDFQGADINTRKDFQEDAAGHEMQDCISAVKVIGTKDDFQGAVGHEMANSLSPSTFVDTKKYSEGTEHEMVDSISPLMDPNTEEGEISC

SEQ ID NO: 49934 - protein, 613 aa, Zea Mays
MGNFSHLSHSHGGDTLENKESTIVKKNRSDGSDFEDSLVSKSDRRRPISQVLQSSENLLPHLKQNNDFGALLIKENNNPSLATSRSRRNKYTYMASDSGETQSHSDLPSIKMTATGADFENESYLRHTGYFSEEQTSSDFVEKQVTESSERECSESETEEDAELLQNASVILPIESHAPDPYSVPIYEKFKHVDYGDNEVAYSNYMPQLNESEEEDGSSELGVSQWHMKGKRNNRNATKRSVDMRDGNTWLKNYNGSLKGSLHNTNDGNPRKEGMHTSGEKFFEESIYQIKEEPSYDDSDETNVFEDTSHSEANLYYGKRCTSFLRTTRDLSRRYSYFNDYENDSSNVSPLNKDTEQMYHVDRNAYWDGPSFYQTKLTSRFGGMRPMLFNVNLKVQASYQGEHVPLVSLMSRLNGKAIVGHPIQIEIVEDGSTDHLILCGDSGMQESSAAPPAWPTGRRTAMQRVPRSNPSGALLDGDNEGGLVYSDYEMKPTKLYTSSNHQVKVNKKSSSNTRRSVAKSQKKSSKKTNLSSQKRRVLSSISTAKKHHGEGGRAKAHWRNDILGGLIRSEGVPLVTCVPTKVVFTRILEAVGRPPLSVVHRVRMTSPSVRDPP

SEQ ID NO: 49935 - protein, 298 aa, Zea Mays
MSNKIGQGGFGAVYYAELRGEKAAIKKMDMQASHEFLAELKVLTHVHHLNLVRLIGFCTESSLFLVYEFIENGNLSQHLRGTGYEPLSWAARVQIALDSARGLEYIHEHTVPVYIHRDIKSANILIDKNYRAKVADFGLTKLTEVGNTSLPTRGIVGTFGYMPPEYARYGDVSPKVDVYAFGVVLYELISAKDAIVRSTESSSDSKGLVYLFEEALNTPDPKEGLQRLIDPALGEDYPIDSILKMTVLARACTQEDPKARPTMRSIVVALMTLSSTSEFWDMNAIQENQGVVNLMSGR

SEQ ID NO: 49936 - protein, 470 aa, Zea Mays
MARILMRLLLLAAAAAVAAGDGCLNSGCVALGSYLVARNQNLTYIASLFGIGDYHALARYNPGTTNLDYIQAGQSVNISFTCGCHTFPNSDATYLGGSFPHKVVTGDTYGGIAQNYNNLTSAAWLAVTNPYPTNNIPDTNTVVNVTVNCTCGDPKISSDYGFFLTYPLMGQTLAAVAANYSFNSSSQLDLLRKYNPGMDTATSGLVFIPVKDGNGSYHPLKPPGNGGSIGAIVGGVVGGVAILVLGVLLYIMFYRRKKANKAALLPSSEDSTQLATTSMDKSALSTSQADSSSGVPGITVDKSVEFSYEELFNATEGFSMSNKIGQGGFGAVYYAELRGEKAAIKKMDMQASHEFLAELKVLTHVHHLNLVRLIGFCTESSLFLVYEFIENGNLSQHLRGTGYEPLSWAARVQIALDSARGLEYIHEHTVPVYIHRDIKSANILIDKNYRAKVCLVHGFFLNMFPECLMK

SEQ ID NO: 49937 - protein, 924 aa, Zea Mays
METLPNGSVNNAELNQENEKSMYASESEEARDIFVYREDVVSLKSKEDVRGVVLEVAGEYDYDGSITDDDIDTEEHEDKTAYGAENGVADGGLQCSLGPGEPGASTFVLVAYDYIESGGAFGDPYKLYGVSQSQKLLPNKTEDDSMSIQLETKGDQQSVPLEEQNPEDLTLLSRFSYTNWQLTDWCLSQRYTSCTNDTMIDSDKHTWQICTCSENSVPLSGIPESQADAQIDTDTGHRQTDVDSTADVLSMSDGDNSCIAKESETGTSASSISNEGPQDNATSRKKFRKDGTKECGVAATALIPIHSPNEHEFFPEQYVVDKVTNDVGVDDSSEPRRVGLVRGVNAKDRTATVSWFKPPLHPEEPKEIACNEIVSVYELDVHPDYDYCYGDIVVRLPPVKPVIESTNSKEQMELDKTLDSSEGFAASYSAPPDTSADEQLSQKESCLQFTSLSWAGNIVGFQDGEIEVIWGDGSISKVGPHEIYVVGREDDGASLDDGTASDGSSWETVDDNEMDVLHDSAKGDSQNVPENSIGRENGSFSSQDGSSVATGPLSVAFEFVTRLASDLFARGRRHLDGSSDAMDEVESHWSNEISEIGDDIDKCNKNHVESPEHAAVIENDSSVEKSVDVVMADNPVHSECFKHFDVLQCPLDHHYLENTTQGTGGKKWVKKVQQEWSILEKNLPDYIYVRVFEDRMDLLRAVIVGASGTPYQDGLFFFDFHLPLEYPLVPPSAYYHSGGLRVNPNLYVDGKVCLSLLNTWTGRGNEVWDPSSSSILQVLVSLQGLVLNEKPYFNEAGYEKQVGTVEGEKNAVPYNENTYLLSVKSMLYILRRPPLHFEDFVKSHFRKRGHYILKACHAYLQGNVVGTLTDDACTTDRSKEHSSSVGFKLVLAKILPRLITALKDTGADCDQYEHLGRTETVTES

SEQ ID NO: 49938 - protein, 284 aa, Zea Mays
MLLLRANALAAVPVSFSITPAASYSCFPWPSSSTTAASCSVGSSARLDAAVQYDPLRPGSDAWAHPDGMVTAEGDEEKQRYDTEGESNDWEGEGPQGSSDPEGINVPRQRYIAVPKEALLDAVLSQFASDDDDAADFKRCARCLDAILHAEHKRMLEEMRTSYMLTQRHRDEEEEQDDTDTASGSDYVNGKAGSGFFGITQLDGTLFLTRSVDLRTLLGLTPDPDSQTRRGYATERQKGLLLVEKLDYLQSKLLQNVFFSLSKPLKKPGKWLNEFLAGFEKINR

SEQ ID NO: 49939 - protein, 517 aa, Zea Mays
MLLLRANALAAVPVSFSITPAASYSCFPWPSSSTTAASCSVGSSARLDAAVQYDPLRPGSDAWAHPDGMVTAEGDEEKQRYDTEGESNDWEGEGPQGSSDPEGINVPRQRYIAVPKEALLDAVLSQFASDDDDAADFKRCARCLDAILHAEHKRMLEEMRTSYMLTQRHRDEEEEQDDTDTASGSDYVNGKAGSGFFGITQLDGTLFLTRSVDLRTLLGLTPDPDSQTRRGYATERQKGLLLVEKLDYLQSKLLQNVFFSLSKPLKKPGKWLNEALKRSTDNQGFQIWIDKLRLWLKEQTYADNSLLLIESSSWDKLSSDQLPDADVPIWIAAQRAVSRYEGILSPVGPRGRLLRRLLKWTGLIPSLPEATIKSNNETKHLEGHVRPNFLPRITLANIWEPASRESCNNNIWEMVKASFRILFGRSTLQEPAFQELILLYTDEVVPSETKDEMVPLQLKIYERIPIPDLPVVFPHKKLSFRILDTVRLDIATVIGLLAYVVNYKFESLASSPSAFSS

SEQ ID NO: 49940 - protein, 1044 aa, Zea Mays
MAGSFDLRTPTRGVEQDETTLIWYSKGREKHLSLSSVSAVVLGQKTIKFLRQRCPEKEPHSFSLIYKNGERSLDLICSDRDQAENWYLGLRALLPTPCNPCSSIESRSSRQIDSCTNTPSSYIQLKSKLLSVHGTPRHIQVCSSQRKPKKAHGTFFGGSADCSESLFYTRQRTFSDIGTYLENLTRKMSNPEIHDLKDVMVGNQEKEQKITQTPKLKTFEGPRAACRLDSLKDVFFWGDAFGSILECGDTSKPLPMLVDSTNMLDVQSIACGETHAAIITKQGEVYSWGNESSGRIGNQVNIKVSRPKVVQSLASLHVKDVAYGSKHTCAVTVSGELIEWGEGPYMGQLDSYARNQWFPHKLFSPLDGISVVKIACGPWHTAIITSSGQLYTYGDGTFGVLGHGDTQGTTRPKEVESLKGSRVKCVACGPWHTAAIVEVISDFKSNSPRSKLFTWGDADRGKLGHADKKMKLIPTCVDSLTDYDFIQVSCGTALTVALSVTGVVFTSGSSMHGQLGNPHADGKTVSAVEGLLKSEFVRHISSGSSHVAVVTTNGKVFTWGKGKEGQLGLGDFLNRSTPTLVDALEGRHVESLSCGYNYTAAVCLHKVISRKDLSVCSGCKMAFGFTRKKHNCYHCGSMFCNSCSSNKVAKAALAPDKSRRYRVCDGCFSQLLKVVDSGKVKSELNTSKGAEIIRSYTPKLSRIFRDVNLPVEKEKVALVQRSNQRNEVLYTPVQAKSQRWGQVECPAQFLSAEDSSHYQSISKNHMYSASVSERMHDPTVLKSGRSLQQPNDDQRKDLNSIEETLLTEEVKQLRSQMTLLMEQYHQKALQVELYKQKLDETWLIVRNEAAKCKAAKDIIKVLTDQCKALSEKLLVGQQYENLETKSNISQGQTFSADLQHHPSEKFATGKFGQLDNTKNHQTSSQGDEEYTPSSSSDVQVEGLCGHLNGSRTFDSNGRITEGNSIVARVTSNGVIEQIERGVYVTFAVSPCGKKDIKRVRFSRKHFGEKEAQHWWEENKGSVYAKYSTEKAQHQLEVTIKSVQE

SEQ ID NO: 49941 - protein, 359 aa, Zea Mays
MGSNTERARKALGAMKLIGFSKKQAIPVLKELLKIFNNNWEPIEDESYRALADAILDRQDSKQTPPSQQGTQAAHADLEPLRSTRDDRQQYLSASLDDTCEDDNETPLVKRPRMGTANFRPELQPPQQSSVSTQGALPASPQTSRRQTRSLTVEPHAAGHEYPLAVNDALVVKEPKPEPQIDRAEDFVAGPNATQLNDGSSEQTSGFGARGNIVHQAQSLGRSLQAAAVCKNGVGSTVQNTHETSIVEVDVASSANGEVKMSLKCSLGSSNFSISMEEVFKMVEEKCLHSYKMLPSDLSIGKLLSENLVCRIHLLLGILSWLTVIKRQPMILLIYPKAKSGASSMFLCKNNRGRVLLYT

SEQ ID NO: 49942 - protein, 357 aa, Zea Mays
MGSNTERARKALGAMKLIGFSKKQAIPVLKELLKIFNNNWEPIEDESYRALADAILDRQDSKQTPPSQQGTQAAHADLEPLRSTRDDRQQYLSASLDDTCEDDNETPLVKRPRMGTANFRPELQPPQQSSVSTQGALPASPQTSRRQTRSLTVEPHAAGHEYPLAVNDALVVKEPKPEPQIDRAEDFVAGPNATQLNDGSSEQTSGFGARGNIVHQAQSLGRSLQAAAVCKNGVGSTVQNTHETSIVEVDVASSANGEVKMSLKCSLGSSNFSISMEEVFKMVEEKCLHSYKMLPSDLSIGKLLSENSLVAWNPELAHCNQKTTHDTTDISKGEERIVVLIVLATVYQRQFHVLVQE

SEQ ID NO: 49943 - protein, 406 aa, Zea Mays
MGSNTERARKALGAMKLIGFSKKQAIPVLKELLKIFNNNWEPIEDESYRALADAILDRQDSKQTPPSQQGTQAAHADLEPLRSTRDDRQQYLSASLDDTCEDDNETPLVKRPRMGTANFRPELQPPQQSSVSTQGALPASPQTSRRQTRSLTVEPHAAGHEYPLAVNDALVVKEPKPEPQIDRAEDFVAGPNATQLNDGSSEQTSGFGARGNIVHQAQSLGRSLQAAAVCKNGVGSTVQNTHETSIVEVDVASSANGEVKMSLKCSLGSSNFSISMEEVFKMVEEKCLHSYKMLPSDLSIGKLLSEVCQSVVQLGTMHSEVNRDSGSLHNEVVVPFVKPISCEAAVGISDDVAGGSSVLESSEPCLQNSLVAWNPELAHCNQKTTHDTTDISKGEERRQFHVLVQE

SEQ ID NO: 49944 - protein, 603 aa, Zea Mays
MGSNTERARKALGAMKLIGFSKKQAIPVLKELLKIFNNNWEPIEDESYRALADAILDRQDSKQTPPSQQGTQAAHADLEPLRSTRDDRQQYLSASLDDTCEDDNETPLVKRPRMGTANFRPELQPPQQSSVSTQGALPASPQTSRRQTRSLTVEPHAAGHEYPLAVNDALVVKEPKPEPQIDRAEDFVAGPNATQLNDGSSEQTSGFGARGNIVHQAQSLGRSLQAAAVCKNGVGSTVQNTHETSIVEVDVASSANGEVKMSLKCSLGSSNFSISMEEVFKMVEEKCLHSYKMLPSDLSIGKLLSEVCQSVVQLGTMHSEVNRDSGSLHNEVVVPFVKPISCEAAVGISDDVAGGSSVLESSEPCLQNSLVAWNPELAHCNQKTTHDTTDISKGEERVRIPVVNEFGSETCPPSFYYIPRNLVFQNAYVNISISRICDEDCCADCSGNCLSAPVPCSCARITGGEFSYTLEGLLKTAFLDECTSVNHFLQEHHRFYCPVCPLERSKNEGSPGPCKGHIVRKFIKECWSKCGCGMQCGNRVIQRGITCKLQVFFTREGKGWGVRTVEDLPRGAFVCEYVGEILTSAELHERAIENARNDATMQI

SEQ ID NO: 49945 - protein, 433 aa, Zea Mays
MVHGIGQRLEKANLVDDVVDFRRVTANLAERYLTSYQRSTQRVLFIPCQWRKGLKLSGESTVEKLTLDGVKGLRVALGATVHDVLYYMSPIYCQHIIDSVSNQLNKLYMKFLKRNPGYSGKVSLYGHSLGSVLSYDILCHQESLWAPFPTEYLNMETSDRNQGAKSANEADLHDSGAKDHDTSSLGYSCADNENSVIDEDSTRTDVSCMDSILPSCVLEDSPNNHDTVVPRGAVVADQNGEEKKVENYQSVYAEEGTTSGVITKKAEGSSISRSAKEVHEEVLDKEKLMVLAKDKLILSLEEEVKCLKAKLDQLEQHNHLVTENTSGVEYHEGQNYNHALNSGKLFVAQESTNQSYSPQIKYTKLNFKVDTFFAVGSPLGVFLSLRNVRIGIGKGQDYWQDKNVIEEMPCCRQMFNIFHPFDPVAYRWAFIQN

SEQ ID NO: 49946 - protein, 579 aa, Zea Mays
MRRHCFPVYWNGENRRVLRGHWFARKGGVDWIPVREDVSEQLELAYNCQVWHRRKFQPSGLFAARVDLQGSTPDLHALFTGEDDTWEAWLVFDTGPKFGSNTIKLRRGYFCSESASTKPSQDELRQKKEEEMDDYCSQVPVGHLVFMVHGIGQRLEKANLVDDVVDFRRVTANLAERYLTSYQRSTQRVLFIPCQWRKGLKLSGESTVEKLTLDGVKGLRVALGATVHDVLYYMSPIYCQHIIDSVSNQLNKLYMKFLKRNPGYSGKVSLYGHSLGSVLSYDILCHQESLWAPFPTEYLNMETSDRNQGAKSANEADLHDSGAKDHDTSSLGYSCADNENSVIDEDSTRTDVSCMDSILPSCVLEDSPNNHDTVVPRGAVVADQNGEEKKVENYQSVYAEEGTTSGVITKKAEGSSISRSAKEVHEEVLDKEKLMVLAKDKLILSLEEEVKCLKAKLDQLEQHNHLVTENTSGVEYHEGQNYNHALNSGKLFVAQESTNQSYSPQIKYTKLNFKVDTFFAVGSPLGVFLSLRNVRIGIGKGQDYWQDKNVIEEMPCCRQMFNIFHPFDPVAYRWAFIQN

SEQ ID NO: 49947 - protein, 660 aa, Zea Mays
MELLNDDLIKKDFTKVGSAEELPQASYSSAGMLEDVNNVMVLTRDCEKTKVAGFTKLDEEVIKLIEIEKPILNEAITIIRKAAPMMEEVELLVDAASRLSEPFLLVIVGEFNSGKSTFINALLGRQYLQEGVVPTTNEITLLSYSEVESENFERCERHPDGQFMCYLSVPILKEMNLVDTPGTNVILQRQQRLTEEYVPRADLVLFVLSSDRPLTESEVGFLQYVQQWKKKVVFILNKLDLYRNSNELEEATAFVKENAMKLLTAEDVTLFPVSSRSALEAKLSYSKNSDGKHSTEAMYNDPRWRSSKFFELEDYLLSFLDSSTENGKERVRLKLETPIGIADRLLTSCQRLVKLEYEKAVEDLASIKDLVYGANNYAIKLKSDSSSWQNQISSLIERAKGRAVTLMESTLQLSNIDLIFAYTIKGKTGSSMRATSFVQNDILSPTLDDAVNLLGDYSTWLSSSNTREANVYLECFCERWDALVAPEERALLDPNGLVNEGEKLTIKALEGFNASAAAKDFEEEIRELAFGTFGGLGIAGLSASLLTSVLSTTLEDLLALALCSAGGFFVLSSFPGRRKHAIDKINKAADELSRKVDEAIQKDISQSANNLIRFVEVISKPYQEACQRKIDWLQGVQGELSAVERKLQTLKVEIQNLNGS

SEQ ID NO: 49948 - protein, 1465 aa, Zea Mays
MMPESHPHPHAGAVLASTSSRRSLSLGSSISQSFRQMDTEDPFARSQSEHEHRDDEENLRWAALEKLPTYDRMRQGILRRALDQQQESGGGGVEIVDIHKLAAGDGGRALLERLFQDDSERFLRRLRDRIDMVGIELPTVEVRYEQLTVEADVITAGRALPTLWNAATNFLQGLIGRFGSSNKRNITILKNVNGILKPSRMTLLLGPPSSGKSTLMRALAGKLDKNLKVSGSITYCGHPISEFYPERTSAYVGQYDLHNAEMTVRETLDFSRRCLGIGARYEMITELARRERDAGIKPDPEIDAFMKATAVQGQETNIITDLTLKVLGLDICADVIIGDEMIRGISGGQKKRVTTGEMLTGPATALFMDEISTGLDSSSTFQIVKFMRHLVHVMNETVMISLLQPPPETYNLFDDIILLSEGYIVYHGPRENILEFFESVGFRCPDRKGVADFLQEVTSKKDQQQYWYLDQEQYHYVSVPDFAERFKSFHACQQMQKELQIPFEKSKTHPAALTTKKYGLSSWESLKAVMSREQLLMKRNSFIYIFKVTVLIILAFVSMTVFLRTKMPHGQIADGTKFFGALTFGLITIMFNGFAELQLTIKKLPVFYKHRDFLFFPAWTFGVANILLKVPISLVESVVWVVLTYYVMGFAPAAGRFFRQFIAFFATHQMAMALFRFLGAVLKTMVVANTFGMFVLLIIFIFGGFVIRRNDIKPWWIWGYWASPMMYSQNAISINEFLASRWAIPNNDTTIDAPTVGKAILKSKGLFTEEWGFWLSIGALIGFIILFNSLYLWALTYLSPSSGSNALVSEGEDDVNEIALKERSRDARSEDEISQVVYGDLGTNGATNTLVQSRVTLPFQPLSLCFNHVNYYVDMPAEMKEQGFTESRLQLLSDISGAFRPGVLTALVGVSGAGKTTLMDVLAGRKTSGAIEGDITLSGYPKKQETFARISGYCEQTDIHSPNVTVFESITYSAWLRLSSDIDDGTKKMFVEEVMALVELDVLCDALVGLPGVSGLSTEQRKRLTIAVELVANPSIIFMDEPTSGLDARAAAIVMRTVRNTVNTGRTVVCTIHQPSIDIFESFDELLLLKRGGQVIYAGELGRHSHKLVEYFEAIPGVQKITEGYNPATWALEVSSPLSEARLNMNFAEIYANSVLYRKNQELIKELSVPSPDYQDLSFPTKYSQNFYNQCAANFWKQYRSYWKNPPYNAMRYLMTFLFGLVFGTVFWQKGKNIDSQQDLYNLLGATYAATFFLGASNSITVQPVVSIERAVFYREKAAGMYSPLSYAFAQTCVEVIYTILQGILYTVIIYATIGYDWKADKFLYFLFFMTACFNYFGLFGMMLVACTPSALLANILITFALPLWNLFAGFLIVRPAIPIWWRWYYWANPVSWTIYGVVASQFGENQGELSVPGGKPVVVKQFLKDNLGIQHDLLGYVVLVHFAYIIAFFFVFGYSIKFFNFQKR

SEQ ID NO: 49949 - protein, 655 aa, Zea Mays
MAMPSSTTAALSRLVDRTRVPDPTLQRHAVGAVFRHLLSLPAPLPAAAHDATSALLASPHPAVAAHAAASIARLTATRPDLLPSDVALPLLIAPLAASPSPLLASCLVKAVSALATCALRSGSRFPAHDHPFIQALASGADGARAELMRQAAGMVADRVDWVVKFLRPFVMFSVVRKGDAAFARDLIGALAAAAVAAGKASVAIPVLKMLQDSMLHFGRGDDQEVRLWLSSAECLVDAYVVLLRKLAHGQMPTYDAQASSATLMETLLSQYSFHQKFLGIDSTIFGLSKHLFLVQKDLGLCYIPEISVVLSSLSYSLTGLEFEHEQLAALKLLSFLIDWKYENVLDSKEQTHHVSVELLCVLAVINLTISPSKSVKAVAYHVLSRFSLFVLDLPASHSSEEQDISTSYHISKPALLLPKLLHHLWSKPSSSCFSFMKYIATKASPDSGQSDLEANYWTHQINAYLTALHREKHTLDVRSSKTTSAISSLISSVASVLVMHPKLGTSAAESLAMLGTSDPRLGMPLFVVILFYSKILCSSGKFSAEISASLLSCYWVEALNTATYEAYDRCKQVLLCLMMKCRPLKVLLLSRPSPLVLVIAMVLLEMVEHEHGILQVPEMLLTSHYPPPPLRPALVIEGGVTHFCTTGPGVDNRWS

SEQ ID NO: 49950 - protein, 80 aa, Zea Mays
MSFRAREMYKKVVRRLGGEGKLPAELMKSVKDILPDSNVVMGRAKRGIFAGRHIRFGNKVSEDGGNKWLSFTAARSCWSI

SEQ ID NO: 49951 - protein, 856 aa, Zea Mays
MLVDIVDLSSDDDEVAVTEEHSVDGKGVYAKANFFDLTIDDGILEGEHIAYEQEQGDSAQGTSFYKQEFIADDGQAEAAQCIVTLELQNLGADGGCYASQCTETLLVQQLRRNDGQNDAAHSTGTLPIQELRTDGGQHDAAQCTTSLHMQELRATDVQGDAACFTPTLQRQEHTAGNEQGDTVQYTTTQQGQESIADDTRGDFTHCTTALQWQGSHKAQCTTTLLRQEFLAAGDRMQDAALLRNSAEATTSLTSTQQGRHMRTELFNVSTATPFPRQFWKAGEKAGDYGLASQADLNNDHNRLQIHPKFLHSNATSHKWPFGAIAELLDNAIDEVSSGATFVKIDKMKHSPKGDYSLVIEDNGGGMSPKSLRQCMSFGFSQKSTTSSIGQYGNGFKTSTMRLGADAIVFTCTKDDRRLTRSIGLLSYTFLMRSNCNDIFVPVVDYELDALSSTFKRKMNCGEKHFLSNLFTILKWSPFSTEDELLNQFSNMECHGTKIIVFNLWLNDALEMELDFITDKEDILVSGAPEIRAGRNTVESLTQMHVANRFRYSLRVDVITTIGYLKGAPRLDIYGFSVYHKNRLILPYWPAGSCSGRRRGIAGVLEANFIRPTHDKQDFERTGLFQRLETRLKDMAKEYWTYHCHMVGYTRVMKKPPPAHYVSTIAEKGDDNLAAQSTTKTYGYNSRARVPVALQPCSNAYNTQDPMHADVGVVMDQMNYGACPSMTINVGTTLHSLRYAPQQSQSELCKRRKSSEIHWRSQKKQNTNIYSDKPESDSGTEMAEFRVVLDSSTMLKAECSELEAAGKQLASKADKLRIELDVWQRMYQGLSDKLRSYDGLQRLRCSRHCSSSSIGFI

SEQ ID NO: 49952 - protein, 605 aa, Zea Mays
MLVDIVDLSSDDDEVAVTEEHSVDGKGVYAKANFFDLTIDDGILEGEHIAYEQEQGDSAQGTSFYKQEFIADDGQAEAAQCIVTLELQNLGADGGCYASQCTETLLVQQLRRNDGQNDAAHSTGTLPIQELRTDGGQHDAAQCTTSLHMQELRATDVQGDAACFTPTLQRQEHTAGNEQGDTVQYTTTQQGQESIADDTRGDFTHCTTALQWQGSHKAQCTTTLLRQEFLAAGDRMQDAALLRNSAEATTSLTSTQQGRHMRTELFNVSTATPFPRQFWKAGEKAGDYGLASQADLNNDHNRLQIHPKFLHSNATSHKWPFGAIAELLDNAIDEVSSGATFVKIDKMKHSPKGDYSLVIEDNGGGMSPKSLRQCMSFGFSQKSTTSSIGQYGNGFKTSTMRLGADAIVFTCTKDDRRLTRSIGLLSYTFLMRSNCNDIFVPVVDYELDALSSTFKRKMNCGEKHFLSNLFTILKWSPFSTEDELLNQFSNMECHGTKIIVFNLWLNDALEMELDFITDKEDILVSGAPEIRAGRNTVESLTQMHVANRFRYSLRVYASILYLHVPENFQIILCGRAVEPHYVVNDLIYRECIIYRPHVQVTTEPG

SEQ ID NO: 49953 - protein, 969 aa, Zea Mays
MASPRSAGGDEAIWMKLREAGFDEDAVRRRDKAALIGYISRLESEIYEYQHNLGLILLERKELTSKYEQLKASFEATEIILKRERASQQSALSETRKREENLKKNLAIQKECISNLEKALHDMRGETAEIKVSYEAKLAESLQMMETAQKKFDEAEEKLLTAKSLEADCIRTRNTSLRRLQDIEDREDQLRRYQTSFELENASKEKEINLLRKSLDDTKKILHEKEQCLLKEQVLLNQRDDSILERLAYITSSEKRLEEEKLNLEDERKVLLEEKNKLDLNMQAIISREEAIIQKESILDKRESELLILQETIASKERAEIERLRQEEEIALVRRRQEFDTDMEIKLTSFEEEIDARKALLDQRETTINEKEDAVAQREQNLNLRFAELANKEESLVKKSDELREEEKRLSSERETLHIDLQKEKEEIHNMKLDLEKEKSFFEEEKREAIQAQENLAITQNEREDLQSLQVKLKDEIDSLRAQKVDLMADAERLLSEKERFEIEWELIDEKKEELQKEAARIAEERRVIDEHLKSEFDIIKQEKEDLRVQLKISTESLAHEHAEFMNKMQQEHASWLSRIQLEREDLKKDIDIQRTELLNSAKARQMEIDSYLREKEEEFEQKKSKELEYINSEKETISSKLEHVRLELQKLEEERKRSMLERERREEELSETKKTIDALNEQREKLQEQRKLLHSDRKSITQQMQLLNELEELKIESENRQLSLRQCGKSKHAGVENLEDNGVHLSPDEDQNASPKQTTVKKLEVSPSVSTPISWVKKCAQVIFKRSPEKSADPNNDIPPKLGNVNDCTSLATAYSDGLFACHLENGAEKVPQAIDGLKVGKKRLNNALSHGDSEISQPKRKQQKSATQILRVIGGEIDSNCPSVLEEKCSKNEHDAVPVGLCGKGPQNPQAEHSEDISVSASEPSNGPGVVDSEDKDGADEESDDEGEDEEEEKTSSAKKLWRFLIT

SEQ ID NO: 49954 - protein, 303 aa, Zea Mays
MWSHLPVGRPIEFAPRPWFDVVGLRLRPTAAYRWDQVQAPFARHQRAYVEYSNELDALTPSMVSWQPYDEPPLPHIQLSSACTTDEDIYLLRCPLICFYAVEYHLPHRVARQFGLRQEFPVEPFSTSVELHKFDRQKQKKITDFEAHHQVYIDEWDQMHDLLYQSDQSHTNYNFREYISWYVGVTRCKLKGQWTSADYAELESSDDEDTSYDLVTRHGTHVEAAPILDRVGNSMMQSVVDIEHFSKTTSDDRTLAFLSHHGDTSLGLGAITVAQGSSRTTRDAFASHKEDEDDIKIPLDKIGP

SEQ ID NO: 49955 - protein, 422 aa, Zea Mays
MLMGNTWPVGMAGGNTAATLWCSHCGMGIAAPAPGSGSIVRCAFCRGVTRVEHQRGGVGERAMTTRTLAAAASLPRQLPVSAGPVEIPASYPRVSGGNKKRALLVGVSYTGTAHELKGTVNDVKEMRRLLCDRFGFPGACILELTEKESDPTRVPTRENLLRAMRWLVEGSSSGDSLVFHFSGHGVQKLDMNDDEVDGYNEALCPMDFERSGKILDDEINDTIVRPLGKGVKLHAIVDTCHSGTILDLPYLCRMSRTGYWQWENHARPSGMLTKRPNGGLAISISGCSDDQKSADASGFSDESSSIGAMTDSFIKAVEAEPGTTYGRLLSAMRTRIRDGQGSRRLPGRLGSFVRWMIPSSSVQLHVDLSFMQVFALVHLQLRDDNGYGGRAGNGYLPDSGYPVGTVMGRDPYSRTFMGTNMV

SEQ ID NO: 49956 - protein, 63 aa, Zea Mays
MNSKLKKLAKKDEEVVVASGIPCTTIRTGSLQSAPGGERGFNFTEQPREENAKRMLLPYVWKL

SEQ ID NO: 49957 - protein, 904 aa, Zea Mays
MRLQFIADVCIFHSIAEDQVIFPAVDGELSFVQEHAEEERRLNKFRSLIEQIQLAGAKSTVVDFHSELCSQADQIMQKIESHFNDEEIKVLPKARIKFSPEKQRELLYQSLCVMPLKLLERVLPWFIVKLNDAEAVSFLQNMRLAAPSSETALVTLLSGWACKGRLEDTSNPGKFVCMASGAVTCASDGNGFKTCQSLCPCYVSSNGAFSKPVKRASQGESSTNTDRNHSSHNAATEASQCNNRACYIPRLRVESSYLGVHSSTPTKSFRPLSFNYVAPSLYSSLFSWDTDTLVSGPDNISKPIDTIFKFHKAIRKDLEFLDLESGKLIDGNESCLSQFIGRFRLLWGLYRAHSNAEDEIVFPALESKEALHNVSHSYTLDHKQEEKLFQDISTVLSELSQLHDGLSYPLDVEAGTNDISSNEIDWARKRNELLTKLQGLCKSIRVTLSNHVHREELELWPLFDKHFSVDEQDKIIGHIIGTTGAEVLQSMLPWVTSALSLEEQNMMLDTWKQATKNTMFDEWLNEWWKGPSTSSDPSDKASTPSEESHFQENLEQNDQMFRPGWKDIFRMNQSELEAEIRKVSRDSTLDPRRKAYLIQNLMTSRWIAAQQKSPQPSVEGHNGCTRRPGCVASYRDPGKQIFGCEHYKRNCKLVAACCDKLFTCRFCHDKVSDHTMDRKSVMEMMCMQCLNVQPVGPNCQSPSCNGLSMAKYYCSICKFFDDERSVYHCPFCNLCRLGSGLGTDFFHCMKCNCCLGIKMIEHKCREKMLEMNCPICCDFLFTSSAPVKGLPCGHFMHSACFQAYTCTHYTCPICCKSLGDMTVYFGMLDGLLAAEQLPEEYQDRCQDILCNDCERKGRSRFHWLYHKCGFCGSYNTRVIKTDTLFPGNISVCISDTVGDLLNTV

SEQ ID NO: 49958 - protein, 606 aa, Zea Mays
MGNTCVGPSITMNGFFQSVSTALWKTPQDSDALPAAAANGPGGASPGRSQSALPKPASDVHHHIAVLSEAPEPVKIGAYHSEPAPAVQSEAPEPVKIAASHSEPAPMAAKPGAAAANASPSPSPRPRPQVKRVSSAGLLVGSVLRRKTENLKDKYSLGRRLGQGQFGTTHLCVERGTGKELACKSILKRKLATDDDVEDVRREIQIMHHLAGHPSVVAIRGAYEDAVAVHLVMELCGGGELFDRIVRRGHYTERKAAELARVIVGVVEACHSMGVMHRDLKPENFLFADHSEEAALKTIDFGLSIFFRPGQIFTDVVGSPYYVAPEVLKKRYGPEADVWSAGVIIYILLCGVPPFWAENEQGIFEEVLHGRLDFESEPWPSISDGAKDLVRRMLVRDPRKRLTAHEVLRHPWVQVGGVAPDRPLDSAVLSRMKQFSAMNKLKKMALRVIAENLSEDEIAGLREMFKMIDADNSGQITFEELKVGLEKVGANLQESEIYALMQAADVDNNGTIDYGEFIAATLHLNKVEREDHLFAAFQYFDKDGSGYITADELQVACEEFGLGDVQLEDLIGEVDQDNKPTVGVLPKKADLQNSFSIGFREALRMA

SEQ ID NO: 49959 - protein, 328 aa, Zea Mays
MDVGAELREAHRLTGHADRVWALAWNPAPGPGSSPVLASCSGDKTVRIWKRAPDGAWQCSDVLEDTHNRTVRSCAWSPNGKLLATASFDATTAVWEYNGADFECVATLEGHDNEVKSVSWSPSGSLLATCSRDKMVWIWEVLPGNEFECVSVLPGHTQDVKMVQWHPILDILVSVSYDNSIRVWAGDGDDEWHCVQTLTEANNCGHSSTVWALSFNLKGDRMVTCSDDQTLKIWDTSADLSQPKTGEGHDSCEDIIASGAGDDAICFFTEEKGSMVEKPSYRLILKKEKAHVMDINCVRWCPQDPRLLASASDDGTVKLWELRGNVLD

SEQ ID NO: 49960 - protein, 105 aa, Zea Mays
MDPINGLRVLIIDEDKDDANHMKDMLHQYNFHGPGANTDGEQSNATNSSTNKEYMNNDIYEVQSSTGSNSVDMGLVNYPESEDGETVEKCPNAYQDPEVGTSPNN

SEQ ID NO: 49961 - protein, 156 aa, Zea Mays
MDLKPGNILLDDNLMPKIADFGLSRLFGEEQTRALTSNVVGSRGYMAPEYYYRGEVSTKSDIYSLGILIIEIVTGLKVDSNTVDLSSKNLIDNVQRIWTKMPQIASKYPTLEASNLQQVKRCIDAGLNCVSEKPRERPSAGEIIKQLNGSSFPSRN

SEQ ID NO: 49962 - protein, 653 aa, Zea Mays
MKGDSSRQNSLEDNSQILSAFPREPKLEFLKNITKDFSSERVIGHGVFGVVYKGILQNGQLVAVKKLVQTSGVHDRRFQNEAGNLQFLEHRNIVKLLGSCYQVEKKLVERNNKHFLSDVPEKFLCYEYLSNGSLDNYIYDESSGIDWTMRFKIILGICNGLHFLHEERSEAIVHLNLKPSNIMLGDDMVPKIADFGLSRLFGEEQTRTLTKNVVGWIGYIAPEYHYRGEISVKSDIFSLGVLILEIVTGLKRDLNIQDISSELLIDNVSKNWTEMSHIESKYPSLEEQHLLQVKRCIELGLNCVESDPKKRPTVGSIIGKLKEISHEASIHKFMEKKLQLITEFPREPKLHFIEVITGDFANEREIGKGSFGVVYKGVLQNGEVVAVKRLLVVAKTNLDKQYLNEVSSLIDLNHRNIVKLFGYCNEIQRKLVESHGTYVFADTEERILCYEYLPRGSLDKYLYGASHELNWNISFKIIQGICHGLQFLHESQRPIIHMDLKPGNILLDDNLMPKIADFGLSRLFGEEQTRALTSNVVGSRGYMAPEYYYRGEVSTKSDIYSLGILIIEIVTGLKVDSNTVDLSSKNLIDNVQRIWTKMPQIASKYPTLEASNLQQVKRCIDAGLNCVSEKPRERPSAGEIIKQLNGSSFPSRN

SEQ ID NO: 49963 - protein, 158 aa, Zea Mays
MLINEVNNALSSFLTVDKLETLYSRVSEFPVKLTESSTLFWELSSAKELEGFLLAADGANFSIPELNILKQRYSNCCSWVSRAKNILGKLYAMSDYHNAVEELTGILKEAELLGVKVDELPIVEKELKRSLCRKQASEALATVMSMEVVEEVLKEALM

SEQ ID NO: 49964 - protein, 761 aa, Zea Mays
MARKHGWQLPAHTLQIVAITVFFLLVVAFYAFFVPFLGKQVVEYIAIGVYTPVALAVFILYIRCTSINPADPGIMSKFEDGLINIPTNGSGIEGMNLPQKVNNATGTNSPMSTCRSSLDGHSNQRGSSIGEANMNLGSQLPKKRSSCWLLGGLLCATFVKEDCRKTDDSEQQANGEEALFCTLCNAEVRKFSKHCRSCDKCVDGFDHHCRWLNNCVGRKNYFTFLALMAISLIWLAIEFGVGIAVIVLCFVDKNASRNIQDKLGNGLTRAPFAVIVGIFTLLSLVACIPLGELLFFHIILIRKGITTYDYVVAMRAMSEAAPEDEEGENIIYSPSNSATTGFSVGSSLGIHHKGAWCTPPRIFIDQDEVIPHLEPGMVPSTVDPDGAGYPERANRAKKAVKISARSLAKLDKNEVMKAAAKARASSSVLRPIDARHGHEADVISSGSASVRSSMSVDYSGTKESNSEMKLSPLHNSYPQSLASQDEYDTGTPTASSLSSLVNIHKLASHSQFSAAPRPAPPERPVPAMVRPPVPTTQITNPGIPRPAVPTTQTTNPMFQSATSYVRENRRASVVWDQEAGRYVSVPAQTRTGTGADLPARNPRFLANPSGEPSSHVRGVAPGNTSSSAMPSGQPSERLTYSGQSIFFGGPMLNTPSLGAQRNEAGARARPEGSRDPNAQQRDIRGEKARTGSLPVFAPGTILQRQKGQADKTSRALLVCFTPSLLPTAPVPVPHHWHSGEGIPVPPPALAFCLPAPTRPCG

SEQ ID NO: 49965 - protein, 368 aa, Zea Mays
MFFDRVFITHLCHLPDVFYCLGSSRIWNETWLSGFFYKPCNYELFVKQSLNMEMAIVMARDGGMDWIIHLDTDELLYPGGAAEYSVRRLLAEVPRDVDMVIFPNYESSVEHDNIKDPFSEVSMFKRNYDHLPKDTYFGMYKEATRGNPNYFLTYGNGKSAARIQDHLRPNGAHRWHNYAKSPNEIKLEEAAVLHYTYTKFSDLTSRRDRCGCKPTKEDVKRCFMLDFDRAAFIIASTASEEEMLRWYNERVVWTDKQLNLKLLRKGVLTRIYTPMTIVQSLRESGVFTSAITAGQPAVNAKLSPKETNAQSQNVTAPGNMTRVVRSTDSKASGRKILQAVDLAFSDTNVTAVPPLSPPSLDEHRHHSE

SEQ ID NO: 49966 - protein, 316 aa, Zea Mays
MDTPDRPRAAAAAGFEDSPVFNFINNLSPIPPPKPLDSAHNVQLFKSSDLAPVSSIFASPHVNPVKETKVLIRDESVHLPQELHSPSSVRTRIDTSGSFRMIRCKDIVSDNCNITCQLNEASIDSSDHTSNSTGQLTQSIQDAAGSMESDKDQCDANKTDLTISQECTGLEGMNLDESGPDKMDSSHSGIVVHENQLSEQNNDEPAAYNEGYIITHQSTSDMLTLAIPSGTETQPVNDTQMADNPYSCESLLDDQSSGYCTQNSVHEPHLYWTGAVEGSAVSYTPQTLPGALQSQLMPCNKLSEPKDYVPTEQNLL

SEQ ID NO: 49967 - protein, 731 aa, Zea Mays
MGNASSSEPEDSPVFNFINNLSPIPPPKPLDSAHNVQLFKSSDLAPVSSIFASPHVNPVKETKVLIRDESVHLPQELHSPSSVRTRIDTSGSFRMIRCKDIVSDNCNITCQLNEASIDSSDHTSNSTGQLTQSIQDAAGSMESDKDQCDANKTDLTISQECTGLEGMNLDESGPDKMDSSHSGIVVHENQLSEQNNDEPAAYNEGYIITHQSTSDMLTLAIPSGTETQPVNDTQMADNPYSCESLLDDQSSGYCTQNSVHEPHLYWTGAVEGSAVSYTPQTLPGALQSQLMPCNKLSEPKDYVPTEQNALSQHLRGMRRRSLFNEKAGISNKGVDKTSDHHPVNSTTPKCKTISGDNSKPLRTPPCALPGPAGSSPAPFEQNIINDDFTQTTDVATAEASSQGSPKKKRHKFDNGDGTSCKRCSCKKSKCLKLYCECFAAGVYCSEPCSCIGCQNNQSHMETVLSTRQQIESRNPLAFAPKVIHTSEPGMDLGDFSNKTPASARHKRGCNCKKSSCLKKYCECFQGGVGCSVSCRCEGCKNAFGKREGASVLGIGEPKQGLEEKYVCVKEEKSEIDKQLVVYQTTDAAPAENVLTTPSMVECRPLACLPPASSKKSSKKPRSSTKLTGHPSRPCNLQAPPKTDVVLSPFENYAEMVLGDSTSDILKGNSSPHTSVKVVSPNKKRISPPRMGIGLSPICRSGRKLILKSIPSFPSLGGDVNNEDPKAKLPAP

SEQ ID NO: 49968 - protein, 608 aa, Zea Mays
MSLGGTSTGRTTHLRRHLKICPALPATDRMQKQRSSPHPGSTIESIWKFDQDRSLELLIKVLVSNLFSSPLTSSTTFRQLWAGICPTNDVLSDAAIEEKFLSIFENEKLKLKEEIALAPGGVFLTAASSSLETKNFIFLTVHFIDKEWNLNRKIIRCCFTGCEDFDAEYFVSMFPNLQSCHNFINGNVRAAEEEIVKEAVQNWRLEWKLLGISSRKSLADAAVLALEKNLTEQNYLLAKCKLLNLPCIIDALNDLFGYEINEYVLSTSKMWFQYMTCTPLRRDKYKEILSRLQINRPSFGSQRWYLTFHSLEAALQFNNELPDPQQIDSRYYPAKPSFAQLKAAENFCDLVRAIYHAVKVVSRTCNGALNSQFHAIWNLKMALLRSSTKENIDQVFNIEQMKLKFDQLWRKWYLWLSLAVVLDPRYKFRFLLVCFKEAFGSHAKRYIFEVRGKLYELFLQYSCHVDQQNSDSFDQRTNDLQLDTHGSTPVHATSQNFIEQAAHEELGEVIRYLEAELIPQNANFDILKWWKENALTYPALARLACDILAIPGSAVSAESAFDETDERVGLFNLKLSPELVEALVCTQDWIKSSEIISDEVGGNINMPA

SEQ ID NO: 49969 - protein, 787 aa, Zea Mays
MAAPAARRIVGAEVPIPGSDKLRWIDLTIPSSSAAAPASPSDPFVCVPPRAASGCHIIPSGDSQYYLSWRIHEEHPNVLEVIELSPSKEFPSFGLRLAFQEALSPFAFLCEREGRRQGELVYMLYVLTVSGVALLCHLRSPFSYVSGSVLHQDDIAEFNLQTQAQSAKVTAVTAKPGCIVIGRQDGSICSYSLGKLAPNSPGFSNELRDDAGIGRLWTLMSRTKTVGPVQDIVATVVNERDLLFVLHLDGHLRIWDNHMKLLNYNVHSNDIEGHPSRLWVGKADDDQELISLAILHQNTVVQGCDYVAVYGFGFSAAERFMFSSEPSISTIPLLEGKLADLKIATYKLWILKEFGSMLYEILQYDIDTETAKCCSEKVCCYVLQEDAISEQLFQSSDNALDDLVWTADSMFSSLKEQAFTLISSMFLRRLLQPGVNHCSALRETLLEHKRFLSDSEFQSLTANGLRKEILSIIEQEGSSQTASATAYHWKQFSARYLHNWCWHNKPYGLFLDTTNEVFGLVRKGSFSLFRCLEGLEMLIYGYDHGVNLLDDVSDFELLNEVLRCMGNIHHLLGRSSTAAYYESLISSIISSDEIVSHIVKILETGFSHQSSSSLSTLLGMDTYVERRQAAHKSQRKFSVEMLRSFHTLQSRSASWSAVFDVIEKFMKCLNTNMNVQSYGSKRVCNVNSVLLVQATSQVARTMFECAFDLFLFLSYLVGVGGQEPHQPHHQPLTILAINFLLFSLVNQMNCLCTESLAALILHWLLYLIFQNLLKGTLCHLVFSVQRK

SEQ ID NO: 49970 - protein, 1003 aa, Zea Mays
MAAPAARRIVGAEVPIPGSDKLRWIDLTIPSSSAAAPASPSDPFVCVPPRAASGCHIIPSGDSQYYLSWRIHEEHPNVLEVIELSPSKEFPSFGLRLAFQEALSPFAFLCEREGRRQGELVYMLYVLTVSGVALLCHLRSPFSYVSGSVLHQDDIAEFNLQTQAQSAKVTAVTAKPGCIVIGRQDGSICSYSLGKLAPNSPGFSNELRDDAGIGRLWTLMSRTKTVGPVQDIVATVVNERDLLFVLHLDGHLRIWDNHMKLLNYNVHSNDIEGHPSRLWVGKADDDQELISLAILHQNTVVQGCDYVAVYGFGFSAAERFMFSSEPSISTIPLLEGKLADLKIATYKLWILKEFGSMLYEILQYDIDTETAKCCSEKVCCYVLQEDAISEQLFQSSDNALDDLVWTADSMFSSLKEQAFTLISSMFLRRLLQPGVNHCSALRETLLEHKRFLSDSEFQSLTANGLRKEILSIIEQETASATAYHWKQFSARYLHNWCWHNKPYGLFLDTTNEVFGLVRKGSFSLFRCLEGLEMLIYGYDHGVNLLDDVSDFELLNEVLRCMGNIHHLLGRSSTAAYYESLISSIISSDEIVSHIVKILETGFSHQSSSSLSTLLGMDTYVERRQAAHKSQRKFSVEMLRSFHTLQSRSASWSAVFDVIEKFMKCLNTNMNVQSYGSKRVCNVNSVLLVQATSQVARTMFECAFDLFLFLSYLVGVGGQVSLLQNDVARIKLKLFPMIQDILGQWIVLHFVGTSPTSPPTIDDFSYQLSSLQLGKSDELSLHRKLGCSDFTLASLLDFPKSPEGDVMSPCFLGPAEIINLVRRFSSLIMHGGNFECVHTFLGCTINLSAVLIRHSQYEAAQNLLGILETYLNNGKVSHTGQDADTACSAYLHLNGFCLLMIAHDEANIILRESKVHDAIRCFFRAASGYEAPKALENFSLETGFQVSGESRSISLWRLNYYEWAMQIFEQHSMSEGAYQFALAALELVLLDGIDNGIEAEGLQR

SEQ ID NO: 49971 - protein, 972 aa, Zea Mays
MAAPAARRIVGAEVPIPGSDKLRWIDLTIPSSSAAAPASPSDPFVCVPPRAASGCHIIPSGDSQYYLSWRIHEEHPNVLEVIELSPSKEFPSFGLRLAFQEALSPFAFLCEREGRRQGELVYMLYVLTVSGVALLCHLRSPFSYVSGSVLHQDDIAEFNLQTQAQSAKVTAVTAKPGCIVIGRQDGSICSYSLGKLAPNSPGFSNELRDDAGIGRLWTLMSRTKTVGPVQDIVATVVNERDLLFVLHLDGHLRIWDNHMKLLNYNVHSNDIEGHPSRLWVGKADDDQELISLAILHQNTVVQGCDYVAVYGFGFSAAERFMFSSEPSISTIPLLEGKLADLKIATYKLWILKEFGSMLYEILQYDIDTETAKCCSEKVCCYVLQEDAISEQLFQSSDNALDDLVWTADSMFSSLKEQAFTLISSMFLRRLLQPGVNHCSALRETLLEHKRFLSDSEFQSLTANGLRKEILSIIEQEGSSQTASATAYHWKQFSARYLHNWCWHNKPYGLFLDTTNEVFGLVRKGSFSLFRCLEGLEMLIYGYDHGVNLLDDVSDFELLNEVLRCMGNIHHLLGRSSTAAYYESLISSIISSDEIVSHIVKILETGFSHQSSSSLSTLLGMDTYVERRQAAHKSQRKFSVEMLRSFHTLQSRSASWSAVFDVIEKFMKCLNTNMNVQSYGSKRVCNVNSVLLVQATSQVARTMFECAFDLFLFLSYLVGVGGQVSLLQNDVARIKLKLFPMIQDILGQWIVLHFVGTSPTSPPTIDDFSYQLSSLQLGKSDELSLHRKLGCSDFTLASLLDFPKSPEGDVMSPCFLGPAEIINLVRRFSSLIMHGGNFECVHTFLGCTINLSAVLIRHSQYEAAQNLLGILETYLNNGKVSHTGQDADTACSAYLHLNGFCLLMIAHDEANIILRESKVHDAIRCFFRAASGYEAPKALENFSLETGFQVSDLFLCGDLTTMSGQCKFLSNTP

SEQ ID NO: 49972 - protein, 706 aa, Zea Mays
MELNTSQNDAVLNCISKMHSKSSTFTLIWGPPGTGKTKTISVLLWLMREMKHGTLVCAPTNLAIKQVASRFLKLVQEHSGDTRCLGDVLLIGNKERMCVDGDLKQIYLYDRVRRLFGCFAPLTGWKHHLSSLSDFLENGYSQYLQHLQDSQEGDTPSFFSYARKRFAVIYMELRRCFNDLLLHVPKSSILEVNYNSILLLLEMLEEFNHMIQCRYFGDEIRKVFLYSNDEPDQTNSSVVTLGKMRIKCLEELSTLLSCLKLPLTSSKPTIRDFCIKSASIVFCTVSSSTKITANKKVEFLVVDEAAQLKECETLIPLRLWTLKHAVLIGDECQLPATVKSKVCTDALFGRSLFERLSSLGHEKHLLNMQYRMHPSISIFPNTSFYEGRISDATNVMEKEHRRMYLPGSMFGPYSFINIEDGREERDELGHSKRNFVEAAVIEEILYRLRRACFKTKRKVTVGVICPYNAQVVAIQGKIEKMRFDPLQVKTNSVDGFQGGEEDIIILSTVRSNSVGKVGFLSNAQRANVCLTRARHCLWILGNATTLASSGSIWSDLVRDAKDRRCFFNASSDYVISHVIAKQRRDLDRVNVEKSIHISSSKNCRVWVETRSPNDLNEQGTSSTSVSHYAGIPSSDIVVVSEFQRPSNKNEDVEDITVIPNKENDKDINAMPVIPDKGNVVDGNHILAIPCAMLSNLARWCIRSFRS

SEQ ID NO: 49973 - protein, 251 aa, Zea Mays
MHTDDQASGFCLTNLLAGVNIAVLLFEIASPVKNSENEYLSLPLLYGAKINNLILSGEWWRLLTPMCLHSGFLHIALGCWALLIFGPRVCRAYGQRTFFLIYILGGICGNLSSFVHTPEITVCGTGPVFSLIGAWLVYQGQNKQVIDKDVSESMFWQAVIAAALSFLLSIFGRIDNWAHLGATISGIFFGYLTCPSVEFDNSAKNGQKEAVALIRQQAHPCKSAAVFFITILAFAVLAFAYGTQFNNMDLE

SEQ ID NO: 49974 - protein, 504 aa, Zea Mays
MDHAPAPPFAVHLVTGGGSSSGIALLLRSLAAARVVALDAEWKPRRRGSPAAADPAALGDDTTPASETSPAPPKFPTVTLLQVACRFSDGGGGEGERSEVFVVDLLSVPLADLWAPLRELFERPETLKLGFRFKQDLVYLSSTFSAALGCDSGFDRVEPFLDVTNIYYYLKGHDRQKKLPKETKSLATICEELLGILLSKELQCSDWSCRPLSEGQIQYAASDAYYLLDIFDLFQKRITMEGKCSSTTELTSDRHCSSVVIECSSSGYGICSGSCLMSIVTKYSEKIILTESDAKPRTSRRKEKLKIPANAKRKDNVDCSSEWQGPPPWDPSIGGDGYPKFLCDVMIEGLAKHLRCVGIDAAIPSSKKPEPRDLLNQTYKEGRILLTRDAKLLKYQYLAGNQVYRVKSLLKHDQLAEVINIFQLKISEDQLMSRCTKCNGSFIQKPLTLEEAVEASKGFQIIPTCLFNRNLEFWKCTDCNQLYWEGTQYHNAVQRFLSVCNISD

SEQ ID NO: 49975 - protein, 727 aa, Zea Mays
MGSLATADGPLPPLKYPQARRDEDIVDDYHGVLVPDPYRWMEQVDSKEVKEFVDAQAAVTSAVLSSCDHRGRLRGQLTALFDHPRFRAPFKRRGSYFYFHNPGLRPHSALYVQHGLGGEPDVLLDPSTFSEDGTVSLGVVGVSDDGEHLAYGTSGSGSDWVTIRVMRVRDKEHLPDTLSWVKFSRIAWTRDGQGFFYSRFPAPRDALDSGMKTGVNLNHEVYYHFLGTEQSQDVLCWRDPDHPKYIYIPQVTEDGKYVILSVSETSEPVNKLYYCDLSALAHGLGGVKSAHGNGMLPFVKLVDRYKLARVDVDDDEPGSPWWTDVVPEDEDGKAVLESACAVHGHKLLVSYLSDVRCVLQMRSLVTGELLHDIPVDIGTVSGISGRRCDAEVFVEFASFLTPGIIYRCDVGSAVPEMDVYREISVPGFDRNEFEAKQVFYPSKDGTKIPMFIVSKKEISLDGSHPALLFGYGGFGVSVTPQFSVARVVLMRNLGFVACVANLRGGGEYGEGWHRAGSLANKQNCFDDFVAAGEFLVSAGYTSPARLCVEGGSNGGLLVAACVNQRPDLFGCALAHVGVMDMLRFHKFTIGRAWTCDFGCSENEEEFQWLIKYSPLHNVRRPWENKRAAAAANGDASCRGLGGQYPATMLLTADHDDRVVPSHTLKFLATMQHVLRPGADGSPQTNPVVARIERKSGHCCGRSTQKIIDEAADRYAFAAKMMGVSWMD

SEQ ID NO: 49976 - protein, 191 aa, Zea Mays
MDHAAEAQRTDLMTITRHVLNEQSRHPESRGDFTILLSHIVLGCKFVAAAVNKAGLAKLIGLAGETNVQGEEQKKLDVLSNEVFVKALVSSGRTCVLVSEENEEAIFVDPALRGKFVNPLLLHPDLVKVPQRRTVAFPDRVLVLSLSLFRYCVCFDPLDGSSNIDCGVSIGTVCHCHSRSLGFTWSKTRTT

SEQ ID NO: 49977 - protein, 1650 aa, Zea Mays
MGSKRRFVIGQETALTILDVGDQECQDMRQEGTSSEVITPGSSELLLDVHPLTLHFPFHAHKLIPCTLHLTNKTDEHVAFNLSIEDGMESWQQIFVRMPLSGIVPPKSTYTLVVTMRELTYLPTQNFNLTLQSNICEDRYIYSFMSLSESDQFFEDLKEIRNVAPPQVKLKAVFSLQGQTTFENGSSTGENLVQPLINIWTLFNPAKDFSSMLISLDADPTESWVITGHRHGDVALWKHGMQKMMSLINISGEASLPRNSLNTQHDVYSVKFIARKRWFVAGTCDGFIHVYKYETRIMDCIKRFRAYSSGIIDWGICSSRALIVHPTQPYLLSTCEEMKLWDWDDDWKCIQKFGREHTDSILQVAFSPNDSFASVSSDHTIKLWCLKSPTSECTLHGHSDKVNCLDFVTHDGQQYLISGSQDCTAKAWALKEKECVQTMDVFMSPVVSVISLPDTPYITTGSADGTIHLWSSANFRLERILSLGLCGPVWDLRLIGPTRIVIQPNNYEISVIMDIDTGSEASSSAPSNELIQVDPKELRFPVAQEVSSTLEIRNVTDHHVAFCMWSLNHTANYIPVPNIEVLSPQSMRQVVITRIARREPVPADPVDDIVYVKGTTVVQGTTSADVTYDMFDGTRTGQILQPAMELNVVLVADSEIIHKARLPWALDVHPTMPWIMMAQGDYQIRIWNYKTRIEKPIAIKGREVTSAKFIMHKQWILAGCSSGLVYVYRYEPEKKKSVEKIRVLQGHSNAINSLAVHSTKPCVLSASKDGKILIWDYENEWELMKTFDVKSPVQHVAFSPKDSNMFASAQDKTVKIWDWHSGNCKSTLSGHSDLVLCLDYFSQGDQLYLITGSRDKTAKIWDCKTRSCVRTLEGHTDVVNVACCHPDLLILITGSLNGSVRLWDLNRSTTFRYELIFDLGEVYAIASLKGTRIVIGHEIGLALVDIDLEGKKDGYVKSNVAIMDSKNDTDQNMKELSPTASSSEVQKVSSIIALETLYKMKSSESSIDVHPTETWMVITSDKYVHIWDYHTREVKQMMDTKGAKVRLAKFIARKQWVIAGATSGFIFVYDYDSKKEIIHVLCNHTEPIKSLAIHGTEPLVLSASVDGKILLWDYANDWHLIKTFDARSQRLVQVAFNPKDTNMFASAQGKTVKIWDRQHDECQYKLDGHSHQIECFDYFSGGDFDKLYIVTGSQDKTAKIWDCENAGCVQTLEGHAGPVRAVCYHQNLSLLITGCSDGSIHLWNSTTFRLEHKLNFADFGLLSSVACLKGSKRIAIRSREGLALVDIDIEDKKDSDVESITTTASMNDTGPITEENGVAADHISDDHLAQGVVYVHTEIIGKVNSACTIDVHPTKPWMVITQANKFVHVWDYHTKVVEWTIQIKGAKVSSAKFIASQDWIVAGTTRGFLHVYDCESRKEIRRLCEHPKSITSLAVDDDALELVLSASIDGKILIWSYWHYYHARRRSTWHLEKTFDAGSQCLKQVAFIAPSVHRSSSTIIATARDGTVKIWDPDRSDGCREFTLAADSGQIVECFDWFSRGTDIYLVTGSRDNTAKIWDIEDGSCVRTLEGHADHVTVVCYHPDLSMLITGSRDGSIRLWNSTTFRFEHELNFDLGSLSSLACIKGSTRIAIGYERGLVLADICTQEHRA

SEQ ID NO: 49978 - protein, 362 aa, Zea Mays
MLSHMRWECRWLRFTTNKCGIFYQMILHKKVGIWSTSQPNGLVVPDASLHPVKSTLDVLELMEIGQTNRAVGSTALNERSSRSHSILTVHVRGVDLKNGSTSRGCLHLIDLAGSERVERSEAIGDRLKEAQYINKSLSALGDVIFALAQKNAHVPYRNSKLTQVLQSSLGGQAKTLMFVQINPDTESYSETISTLKFAERVSGVELGAARSNKEGKDIKELLEQVSYLKDTISRKDMEIDQLLKDKAKSPSSSTDINDSSQQIRRLSGAAGSGEAECEDNMSDDGCSVAGTECSVGGASEATAERMQKAPSRIGRLFLTKNGQPANSKPKPRESALKPSGRTTSTGSQATGGGSSVKPPKRR

SEQ ID NO: 49979 - protein, 241 aa, Zea Mays
MLLPIVKEAWRNCKKGDSSVAIAEALYEMVKGFVLQHQVILFCLGETFTELPPIYPLVDLPINTRASAADFGGSVPKPGLEVNLVDAVPCRIAFERGKERHFCFLAIAHGTSGWILLLEELPLKRERGIVRVMAPLAGSDPRIDTKHGKWLHLRIRPSSVPFLDTEKHKAKTKKYLVDGRWTLAFRDEQSCKVAESMVIEEMKLQRGAVAEQLKPLVEFDMPEDGMQHPQTSHETPSDDGS

SEQ ID NO: 49980 - protein, 603 aa, Zea Mays
MRCAPPPAAAAWWPAHVREGPSATRPGYCGSESEFAPRARAIAAGRSGSPNMWLFWRTRNRFSLEELRYLTDQLQKVHVVNEANKEFVIEALRSIAELMIYGDQHDALFFEYFMEKQIMGEFARVLRISKLSRVSLQLLQTMSIMIQNLRNEHSIYYIFSNEHINFLVTYPFDFRIDEMLSYYISFLRAISGKLNKNTISLLVKTKNDEVTSFPLYVEALKFAFHEDSMIRVAIRTLTLNVYHVGDESVNRFVSRTPLSDYFSDMVQHFQKQCIDLDKLVARSSRKGNSSVPISSIEDAIVQIEDTLYYFSDVMSSGIPDLERFITENILRVLVFRFLLPSLQRQSTDLDLSVTTSMYLLCCILHIFKNKDMASTVAAALFHQPDGPDDRKQRTPNGYTSEHDSCKSENHCTTASGIEQSSEEPNSLSSVSWKHLPNNSSRSDCCQGNTPREHLLSYITEGDDSQALGSLCLFATLLQTKELDESMLDALGILPQRKQHKKLLLQALVGEDLAETQLFSSSSSLTDDSICSDFDIYVRKLQDKYGLQCHHPRQMTSKAHRYQVKGFCRCSFGWWLAFPATAAPWRGRVHCFSSKTTKGFTQGL

SEQ ID NO: 49981 - protein, 399 aa, Zea Mays
MNSLLRPPLPGPTPRLSARRRVSSPAPVRVGSAVLAGGERRCQRGLAVATSVAPSWMEEAGVAVLEEGGRRNPSVSDSYRAAGLPQPNATVLDAQARVCTGPAQTRPLGEEQAMRVLDTILRSAIGELKEEPVSSAQLGAFFAGMTIRANSFPEATQWSEGERRAMSIFWPRLVQVLPPEVKFIADPEGTILGANGLAEPRYVGQGTGEMRLVGALREVLAGGHLGYEEVQCVLKDILPIGSSSDSTVVSQALLAAFLIGQRMNRETDRELKAYCLAFDDELAVRACYGESCLLHGVEWMPPKGGITEGQMLKFMGANIHLSPTQAKILLEDETAGFAYLNLQEACPPLYSIIGLREHIKKRPPLATSEKVQQFVRLCLWIPLKIENFTLKEFSEPPDL

SEQ ID NO: 49982 - protein, 367 aa, Zea Mays
MNSLLRPPLPGPTPRLSARRRVSSPAPVRVGSAVLAGGERRCQRGLAVATSVAPSWMEEAGVAVLEEGGRRNPSVSDSYRAAGLPQPNATVLDAQARVCTGPAQTRPLGEEQAMRVLDTILRSAIGELKEEPVSSAQLGAFFAGMTIRANSFPEATQWSEGERRAMSIFWPRLVQVLPPEVKFIADPEGTILGANGLAEPRYVGQGTGEMRLVGALREVLAGGHLGYEEVQCVLKDILPIGSSSDSTVVSQALLAAFLIGQRMNRETDRELKAYCLAFDDELGPPPVADVKSLTHYGEPYDGNTRFFKSTLFVAAVRACYGESCLLHGVEWMPPKKDKCLNSWVQTYTYPQHKPRYCWRMKLLVLHT

SEQ ID NO: 49983 - protein, 2138 aa, Zea Mays
MATLVRHDSRQYSWWISHISPKNSKWLQENVSDMDSKVKAMIKLINEDADSFAKRAEMYYKKRPELMNLVEEFYRAYRALAERYDQSTGALRQAHRTISEAFPNQMPSMSDESPSAFSQEMEPHTPDTSTLTRVAFDYDDLQKDGVGVSPQSFTSKRNGTHPEETSALSSSVENAPRAGFDGKVWKGLTFEGPNVKGKDDISNEMANLQQEVARLLAESQDLKQQMFSESERANKAENEMQMLKATVLQLNAEKDTSLMQYNNSSERISTLESELSKAQSDLEKLTDEMAADVQKLINAETLNIAIQSEAEGLDQKMKMQQQALEQKLKELESFRSSFQEEHEKRMQAESALLSQRKELAQSHEEVQRLAIEIKTANEKLNEFKQTKEVLEYTVCELKKDVERLTEQNQSSEVLVQKLGDQINTLKDSNNELQSEIQSLKSIISQLNTEKNAAVLQHQQFVELVSVLESQLSKLQSELDETEQKVQMLTHDLEKKKEEADNVHLKLQDECHRRMQIEAALLMTEGLHSQLQEKMQMLTQDFDGSTKKLSELENNKLDLESTLKELNNTILGLNSEKDAALLQQQQSLQKVSNLELELSMMQLEMDKSEQKILLLEQEIARKNGSVDSLEISLKDECEKRLQAQKMYSQSQEDVSRLYIEIEKQNGKLNELENLISELNNTILLINTEKDATLHENQQSSVRISDLESELMALKTELENVEGKVHAVEQELIYKKEEADNLQISLQDEIQKRVEGEESLLMMTNLHSGSQNEVRGLALELEKLNGNLRQVENSKVDLENIVTKHTEEIHILRERNLSTDLMIKDLHLELDALKDLNVKLQTEMGLHIGEKEALQREFTSQREEKKNLEGIHHTLVDEMSTLKTTATMNQKLIEELQITNSKLKEVCAKSEVEKALLSEKLQEVEKLSEECSLLENSLSDANAEMDALRDKIKALEALESSLKDIISCHVSEKAVLVSELEILGKRLSDASEKNSIMDSSLFDMKMDLEDLRTKLKDSEESCQALLANNSALSGEVDALREKIKALQDSESSLKDAISCYVSEKAVLASELEILGKSLSEVSEKNSILDISLCDMKTELDELRTKLKDSEESCQAHLTNNSALSAEKNNLFSQLESITLAMKALEGMHANLEQKHSSVSREKDFAYDQVRELQDQLRIKNEEFEVSAKSHQLQANSYEKQIFSLQEKNHYMEEVLQQEQQKNINASISTVILENCLVDEQDKKVALFTECQKYAVENHSANMLVSELMEEARYHGEERKKLLAHNEKLREGISNQMKFLNICKDLGPADLAEDEVLLQTVSDETINIMRLKDETEDVNRLMDTELSVLSVVLLQVGMELRDLHLQKCALEKEVESGEKETLSLQNQNQQMLEQNEQLRSGLQESSEGVEVLKTEVFVIQEKLSCLRESYQTSQDEISNLTKKNESLSKEYQSLSEKYNALEDENDTIFEECMMLKNLCLFFRGHNNEIASALASLTDEMALLSLAKGDLDLQVNELNRRSVMLESENYHLKDYIIYLVEILRTRLVLSEFDLDTNRSVFQELVVELENCMTQLVQKDDELMEAEEKVQLLQEKNRELCGVVGSLQVAMEGAKVVKGELEKKITILIEQCSSKDDKILLLHQDNEALQSEIEQCEREFVELMDDAITFSVNSAVYEEKAFELMMNGKATENRAISQKELLMKEISSRDANIEELQKRLAGIQDEHAELKAELNTHLALIASLVDHVSVLEEDVRSLSKPCSTEGKEETARVHHVQEGDDGLESHCLVNGTPKLQGLIARIEALQVVVLNAKDRQDRKSAESAAKLAAASAEIQELKTRGGSRMEAKEICSDNEKQDVEVSKGKQVQIMKDIELDQISTCPPYGAGAALYPHGTGANAELDDDMLQLWEAAERSCKNQTAKSSSSEHDIQAVEDLESECPSSELARGRDLGTNKLEVPKGAVEPHEAWSKNVLERLTSDAQRLLSIQASIEELKKKMEGSSKGTNSEYGSVSAQVHETEGLVLEQINSNNKLSRKAENYPALSDNTSTERGGYSSRRKISEQVQRGSENVARLELELQKIQYVLLKLEEEHEYTRLKVSDKRTRVLLRDYLYGRKDRGGGQKGKKKRVPFCGCVRSKSRTEP

SEQ ID NO: 49984 - protein, 848 aa, Zea Mays
MAPTKRLEKLKLSTLLTFMRCHGGSSDDHLRIGTVGFSRVVYVNEPDRLEEEGFSYLLNEVSTTKYNLATFLPKSLFEQFRRVANFYFLVSGILALTPLAPYTAVSALAPLCVVIVATMAKEGVEDWRRKQQDHELNNRIVKVHRGNGHFEESKWKNIKVGDVIKVEKDNFFPADMILLSSNYPDGICYVETMNLDGETNLKIKQALKVTLDLHEDIKFREVRQTIKCEDPNANLYSFVGSMEWRGQQYPLSSLQLLLRDSKLRNTDYIYGAVIFTGHDTKVMQNATDPPSKRSKVEKKMDQIIYLLMSSLLMIALLGSVFFGIWTKEDLRDGELKRWYLRPDATTIFYDPKRAALASFFHLLTSLMLYSYFIPISLYISIEMVKILQALFINQDIRMYHEESDKPTHARTSNLNEELGMVDTILSDKTGTLTCNMMEFIKCSIAGTAYGQGVTEVERAMAMRKGARLDDDIENGDHKDKKNDNSPHVKGFNFKDQRIMDGKWVHEPNRVMIRDFFRLLAICHTCIAEIDENEKVSYEAESPDEAAFVIAARELGFEFYKRSLATIIVRERNPSQNVVEKRKYELLNMLEFSSSRSRMSVIVKEPEGRILLLSKGADSVMFKRLAPIGRKFEEETRSHINQYSDSGLRTFVLAYRVLDEKEYKEFNEKLNAAKASVSADKDEKIEQVADSIERDLILLGATAVEDKLQQGVPECIDKLAQAGIKMWVLTGDKLETAINIGFACSLLRQGMTQIIVTLEQPDIIALEKNGDKPKIAKASKQRVMGQIEDGIKQIPPSTQISTASFALIIDGKSLTYALEDDVKFKFLDLALKCASVICCRSSPKQKALQ

SEQ ID NO: 49985 - protein, 215 aa, Zea Mays
MSVHFAGPPPKPWERSGTEGTSGPAPFKPPSGGSTSDVVEASGTAKPSENVTAMEGNAAPNVNSTVSRPMPQRPWQQTGYGNTYGGYGGSNMYSSYGGFGNTYGTGGLGNSMYSSYGGGYGGGMYGGGMYGGGMYGGMGGYGGYGMGGMGGMGMGPYGNQDPNSMGPPASPPGFWVSFLRVCHYIYKMSNHLTFYFQKDPNAWCCQFLRTNLIPC

SEQ ID NO: 49986 - protein, 475 aa, Zea Mays
MDGGLDDEWEASFLDEVIRATDEAEAVVSRNPNPTPTPAPAPIPTYYPLAAAPVSYLPASSVSYIPAASHLRSAISFSPPRDLSQRPPLPPPTAATSTRDALATGADVGRDFSPPPQLSQRPAADEGSLVAFAASSSASDRRFISTGCGEAGAKREAREIERLKRELDRVSKERNELKNECTALKKDRTKKDLQIKAKEAEIQNLKKANVAGMNIDQSFHAPANEALHTGVSSRRTDKMSGKDKDAHSLRDDLYLKQGHQTDLLEALELRRRTMIDNGMSTSGVVSLEEDTHFEPRNATCKEIKAIGVQTDNTSDNEHLDCKKLLVERISGNLRAMWGMSPNSLSSRNLISKINVSCSEEILSLLQHTRLSDNCEPSSQAISSMNEAISQLYDTFIKMNSGKMSIQTFLEALLNLCAFDDAAIVSRTLRVFLKVLQHLLQHGAKSSESVPSGTMFLLNHMLTYSWRTTTKTVRPC

SEQ ID NO: 49987 - protein, 309 aa, Zea Mays
MENNHKDCSTLLRPVDAEDSLRLHNMFLPFTFWSSLFTGMLQIGVKYSQETIRTDALSIMILIVRTTDPIEERQKFGFTSVMTRLHLLLQKENGLLVKKHSVRLLFLLLNCPVMLKLLCSGGKDGSKQMGSEACESNRSQEVISSVLVDLSDCLTCGETCSLGIELCRLVIILLAYIASSGKLGYEVLLVPVSARGASFLEMIMEVLASQMQYETRELLKERCLVMREALILLNRLASHANYSKPTLEVLTRSKLCATWTIDVANRLPHTWMANDLAELAQKFRSRVYAFIEEKPLTSDGTNLGASNKR

SEQ ID NO: 49988 - protein, 80 aa, Zea Mays
MWLRRARKAKGHDSCLFPGSKLLNNATGSGNTNTSSTPTSDAEGSAIWRLRTGRDKGLLLFLRLVLSIAVAIVVDSNFWT

SEQ ID NO: 49989 - protein, 52 aa, Zea Mays
MQNGDIINIDVNVFQNGYHGGTFRTFACGQVNDSIKHFLNVMTAVYFLEVSC

SEQ ID NO: 49990 - protein, 71 aa, Zea Mays
MCSSGPALRPYVLPTASSASSERRALPMSTTAPHWRPRASIVHCGDVVLWIRRHPLNPLGGGRRTHRFRLL

SEQ ID NO: 49991 - protein, 493 aa, Zea Mays
MAPECSRRDAPPSATLLIVCVALYTVVLAVASSPKALASSSALSSRARAAPEQQLLLSADLTTEESARRPGETRRPPSVEQELDVARAAIRRTAQRHGDAGRAGDGNVSSANTWFDAGVEYALLASVYRNPAAFHRSYAEMEKLFRVYVYEEGEPPILHAGPCKNIYTIEGRFIEQLELMAPSPASSSRRGTRRRSASDVRTSEPARAHAFFLPFSVSQMVQFAYRPNTYDKTPLRAIVADYVRVVASRHPYWNRSAGADHFMLACHDWGPEASTGHPELHANGIRALCNANSSEGFRPWQDVSVPDINLYDGDMPRQLLAPAPGVTSRPFLAFFAGGRHGHIRDLLLRHWKGRDPDFFPVYEHRHEDGFDYYSFMRRARFCLCPSGYQVASPRVVESIHAECVPVILSDGYVLPFADVLRWEAFSVAVPVADIPRLREVLERIPAPEVEKLQQGVRLVKRHFMLNQPPQRLDMFNMILHSVWLRRLNLRLDH

SEQ ID NO: 49992 - protein, 582 aa, Zea Mays
MTMARATTSTVAALCFLLSCVSATPSTLAASSAIIHDIIRGLADTTAARVRTDAEATARASTDFGTNATADDAARPAAVFYPSCAADIAALLRASSASASPFPVSARGRGHSTRGQATAPGGVVVDMASLAVAAGRDETATTNASSTSASARLAVSVDGRYIDAGGEQLWVDVLHAALAHGLTPRSWTDYLRLTVGGTLSNAGISGQAFRHGPQISNVLELDVVTGDMVTCSKEKDADLFDAVLGGLGQFGIITRARIPLAPAPARARWLRLLYTGAADLTADQERLIADDERRGGALAGLMDYVEGSVVTDLQQGLIGSWRSQPPPSSSSFYSATDAARIAALAEEAGGVLYFLEGAVYYGGASDTTAADVDKRVDVMLRELRYARGFAYVQDVSYEQFLDRVSAGERRLRGEGLWDVPHPWLNLFLPRSRILDFAAGVFHGVLLPTRTAGGGGGGPVLVYPMNRGKWDGATSAVLPYDDGDGDGDEVFYTVGILRSAVADGDLRRMEEQNAEVARFCEAAGIPCTQYLPSYATQADWAARHFGPAGSGRWDTFLRRKRKYDPMAILSRGQRIFSSPLLAS

SEQ ID NO: 49993 - protein, 210 aa, Zea Mays
MEGRGHYLIYRGRLVQTCRYYIVGEIKAARNALIQVTTKLRSFLYREMPDPIQVGNINLHGAISPVAGSPRGPYQGNDIPMGAYHQASQLATSWHSKDSGGSASGSFEQGSNINDDIRQSATKRFAVPLVTRSTLEIVIPNSAVASLTMRAGSKLAQISEISGAAVTLAEDRSDILQKVVRISGTPEQASKAENLLQGFILSIPDDIPSG

SEQ ID NO: 49994 - protein, 653 aa, Zea Mays
MLEESQSDSPVSFYSHLDSSEQSDSEAAPYDKGRSAKIMPIDADFLAAKLHERSNHNKNLTWCTSPENAMIYAPESSMYQVDDRETKPNCLQSNRSHGSLNNLSNSVLELKNADSYSTSNYSAKDAMFTQCSPRHDLRCFNAFSAKFIKKSSLSDLVSRGSMSRKFKTSTASDDWSDVSSRWAKDSQVDFLERFEKAVSKLLISDGLESCLDAGSEVTTIWQLLNNTCEARHMSSVRQDILDRLLDSISTSKKDKVVRASVYVLLLMISEDRNVMRGIKRKDFHLSNLAVALKRDVHEAAILIYLLDPTPLEIKNLDLLPSLLHVACSSGTQKWPSMLPLTPTSASIALIEILVTAFDYVTNNVHLASLSSPPILSKLVDVAKNHNLEEGVALAAILIRCVRLNGNCKKFLSQATPVDPFLHLLRRKEHRAKCAALEYFHEILQIPRSSANSLLEEIRRQGGIAIMHTLMERSDGRSVFQDEAMEVLLDSLSSQENSRVQALSACFLSNLGGTYSWSGESYTAAWLTKKAGLTSTSQRNTIRNIDWLDSCLQDTEISTWSNKSARAIIKIGVPFISALAKGMQSKVKGTSQNCLLCTAWLGSELAALGENAIRYSACEILLHDIASHLHPGNELDERVLACMCLYNYTSGKGK

SEQ ID NO: 49995 - protein, 935 aa, Zea Mays
MMNSMNVPSKRSTLEKKLDKLILALFATLFTMCVIGAIGSGIFINEKYFYLGLRGHVEDQFNPKNRFVVTILTMFTLITLYSTIIPISLYVSIECTQFINNDLHMYHAESNTPALARTSNLNEELGQVEYIFSDKTGTLTRNLMEFFKCSIGGEMYGTGITEIEKGGAERAGIRIDDDEGKRSANAVHEKGFNFDDARIMRGAWRNEPNPEACKEFFRCLAICHTVLPEGEETPEKISYQAASPDEAALVSAAKNFGFFFYRRTPTTVMVRESHVERMGSIQDVPYEILNVLEFNSTRKRQSVVCRFTNGRLVLYCKGADNVVYERLADGNHDMKKISREHLEQFGSAGLRTLCLAYRDLSREQYESWNEKFVQAKSSLRDRDKKLDEVAELIEKDLILVGCTAIEDKLQEGVPTCIETLSAAGIKIWVLTGDKMETAINIAYACSLVNNDTKQFIISSETGAIREAEDRGDPVEIARVIKDSVKQNLKRFHEEARHSLISTPERKLALIIDGRCLMYALDPTLRVDLLGLSLSCHSVICCRVSPLQKAQVTSLVRKGAEKITLSIGDGANDVSMIQAAHVGIGISGQEGMQAVMASDFAIAQFRFLTDLLLVHGRWSYLRLCKVITYFFYKNLTFTLTQFWFTFQTGFSGQRFYDDWFQSLYNVIFTALPVIIVGLFDKDVSASLSKKYPQLYKEGIRNSFFKWRVIAVWGFFAFYQSIVFFYFTAAASRHGQGSSGKILGLWDVSTMAFTCVVVTVNLRLLMACNSITRWHYISVAGSIVAWFMFIFIYSAIMTSFDRQENVYFVIYVLMSTFFFYLTIVLVPIIALFGDFLYLSIQRWLFPYDYQIIQEQHKDEPHEYSRVPLPETSHLSPEEARSYMISMLPRESSKHTGFAFDSPGYESFFASQQGIGVPHKPWDVARRASMKPQRAGKS

SEQ ID NO: 49996 - protein, 432 aa, Zea Mays
MEDSMLERMIHSGIPLEEPYLLSRLSFMAKQEMKVFREGKLPIDECYYLMGTTDPTGTLKPNEVCVILDSGQYSGDVLVFKHPGLHFGDIHILTARQIDGLEKNFIGYSKNAILFPTSGQRSLADEMANSDFDGDEFWVSRNNMLLKTFEKRSEPWVELLKLKETQHRLSKPGDLNELILERVLFNECLTTMFIPNYTKGLAPDCWLAHMDRLLTEGVDQDEKKSIVENMIKLVDLYYAALDGHKVDVDRHLRVKAYPHFMEKKGFESYHSSSILGRIYDETEEIIAQQCDEQIQITTLPCFSEVEATPECTSLWEHRYQEYLTKSRGLFDLGKEEKNDEFQKLYQHYKHLLYDADELEETSRDLSDVFMEACAIYRIVYERAWCTRSVSRCRFVWNVAGAALCHLHATKYAAQRGEKTALCPLSVIRQLYI

SEQ ID NO: 49997 - protein, 638 aa, Zea Mays
MSRSGPRRGIFDGLPIPADKSYLKESLSRIDESWAAARFDSLPHVVHILTSKDREGEIQFLKEQSDLIEDVVDEVVHAYHHGFNKAIQNYSQILRLFSESAESITGLKGEMEEAKKLLGRKNKHLGQLWYRSLTLRHVLSLLDQVEDVAKVPARIENLMAEKQLYAAVQLQVQSVLILEREGLQAVGALQDVRSDLTKLRGVLFYKILEELHAHLYNNGEYSSAVLSMVDSEQAPTSTATGRLVNSMQPLSRRTRSIKGDNHIGGPVDGFPKVSSVDGGSSFDGPDDNSLDMSESDGHTRKDSKSFSHEIPIFLSYATPDEFLESMIKADAPLNVKYLRTLVQCLSMLGKVAAAGAVICQRVRPTIHDVITSKIKACSEDASKSSMGKAAKTNDVLHSNGPTPRFQMFTQKTKSGASVMAAQLVVSPISPTMAPTGDAQRAATQLLRSIFECLVEILENHIIVGELLEQKSTSEVDNVNTPHIANGDASWNPDSESFQATGGFSVAFSLSVVQSECQQLLCEILRATPEAATADAAVQTARLANKDPVKEKRDGSEGLSFAFRITDAATPASNEGQGWRRNSNVPQEGYGTASVIPDQGIFLAASVYRPVFEFMNKIGLMLPQKYSQLGQMRSTQMTK

SEQ ID NO: 49998 - protein, 140 aa, Zea Mays
MEMELDVAVVKRDDLGNAHGLNLDEFDDVEGQALKMSSTVPKSSNIFWHDCLVGKTDRQKLLNQKGCVVWITGLSGSGKSTLACTLGRELHTRGKLAYVLDGDNLRHGLNKDLGFKAEDRAENIRRVGKCLTNIDKKGQT

SEQ ID NO: 49999 - protein, 501 aa, Zea Mays
MRPCLYILYWTHSGPACSCSSSPSTVTTDRARTMTRTTTSSTLLTAALLCLALPLLPGATANKAARRRQGDNLARLRGSPWPAESSVSLAVAATDDRASRHAASPPAGRSKEDDRVDKLPGQPSGVDFEQYAGYVTVDAAAGRALFYYLTEAVGGGAAAKPLLLWLNGGPGCSSLGYGAMEELGPFRVKSDGKTLYRNPYAWNNAANVLFLESPAGVGFSYSNRTEDYSRSGDNKTAEDALLFLLNWMEKFPEYKGRDLYLAGESYAGHYVPQLAHAILRHAAAAAGKPSSPINLRGIMIGNAVINDWTDTKGMYDFFWTHALISDATADAIGRHCNFSAAAAAAAGSNDKCDEATSEADEALEDIDIYNIYAPNCQSADLVSPPITPSMDNFDPCSDYYVDAYLNDPDVQRALHANVTRLDHPWSACSDVLRRWTDSAATVLPILAELLKNDLRVWVYSGDTDGRVPVTSSRYSVNQLQLPVAAKWRAWFSSTQDVERGR

SEQ ID NO: 50000 - protein, 546 aa, Zea Mays
MLLFGSFTEDETKLFQGQPLKSPNKSVSKECERTEIQFGTLNFSVLSLEKVSTSSVVLPAKSANSETSAITKENTCSNEKKAAGSSLPNGRAILANGCPPVNVPANNDLFENVKKTEAVVPPVVPVKSISNPTPQMTLEVHNDGTEPTQSRKLDKEREITENGSPIVDTPIAAAPAEEAVTNLNKKTSQNMPLIPQGLRNTGNICFLNATLQALLSCSPFVHLLQDLRNRSIPKFGYPTLRAFVELISQFDVLDESVNKKKEKATTVAAKPLNPAMFDDVLRNFTPDVPAGITARPRQEDAQEFLSFAMDRVHDELLKLNGNGLDSKEGMVVSSSADDAWETVGRKNKSAIVRTHSFVPSELSAIFGGQLQSVVKAAGNKASATVQPFLLLHLDIFPDAVQTLNDALRLFSTPESLEGYRTTAGKAGLVTARKSFKIHALPKIMILHLKRFSYGNNGSTKIYKPLGFTSELVLSRDLLSSPSQEGRKYELVATITHHGRDPYRGHYTAHAKHADGQWLRFDDDAVVPVGENDVLHDQAYVLFYKQV

SEQ ID NO: 50001 - protein, 901 aa, Zea Mays
MRRFFFFGSSAANAGDENGTPGSDSGTTHKKTLVADVGNESSGSCSTRLSRSRSRGQKRNKEEPANPKQLRRSMSFSSPATNTCLDERCFSFSGDVPCTLYDGFDAPQNVKDVAPNIWSPEGNPVLREYAINIPKDHSSMENDSPRSRCCSCSAGHSPVSSPIALRCRSTRLSNLLSKNEVLDRYIDRGHEDAMVNEKQRQYPSAASMVSTLGRPPRPQSTVPSIPKSMKGNTECYPDVDIKEDCLWQVAQEGTRDNCKITTMCDAGRNHVSMPDAFERDSATSVVDICEDLQEVRPPNVICPSACPISGEQETNDMLLQRAKEVESRFIVHCGDEYEFNIIRDKRMSSNDMFQLIQQLTEDRKQLTHELSSHIRAHVAERSAAKQQYKQSKKELDTRTRRLEKEKSERQTTLEREMDRRSHDWSVKLSRFQSEEERLHERVRELAEQNVSFQREVAFLEANKAEASTKVASLELQNNKLNDDLEKLRNEHEKLHNSSVDKDARFAEVVEERDHTREYLKDKEGENKALHKVIARLQTTCNEQERAITSLRQGCKAQLDKKFVECDSDKMRKLRMELIRLTGVEQKLRCEIRSCHLEVGSLRQENIALLNRLQVVGNGAPFSIRLDQELQARVDNLQVQGLSLLNKTSQLCTKLLDLMKHKKLENESFSGNDVLIVSNYTFEYQSIKGGIESLKRSLKTINSVLNEKQSVKEKSGETAARGSSSREQTDDFGLKLKEEAMLSRVLKEALLSKELDNGQLESDLSSSLRIQDVMRNETQRVQDELSCITHKAKQLELQVSKKDEAINELQQDLQESAKELASLRGTLKTVTEERDLSWQESKQLRRNINIMQNEVVSLKKKIEALDEDILLKEGQITILQDSIDKPFDIICSPRSMREFDME

SEQ ID NO: 50002 - protein, 303 aa, Zea Mays
MSWKAAPEKEVIQLKKEGRRNEYDMHKLLALNQRQKMVLQRKTEEAAAATKRFMELLEAKNSSLETYGSGNASGMQALMRAVDDELEVTIRAHELRSYYQRQMQERAAISKEIAKLEEEPKHKMSDCPQAMSPSARSFRISALENMSSSSSAMVSMASQLSEAEERERVFNGKGRWYHVRSLPEAENIMNHLFQLASSSRCKEKEHTIMELKEKVVVLNSEIRQLETQATDLRSTNKRTYPVQSLILVQACNQTIQSIQSRSNGFIWKGLKLFNGLNNSKKSARSNGTGFAPRQCSTFPAFWL

SEQ ID NO: 50003 - protein, 657 aa, Zea Mays
MSSSSDIIWRPGPVYSLSIPSDGQKKQVIIVKDLWMKTSLPGLPTPTWGSWLMEADSLEGELFDGGNNQNIVKDHSVRDTRNQGLSVGDHIILKLGNGTPLHAKLLSDNQSTIMHNCVTEIPNASYISQYGRPQVVEEPWILESIVSAKKPVAKVKDKKGQKKLVNYKHTLSGVSKNMHEQYQPVEEPWLFQSILELNETIVLADGKVEARDIIRKLRKIEKPLTPLDESKPTGGEPSSRVILMNSSVCTMQRIAVLEDGKLVELLLEPIKNNVQCDSIYLGVVTKLVPHMGGAFVDIGISRPSLMSIKQNRDPFVYPQVFKNRGTDHVGDYCNEENLPAYENDDDMSDDEFADEEAHDGSSFPVENVTDNNVDDDEVDSISVYDVDKDEENDHMEDEYSEGILQGYQSEISNDLKTLSSIQHALRESNDDTNGSRWSQVRKGTKVMVQVVKEGLGTKGPTLSPFPCLRSRFWILVSRGNKVGVSKKITGIERTRLKGITKLLRPPGFTLTARTVAAGHSWEELQKDLDGLLSTWKGITEHAQSAALAADEGVEGAVPVMLHRAKGQTLSVVQDDFNEKVKRLVVDSPRTYHEVTSYLEEVAPELYSRVELYEKRKPIFDEYNIEKEIDNILCKRCYFIVSILFHSSCWWIFSLVFF

SEQ ID NO: 50004 - protein, 305 aa, Zea Mays
MATNHLSQGQHQHPQAWPWGVAMYTNLHYHHQQHHHYEKEHLFEKPLTPSDVGKLNRLVIPKQHAERYFPLSSSGAGDKGLILCFEDDDDDEAAAANKPWRFRYSYWTSSQSYVLTKGWSRYVKEKQLDAGDVVRFQRMRGFGMPDRLFISHSRRGETTATAATTVPPAAAAVRVVVAPAQSAGADHQQQQQPSPWSPMCYSTSGSYSYPTSSPANSQHAYHRHSADHDHSNNMQHAGESQSDRDNRSCSAASAPPPPSRRLRLFGVNLDCGPGPEPETPTAMYGYMHQSPYAYNNCPYQHDEEI

SEQ ID NO: 50005 - protein, 462 aa, Zea Mays
MQTPTMSTSMATTAPAKPPAPPRQCCRYLLLPSTGHRRSVAAWSAKKKNPWLDPFDDGPDEEFDYQGMFSGGKQEEDPRPPEDPENPYGFLRFPQGYNPELDSLASKVRGDVRRACCVVSGGVYENVLFFPVVQMLKDRYPGVLVDVVASARGKQVYEMCKNVRYANVYDPDDDWPEPAEYTHMLGVLKNRYYDLIISTRLAGIGHALFLFMSSARDKVGYVYPNVNSVGAGLFLNEMFKAPTNNLADGGYHMYKDMLEWIGRPAKNVPQQPTQPLRVSISKKLRAYVEDKYSRAGVEKGKYVVIHGIASDSVANMKSRGDDDCLLPLGHWAQIAKEIRGLKPLFVIPHEKHRDEIEEEVGDDTSILFITTPGQLTCLINDSAGVVATNTAAVQLANARDKPCVALFSSAEKARLFLPYVEGKSSCTVISSATGNLIDIDLNAVKNVVKDLEPAPSFALAQK

SEQ ID NO: 50006 - protein, 723 aa, Zea Mays
MLAPLPRLTSALRGHYDADQAYLLRKSALQALTLPRPHDEWKFARKIVPGWDDASSEVRQAYKQFIGAVVELLSGEAVSEELYQVAQTVYTLFGGDDTEYVGAKKVLSKRNELESLVGYTVQDSVLKKLAQLAQKLDSLQRASAYESVHRIADDVNENDRIEFGADFDFKPLARFIVDVSLDAPLESAELGSGPFEKWQYDAWSTSTTSHSTAVRGSIAGELLDLVGDTAFEIVQDLLLHRKELVDAIQHGLSILKSEKMTSGNQPKMPTYGTQVTVQTESERQLDKIRRKEERRSKRSADSGNNDIGVDDFSSLLLASERKEAFDDVIGSGEGSDSFTVTSLPQGTTRKHMKGYEEVKIPPTPTASLKPNEKLIEIKELDEFAQAAFQGYKSLNRVQSRIFQATYYTNENILVCAPTGAGKTNIAMIAVLHEVKQHFRDGILHKNEFKIVYVAPMKALAAEVTATFSRRLSPLNLVVRELTGDMQLTKNEIEETQAFHVLYHTDNNVLLGAPTGSGKTISAELAMLHLFSTQPDMKVVYIAPLKAIVRERMNDWRKRLVIQLGKKMVEMTGDFTPDLMALLSADIIISTPEKWDGISRNWHSRSYVMKVGLMILDEIHLLGADRGPILEVIVSRMRYISSQTERSIRFVGLSTALANARDLADWLGVTDDGLFNFKPSVRPVPLEVHIQGYPGKFYCPRMNSMNKPAYAAICTHSPNKPVLI

SEQ ID NO: 50007 - protein, 414 aa, Zea Mays
MARHLAPSSGSLHRLLASCHYPPTSQAPPPRPLLLPKTRSAAMQLPRRGRRDVVAAAAASAPSPSSPGTEVAVWGKVSAVLFDMDGVLCNSEEPSRQAGVDVFAEMGVEVAVDDFVPFMGTGEANFLGGVARAKGVKDFNPESAKKRFFEIYLDKYAKPNSGIGFPGALELILECKNSGLKVAVASSADRIKVDANLAAAGLSVFLFDAIVSADAFEKLKPAPDIFLAASKSLGVDTNECIVIEDALAGVQAANAAEMRCIAVTTTLEEIALRQGSPSFIRKNIGDISINDILYGGSNARHNEGAGSTENSSSVGNALSESLNGATAAGHSDTKGFPISKNKGLLGSRREILRYGSLGIALSCLFVAVRNWKAMQFASPKGLLNFLMGGNSSVFARNEGVLPHMFLSFQESLTG

SEQ ID NO: 50008 - protein, 1212 aa, Zea Mays
MEKGKSIVDTSDVKAMSEVEHLLMRKTFTKVEFDRLTDLLRARTIESDPPKPIVSREEKNEESIKVDGIRGSALRHMDLDDSPAVKCCCSLSAGYTPYLWPSSATTLPEGVHNHGASSPAELAKQYMSSRYLREPQSSSLRSRLFLENKGEASNTVNDRRSVPPIVQTPLELRNENPGLPVNGYVTSGLRGRSAIYRMSRSPYFKGQNYSSDLNTSSLSQRSQSLHVGGRQVLKRSGAELENELGSIGPIRRIRQKSNMMSSFRDSRANPKGNLLTSHISSTDFTEDGASIQSPSSKKLLVGSSQSLRPLESQKNEGDGKSSDSIPPIPAQSNKMAEKIFEQLNIIAPSPKQQQSVTLNASNSMSKKPVFQDAGSSSMYNQSSSLKFQDLDGANGPHDTNLNGSLLKKDKLNIIKDGSPKAAFSDRPALLGNSVSASKSWTPAFKMAVIEDLPELDDDLEVLIQSSKIEVETTEQKIDSNRKEQKVEQNILEQRVEPNLKNIAGSTISEQPVASLSKTVTSSGGLFLSNDPGKAVPKASVDNNTEFAFSNGPPGTRPATGVSAMPLASVNNDKQTGASNFIFGIKQPITSDFETSTAKNKSTLGQSVTKPTTLASTSSERGDKTEKAEDVANPSEKVLPSAASTTLNAPLHFTSVASTSSLSNGLSYSPPKLTTPPPTDKPAISSAVSTSIFAVSSSSPAISSSPAFTGFSFSSSAPVGLSLVTSAKSDGTTAENKAASTLSFGIGGTKAEVKSVAPDASSKASSELFISPVSSSIASFSSSPATSTPTFTAVAPSSDAAGISVAAPSSTSTAPGLQSASTPSFTFPSSGNNLFGFSSPAQSTGLSTSSLAGSTSQPPAASTLFGSKPTQSDGTIQQTSQSSKPQSGSPFPVMTPGVGASSSGPGTLSFGLGASSTGSGTASFGVGASSSAPGTLSTFGAAAHSSGPGVFSFGAGTSSSGPSTASFGAATSTSGTGFGNSPFGTGATFANPFSSSSSTGFTFSSPSSSAGASTAASTSVFASTSTASSASAFSNPFGSSSSPPSTFTFGQSGSSGNTFAFGAQPAPTFPSQPSLFSFSSANTSMNSSPQPAFGMINTNTAFSMASPGNDQMNEDSMADDTSQAAPAPAPVFGSSFGQQNNSSAAPVFGAPAVQPGGVFQFGGQQGSAQQNPSFPAVGSLEFQGGNFSLGSGGGGGDKSNRRVIKVKRTPKKR

SEQ ID NO: 50009 - protein, 649 aa, Zea Mays
MPLASVNNDKQTGASNFIFGIKQPITSDFETSTAKNKSTLGQSVTKPTTLASTSSERGDKTEKAEDVANPSEKVLPSAASTTLNAPLHFTSVASTSSLSNGLSYSPPKLTTPPPTDKPAISSAVSTSIFAVSSSSPAISSSPAFTGFSFSSSAPVGLSLVTSAKSDGTTAENKAASTLSFGIGGTKAEVKSVAPDASSKASSELFISPVSSSIASFSSSPATSTPTFTAVAPSSDAAGISVAAPSSTSTAPGLQSASTPSFTFPSSGNNLFGFSSPAQSTGLSTSSLAGSTSQPPAASTLFGSKPTQSDGTIQQTSQSSKPQSGSPFPVMTPGVGASSSGPGTLSFGLGASSTGSGTASFGVGASSSAPGTLSTFGAAAHSSGPGVFSFGAGTSSSGPSTASFGAATSTSGTGFGNSPFGTGATFANPFSSSSSTGFTFSSPSSSAGASTAASTSVFASTSTASSASAFSNPFGSSSSPPSTFTFGQSGSSGNTFAFGAQPAPTFPSQPSLFSFSSANTSMNSSPQPAFGMINTNTAFSMASPGNDQMNEDSMADDTSQAAPAPAPVFGSSFGQQNNSSAAPVFGAPAVQPGGVFQFGGQQGSAQQNPSFPAVGSLEFQGGNFSLGSGGGGGDKSNRRVIKVKRTPKKR

SEQ ID NO: 50010 - protein, 1328 aa, Zea Mays
MYPSPYDGSGAGGKIRRRPHLRAASTPYERPPAAAAAHRLAAAAAAASASSEPGGERGGGGGGWVSRLVDPASRLIAGGAARLFGSVFRKRLAPPPAPSPPLSSPPGRNNEPKQGLPDSTHVTRTFQNSMQDSLPIPEGGMEKGKSIVDTSDVKAMSEVEHLLMRKTFTKVEFDRLTDLLRARTIESDPPKPIVSREEKNEESIKVDGIRGSALRHMDLDDSPAVKVHNHGASSPAELAKQYMSSRYLREPQSSSLRSRLFLENKGEASNTVNDRRSVPPIVQTPLELRNENPGLPVNGYVTSGLRGRSAIYRMSRSPYFKGQNYSSDLNTSSLSQRSQSLHVGGRQVLKRSGAELENELGSIGPIRRIRQKSNMMSSFRDSRANPKGNLLTSHISSTDFTEDGASIQSPSSKKLLVGSSQSLRPLESQKNEGDGKSSDSIPPIPAQSNKMAEKIFEQLNIIAPSPKQQQSVTLNASNSMSKKPVFQDAGSSSMYNQSSSLKFQDLDGANGPHDTNLNGSLLKKDKLNIIKDGSPKAAFSDRPALLGNSVSASKSWTPAFKMAVIEDLPELDDDLEVLIQSSKIEVETTEQKIDSNRKEQKVEQNILEQRVEPNLKNIAGSTISEQPVASLSKTVTSSGGLFLSNDPGKAVPKASVDNNTEFAFSNGPPGTRPATGVSAMPLASVNNDKQTGASNFIFGIKQPITSDFETSTAKNKSTLGQSVTKPTTLASTSSERGDKTEKAEDVANPSEKVLPSAASTTLNAPLHFTSVASTSSLSNGLSYSPPKLTTPPPTDKPAISSAVSTSIFAVSSSSPAISSSPAFTGFSFSSSAPVGLSLVTSAKSDGTTAENKAASTLSFGIGGTKAEVKSVAPDASSKASSELFISPVSSSIASFSSSPATSTPTFTAVAPSSDAAGISVAAPSSTSTAPGLQSASTPSFTFPSSGNNLFGFSSPAQSTGLSTSSLAGSTSQPPAASTLFGSKPTQSDGTIQQTSQSSKPQSGSPFPVMTPGVGASSSGPGTLSFGLGASSTGSGTASFGVGASSSAPGTLSTFGAAAHSSGPGVFSFGAGTSSSGPSTASFGAATSTSGTGFGNSPFGTGATFANPFSSSSSTGFTFSSPSSSAGASTAASTSVFASTSTASSASAFSNPFGSSSSPPSTFTFGQSGSSGNTFAFGAQPAPTFPSQPSLFSFSSANTSMNSSPQPAFGMINTNTAFSMASPGNDQMNEDSMADDTSQAAPAPAPVFGSSFGQQNNSSAAPVFGAPAVQPGGVFQFGGQQGSAQQNPSFPAVGSLEFQGGNFSLGSGGGGGDKSNRRVIKVKRTPKKR

SEQ ID NO: 50011 - protein, 760 aa, Zea Mays
MIDDEVNFGNIFDASEEVQVTAKFGPKQRPKTRKTALSSRSAAPNPTEETGDRKVGTFSQVNSSKELTSQERTSLMCPSTESVDIIAGSHSILDTPLEDALTVPQGSLSGASAADRTSQYGEHNDDPSKLATHQENLVVSDINVPPNSSCSKAIDDIVEFGDMCDVQIEEERVTKFQPKVQTKLLKEIAKSRKTNQKVETSTVDVVTQNGKGNNIQTRLHGDPVQDPKSHESVQIPDSEGLLATDNSKGCNLANLNNLLEESVQEETIAKFRSDLQPNLGKASSQVAAIKINVVAVAPIVGVCDSNNDMYKEPKDQETITGPVAWSPQAVHADVDLDNHNEPINPPIDGTQSMFGEVPGTAFTGREKGKSKSVSFALSDVSGIASPIDTNSEMGNIGDSCSDKLTDENLSNSSRHIAEKHSITKDQYSNEQDHEREPLDHAVQQQPKSDVGERASSMKRRCRKKVQKVGTPNHTVDDYFGEDCVEPSLAEEDNDTGDHYTTGNKHKARKKSRGGVEESQQQKAQKNKSKVSSRGRKRTLKDESTEKPEKKLTHRIRQRIPKEVKALLETPREQIKPMKLCASHLRLLQEARERVDPKGIPSGPSSNTRNFQLDDMDDLGYRDEEARFFDNDITEEHVQNATKLNYHSYMNKPARGKWSKSDTDLFYEGLRQFGSDFAMIQQLFPDKTRHQVRQKFKSEERKNPLLVHDAIVHRSGDSLYFKKVIKQLNIEDVVLPDIKSTQNKMVHQVKEALEMRMYWMI

SEQ ID NO: 50012 - protein, 573 aa, Zea Mays
MIDDEVNFGNIFDASEEVQVTAKFGPKQRPKTRKTALSSRSAAPNPTEETGDRKVGTFSQVNSSKELTSQERTSLMCPSTESVDIIAGSHSILDTPLEDALTVPQGSLSGASAADRTSQYGEHNDDPSKLATHQENLVVSDINVPPNSSCSKAIDDIVEFGDMCDVQIEEERVTKFQPKVQTKLLKEIAKSRKTNQKVETSTVDVVTQNGKGNNIQTRLHGDPVQDPKSHESVQIPDSEGLLATDNSKGCNLANLNNLLEESVQEETIAKFRSDLQPNLGKASSQVAAIKINVVAVAPIVGVCDSNNDMYKEPKDQETITGPVAWSPQAVHADVDLDNHNEPINPPIDGTQSMFGEVPGREKGKSKSVSFALSDVSGIASPIDTNSEMGNIGDSCSDKLTDENLSNSSRHIAEKHSITKDQYSNEQDHEREPLDHAVQQQPKSDVGERASSMKRRCRKKVQKVGTPNHTVDDYFGEDCVEPSLAEEDNDTGDHYTTGNKHKARKKSRGGVEESQQQKAQKNKSKVSSRGRKRTLKDESTEKPEKKLTHRIRQRIPKDKTHEALCITSQVVTRS

SEQ ID NO: 50013 - protein, 784 aa, Zea Mays
MHYQHAGSRSRMPPFARGGGAYSRGQKQFYPPPPPPLPAAALPLLPQNKHEVLMEAGRLAAEYLVAKGVLPPGSLQQRGSTVVAGGWGQLPPPPPPPLSVTQEAPAYHIARNSRRQIDDERGIRNARSRRNRGGDYSSSNGSNYNGRGKRKFGADNKYSDWTKDRGRNRRYSDIRSYDDEDDDGAPPGFKRERQSGGGIDEVGSSMSGVAWEGPSSKVEAMGESELEDTGSKASSNSNIQQKASALQEVEDENEANKMQENSVVSNSDVAEQALNGEDNSNNDSSAGVEEAGTKHLPVSSGEKVSDGRLEHSGVLNDKVEDDSTLHEKSEDDTMSEEVSVMESNLPNDARNLLNYCSFARVPTRPRTVLANRNVGPGQREITVSEQLNLVTSEEISNMAMDGEANTNSITSIEEGSKVELVGQDQEHAEQSAICNQVAESVAFHEKETRGETEEKEEQKNIPQHYEVEDNKETNELCPTFASSQNNQSAICNQVAESVASHEKETQGETEEMEEQKNIPQHYEVEDNNETNELSPTFASQNNFNLQVEKGIQIYNLDTPPQDELLIDPPDKGKTVDSELLPNIKAEDAVTVEEEKIGQSSSFKIRDLNLVGSPEVVDMRGDPRLGQSSTAGCPVDLQDNQQVEFETALGNNPNNTDTCAPFLLGNKSVQVIDIEDDIPIEAGACDTSKSKGEMVYSSMESMMNPPPVNTDALHGIQDGYSLAISDYLGADMSCYQSIQAELQDGMDLNGSEGITVMDDPIYSSLSDIGFMEVWDQQPQDYEKFF

SEQ ID NO: 50014 - protein, 815 aa, Zea Mays
MCSLPTADVKHMLADHCRLKVWSVTSMTFALWDAKTRELLKVFGIDGQVDLARPEAPVMPEQFIEEEIKAKPTKKEKLQGSLSFFRKSRNALMGAADAVRRVATKGTFVEDNRRTEAVAQAMNGTIWSGCTDGSIIVWDGNGNRLQEFHYHSSSVQCIEALGERIWVGYASGTIQVMDVEGNLQAGWIGHSCPVISMAVGDSYIFSLAHHGGIRGWSLSSPSPLDDILRYELASRELSYTRLENLKILVGTWNVAQEKACPEALKSWLGGAFFDVGLVVVGLQEVEMGAGVLAMAAAKESVGLEGSTNGQWWIDSIGKTLDEGISFHRVGSRQLAGLLIAAWARNDLKPHVGDVDAAAVPCGFGRAIGNKGGVGLRIRVFDRRICFVNNHFAAHQENVSRRNADFDHIYRTMTFNKPHGSTASATSVQLHKAVSANENQADEDRPELAEADMVVFLGDFNYRLDGITYDEARDMVSQRSFDWLRERDQLRAEMEAGNVFQGMREGRIKFPPTYKFQRHQMGLSGYDSGEKKRIPAWCDRILYRDSRSVSMPECSLECPVVAAITAYEACMDVTDSDHKPVRCTFSVDIARVDELIRRQEYGKIVESNKRVHSLLRELHFVPDTIVSTNNIILENQEDVILRITNNCETSKAAFEILCEGQSIRKQDGTKSEPVIRASFGFPLWLEVQPSSGLIGPGDTTEVAVHHEDFFTQEEFVDGVQQSWWCETTRDIEVVLSVNVTGVASTEAATHRITVRHCCPAPPAPPSANPRGPITDSPSDAVPGPKSSQSNHLLRSDFANFGSSEVRDLCGVRKRNL

SEQ ID NO: 50015 - protein, 897 aa, Zea Mays
MAGQQRPSLSNSSFPPLSSWVRAASPGRRAAVPHPLPAAADPTSPAGAPALVPGAWGSVPVSPALGPAWGAAPSATSGDPTAAGAASALAAVAAVVPAGTADLEDSNPPPPIPPSMVVDPPPPPPLTHQEDTVAALTAARAEHAARQARLREAALAWERARAAADAIAAQIAAAEQHLASPAAHDGGATSANTMGGVYGVPTVPTVGTGPRTIPEILILGNLSVSPIFAESVSKFLKLYPDLGFDPEASLLENVWQSLAILVVMQLYSYERRQNSDKNFGVSDASESGLLGFLRRFLIWHSDKILSVCVFYACLSSISLSGLIYLLGLIVFSTLPKVSRIPSKVYLVYTGLLAASEYLFQMVCKPAQMCPHQHFYGLSVFLGLKYYDSGFWGIEYRLRGKVLVIVACTIQYNVFHWLDLMPTSLVHKGKWEEPCQLFISSNPPYSPVRSNEESHSSNRFTSLFSKVQGLIGSSSSSSSSVGPGSIHQKLEYVDNAIEGSDEDKRHSFAKIWGLSKESHKWDKKRVIFLRRERFETQKTTFKCYMKFWIENLFKLRGLEINMIVLLLASFTLLNVVSIFYIMCLVLCILMNRDLIQKLWPLFVFLFASVLILEYVALWNDEITWYHGTNDIEVHCRECWKNSRIFFDYCSKCWLGIIADDPRMLISYYVVFIFSSFKLRSDHFSSFSDSDTYRQMMSQRKNAVVWRDLSLETKSFWTFLDYVRLYAYCHLLDIVLALIAITGTLEYDVLHLGYLGFALVFFRMRLEILKKKNRIFKFLRMYNFGLIVLSLAYQSPYVGQFSSGKCDQIDYLYEIIGLYKYDYGFKITSRSAFVEIVIFLLVSVQSYIFSSSEFDYVSRYLEAEQIGAMVREQEKKALKKTEQLHHLRRSEEHKRQRNM

SEQ ID NO: 50016 - protein, 595 aa, Zea Mays
MSLKATLLRSFFPDPYLNTDAGTMSPFEHGEVFVLDDGGEVDLDLGNYERFLDIKLTRDNNITTGKIFQAVINKERRGDYLGKTVQVVPHITDEIQDWIERVAVVPVDGKEGPPDVCVIELGGTIGDKIFSPHNDSGILDAGDIESMPFIEALGQFSYRVGPGNFCLVHVSLVPVLNVVGEQKTKPTQHSVRGLRGLGLAPDVLACRSTEPLEEHVKAKLSQFCHVPDQKAHEAILKVLDLQYDGKVPREPELTKWTKRATKFDKLKTPVKIAMVGKYTGLSDSYLSVIKALLHASVAMERKLVVEWVPSCDLEDSSAKETPEAHKKAWKLLKGADGVLVPGGFGDRGVQGKILAAKYARENNVPYLGICLGMQIAVIEFARSVMKLRGANSTEFDPATTSPCVIFMPEGSKTQMGATMRLGSRRTYFHVSGCKSAKLYGNASSVDERHRHRYEVNPDMVPDFEKAGLQFVGKDESGKRMGIVELPSHKFFIGAQFHPEFKSRPGKPSPLFLGLIAAASGQLEPLLQRSNPTTKACSISKVPKLKLYPTGPVNNPLNSLVNGYYPNEKRRLRFSKPPAPATHGSDIFNEERLPVR

SEQ ID NO: 50017 - protein, 322 aa, Zea Mays
MVGKYTGLSDSYLSVIKALLHASVAMERKLVVEWVPSCDLEDSSAKETPEAHKKAWKLLKGADGVLVPGGFGDRGVQGKILAAKYARENNVPYLGICLGMQIAVIEFARSVMKLRGANSTEFDPATTSPCVIFMPEGSKTQMGATMRLGSRRTYFHVSGCKSAKLYGNASSVDERHRHRYEVNPDMVPDFEKAGLQFVGKDESGKRMGIVELPSHKFFIGAQFHPEFKSRPGKPSPLFLGLIAAASGQLEPLLQRSNPTTKACSISKVPKLKLYPTGPVNNPLNSLVNGYYPNEKRRLRFSKPPAPATHGSDIFNEERLPVR

SEQ ID NO: 50018 - protein, 212 aa, Zea Mays
MPSRSPRQSARPPLPTAAEPPPGLFPAREDLVRLLAVIFIAAAAAAACSVLNRRPEPFCDSPQWPDDYADDSCQPCPPNGRCVDGELECVQGFKRHGKACIEDGLLIQRANKISQLLQLRICDQHARALCGHSAEILFQEHEVSNAIDELLSKIPAGLTEDGLQLVKTRVLESAGGFFDTTFTSSKQLSDDGTQVCSTALDTVDHLQEADII

SEQ ID NO: 50019 - protein, 393 aa, Zea Mays
MPSRSPRQSARPPLPTAAEPPPGLFPAREDLVRLLAVIFIAAAAAAACSVLNRRPEPFCDSPQWPDDYADDSCQPCPPNGRCVDGELECVQGFKRHGKACIEDGLLIQRANKILRICDQHARALCGHSAEILFQEHEVSNAIDELLSKIPAGLTEDGLQLVKTRVLESAGGFFDTTFTSSKVKVYKCPELVAELHMPMGCRVRQWIFRNTTSVAIFCILFAALLWILWIIYKRRTLSNRAEQIYEQVCEILEDNAVNAEIDNSNSEVWVVTSWLRDHLLVPQERKNAFLWKKVEELIREDSRIDQYPKVIKGESKVVYEWQASGSLSAKIKKVQGARAKSRTGVGVIKFGEEMSASSLGEVREQGSCDLTREERRAEPSQCVVAVTVEFVGMS

SEQ ID NO: 50020 - protein, 362 aa, Zea Mays
MPSRSPRQSARPPLPTAAEPPPGLFPAREDLVRLLAVIFIAAAAAAACSVLNRRPEPFCDSPQWPDDYADDSCQPCPPNGRCVDGELECVQGFKRHGKACIEDGLLIQRANKIEHEVSNAIDELLSKIPAGLTEDGLQLVKTRVLESAGGFFDTTFTSSKVKVYKCPELVAELHMPMGCRVRQWIFRNTTSVAIFCILFAALLWILWIIYKRRTLSNRAEQIYEQVCEILEDNAVNAEIDNSNSEVWVVTSWLRDHLLVPQERKNAFLWKKVEELIREDSRIDQYPKVIKGESKVVYEWQASGSLSAKIKKVQGARAKSRTGVGVIKFGEEMSASSLGEVREQGSCDLTREERSKDKVTCSD

SEQ ID NO: 50021 - protein, 283 aa, Zea Mays
MPSRSPRQSARPPLPTAAEPPPGLFPAREDLVRLLAVIFIAAAAAAACSVLNRRPEPFCDSPQWPDDYADDSCQPCPPNGRCVDGELECVQGFKRHGKACIEDGLLIQRANKISQLLQLRICDQHARALCGHSAEILFQEHEVSNAIDELLSKIPAGLTEDGLQLVKTRVLESAGGFFDTTFTSSKVKVYKCPELVAELHMPMGCRVRQWIFRNTTSVAIFCILFAALLWILWIIYKRRTLSNRAEQIYEQFFFCSNSFWTFWHLCLCLLSFSRYVKSLKIML

SEQ ID NO: 50022 - protein, 179 aa, Zea Mays
MMEPKFAALLWILWIIYKRRTLSNRAEQIYEQVCEILEDNAVNAEIDNSNSEVWVVTSWLRDHLLVPQERKNAFLWKKVEELIREDSRIDQYPKVIKGESKVVYEWQASGSLSAKIKKVQGARAKSRTGVGVIKFGEEMSASSLGEVREQGSCDLTREERRAEPSQCVVAVTVEFVGMS

SEQ ID NO: 50023 - protein, 470 aa, Zea Mays
MGDFKAAVESEEQIYSPAFGNIEVQDSRGCCSGFTGSVTKLLFIFHLLAFIALTAFLGVQASYHQNPAYKPFSNFIPLVSSVIVSTIAACFWVILAVTNPPKAIKTSLWAAPVSALACDVVILLVGNTAALGIGALVVVFAIAAGLYSCWATGPRLKHASDMLSVSVIGAHLPPATSCLVVYVLLATFGYMAFWTVAISCIAAAEGHFMDYRMAYVAALLVSMAWTMQVLRYIVYVAVAKLAHGRLTYGIHVLGGAVEAFCDTIFGPAFGDICMGAVAVPVNSAVRGLARAMKTAAGGNDEFILSGQGCCFAVSEKMLGRANRWGFVHVGARGKAFCVASRDVWSLFVLRGIAELVDSDLTGSFCFLSSVTSGALASLVSGSWALAMDKDQKKLALPISIYAFLIGYYMCRMMIAWPQACVAAYHVAYAENPQNPQLGTLIPEHLRELQAMAADQDRPRVIHFSDDIDNS

SEQ ID NO: 50024 - protein, 152 aa, Zea Mays
MDKIKDSNRQAKQLEDLTVKMKECKRLIKEFDRILKDEESNNPPEINKQLNDRKQFMIKELNSYVTLRKTYQSSLGNNNKRVELFDMGAGSSEPAAEDNIQMASAMTNQQLIDTGRNQMDQTDQAIERSKMVTSLTIHPCPVCHGKIYKTFL

SEQ ID NO: 50025 - protein, 1458 aa, Zea Mays
MSTKTVEQETVKPSGKIRFAVLVSGRASVQQGNRASPESKTGYIQISPSKEGPWTSMKLNYAVPAACWRFGNCVIASEATVKEGNRYVSIRSLVSVTNTTNFIVDLRLKGRISQSARADEQGDSFGKEDQILIGTLEPNSTIPVPLSGLSHPLMPYMLQLRPAKHHDHENYSWSDVQERRSQTEFRKEEILDLCISDLYESENLLFCSQVDGTSNSCHGLWFCLSIEGKEIGKDVQMEPIYDWCIIIKSPLCLTYYLPIAAHYTVSSSHLDNEDSSCSLGTLSPGEAVKVHNVDPRNPLYLSLVPHGGWELMHEPVVISHPTQAPSKFINLRSSLSGRLPTLTLRLIDISGRKEKRRLLSRSHLERGEKQLYDIKHDELVEGYTIASGLNFKGLGLLSSVGHGGRFGSVKELSPLGDMDGAVDLSAYDDDGKCMHILLCSKPSSYQAVPTKVIHVRPYITFTNRAGQDLYLKLSIEDEPKVLHAYDWRVSFMYSKGTTDKLQVRLVDTEWCQPLEIVKEDTIVIAMRKQGGTQKFVKAEIRGYEEGSRFLIVFRLGPAYGPIRIENRTSHTTISTCQSGLGEESWIQVKPHATRKYSWDDPYGQKVIDVSIDKGDDTCVLCVDLENPIGSSTSFREHGLMFTVDTSDIKILKFADYIRKEEVYGLPGSELTDHQGSSLKENETEPGAGPLELIVELGVVGISLIDHKPRELLYLHLQKVFVSYLTGYDFGTTSRFKLILGELQLDNQLPLSTMPVVLSTESRPDSNRSVFKANVAVSNVTSNGIQVYPHVYIRVTDQTWRLNIHEPIIWALFDFYSNLRFVTTINSTTVTEVDPEIRIELIDISEIRLKISLETAPSQRPRGVLGIWSPILSAVGNALKIQVHLRKVMHRSRFMRKSSIIPAITNRIKRDLIHNPLHLIFSVDFLGVTKSTLSSLSKGFAELSTDGQFLQLRSKQVWSRRITGVGDGLVQGTEAFAQGLAFGVSGVLRKPVESARQYGVIGIAPGIGRAFVGFIVQPLSGALDFFSLTVDGISASFMRCVNILSNKSVPQRIRDPRAIHRDGIVRDYDKFEAAGQMALYLAEASRYFACTDLFREPSKYAWSDYYEDHFILPSQRIALVTNKRVMLLQCLDLDKMDKKPSKILWDVPWEEVLSLELAKAGYQRPSHVIIHLKNFRRSENFVRLIKCNIDNEREPQALSLCCSIRKMWRSHQAAMKVIPLKVPSGQRHVYFVSDDDKKESHSLSRPLLSSGGTSTDVEQQFINNTVHFQKMWSSEPEIQSRCKLVAKQIADDGRVFSIWRPLCPNGYVSIGDIAHVGIHPPHFAAVYKNINGNFALPLGYDLVWRNCAEDYKSPVSIWLPRPPGGYVALGCVAVPSFKEPTLDCAFCVDERLAEDAAYEEQIIWASSDAYPWGCYIYQVQSASMQFMALRVPKEQSELRPKKILESFLQQASETQTSRA

SEQ ID NO: 50026 - protein, 2444 aa, Zea Mays
MLEDQVAFLLQKYLGNYVRGLSKEALKISVWRGDVELTNMQLKPEALNSLKLPVRVKAGFLGSVKLKVPWSRLGQEPVLVYLDRIFILAEPATQVEGCSEDAVQEAKRSRVREMEIKLLERQQQLKSELSSSWLGSFIGTVIGNIKLSIGNIHIRYEDVESNPGHPFAAGLVLSKLSAVTVDDLGKETFATGGDLDRVKKSVELESLAVYFDSDSSSWIVDKPWEDLLPSEWSQVFEFQEQDGSRSASKKHAYILQPVSGKAKYTKIQLTEAKKTGQALQNTAVDLDDVTLSLSKDGYRDMLKLADNFSTFNQRLRYAHLRPSSPLKSDPRAWWKYAYKVVTQEMKKASGRLSWEQLLRNARLRKTYVSLYASLLKSDMSRLVVDDHEEIKRLDRELDMEVILQWRMLAHKFVEQSVETYQYAQQNKKSWWTGSSKDEEDSKSFTDEDWERLNRIIGYKETNEYVTDQQDMKLMQFDFEIRMKHNASKLTIDDSECLADLSCQDFCCNLKMYPEAKIFDLKLGSYRLLSPYGLLAESASVIDSFVGLFSYKPFDEQLDWSLTAKASPCYITYLKDSVDQIVGFFKSSPTISQNLALETAAAVQMTLDEVKRTAQQQMTRVLKDQSRFSLNMDIAAPKITVPTKFRPDDVHETKLLLDLGNLVLRTEEIWDAYTSEEQDIYLNFNLVLSDVSAFLVDGDYHWNETSDEKNLLPVIDKCGIALKLQQGVGNREAVWQHRYLRLVGPFLYVFENLMSTTYKQWFSLRGKQVHQILEDTGALILLFDNDEGRKIWQNRLQGAIYRASGSAISSFPGVALPSEAHSFKGNFLDVADTEKLFVAGILDELKICFSCGYESNHKLKKILLAKESSLFEFRAVGGQVELSMKGGNLLIGTILGSLEIEDQYYYPGSPVPRFLARSFINSMQTQELPSLSRKNSAGPRNTPLMKNDSEENFFEASDDFDEFETPMHQKRTISDYFSTQKFLPTSVPSLQPPTFKRIPDLIPDTELQTGKFTLEGSGTFNSFVKAQIVIYDQHSPQYNSLDNRVVVTVATLSFFCHRPTVIAIMEFMNAINLANGSDTDKDKSTYPATVEDSAIEESKSDLESEPSIKPLLAKGKSRIVFHLTSSMAEAQILLMNENGDRLATLSQNNLSTDIKVFTSSFSIKAALGNLKISDDSLLSSHPYFWVCDMRNPGGRSFVEIDFSSYNVGDEDYCGYDYSLVGQLSEVRIVYLNRFVQEIISYFMGLVPKSSDAVVKLKDNKTNSEKWVSKTDMEGSPALKLDVSFSRPIIVMPRETNSNDFLELDVLYITVQNEFQWIGGDKNEMSTVHLDILTVTVRDINLVIGMNMVRGETIIQDVEGLSFELRRSLRDLRHQLPVVEAAIKVDVLKATLSNREYEIISECALSNFSETPHPVPTLDDPRYGTSTTPSHVSASSSESIHVLSEGAETWIANKFSVSINLVELSLHSGSTRDSPLASVQASGAWLFYKSNTRGENFMYATLKGFSVFDDREGTKDELRLAIGKSASVRDTSSVDGYDNPNELDSGERRIQKDLGLEPIPSMLILDAIFRKSSSSVSVCVQRPKFLVALDFLLAVIEFFVPSAQSLLSNDEDKDLLHMITPVVLNDQIYFQEHSTFSLSPQKPLIVDNERFDHFVYDGKGGKLYLLDSEGKILSSPCTESFIHVLGCKRLQFRNVTIVNGEYLDSCISLGDDSCYSASRNDHVYLVREDDGSLSTPSKEIRGDSVKNGSADISTEFIMELQAIGPELTFYSTSRNAGENLALSTKVIHAHTDAFCRLIMKGDSMEMNGNILGLKMESNGIRVIEPFDMVVKYSNASGKTNLHLLVSEIYMNFSFSILRLFLAVEEEISAFLRMSSKKISLVCYQFDKVATMQGNANDQVLSFWRPRAPSGYAIFGDYLTPMNEPPTKGVLALNTNIVRVKRPLSYKLVWQSGSPRTNIFHQKDLEDKISNIDQLCSVWLPVAPAGYVAMGCVASSGTAEPPLSSAFCLTASLVSSCNLRDCIALRDNTNMIFWRVDNAFGSFLPGDPASMSVDGNAYDLRHMLFDSADSSSKTVSRRQDSRNDFSQLERSELTSGRLFDAVASFKLIWSNSGTSSPKKLSIWRPMLSEGMFYFGDIAVNGYEPPNSTVVLRDTGEDTFLRAPEGFDLVGRIKKHRGTEGVSFWFPKAPSGFVALGCVASKSSPTKEDFSLLRCIRNDMVAGGQFSEESLWDSSNARTSEPFSLWTVDNDAGTFLVRSGYRKPPKRLALKLAGPPTSSSSDSIIVDAKIKTFSAVSFDDYGGMMVPLFGVSFDSVGLSYHGGPHHLNATISACLGDHEKQLRHPSSRSGVLGRRMGLTNNAQELWTIVWAVGAGRSLCWGTSWVKASTMVTLVDVAYPDEVVVSHSPTLSSMDKSSVHRGQATMASTTSLSEGFVAEVRLSHDVAFS

SEQ ID NO: 50027 - protein, 4139 aa, Zea Mays
MLEDQVAFLLQKYLGNYVRGLSKEALKISVWRGDVELTNMQLKPEALNSLKLPVRVKAGFLGSVKLKVPWSRLGQEPVLVYLDRIFILAEPATQVEGCSEDAVQEAKRSRVREMEIKLLERQQQLKSELSSSWLGSFIGTVIGNIKLSIGNIHIRYEDVESNPGHPFAAGLVLSKLSAVTVDDLGKETFATGGDLDRVKKSVELESLAVYFDSDSSSWIVDKPWEDLLPSEWSQVFEFQEQDGSRSASKKHAYILQPVSGKAKYTKIQLTEAKKTGQALQNTAVDLDDVTLSLSKDGYRDMLKLADNFSTFNQRLRYAHLRPSSPLKSDPRAWWKYAYKVVTQEMKKASGRLSWEQLLRNARLRKTYVSLYASLLKSDMSRLVVDDHEEIKRLDRELDMEVILQWRMLAHKFVEQSVETYQYAQQNKKSWWSFGWTGSSKDEEDSKSFTDEDWERLNRIIGYKETNEYVTDQQDMKLMQFDFEIRMKHNASKLTIDDSECLADLSCQDFCCNLKMYPEAKIFDLKLGSYRLLSPYGLLAESASVIDSFVGLFSYKPFDEQLDWSLTAKASPCYITYLKDSVDQIVGFFKSSPTISQNLALETAAAVQMTLDEVKRTAQQQMTRVLKDQSRFSLNMDIAAPKITVPTKFRPDDVHETKLLLDLGNLVLRTEEIWDAYTSEEQDIYLNFNLVLSDVSAFLVDGDYHWNETSDEKNLLPVIDKCGIALKLQQGVGNREAVWQHRYLRLVGPFLYVFENLMSTTYKQWFSLRGKQVHQILEDTGALILLFDNDEGRKIWQNRLQGAIYRASGSAISSFPGVALPSEAHSFKGNFLDVADTEKLFVAGILDELKICFSCGYEVELSMKGGNLLIGTILGSLEIEDQYYYPGSPVPRFLARSFINSMQTQELPSLSRKNSAGPRNTPLMKNDSEENFFEASDDFDEFETPMHQKRTISDYFSTQKFLPTSVPSLQPPTFKRIPDLIPDTELQTGKFTLEGSGTFNSFVKAQIVIYDQHSPQYNSLDNRVVVTVATLSFFCHRPTVIAIMEFMNAINLANGSDTDKDKSTYPATVEDSAIEESKSDLESEPSIKPLLAKGKSRIVFHLTSSMAEAQILLMNENGDRLATLSQNNLSTDIKVFTSSFSIKAALGNLKISDDSLLSSHPYFWVCDMRNPGGRSFVEIDFSSYNVGDEDYCGYDYSLVGQLSEVRIVYLNRFVQEIISYFMGLVPKSSDAVVKLKDNKTNSEKWVSKTDMEGSPALKLDVSFSRPIIVMPRETNSNDFLELDVLYITVQNEFQWIGGDKNEMSTVHLDILTVTVRDINLVIGMNMVRGETIIQDVEGLSFELRRSLRDLRHQLPVVEAAIKVDVLKATLSNREYEIISECALSNFSETPHPVPTLDDPRYGTSTTPSHVSASSSESIHVLSEGAETWIANKFSVSINLVELSLHSGSTRDSPLASVQASGAWLFYKSNTRGENFMYATLKGFSVFDDREGTKDELRLAIGKSASVRDTSSVDGYDNPNELDSGERRIQKDLGLEPIPSMLILDAIFRKSSSSVSVCVQRPKFLVALDFLLAVIEFFVPSAQSLLSNDEDKDLLHMITPVVLNDQIYFQEHSTFSLSPQKPLIVDNERFDHFVYDGKGGKLYLLDSEGKILSSPCTESFIHVLGCKRLQFRNVTIVNGEYLDSCISLGDDSCYSASRNDHVYLVREDDGSLSTPSKEIRGDSVKNGSADISTEFIMELQAIGPELTFYSTSRNAGENLALSTKVIHAHTDAFCRLQMQHVQGQNQPTRRNTKMMCYQWMALKIRHPTNLLTNLVQVTNESYLLTNLNKSRFHGTVRMALVLSSHVSSPLDAPSPHQPTSAPTPRPVATALAAAAAASPNPGASCSFPSLSPQSASLTAGGVPSSSGGWPQASALLPPLVLPASQPSFRDVVFASLVPTSVERAKMVPRPTHPLVEKPWRSMQNEPPTKGVLALNTNIVRVKRPLSYKLVWQSGSPRTNIFHQKDLEDKISNIDQLCSVWLPVAPAGYVAMGCVASSGTAEPPLSSAFCLTASLVSSCNLRDCIALRDNTNMIFWRVDNAFGSFLPGDPASMSVDGNAYDLRHMLFDSADSSSKTVSRRQDSRNDFSQLERSELTSGRLFDAVASFKLIWSNSGTSSPKKLSIWRPMLSEGMFYFGDIAVNGYEPPNSTVVLRDTGEDTFLRAPEGFDLVGRIKKHRGTEGVSFWFPKAPSGFVALGCVASKSSPTKEDFSLLRCIRNDMVAGGQFSEESLWDSSNARTSEPFSLWTVDNDAGTFLVRSGYRKPPKRLALKLAGPPTSSSSDSIIVDAKIKTFSAVSFDDYGGMMVPLFGVSFDSVGLSYHGGPHHLNATVSLSFVARSYNDKYSSWEPFIEPTDAFLRYQFDMNTPGSPRQLRITSTQDLNLNISVSNTNMLSQAYASWNNISCGDELYKKETFSSTERPVLDVHQRRSYYVVPQNKLGQDIYVRTTENRGSLVTLLPSGDDRSIKVPALRDLSDSHLNGRSVKPYRLMITAILADAEVKDDEGLETGEYMTAVRLFSENHSISVQQQSARTCAAIGEHLSQNTRKVNWNEMFFFKVERVDSYTLELLVLDAGKGQPVGIYSAPLEQVVQKLPPTSNPDSVKFDLALGDLMSTKTVEQETVKPSGKIRFAVLVSGRASVQQGNRASPESKTGYIQISPSKEGPWTSMKLNYAVPAACWRFGNCVIASEATVKEGNRYVSIRSLVSVTNTTNFIVDLRLKGRISQSARADEQGDSFGKEDQILIGTLEPNSTIPVPLSGLSHPLMPYMLQLRPAKHHDHENYSWSDVQERRSQTEFRKEEILDLCISDLYESENLLFCSQVDGTSNSCHGLWFCLSIEGKEIGKDVQMEPIYDWCIIIKSPLCLTYYLPIAAHYTVSSSHLDNEDSSCSLGTLSPGEAVKVHNVDPRNPLYLSLVPHGGWELMHEPVVISHPTQAPSKFINLRSSLSGRVVQILLEQSSDSDYLMARLIRIYVPYWISFSRLPTLTLRLIDISGRKEKRRLLSRSHLERGEKQLYDIKHDELVEGYTIASGLNFKGLGLLSSVGHGGRFGSVKELSPLGDMDGAVDLSAYDDDGKCMHILLCSKPSSYQAVPTKVIHVRPYITFTNRAGQDLYLKLSIEDEPKVLHAYDWRVSFMYSKGTTDKLQVRLVDTEWCQPLEIVKEDTIVIAMRKQGGTQKFVKAEIRGYEEGSRFLIVFRLGPAYGPIRIENRTSHTTISTCQSGLGEESWIQVKPHATRKYSWDDPYGQKVIDVSIDKGDDTCVLCVDLENPIGSSTSFREHGLMFTVDTSDIKILKFADYIRKEEVYGLPGSELTDHQGSSLKENETEPGAGPLELIVELGVVGISLIDHKPRELLYLHLQKVFVSYLTGYDFGTTSRFKLILGELQLDNQLPLSTMPVVLSTESRPDSNRSVFKANVAVSNVTSNGIQVYPHVYIRVTDQTWRLNIHEPIIWALFDFYSNLRFVTTINSTTVTEVDPEIRIELIDISEIRLKISLETAPSQRPRGVLGIWSPILSAVGNALKIQVHLRKVMHRSRFMRKSSIIPAITNRIKRDLIHNPLHLIFSVDFLGVTKSTLSSLSKGFAELSTDGQFLQLRSKQVWSRRITGVGDGLVQGTEAFAQGLAFGVSGVLRKPVESARQYGVIGIAPGIGRAFVGFIVQPLSGALDFFSLTVDGISASFMRCVNILSNKSVPQRIRDPRAIHRDGIVRDYDKFEAAGQMALYLAEASRYFACTDLFREPSKYAWSDYYEDHFILPSQRIALVTNKRVMLLQCLDLDKMDKKPSKILWDVPWEEVLSLELAKAGYQRPSHVIIHLKNFRRSENFVRLIKCNIDNEREPQALSLCCSIRKMWRSHQAAMKVIPLKVPSGQRHVYFVSDDDKKESHSLSRPLLSSGGTSTDVEQQFINNTVHFQKMWSSEPEIQSRCKLVAKQIADDGRVFSIWRPLCPNGYVSIGDIAHVGIHPPHFAAVYKNINGNFALPLGYDLVWRNCAEDYKSPVSIWLPRPPGGYVALGCVAVPSFKEPTLDCAFCVDERLAEDAAYEEQIIWASSDAYPWGCYIYQVQSASMQFMALRVPKEQSELRPKKILESFLQQASETQTSRA

SEQ ID NO: 50028 - protein, 2506 aa, Zea Mays
MAMIILMNLIQSLLSNDEDKDLLHMITPVVLNDQIYFQEHSTFSLSPQKPLIVDNERFDHFVYDGKGGKLYLLDSEGKILSSPCTESFIHVLGCKRLQFRNVTIVNGEYLDSCISLGDDSCYSASRNDHVYLVREDDGSLSTPSKEIRGDSVKNGSADISTEFIMELQAIGPELTFYSTSRNAGENLALSTKVIHAHTDAFCRLIMKGDSMEMNGNILGLKMESNGIRVIEPFDMVVKYSNASGKTNLHLLVSEIYMNFSFSILRLFLAVEEEISAFLRMSSKKISLVCYQFDKVATMQGNANDQVLSFWRPRAPSGYAIFGDYLTPMNEPPTKGVLALNTNIVRVKRPLSYKLVWQSGSPRTNIFHQKDLEDKISNIDQLCSVWLPVAPAGYVAMGCVASSGTAEPPLSSAFCLTASLVSSCNLRDCIALRDNTNMIFWRVDNAFGSFLPGDPASMSVDGNAYDLRHMLFDSADSSSKTVSRRQDSRNDFSQLERSELTSGRLFDAVASFKLIWSNSGTSSPKKLSIWRPMLSEGMFYFGDIAVNGYEPPNSTVVLRDTGEDTFLRAPEGFDLVGRIKKHRGTEGVSFWFPKAPSGFVALGCVASKSSPTKEDFSLLRCIRNDMVAGGQFSEESLWDSSNARTSEPFSLWTVDNDAGTFLVRSGYRKPPKRLALKLAGPPTSSSSDSIIVDAKIKTFSAVSFDDYGGMYSMQMVPLFGVSFDSVGLSYHGGPHHLNATVSLSFVARSYNDKYSSWEPFIEPTDAFLRYQFDMNTPGSPRQLRITSTQDLNLNISVSNTNMLSQAYASWNNISCGDELYKKETFSSTERPVLDVHQRRSYYVVPQNKLGQDIYVRTTENRGSLVTLLPSGDDRSIKVPALRDLSDSHLNGRSVKPYRLMITAILADAELKLLGSLNSLSFWVELASVSTLTWFPSQVKDDEGLETGEYMTAVRLFSENHSISVQQQSARTCAAIGEHLSQNTRKVNWNEMFFFKVERVDSYTLELLVLDAGKGQPVGIYSAPLEQVVQKLPPTSNPDSVKFDLALGDLMSTKTVEQETVKPSGKIRFAVLVSGRASVQQGNRASPESKTGYIQISPSKEGPWTSMKLNYAVPAACWRFGNCVIASEATVKEGNRYVSIRSLVSVTNTTNFIVDLRLKGRISQSARADEQGDSFGKEDQILIGTLEPNSTIPVPLSGLSHPLMPYMLQLRPAKHHDHENYSWSDVQERRSQTEFRKEEILDLCISDLYESENLLFCSQVDGTSNSCHGLWFCLSIEGKEIGKDVQMEPIYDWCIIIKSPLCLTYYLPIAAHYTVSSSHLDNEDSSCSLGTLSPGEAVKVHNVDPRNPLYLSLVPHGGWELMHEPVVISHPTQAPSKFINLRSSLSGRLPTLTLRLIDISGRKEKRRLLSRSHLERGEKQLYDIKHDELVEGYTIASGLNFKGLGLLSSVGHGGRFGSVKELSPLGDMDGAVDLSAYDDDGKCMHILLCSKPSSYQAVPTKVIHVRPYITFTNRAGQDLYLKLSIEDEPKVLHAYDWRVSFMYSKGTTDKLQVRLVDTEWCQPLEIVKEDTIVIAMRKQGGTQKFVKAEIRGYEEGSRFLIVFRLGPAYGPIRIENRTSHTTISTCQSGLGEESWIQVKPHATRKYSWDDPYGQKVIDVSIDKGDDTCVLCVDLENPIGSSTSFREHGLMFTVDTSDIKILKFADYIRKEEVYGLPGSELTDHQGSSLKENETEPGAGPLELIVELGVVGISLIDHKPRELLYLHLQKVFVSYLTGYDFGTTSRFKLILGELQLDNQLPLSTMPVVLSTESRPDSNRSVFKANVAVSNVTSNGIQVYPHVYIRVTDQTWRLNIHEPIIWALFDFYSNLRFVTTINSTTVTEVDPEIRIELIDISEIRLKISLETAPSQRPRGVLGIWSPILSAVGNALKIQVHLRKVMHRSRFMRKSSIIPAITNRIKRDLIHNPLHLIFSVDFLGVTKSTLSSLSKGFAELSTDGQFLQLRSKQVWSRRITGVGDGLVQGTEAFAQGLAFGVSGVLRKPVESARQYGVIGIAPGIGRAFVGFIVQPLSGALDFFSLTVDGISASFMRCVNILSNKSVPQRIRDPRAIHRDGIVRDYDKFEAAGQMALYLAEASRYFACTDLFREPSKYAWSDYYEDHFILPSQRIALVTNKRVMLLQCLDLDKMDKKPSKILWDVPWEEVLSLELAKAGYQRPSHVIIHLKNFRRSENFVRLIKCNIDNEREPQALSLCCSIRKMWRSHQAAMKVIPLKVPSGQRHVYFVSDDDKKESHSLSRPLLSSGGTSTDVEQQFINNTVHFQKMWSSEPEIQSRCKLVAKQIADDGRVFSIWRPLCPNGYVSIGDIAHVGIHPPHFAAVYKNINGNFALPLGYDLVWRNCAEDYKSPVSIWLPRPPGGYVALGCVAVPSFKEPTLDCAFCVDERLAEDAAYEEQIIWASSDAYPWGCYIYQVQSASMQFMALRVPKEQSELRPKKILESFLQQASETQTSRA

SEQ ID NO: 50029 - protein, 479 aa, Zea Mays
MALPKHSQGAGAEVAADGSTSTSTSPVEDDGGTLDDLGQGQRQGHHEEDNDDDHHFSSSSSTGNKHKQTSCLLPARSLRSTDEASHSQQADCGVRSLSFSKILSFRMWAPGGSSSPTCLEDYIAGQHQLEHDDDEADKLMKQVCRSQSVPATSVARRRSSGTTAKGKGSRRVADSSSLRRLRVVPLRVPLPPPPPLQDEAARGTADAIATTVTTGEEEEDQDIAAEEAVCRICMVALSEEAVFKLECCCKGELALAHRACAIKWFSIKGNGSCDVCSQEVLNLPVTLRRLPDHPSVIQAAAALAQAQAQAQAQGTQADGGGGDPTATTNTTRYRVWHGTPILIIVSMLAYFCFLEQLLVGDHGTAALAISLPFACVLGLFSSLSTTKMVSRRYVWIYSAAQFLFIVLFTHIFYRYILRWRRARHAVASPTSTARAADDGGLHGSSPRDPPSAPVAVAVTVAEVDLEMALPPTYAPPAHA

SEQ ID NO: 50030 - protein, 1174 aa, Zea Mays
MCPQSTENLVEMAFSDRNHESSSSRLDAIFRSLRSGRNGHRFNMWLDDGPQRNGSAAPAVPEGIEELLISHLRRPTPQPDGQRTPVGGAQENDQPNHGSDAEAREVAPAQQNENSESTLNPLDLSECAGPAPPDSDALQRDVSNASELATEMQYERSDAITRDVEAVSQASSGSGATLGESLRSLEVEIGSVEGHDDGDRHGTSGTSERLPLGDIQAAARSRRPSGNAVPVSSRDMSLESVSEVPQNPDQEPDQNASEGNQEPTRAAGADSIDPTFLEALPEDLRAEVLSSRQNQVTQTSNDQPQDDGDIDPEFLAALPPDIREEVLAQQRTQRMQQQSQELEGQPVEMDAVSIIATFPSEIREEVLLTSPDTLLATLTPALVAEANMLRERFAHRYHSSSLFGMNSRNRRGESSRRDIMAAGLDRNTGDPSRSTSKPIETEGAPLVDEDGLKALIRLLRVVQPLYKGQLQKLLVNLCTHRGSRQALVQILVDMLMLDLQGFSKKSIDAPEPPFRLYGCHANIAYSRPQSSDGLPPLVSRRVLETLTNLARSHPNVAKLLLFLEFPCPSRCFPEAHDHRHGKAVLLDDGEEQKTFALVLLLNLLDQPLYMRSVAHLEQLLNLLDVVMHNAENEIKQAKLEASSEKPSAPDNAVQDGKNNSDISVSYGSELNPEDGSKAPAVDNRSNLQAVLRSLPQPELRLLCSLLAHDGLSDSAYLLVGEVLKKIVALAPFFCCHFINELARSMQNLTLRAMKELHLYENSEKALLSSSSANGTAVLRVVQALSSLVNTLQERKDPEQPAEKDHSDAVSQISEINTALDSLWLELSNCISKIESSSEYASNLSPASASAAMLTTGVAPPLPAGTQNLLPYIESFFVTCEKLRPGQPDAVQDASTSDMEDASTSSGGQRSSACQASLDEKQNAFVKFSEKHRRLLNAFIRQNSGLLEKSFSLMLKIPRLIDFDNKRAYFRSKIKHQYDHHHHSPVRISVRRPYILEDSYNQLRMRSPQDLKGRLTVQFQGEEGIDAGGLTREWYQSISRVIVDKSALLFTTVGNDLTFQPNPNSVYQTEHLSYFKFVGRVVGKALFDGQLLDAHFTRSFYKHILGVKVTYHDIEAIDPSYYKNLKWMLENDISDVLDLTFSMDADEEKLILYEKAEVFAVLVSQEFVVLIFSML

SEQ ID NO: 50031 - protein, 1943 aa, Zea Mays
MKVPFAFPFPFSRKATFHFSLLRLSWVPPCPPFQLGFITGRARHCIEFHKLRGAMVSPPAFAAAVAVVAVLLCASAAANPAGGPHMADLSVLLPPRMTKPVEYRLIGGDGCFSWSWDHHDLISVKPEYNDSSRCSTSARLASIAPYSGRRETSVYATDIISGITIHCKVFVDKISRISIFHHAVKIDLDEIATLRIHAFDDEENVFSTLVGLQFLWHLTPRLVDNSSHHLIRIPLKETHLSDCGGFCGDMNIRFELEDKNLGSDFSVVKGIEIGQEVVKAQLFEPQFEHVIDTITLTVAESMSLEPSSPVLVTVGVLVKFKLKVFRQKVAQVVKLPSQYHRWYATNSSVAQVDSLGILHALSLGFTKVVVEDTRVSGHEQVSSLHVVIPRTLFLYLVPIMDDSAHLHGITNIPSSKVWYVYPGRKYMVLAKAFAEGFDAREIYITEENELKLESSTMEFWNLSQVPDSSTSSYEVQTSRLLSPIFQGQGHLDASLTYLTGASGPTKVLKLVQEVNVCSKVKAFWDEGLENSNVIYLPWVPGVHQEVEMMAIGGCGKTLDDYKLFSSDEDVASVSDSRIVRAKKPGQAVIRVVSAFDFLNFDEVIVEVSIPSVLSILPIFPVEVPVGTRLHSAAVLKTSAGHPFSQCTHFNAFIRWSLLSEDEAFHILNTAEASSIDDIKHNSGYWGQNGNPCAWVSLSAFAAGRSTIVATFAVDSDSDIETFGGPISLEATSKISAYYPLVVLQGGNGNHFGGYWFDLSGIHSRIKNMDNNSPKELYLVPGSTMDVLIFGGPERWDQVIDFVETVDVIDPSKNHIISSTAVKKLSSGLYRVSCLSKVSYKLLFSRGNMVGKDHPVPAISKSEFTVICDFPSEITLIANENENRLDILEAARKADRGPDRLQASPIVISNGRNIRLAAASIHVNGRFFANSSSLRLKWEATGCEGLAYFEETKSVEMLDESAWERSLVLQNSTGVCTVRATVDDFSTKYAGQTHEEEYTFHSLTDAIQLQIVSSLRVTPEYVLLVFHPEAQVRVANVDWIKITAEEQISLMEGSTKDFQILAGTQDGQIFGDSQFKYMDIELHLDDEILELIGPSESMDGPEFSIKAAKIGITSLYVSTKQSSGHRVLSQVVKVEVYGPLQIHPEYIYLTPGASFVLSVKGGPKTGVSIEYSSLNMGIVEVQNTTGKLSAKSVGNSTVRAAVLANGGILVCEAFGRVEVDIPVAMTLNTQSERLCIGCSMPVYPSLPKGDLFSFYETCQSYSWMIADEKVVTFQSAKSWRYRLDQGLYSDGKKSPWFSNGSSKFFISHMLGRSAGKTKISISVVCDFLLPGTSGSVVSYNASKIILVVPDPPLALALPMTWLFPPFYTTMSLLPRSANSLGEPNSLDLESSVGYSLLRGNGRIIDGSKIQTGESNTVDCIQAKDHSAGRTEIAACLRVAQVAQVRVAAAESSIQIVYLSVNDKVELDIKYADELGYIFNEAHGVVPVKIETNYPDVVSVLMPRDFNGTYDTRERFVLQARSHGTALVRLHTNNVPNKVDFIMVSVGAQIYPRDVILHSGQHLNFTVIGDSMDMCGHGHWLSSNGKIVHINRVTGEAQARSEGVAEVIFKGSNFKLQTTITVLKVNQIVVDAPAETLTNAAGLPDGYMFSVRFSDSIEHSIGSSASPINVPFECKVDPSFVGFVEPWTEHATKKSYCLFHPYSPAQLLPVKLDPNEGTLHILVRANLKEDPKVTGSAHALFVKGFYIKEPGKLNLTPSCNHSVITIDGNTDIELFWNAKDLLRVSRVDTNENNGVLSRVVYRVEALKRLSFSDKVTIVLPATGQTEEVEVSYDTGEEAESPSSWGLTTTAVMLTCIIVTIVTVALFIKLLQRPIRQAPSGSMTASTPARAPAADPAAMADPASPANGQFSPRTPQPFMEYVRRTIDDTPYYKRDARRRFNPQNTY

SEQ ID NO: 50032 - protein, 251 aa, Zea Mays
MSRRNSRTIYVGNLPGDIREREVEDLFYKYGRILDIDLKIPPRPPGYAFVEFEDPRDADDAIYGRDGYNFDGYRLRVELAHGGRGQSYSYDRSSSYSSACRGGVSRRSDFRVMVTGLPSSASWQDLKDHMRRAGDVCFSDVYREAGETIGIVDYTNYDDMKYAIRKLDDSQFRNAFSRAYIRVREYDARSRSRSRSHSYSRSPSYSRSRSPKSVSQSPSSVDERYVNLCHLEMYICETESANIVRRNPIVK

SEQ ID NO: 50033 - protein, 172 aa, Zea Mays
MFLKHSVEQLKCILQPPILPKRINHLIVALGPKPHRRFNTQHLFVTLHNLFPRSHKEVRLHESPVHNAIQNWFAPNLVLEFLVQLQGFGSIPSTHEPSHEKAVDLGIRPDESRGEHLILELDGIREPAVVCNEALDDDAVGRRGGRHGGAGAGDDAEVVERVVGEAARGERG

SEQ ID NO: 50034 - protein, 486 aa, Zea Mays
MFSAARRLLTSRARSRALAAATPYPHSAVASPSCPRFPTPKEIRRGLDEFVVGQDKAKKVLSVAVHNHYKRIYNESSNKCSVKSWVRGGVATNSDDVIELEKSNILLIGPTGSGKTLLAKTLARYVNVPFVIADATAITQAGYSGEDVESVIYKLLVAADFNIEAAEHGIVYIDEVDKLTKKADCRKDRRDVSGEGVQQALLKIFEGTIISVPGKRSRENIPQGYVEVDTRNILFICGGAFFGLEKIVSERHQFYPVGFGIPICHELRNCSWRTVQESSSIDTVENDDLIAYGLIPEFIGRLPITVGLTNLSEEQLVQVLMEPKNAIGKQYKKLFKMNDVKLHFTDNALRMIAKKALAKETGARGLRSIMEDILTEAMFEIPDGRHGKEKVIAVLVDEESVGPLHSRGCRAKIFRDDGALELYVYQNNIKLPGLIQSNPRRRRIFRLCLLVALSATKLWIYQTIPCFSSIYEWIAWILCKVYNFTQ

SEQ ID NO: 50035 - protein, 163 aa, Zea Mays
MFAFRTLLRGESDMPQAACCWSFYVSPYQICFSLIRELNCCTAHLFREDHTVAFLMFGSFCIVRVIAGALPKGLHMLILSKNNISIIERLRELTRLRLLDINYNRISRIGHDHLLGLASCSSLKELYLVGNKISEVDGLHRLLKLKVQRMLGKYSIIMVHVQF

SEQ ID NO: 50036 - protein, 180 aa, Zea Mays
MFAFRTLLRGESDMPQAACCWSFYVSPYQICFSLIRELNCCTAHLFREDHTVAFLMFGSFCIVRVIAGALPKGLHMLILSKNNISIIERLRELTRLRLLDINYNRISRIGHDHLLGLASCSSLKELYLVGNKISEVDGLHRLLKLKVLDLCHIQSSVATILGVGAEDARKILNNYVRVLI

SEQ ID NO: 50037 - protein, 628 aa, Zea Mays
MSVSHAQDIEISLCDGNSEDERRRRKIGSLRRKAIHALKKRGRRRVDSRFPPPAISIEDVRDAEEERAVASFRERLAAHGLLPEKHDDYHMMLRFLKARKFEAEKAMQMWSEMLKWRKEFGTDTILEDFDFEELDDVLRYYPQGYHGVDRQGRPVYIERLGKVDPNNLMQITSVDRYIKYHVQEFERAFRERFPACTLAAKRHIDSTTTILDVQGVGFKNFSRTARELVNRMQKIDSDYYPETLHQMFVVNAGSGFKWIWNSVKGFLDPKTSSKIHVLGSNYQSRLLEVIDSSELPEFLGGSCTCSDKGGCLGSNKGPWNDPYILKLIHNLEAGCMRETTKPVSEGGERSSSSFRLEQMKWQGMLSDTSNAESGSDVDDFGPSFVHKVSGYGCLTPVREEVKGTDCATYLSCDDQSHPDMVPEFYHGVQRTTEMVQKQMADFRQYSTNRRPRELGNGSLNANGTAAAQRGWEDVAKLVVTALIKLFSFIRLFLSRAAESRLEKVRRTAPPPAAEKPKPPRAVSEEEVRACLQRLDSLESLCGHLATRPAQIPEDKERVLLSSFERIRSVEADLERTKRVLNATVAKQKALVEEVALESVQELPRAKRGCSVDRTWRSTARDPEPCRRH

SEQ ID NO: 50038 - protein, 793 aa, Zea Mays
MMARALVEVEHCRFIDMAESLCQKRALEAFRLDPTKWGGFQVCHSLGGGTGSGMGMLLISKIGEEYPDRMMLTFSVFPSPKVSDTVVEPYNATMSVHRLVENADECMVLDNEALYDICFRTLKLTTPSFCFWTVGDLNHLISATMSGVTCCLCFLGQLNSDLHKLVVNLISFPRLYFFMIGFAPLTLRGSQQYRALTVSELTQQMWDAKNMMCVADPRHGRCLTASAMFRGKMSTKEVDEQMINVQNKNSSYFVEWIPNNVKFHPFVPIIRDSSFDPSPPRSLPLPTPTRTRTGSRSGNHKTSVKAPEPPRAPPTTPRNPNAPPQRGISPITPYQFQFSKGRGGAAPPPPPPLTREETPPPRASPMLSDQELAQYVESLVQHTAAQGGTGISADAVVRQLGAQLGVDLSPKAQLIRSVLVALLGPAAAPAPDPTGSRKDPFDPATAAAAGGPRAETPPQQMHFSTAAASSAPAPSPAVPHFFPQQHQHQMQYFLSAPQQYQHQQQQQRAGASPSPFDIPASYRYGHQPLPQADQAQLQRLVQLQHQQQQLAAAARVAAAAAPTPGESPRAPEPPPAPAPAASKKNSSASVGAKRKGGPGGLNKVCGVSPELQAIVGEPAMARTEIVKQLWAYIRRNNLQDPNNKRKIICNDELRLVFETDSTDMFQMNKLLSKHIRPLESKNDSKPEAKKLKPQGDEPISSVETDVNQLPLMVSDALATFFGTGEREMVHSEAVKRVWDHIKSNDLEDPENPTVILCDSKLKQLFGRESLTAHGVSEVAFRPPLHAIYQYLTG

SEQ ID NO: 50039 - protein, 531 aa, Zea Mays
MAKVKQKVATEDILEGDDERTSSENNSVPPVILDLNEGFGEGNEAGEASDDGDDNQEEDGDDGGSTSEVAGGRNSSNNSSTNHTSMSNKDYDMNSSSNGEGREERELAVRQYNRSKLPRLRWTPDLHMAFVHAVERLGGQERATPKLVLQTMNVRGITIAHVKSHLQMYRSKKLDQESAGHERAATSSVFSPMDFHMMRTGDHHRYHDMFLHRPAAGSAISSRLLHGGEFFGSRNAAVSPEARRLYELLQRRQPTMQTFDFKGYSSGSGLRDQEWSFSQHAAAAAARAGAINGHGPTKGLIHDMGLRKNSRPMSHLFDVRDRDAIASNRTSSDATGAASHGVTITRSADRNGTSSSWPQPRTMSAAASTAPALGSHHLLSMGRGSANLTSSSDHPVVTNEALGSRLQLQTFQELNKVTGDMCAGTRKTKRMKTPMEGNSGTPDLHLSLSPNDDDMGGAADKQIKKMKIQGIGLSEQQEVDGDKMLPLSLSLSLRGGEDARRLEAATGGSSGNKAALGRCTLDLTMSIKATE

SEQ ID NO: 50040 - protein, 112 aa, Zea Mays
MEKGKKSGSGRGYISWNDDMDKALLDTFVEYYNRVTDAKMGGSLMSTRLLSRMSEKSAMWKSQKTTSCQGTRHLTSTTLSSMVCYKQVALVGIGTRTRYPSIVILYGRLMWR

SEQ ID NO: 50041 - protein, 495 aa, Zea Mays
MQLQTVWAKLRRNEVNKDDFLRVIRNIVGDQMLKQAAHKVFVQMQAQAQRNSQANSSQQSLFSQLSAQQMASSGSAQLHDQKIRPPGPPNQGQKNQVSSSPQAFAPPSGTQPQNSVHYLAHDNPNQNPDAKGTNVVPNQPSRMNTSVPLQTKNKQHQPTQLQQASQQIYGASNPGAQAYPRSITGSLRSPSLVPETQPSMHAPGMAPAKMVPPPTHPMMQHNATAWQMHQNRELKTNAPPPNANMKQNSESVGKVRMAGTGNSSAKGKQGTPNSTPNASGGTKSSKKSGGQKKSLEAAGSMQPSSKKQKTSGGSQEQSIDELNDVTAASGVNIRADGSGATELEKEKEESRPKNVKPNKEEDDKMRANAANVAARQAVGGSDMLSKWQLMAEQARQKREGIDVSAASQPGRGPGSRQLSKFGKGPGEHPEGSKRSHSMAFGTGGMKRPGRTAFAGPQRLISVKDVICALEREPQMTKSRLIYRLHERLPVDSTVD

SEQ ID NO: 50042 - protein, 551 aa, Zea Mays
MIYGRVGVIALDNARQSAKIIDQSLTPGKIYDGDGFNYIKESFENGTLHLIGLLSDGGVQLSYKRTTRFTFICSIQLLLKGVSERGAKKIRVHNLTDGRDVLDGSRVGFVETLENDLLELRGKGIDAQIASGGGRMYVTMDRYENDWDVVKRDWDAQVLEEAPYKFKSALEAVKTLRAQPKANDQYLPPFVIVDDSGKAVGPVLDGDAVVTINFRADRMVMLAKALEYADFNNFDRVPVPEIRYAGMLQYDGELKLPNRYLVSTPEINRTSGEYLVKNGIRTFACRQPGKTTRSSSHALPPPYFSLLDTPPATDIPYRQVPFPRLALVACFRPAHLPPVLAMGAGANNHEESSPLIPAAVAAPAYEKPVSAHAFGGVPRESWNSGILSCLGRNDEFCSSDVEVCLLGTVAPCVLYGSNVERLAAGQGTFANSCLPYTGLYLLGNSLFGWNCLAPWFSHPTRTAIRQRYNLEGSFEAFTRQCGCCGDLVEDEERREHLEAACDLATHYLCHPCALCQEGRELRRRVPHPGFNNGHSVFVMMPPMEQTMGRGM

SEQ ID NO: 50043 - protein, 1427 aa, Zea Mays
MKKRNETNEAQIIGFSKRKKISRRTGGAPPHGHGPAARHEAENLKTSRANCRLNSKSRQLSPPYPSPSSFPPFLPQTSASRISNPNLIGDEGSPASASCFSVMNNFHVYEAIGRGKHSTVYKGRKKKTIEYFAVKSVDKSQRSKVLNEVRMLHSLDHANVLKFYSWYETSAHFWLVLEYCVGGDLKGLLEQDKKLPENSIHDLAYNLVKALQFLHSQGIIYCDLKPSNILLDEFGCMKVPQPMRGTPCYMAPELFREAGVHSYASDFWALGCVLYECYTGRPPFVGREFTQLVKSIILDPTPPLSDNSSRSFQNLIDCLLMKDPAERLQWSELCDHNFWKTSIPMISLPPQPAFDNMIELSATPYLAERNGDKPSRQLTPPKHREYSGLRRKDENSTKPSMTPVKNVQSVKKNCGKPKAEGFKGVNILRMSRIAKLNLQRERDKENYRRPPTETTENETEVNIDNNDMELDFGENPEADAPDDTYGSDNPGSAGNEKPQSTDANEENCMANQVDMLTDEGSVKPDIMVKTEQNSCSDNLDVEATPPSSTRKAQRAKVTPCPGTGSEPSNIFEAFWHPTDLAVKPVMPSRKADKAVDMVPTLPFEALTASDYIKLPLEQMNAFNSQILQSLSGTYQVSEKQNTIRYLEMLSMNSDAANKITNGPIMLLLIKMLRLSKTSVLRVQIASLMGLLIRYSTALDVELASSGIFNALSDGLRDKHDKLRRFCMATLGELLFYISTQSDQDTKEINTQEYPLKDNRSATSWQVPSAVIALVSSILRKGEDDLAQLYALRTVDNICSQGTEWTSRFASQDAIGHLCYIYKATGKQESTRLIAGSCLARLSRFSPSCIHLILEKISFKDIACTLIKGNTREQQISLNILNSALVNSHTVTSMNRYILSLSDDKQLVPGLISLIEQGTDVLRGKTLLFVALLCKNSRRWLPHFFCNAKLISAVDRLGKEKEGFIHQCTEAFVQLVASLVPGILDTVSSDIQQVMVGKRHGPVTALAGRAHPKSTIHLFPVILHLLGSASFKHRVVTGHVLLQLANLIKILEAPFQARDDFQMTLLRVLEAATEEPSVILNEHTVFMSRIIPSLSVLYKGNKDGDARFLCLKILADVMIVIFSDSSLTSDEQTITDLKSISQRHFLPLYPSFAEDEDPIPIYAQKLLVMLMEHGCVKVSDILHKATVSQCFEFLLGDLSNANVSNVKLCFALVSAPEMDTYILSQLQVVRRIGNLLEFVAAKDMDDFLEPTLELCRAFIIRGTGSNRSVALSKNPALLLDSAFSMSIAVDQQTCVMDICDFGGNMGIFLELVGNSDPQISDLASDCVVLLLKAAPREATVGLLTSLPKLSTVMDLLKHDSHRCLIRLLYGLAFSCRQYLAQGMILSISVPALMRVEALVSVFKGSNDSLLADAASYLSAELQRLPRCG

SEQ ID NO: 50044 - protein, 315 aa, Zea Mays
MSTGEGHAPVNASVIIGCGRKQSGDYLDGIAPDGLLGLGMADISVPSFLARAGLVRNSFSMCFKEDSSGRIFFGDQGVSSQQSTPFVPLYGKLQTYAVNVDKSCIGHKCLEGSSFQALVDSGTSFTSLPPDVYKAFTTEFDKQINASRVPYEDSTWKYCYSASPLEMPDVPTIILAFAANKSFQAVNPILPFNDEQGALARFCLAVLPSTEPIGIIGQNFLVGYHVVFDRESMKLGWYRSECRDVDNSTTVPLGPSQHGSSEDPLPSNEQQTSPPVTPATTGTAPPSSATTNRQMLFASSYPLLFLTMSTVFFIS

SEQ ID NO: 50045 - protein, 477 aa, Zea Mays
MDRFVEIDCFQRMAHLISILAFVSVGNRSFMILECLTCLRRTEHGRYYTFYLLDGIHAMGEGITEIMSLDSGLIEDTHPMGGSSHSRSPIRKSLWLACEIAYLYVYVLWLLSERKHSKSPDGGETDSSVSVRSPDNEDRGKDERYLSSDEKNGHEDQLKQMHLDMEALREDKSKLEMILEKKTDEEHKLCSRVEDLELQLNKEKEDCQRSQARFERLADLLASDILKPCTKEQGSIGITANEDPYNANEMSPSDQRQNHVSASRKRLISLPTSEEAKTGKRQRENGDDMIPTSENYRPEDALEHLQDSKGTDLPESFTVKKLREGDNDDVGNIVSSSNIFADRGLDVGVDEDVAVVNSFISSRMIDKRPIPSSNSLKELSNSLKELPPAGHATPKQQLASLGGASGRVIFNRGPTVAQFRSTLRGAVLRRVRCKGGTDGGGRTSRNGSTRDETNRRATHLCVGPLTLERCLVAWASL

SEQ ID NO: 50046 - protein, 148 aa, Zea Mays
MHLDMEALREDKSKLEMILEKKTDEEHKLCSRVEDLELQLNKEKEDCQRMSSKTKKLIKAHGRYIKAQEDLKRSQARFERLADLLASDILKPCTKEQGSIGITANEDPYNANEMSPSDQRQNHVSASRKRLISLPTSEEAKTETEREW

SEQ ID NO: 50047 - protein, 1082 aa, Zea Mays
MFVSDGGLAMDAGGRAGVSGPAAANGSFGLVRTVVGYSTSPLFFWLLTVALVAAIHIVSGSSSKPARNNETEERKKARRDRFLPAAEEREASGRGDDRVLEMMRSFSFMQATEEDFMEGMTAYEHNGVGDGTAHGPVAPEPPALTATSLSFRFQHQMPEVPTETALVSREFTAARQETAVVSRELTAARDDDGRQREEEKEPHFPLEPFAPLQTAADMQEHRHDEAEETEFLAEEPAEERSGEVAQEEAAPPKTVAATHNYQFLTERDFRGFVREPEAVTVRVQESFVPSPPPAHQPEERRVVDVSSRSGRFLTARDFRPANEPDVCESVASSGKWTPPPPRPRPKPKPKPASSPSAASMGGGGGFTSEFSGFGDSDSESSASDGYSVKDLVVDSDSDWFLSEKEFPASALGSGNLKTYKAKVLRAIEAMEAASNLEPSYQEDSATTVSPSSVRQRSPDTVPDGSPKFPEDVWSRSPSPDVEYKEDEEEVTREAEAQYDEDIEQRSTGEEEEGKGIDMSDDEHSSGGKEVESAPIYDLAPVADDCMDHSEKGIITLNDHSGGQAASDAQRSPEAVSARQLAAVPSDQVAGPVKRSPEPPEQEFVGMVDHSLEHSSYDRKQTASESDQSYEIVFDDKRRPQRAETGFLVWEEIVTRNDQPPLGPHADEQGLDTAEEEYVGTGDQPHGAVSDEKSGAETPEQEFSLTDHRNVAVPDARNISETREDEEQASADDHSDNAVTGKAKVYDEDGEDREARWKDLTDEEEDELESLWEHQDLVEQLKLELKKVRSSVGLPTILEESDTPKAPVEDLKPWSMDAKFLREDPMDELNKFYKSYRERMRKLDILCYQKMYAIDFLQLRGSQQSNNNNNNSVKSLSPTVASILSHNFRSSRRRSPEDPSERFLRELRYDLETVYVGQMCLSWEFLRWQYEQARDLPESDSYHSHQYNQVAGEFQQFQVVVQRFVEDESFKGPRLSNYINNRGQPEGQDGGPAQGELRDNQRGAGGRHGRGDARPVGVHQGRQGRDDDDGGGGIGAQGPVEQQRRAPGPSGSWPHGAHPFRVTEEREEAQGPAQDGQLHREEV

SEQ ID NO: 50048 - protein, 906 aa, Zea Mays
MFVSDGGLAMDAGGRAGVSGPAAANGSFGLVRTVVGYSTSPLFFWLLTVALVAAIHIVSGSSSKPARNNETEERKKARRDRFLPAAEEREASGRGDDRVLEMMRSFSFMQATEEDFMEGMTAYEHNGVGDGTAHGPVAPEPPALTATSLSFRFQHQMPEVPTETALVSREFTAARQETAVVSRELTAARDDDGRQREEEKEPHFPLEPFAPLQTAADMQEHRHDEAEETEFLAEEPAEERSGEVAQEEAAPPKTVAATHNYQFLTERDFRGFVREPEAVTVRVQESFVPSPPPAHQPEERRVVDVSSRSGRFLTARDFRPANEPDVCESVASSGKWTPPPPRPRPKPKPKPASSPSAASMGGGGGFTSEFSGFGDSDSESSASDGYSVKDLVVDSDSDWFLSEKEFPASALGSGNLKTYKAKVLRAIEAMEAASNLEPSYQEDSATTVSPSSVRQRSPDTVPDGSPKFPEDVWSRSPSPDVEYKEDEEEVTREAEAQYDEDIEQRSTGEEEEGKGIDMSDDEHSSGGKEVESAPIYDLAPVADDCMDHSEKGIITLNDHSGGQAASDAQRSPEAVSARQLAAVPSDQVAGPVKRSPEPPEQEFVGMVDHSLEHSSYDRKQTASESDQSYEIVFDDKRRPQRAETGFLGTSSPSHELVSEVWEEIVTRNDQPPLGPHADEQGLDTAEEEYVGTGDQPHGAVSDEKSGAETPEQEFSLTDHRNVAVPDARNISETREDEEQASADDHSDNAVTGKAKVYDEDGEDREARWKDLTDEEEDELESLWEHQDLVEQLKLELKKVRSSVGLPTILEESDTPKAPVEDLKPWSMDAKFLREDPMDELNKFYKSYRERMRKLDILCYQKMYAIDTNCFNFDCRFPTAQRVPAVQQQQQQLCKVLVAYGGVHPVA

SEQ ID NO: 50049 - protein, 84 aa, Zea Mays
MAAQEQEQEQEKQQAKTSTTSSLPSSSERSSSSARNNLTEGGAESDEEIRRVPEMGGASASASSGAGADERGQAALHGPQPRGS

SEQ ID NO: 50050 - protein, 262 aa, Zea Mays
MDPKVGVALTLSLVGGLSTSLGALLAILNHAPNNRTLGILQGFATGLMLSMSFFDLAYDAVNAIGFLRGNLWFFAGALLFSTIADVFPEPDCSAADENGKQQGGKELMMRHRRRVIFSVIVTAIVAGVSLQNFPVGTAAFLGTTKGFRVGLNLALAIALHYIPEVIYSALAFVKGISVALPAYFATSSKWQAFKLATLSGFAEPLGVIIVAYLFPSNLNPEILEGLLGLGRKDAVKAVFVGMAFMSMSLYFLDASLPKEMSA

SEQ ID NO: 50051 - protein, 608 aa, Zea Mays
MSSRAARPWRASATRERGGRRKHRMDCAPFAAICERRRKIRVWRREERRGGARDPGSRAQGRDVMAAPPIRCGLATPTSMTISRAGAEVPEDKRRREEQRIDYQDRATRKANKGLEVIWRGSRPVGSSSQIFTNVFPVHYSAPVGFSFEVLAENVIPVQDDMSLFDYNVQERVDDFVAAAIAQANVTRTNHIMWTMGDDFNYQYAESWFRNMDKLIQYVNKDGRVHALYSTPSIYTDAKHASNESWPVKYDDYFPYADSTNAYWTGYFTSRPTFKRYIRVYSGYYLAARQIEFLMGRSSLGLFTSSLEDAMGIAQHHDAISGTAKQHTTDDYSKRIAIGASKVEKGVNAALTCLTNSNKTCVSSVPKFSQCPLLNISYCPSTEEAISATKHLVVVVYNPLGWKRSDFIRVPVNDEDLVVKSSDGNTVVSQIVVVDNVTNNLRKLYVKAYLGVTANKAPKYWLTFQASVPPMGWNSYFILKSTGSGYNNTEHVPVVVPPSNNTIEAGQGHLKMSFSSASGQLERIFNSASGGDLPIQQSFLWYRSSKGDALDPQASGAYIFRPDGNTPTIASSSVTLKVIRGPLFDEVHQQFSSWIYQFWSLGPSFFLI

SEQ ID NO: 50052 - protein, 750 aa, Zea Mays
MSLFDYNVQERVDDFVAAAIAQANVTRTNHIMWTMGDDFNYQYAESWFRNMDKLIQYVNKDGRVHALYSTPSIYTDAKHASNESWPVKYDDYFPYADSTNAYWTGYFTSRPTFKRYIRVYSGYYLAARQIEFLMGRSSLGLFTSSLEDAMGIAQHHDAISGTAKQHTTDDYSKRIAIGASKVEKGVNAALTCLTNSNKTCVSSVPKFSQCPLLNISYCPSTEEAISATKHLVVVVYNPLGWKRSDFIRVPVNDEDLVVKSSDGNTVVSQIVVVDNVTNNLRKLYVKAYLGVTANKAPKYWLTFQASVPPMGWNSYFILKSTGSGYNNTEHVPVVVPPSNNTIEAGQGHLKMSFSSASGQLERIFNSASGGDLPIQQSFLWYRSSKGDALDPQASGAYIFRPDGNTPTIASSSVTLKVIRGPLFDEVHQQFSSWIYQITRLYKNKEHAEVEYTIGPIPVDDDVGKEVITQLTANMSTNSTFYTDSNGRDFLKRVRNYREDWNLQVTQPVAGNYYPVNLGVYIVDEKYELSVLVDRAAGASSIQDGQLEIMLHRRLLKDDGRGVAEPLDEVVCVDQDCQGLTARGTYYINVEKLGHGAHWRRTYGQQVYSPFLLAFTHEDATSSKPYSVAKDSMMDGNYSLPDNVAIVTLQNLDDGTTLLRLAHLFQAGEDPRYSEVAEVDLKKVFGKRTIKELTETNLSANQKKSEMKQLNWRVIEDAESGPAPVKGGPVDCRALVVALGPMEIRTFLLKF

SEQ ID NO: 50053 - protein, 1017 aa, Zea Mays
MAPTLLLVALVALAVAAATPMVMEASAFTEGCNNRSTPGGGGGTAVGNKLNVHLVPHSHDDVGWLMTIDQYYVGSNNSIQGACVMNTLDSVVDALAKDPARKFIVVEQAFFQRWWAQKSLTVQATVHKLVDSGQLEFINGGWCMHDEAVVHYIDMIDQTTLGHRVIKKQFKKIPRAGWQIDPFGHSAVQAYLLGAELGFDSVHFARIDYQDRATRKANKGLEVIWRGSRPVGSSSQIFTNVFPVHYSAPVGFSFEVLAENVIPVQDDMSLFDYNVQERVDDFVAAAIAQANVTRTNHIMWTMGDDFNYQYAESWFRNMDKLIQYVNKDGRVHALYSTPSIYTDAKHASNESWPVKYDDYFPYADSTNAYWTGYFTSRPTFKRYIRVYSGYYLAARQIEFLMGRSSLGLFTSSLEDAMGIAQHHDAISGTAKQHTTDDYSKRIAIGASKVEKGVNAALTCLTNSNKTCVSSVPKFSQCPLLNISYCPSTEEAISATKHLVVVVYNPLGWKRSDFIRVPVNDEDLVVKSSDGNTVVSQIVVVDNVTNNLRKLYVKAYLGVTANKAPKYWLTFQASVPPMGWNSYFILKSTGSGYNNTEHVPVVVPPSNNTIEAGQGHLKMSFSSASGQLERIFNSASGGDLPIQQSFLWYRSSKGDALDPQASGAYIFRPDGNTPTIASSSVTLKVIRGPLFDEVHQQFSSWIYQITRLYKNKEHAEVEYTIGPIPVDDDVGKEVITQLTANMSTNSTFYTDSNGRDFLKRVRNYREDWNLQVTQPVAGNYYPVNLGVYIVDEKYELSVLVDRAAGASSIQDGQLEIMLHRRLLKDDGRGVAEPLDEVVCVDQDCQGLTARGTYYINVEKLGHGAHWRRTYGQQVYSPFLLAFTHEDATSSKPYSVAKDSMMDGNYSLPDNVAIVTLQNLDDGTTLLRLAHLFQAGEDPRYSEVAEVDLKKVFGKRTIKELTETNLSANQKKSEMKQLNWRVIEDAESGPAPVKGGPVDCRALVVALGPMEIRTFLLKF

SEQ ID NO: 50054 - protein, 253 aa, Zea Mays
MVWDFCSSFGRVLNLSPFPLTDLENTICHKESNVLLVEIHAAMKDEGDYFTVLQNKKRKLKVSSVTWAEYLCDFLEMTKNEERSTNIATVIRGYYGLIDTDIKLKILRELVEEAIQTSAIKEILSDRVDQKQVLNATKRENTRKDKQEKNLNTEIAMKSQENQTDDVQVGHGGVDELVRRKEENDKSNISRSRTEGKRHLHLETEIEKLSIRSSPLGKDRQYNRYWFFKREGRLFVETADSREWGYYNTKEEL

SEQ ID NO: 50055 - protein, 206 aa, Zea Mays
MAAQTTVQCRVIGGGGMRTVECLRGRLLAERVASKAAKEDADQLTKRLDELEKKLAGEVRVRNRAERRLRRAIKKLESLKILDVELSEGSIGSLSSNGRSDHQAPEAEERNGPGSLTTRGSVLASGPSGDPDADADRESSEGSCTQVNSSSRDGSWCSVASEQSRPGSCMDLAGNTTNCGSEGSCGDHDSERYNICVQINSMPIGS

SEQ ID NO: 50056 - protein, 115 aa, Zea Mays
MWRRLQTLAPSLRRAAASSSPASARAVPLSTVPVAAFRRTSTLLSSPGDKPAPSKVEDVMPIATGLEREELEAELQGKKRFDMDPAVGPFGTKVGFSRSNDCIFCGTERVVSSSS

SEQ ID NO: 50057 - protein, 399 aa, Zea Mays
MPGRNFATTAVAIAVVVVAALASASAGADDDEQGHLRREADRIVRLPGQPDDGVDFPMYSGYVTVDEGAGRALFYWLQEAAAEAQPAPLVLWLNGGPGCSSVAYGASEELGAFRIRPDGATLFLNAYRWNRAANILFLDSPAGVGFSYTNTTSDLYDSGDRRTAHDSYKFLARWFERFPQYKYRDFYIAGESYAGHYVPQLSQIVYRKNKGVEKPIMNLKGFMVGNAVTDDYHDQVGTFESWWNHGLISDATYRLLDASCVHDSGEHPSPRCNAAYDKATAEQGDIDPYSIYTPTCNQTSTSSSSSTPRRMRLKGRYPWMRGSSYDPCTERHSTVYYNRPEVQRALHANVTAGAGGAMNYTWATCSDTINNNWGDSPKSVLHIYKELIAAGLRIWVFRK

SEQ ID NO: 50058 - protein, 580 aa, Zea Mays
MGGNWSGKESGGRACPPPARPAANPKFEPAASTDYYPTIQNPTPASAVISSPRQSATISSSDRPRNPSPQTIPLATAMPDLPCDGDGVCMVCRVASPPEVDLLTCSTCTTPWHSPCLSKPPALADAASWSCPDCSPDSAAVAAPSGPANTLVAAIRAIEADHTLSDQEKARRRQALLTGDAPDGADDDDDEASDDALEIVGKNFSCVFCMKLPERPVTTPCGHNFCLKCFQKWIQNQKRTCGKCRAQIPAKMAEQPRINSALVEVIRMAKISKNPNSAGSAVPYHYLRNDDRPDKAFTTDRAKRAGKANASSGQIFVTIAPDHFGPILAENDPRRNMGVRVGETWEDRLECRQWGAHFPHVAGIAGQSTHGAQSVALSGGYEDDEDHGEWFLYTGSGGRDLSGNKRTNKEQSSDQKFEKLNAALRISCLKGYPVRVVRSHKEKRSSYAPESGVRYDGVYRIEKCWRKIGIQGKFKVCRYLFVRCDNEPAPWTSDDHGDRPRPLPKIKELQGATDITERKGRPSWDYDMAGNGWCLRQSAGSLFYLGILRPTSKSVEQQSVFICLLLKGCLKNLLVRYAGR

SEQ ID NO: 50059 - protein, 410 aa, Zea Mays
MGEVSDDNSNMSFLKRIATSDVPLLKEYGVNGVVVALLLAVVTPVLLSMMFGKKTKQRAVRADVGGEEGFAMRNNRFSSLVEVPWEGATTMSALFEMASKKYSRQRCLGTRKLIKREFMESSDGRKFEKLHLGEYEWDTYTEAFNRACNFSSGLIKMGHDLDSHAAIFSDTRAEWIIAAQGCFRQNLTVVTIYASLGEDALVHSLNETQVSTLICDSKQLKKIPAISYKLQSLRRIIYIEDEPVEAETLNQVKHLTTLSFTEVEELGKTSHVDARLPSGSDTAVIMYTSGSTGLPKGVMITHGNMVATTAAVMTIVPNLGMNDVYLAYLPLAHVFELAGETVMLASGSAIGYGSALTMTDTSNKIKKGTKGDVSVLNPTLMISVPAILDRIKDAVFKKVGEKGGLTKKLS

SEQ ID NO: 50060 - protein, 1125 aa, Zea Mays
MASSQGESVPPWLKSLPLAPEFRPTVAEFADPIAYLLKIEPAAAPFGICKIVPPLPPPPKRTTLGNLSRSFAALHPDDPTPTFPTRHQQLGICPRRPRPALKPVWLSPHRYTLPKFEAKAGASRKALLARLNVPASKQLSPLDVEALFWRSSADRPVVVEYASDMPGSGFAPCAARLTQLPPANVGETAWNMRRVARSPASLLRFVREEVPGVTSPMLYVGMMFSWFAWHVEDHDLHSLNYMHYGAPKTWYGVPRDAALAFVEVVRVHGYGGEVNSLETFAMLGDKTTVMSPEVLVDSGIPCCRLVQSAGEFVVTFPGAYHSGFSHGFNCGEASNIATPEWLIVAKEAAVRRASINRPPMVSHCQLLYELALSLCLRDPSNDVMEPRSCRLKEKKKSEGDQLIKKIFVQNVIEDNKLLGHFLSDGSPCIILPVNYNDGSPLSTLLSKFQSTTDSRISHGQCSKAEAPKDSRRLPMDGADKNRELSSSNKNSLSAFSGKTVPLPPRICIHECANVTGASHAHNAENDKVDMNSAAGLLDQGLLSCVTCGILSFSCVAVIKPRECAAKWLMAADSSLINDRLASSGEHDIDALQGGRTTGGILQYPRIEVEAKLLAGEMDFEYDWKDILFKEVTIKDREKIQEVVRDEEAIPTNSDWAVKLGINLYYSANLAKSPLYSKQVPYNRVIYEAFGCGSPNDSPVKLKTYSRRQCRAKKIVLAGRWCGKVWMSNQVHPYLADRIKNHEPKEIDETFPSDQKSHAEPVENSSREAASTRKSSSRTIEGKTSKREKEQLEKANAKKPKFTEEDNSKSLEGTAEASTQKIKGRSVLEKTSKKEKAYTKKLKHTEKVSEALKGPSEASFPAPAGMVVRSSSRIANRKIMLKSKMEEEDNGSADRPKSKVEDDKDNPAGRSRAKPLRQKTKVDAKKKTKETRVEKRKAPSPASQKDEEEQSDDVEGRSTTKQRLSLRKKGAKTEGKQRMEKPRFGGSAPPPSSPKRKEEYVCDIEGCSMSFGTEQALSLHKNDICPEKGCCRKFFSHKYLQQHRKVHADDRPLKCPWEGCGMAFKWPWARTEHVRVHTGDRPYVCLEPGCGQTFRFVSDFSRHKRRTGHGASKKAKAKKQGKAAVT

SEQ ID NO: 50061 - protein, 288 aa, Zea Mays
MAKNIPAGSIRFGCHVVAIQQDPGTHGPILTTVDGGTIRAKVLIGCDGGSSAVARYLGLSPPKAIPRTVLRGFTAYPHGHPFGAEFLRIRGGGEFVVGRLPVTRNLVHFFVTMPNPPTGIMLATKDVSATTTKDFMLEKLRDCCAPEIVQMVQDSDPESLNVVNSIRYRSPWQVALAAFHRGAVTVAGDAMHAMGPFIGQGGSAALEDAVVLARSMSRANAAGGGHGAAVREYVRERRPRVALLSLESFVAGTLLRARSLVGKLACVAVLALLGTRSLRHADFDCGRL

SEQ ID NO: 50062 - protein, 448 aa, Zea Mays
MRATIPALSLLVTPRLPSLAVPLAGGRLRVGGRSRTRLRVAAPTSVPGEAAEQAEPSTSAPESGEKFSWRDHWYPVSLVEDLDPSRPTPFQLLNRDLVIWKEPKSGEWVALDDRCPHRLAPLSEGRIDETGCLQCSYHGWSFDGSGACTKIPQAMPEGPEARAVRSPKACAIKFPTLVSQGLLFVWPDENGWEKAAATKPPMLPKEFEDPAFSTVTIQRDLFYGYDTLMENVSDPSHIEFAHHKVTGRRDRARPLTFRMESSGAWGYSGANSGNPRITATFEAPCYALNKIEIDTKLPIFGDQKWVIWICSFNIPMAPGKTRSIVCSARNFFQFTMPGKAWWQLVPRWYEHWTSNLVYDGDMIVLQGQEKIFLAATKESSTDINQQYTKITFTPTQADRFVLAFRTWLRKFGNSQPEWFGNPTQEALPSTVLSKREVKAIWVTKKVSV

SEQ ID NO: 50063 - protein, 288 aa, Zea Mays
MVLEEQRATKVISFTDDGVLGHSESRCRTESREIFVMRAPKNAVGGGATHAQKKDRNQSCKSTGFKIRDIWKNFQEALDAEGCFEGFSEDVHEGSCSRSVTETELSGACRKLHFNSSSVPDLNAEVPVPVDYTENHYYSKKGLVRSNDSGDSETCAVGQTAEPPAVESRQVSKVNSVPVNKCEQNGASAICHEKMLSGSTRQLDGDYEHCVKVVRQLECDGHIENGFRMKFLTWYSLRSTDQERKAVSTFVRTLSNEPSSLAEQLVDSFGEILNSKKAKTGFCSKLWH

SEQ ID NO: 50064 - protein, 574 aa, Zea Mays
MPKTPPVNASKNTEPQKQSAPNLTITNGHTSTKVVVKKEHPINDVKHISTWVCKNLACKAVRPAEDSFCKRCSCCICHKFDDNKDPSQWLVCSSDNDSKNCCGSSCHIECAFREKRAGCFDLEQIIHLDGSYSCASCGKISGILGYWKRQLVIGKDARRVDNLCQRIYLSYRLLEGTVHFKELHEIIEDAKAKLESEVGPLDGMSAKNAHGIVSRFSAGIAVQKLCSTAIQRADEWLSSPDLHLRETSSSDTIKGYKLWYWKSREQPSMEKPVIVSKDERKILLYDLTPCTEYSFRVISFTDDGVLGHSESRCRTESREIFVMRAPKNAVGGGATHAQKKDRNQSCKSTGFKIRDIWKNFQEALDAEGCFEGFSEDVHEGSCSRSVTETELSGACRKLHFNSSSVPDLNAEVPVPVDYTENHYYSKKGLVRSNDSGDSETCAVGQTAEPPAVESRQVSKVNSVPVNKCEQNGASAICHEKMLSGSTRQLDGDYEHCVKVVRQLECDGHIENGFRMKFLTWYSLRSTDQERKAVSTFVRTLSNEPSSLAEQLVDSFGEILNSKKAKTGFCSKLWH

SEQ ID NO: 50065 - protein, 279 aa, Zea Mays
MDFGIFPVGSLESRLAHFICQQCEASLQFLLLLCQQKLFRDRILRNKELSRNGGILSLSHTILKLAVPECLKQSTDLVASISRLKAKILSILLQLCEAESVSYLDEVATNSNSMRLGQTLALEVLNLLKIAFGKKKYITSDSHDKVKIYPMGSMLISALRLVDVFSDDSNFRSSFLTNTVPFLTQILATPHGEFVSSWCSVNLPAIEEDASLDYDPFVASEVALLASNNVLTEAKADYSCPFRPSLPSVAYAQTRTSCVVKIIANLHVFIPNICEGGTK

SEQ ID NO: 50066 - protein, 766 aa, Zea Mays
MTHGQVDIFVDVAFDSLHEDVRLLNIRLSSMDFGIFPVGSLESRLAHFICQQCEASLQFLLLLCQQKLFRDRILRNKELSRNGGILSLSHTILKLAVPECLKQSTDLVASISRLKAKILSILLQLCEAESVSYLDEVATNSNSMRLGQTLALEVLNLLKIAFGKKKYITSDSHDKVKIYPMGSMLISALRLVDVFSDDSNFRSSFLTNTVPFLTQILATPHGEFVSSWCSVNLPAIEEDASLDYDPFVASEVALLASNNVLTEAKADYSCPFRPSLPSVAYAQTRTSCVVKIIANLHVFIPNICEEQERDLFLQNFQKYLVSGSSKLSADQPASSDFDATKVCRNLGSLSDYAKTLVPNLLNGEDLLLLSDFSDKLQSWCKSQVAVKVVQNDIPPESMEDMHPMQQPLPTRASTPDSKMNNFPKDVQNMEVSAPIPPINREGNDKDETPKNTVSRNGGFLQNAVGQDLVHLGVARTASGGSSAVTSVVSTGHQRSKMDLDPASGSVDNFKTPELTKENGLQGDDKGESSVYDERQPKRRKRNIMNSEQIDELEKALVDEPEMHRNPVLLQGWSEKLSLQGPEITSSQLKNWLNNRKAKLARIAKERGTFEGDNADKPSTPHPGESSESAGEDNYIPPARVMTAPSKGRLVSPDGNEKTSQAELSPNTMLIRPFTRSFSLEPGRLVSLVDSDGKEVGRGKIFQAPGKSPAPVESRICTVDVTELRTEKWRELPHPSEASGRTFQEAEARNGGIMRVSWDSGRLLPVV

SEQ ID NO: 50067 - protein, 397 aa, Zea Mays
MVAIVGFGDRWRLRLSHEIIFQAVWNLLSILRTGDREAYRQFFLDAMVAVEDTPGPFSELPASCRPKNGPGVLVDLTGDARWRPFATSLIKLVNKCLTDGTLYVDGLVTMPFVSAACSILCYGDGSLHKVCFDFARIVATVMTPEILPLESIIRSITCILSQEISELSDIRDADYDFSMGACLCALHSSCPDYIVESTAADIVNVLKRAVKTSKSAELQVALYTAYKRIIELCSVQVWKPEILLKLLSLPKPCSKLIQCIRAVIGKFGQTFFTLDDGNSQSSPQARSEKNELQKAGHKRIPQNEESNSAKRQKITESGFSAATGFEKEDYGYAFLQSLNSLINCLSPDNHESYPLDPDVAIETVQRNLYSFDASLYFEALHTSIFLDTRNCLKMTIS

SEQ ID NO: 50068 - protein, 598 aa, Zea Mays
MACGSLDTGSAGLERQNKQNHQCYVIILGFCAVYHGVPKRPLAFLIAQATPFFLLSSLSGLSPIHSTPIHFPPLSTLAAPPAVCSGGAYMTHPSSPSSSAPPPPPAAAAAAAAAEATSLAPGFRFHPTDEELVSYYLKRKVLGRPLKVDAIAEVDLYKLEPWDLPPRSRLRSRDSQWYFFSRLDRKHANRARTNRATSGGYWKTTGKDREVRHGPRVVGMKKTLVFHAGRAPKGERTNWVMHEYRLEGDAAVEIPQDSFVVCRIFQKAGPGPQNGAQYGAPFVEEEWEEDDADVGLLPVEGDAAVDPEVPPGPVEIPGALERGYLQMSDLIQGLGDRNGNGTPSLPVSDTSHNSNHSEDVDGNSGDILSDPNLGSNFIQCVEPGEQNSLMLNGNIISNANAGDFFNNSSPSDGFLELKDFADAADLDFPLGNGSTIWPSDGWAWKTPDSAEAVNGANDEIPPLPDDQIFQPDELEQLLQSIQEDSHLGSTIIDPMHSSMTNSVLPEDDYLMFYDAPFDSTMCDGYGQNGILGSAAANLSGIGMMEDGMAYFDAMDDNSFNDTLGSIQQSAGSSSHAFNGPVLTQEMVRLRVVLLERDL

SEQ ID NO: 50069 - protein, 348 aa, Zea Mays
MLVKHLEHKNVLKQPDMNLDIIEVTSRLAGHSKAQSSTALMASISDMVRHMGKSMQSLASDAGPGDNMVKWNSRYGKAVDECLVQLSRKVGDAGPILDTLAVVLENISSSMIVARSTIFAAYRTAQIVASLPNLSHQSKAFPEALFHQLLLAMVYPDCGTHLGAHRIFSVVLVPSAVAPCSFSDTSRTRKIDLRRTLSRTTSVFSSSAALFGKLKRDMLSFRESPLHDNTKLLPISEDADEISANDAKLFKSQTIQRMASTKDISLPSSTDASTLSEQTPNQEKDAVTLMLSVRQANLLLSSLWTQALSPENVPRNYEAISHTYSLMLLFSRAKVPTFWLVAFSLLFH

SEQ ID NO: 50070 - protein, 176 aa, Zea Mays
MLQSLTVYYYLYQISTGLWMGIEFYAINTDSQALINSQAQYPLQIGEQLTHDLGTGGNPNLGEQAAEESRETIATALRDSDLVFITAGMGGGAAPIVAQISKEAGYLTVGVVTYPFNFEGRKRSLQDLPCDRWLGKIILETCISQIHIWLRGTSAESHRRPIIKPHSFGFPRKLEF

SEQ ID NO: 50071 - protein, 153 aa, Zea Mays
MAGLCLLSSAPLPPRRGLGDGSVGMLQSLTVYYYLYQISTGLWMGIEFYAINTDSQALINSQAQYPLQIGEQLTHDLGTGGNPNLGEQAAEESRETIATALRDSDLVFITAGMGGGAAPIVAQISKEAGYLTVGVVTYPFNFEGRKRSLQASI

SEQ ID NO: 50072 - protein, 642 aa, Zea Mays
MCGPANYDPNSATAIVVYKPGSNSIPPMQNETTAQEENSKKACSHFIELWKQKHETGQWIEVEPEAISTRSEFPPFNASGIVLMGDNMKQNLESGSINGEPNGEDGAKADQKSSQQMGSHAAYPPWAMHPASGAVLYPPYPMQGMPFYPGVNPYYPPYPPVDDPSSGGGNSHGHKSHRKGKRSGKKPSVVVIKNVNVTSKKCGSSESESQSSSEVESADSDNSHSKSRERKHKSSCSKEGRRTTFDPGDEYNKDETSNGHGVEQGNWSAFQNFLLRAEEKTRSSDADLFAGEKEPPSRRKQNVNTADPIILVERDGGNVCEQNKIGFDSANGRTRVIRVMSNDELVMSGEGRIYMDCEMKEIEAGGGRYRRGTGDDYMVYGQGCQIDRHCLLDPLAEAQYKNPVQQDNNRNGVTDESFMIPLRSSSQDNIGAESRTTMDIDVELPSSIHKASDKKAGHQLFYEPDELSTVKVEDAKPEDVLPVTDGVQKVEKEKLKNARDGSDKRTKDSLLRRLSAPRTPLNDAQKRAQNLRAYKADLQKLKKEQEEEQIKRLERLKLDRQKWIAARGNGKGPGNDAPRANGMNGLSKSVPTFTGMKRVENGTTESLSGRLKRLSEPKSIVGAEHSLNPKSAGAGRSRRSMA

SEQ ID NO: 50073 - protein, 604 aa, Zea Mays
MMKACSHFIELWKQKHETGQWIEVEPEAISTRSEFPPFNASGIVLMGDNMKQNLESGSINGEPNGEDGAKADQKSSQQMGSHAAYPPWAMHPASGAVLYPPYPMQGMPFYPGVNPYYPPYPPVDDPSSGGGNSHGHKSHRKGKRSGKKPSVVVIKNVNVTSKKCGSSESESQSSSEVESADSDNSHSKSRERKHKSSCSKEGRRTTFDPGDEYNKDETSNGHGVEQGNWSAFQNFLLRAEEKTRSSDADLFAGEKEPPSRRKQNVNTADPIILVERDGGNVCEQNKIGFDSANGRTRVIRVMSNDELVMSGEGRIYMDCEMKEIEAGGGRYRRGTGDDYMVYGQGCQIDRHCLLDPLAEAQYKNPVQQDNNRNGVTDESFMIPLRSSSQDNIGAESRTTMDIDVELPSSIHKASDKKAGHQLFYEPDELSTVKVEDAKPEDVLPVTDGVQKVEKEKLKNARDGSDKRTKDSLLRRLSAPRTPLNDAQKRAQNLRAYKADLQKLKKEQEEEQIKRLERLKLDRQKWIAARGNGKGPGNDAPRANGMNGLSKSVPTFTGMKRVENGTTESLSGRLKRLSEPKSIVGAEHSLNPKSAGAGRSRRSMA

SEQ ID NO: 50074 - protein, 650 aa, Zea Mays
MADVGRLEHLEQRRRQKPERTEERIRVYWRLGGFLAGLWLAIHVMTQIEHRGLQKQWTWEPMMGESLILALVDNNDDVRQVGRALLEHVSQARGLTSGLQFLCSSASSLTAVFLGLRYVVQLVGTRSVLADFSSFHHLFFVICKLLKEVVVQRPQIAQPAKPPEGGFLRQPYSSVLASPPEHAVDVSNWEKFCTLLSATLWPFISTCLREGKELIGLKQCQISCVRLLELLPLVYERVNSNCRTLSCSTTTVFQNPMDISWFIHLVHWGKSSLLVIIRHWKQCMLSLLKELKCSHSGTIQCYIEDLDNIISHDAVNINELEERVSNLELVLSKEVATKIERRGLADLPMFKEPIVSVPSPVHERHSGMDSFVDVESTKSSHPPDVHEIILLSDSEDNLLAPDVSSEEVLSSVMENDASTASNMLKDATPLEQSTLNDNRHSPLEPQICHPVSNISASSKPVSTDSRDNIAATKGLLRMKKPRPPMNTNNNSTSPKMVKSSVTGTSQQLHPKLLSDTEKFKSIFRDISDDEDDPLDHALDNYRRPQVLSRKPCILVPKRQVVQLPVPVGRKPGSGSRVTSTRRLQPPKLGSWFRNILEMDYFAVVGLSSPEIVRKPALKEVPLKELMISLLSVPVLSIASRSNSEVAQRMI

SEQ ID NO: 50075 - protein, 234 aa, Zea Mays
MAGRGSLAGLLPFGDANDIVLQMANEVLPVVKGVPVLAGVCAIDPFRRMEYFLRQLETIGFCGVQNFPTVGLFDGNFRHNLEETGMRYIMEVEMISMAHRMGFLTTPYAFNPDEVAAMAKAGSHIVVAHMGLTTAGSFGAMTATTLDDSVLRVQAIADAAFGVNPDIIVLCHEGNLVKIVIPRSNPNDAHVAGVGKFLMFPRELQLSGESVKLMKLGEAVAKGTINNETLGYFT

SEQ ID NO: 50076 - protein, 427 aa, Zea Mays
MMHWPGIKFREIALRTAMRHIHYEDESTRYINLGPVNKVLNMLACWIEDPNSEAFKLHVPRIYDYLWLAEDGMKMKGYNGSQLWDAGLTVLAIVNTDLIEEFGPTLKLAHAFVKNSQIIDNCLEDLNQWYRHMSKGGWPFSTADHGWCVSDCTATGLEATLLLSTISPQIVGEAMEVGRVYDGVNCLISLMNNNGGFATFELTRSYAWLEHINPSETFGGIMIDYPYVECTSSSIQALALFKKLYPRHRTEEIDSCISKGANFIESMQRNDGSWYGSWGVCFTYATWFAVFGLACAGRTFEDSPAIKKACEFLLSKELPSGGWGESYLSCQDKVYTNLEGMRPHAVNTSWAMLALIRVGQAERDPAPLHRAARVLINLQSEDGEFPQQEIIGVFNQNCMIGYSQYRNIFPIWALGEYRTKVHVPRKK

SEQ ID NO: 50077 - protein, 134 aa, Zea Mays
MAMNEKFNKDEVWGHLGKRIGQLNDEPNGYEDDVIEDDEISPRKPEAKAVYVKDDFFDSLSCNQIDNGGRNGRVKFSEQRKIDTETFGDSARHRPMGIRGRGPRGGARGRGYYGIRGYGYTGRGRGYSYPNHQP

SEQ ID NO: 50078 - protein, 243 aa, Zea Mays
MASGGAARGRLAEERKAWRKSHPLGFVAKPAMLPDGSVNLMLWNCVVPGKEGKKNNFSLLSQNRNKQSIIRFSEFMSGILSSVQQLANQLADAHFARPHPTIHTSSRSQMPQNVQSAMRLRVLSFLWERMHIRIREPLDTGAFSVAQTRAATREMRFRIRPPLDTNTTILLNLLLETKTRDMLYYGNHTIKLFCFLALAAKRGLVGSSPGLIKLFCFICKYSPFLLVLSSLFFVNHTTFSIGG

SEQ ID NO: 50079 - protein, 671 aa, Zea Mays
MGANCLAQTNALFRKNLVIQRRNHRSNCCLICFPLVVCLLLGGVQLIVAIAYASSAAHRPRVDCGGCTASTTSSSSADTVVGGPVCPTQCPLPTAPKWPPVLQLPPAPEDMEEIGSSTSTDDLTGASTARPNPPAATFLVTGTNRSFAEGVMSNMFSKHDELSSAANISAVADFALGTNEMRFISNGAEELGSDFDRRNHLFFLQTSCTPNATLSFPVQQGRSNFTKDAGCIEGLFLWREDSSAINSESYRGYYKEDKQANQIASAYDLTSSDLSKFNLIVSYNSTYKGAIELSLSVASFSFSPILLRVPRLLNLVSNAYLQLRGSDTKMQFEFIKDMPRVAQQEFPIDISFLVGKLVFVWMIMLYFPVILSNLVYEKEQKLRTIMKMHGLGDMAYWIISYCYFLLLSLLYMLFLVSFGSIFGIKLFRLSDYRVQFVVYFAYINLQVSFAFLMATFFSNCRTASGSWSTLMELFPPFCLYRIIYEFSPPPSPLYRTDFSGVHWEDLSDHKNGMLDILIIMAVEWATFLLLTFFVDEFGTFRNGIRKTVSIFRSNTDQSSHTCQMQTIQLEEFLPSVETDRTDVSRERETVQQLLRESDSNFSVICDNLKKVYHGKDGNAEKIAVAGLSLSVQRGQCFGILGPNGAGKTSLISMLTGFTKPTSGTAYIDGMD

SEQ ID NO: 50080 - protein, 507 aa, Zea Mays
MDSTALQYENQKLVQQLEVQKSEMHALERKFKELSDDQCSYDKTLISLNKLWNQLIDDLVLLGVRAGGDLDNLQALDHEELSEESLESCPSEEIFLLRLLKTNNIRDNSDTSLLKFVEEALAFRSSATVTLMKSLQETISSQQARSESLSLALNGQKSNEDVIVALRNHNDCLKEVAENASQAISIINEKHKRYLDEIEAFKSNHSRELQEIKRISGELEESIAELEESQRKLVVLQLQRHGSVMDASGANAVNGGISTHKSSDKSMSWQDLKDAVDAAKTLAGNRLLELHQTQEDNLILSKELGDLEGQLKDEKYVLVSKPYMILNDKLQHLNAEIERYRGLVEVLQNDKDQLMQREKEISAKAESLDSVKQTIITYEKKIEELETQIQILFSEKNDLETKVEETLQDSGKKDFKNEIHVMAAALSNELGMMENQLSRSKDAASEALALREQAESLRSLVAKKIEEHKKISDKYNSQVIEIKSLKALVCCPNNFCLLKGGAKLLIA

SEQ ID NO: 50081 - protein, 480 aa, Zea Mays
MDSTALQYENQKLVQQLEVQKSEMHALERKFKELSDDQCSYDKTLISLNKLWNQLIDDLVLLGVRAGGDLDNLQALDHEELSEESLESCPSEEIFLLRLLKTNNIRDNSDTSLLKFVEEALAFRSSATVTLMKSLQETISSQQARNVIVALRNHNDCLKEVAENASQAISIINEKHKRYLDEIEAFKSNHSRELQEIKRISGELEESIAELEESQRKLVVLQLQRHGSVMDASGANAVNGGISTHKSSDKSMSWQDLKDAVDAAKTLAGNRLLELHQTQEDNLILSKELGDLEGQLKDEKYVLVSKPYMILNDKLQHLNAEIERYRGLVEVLQNDKDQLMQREKEISAKAESLDSVKQTIITYEKKIEELETQIQILFSEKNDLETKVEETLQDSGKKDFKNEIHVMAAALSNELGMMENQLSRSKDAASEALALREQAESLRSLVAKKSYLSRTSICCNPLLQTLQRARKMTSTYDEIC

SEQ ID NO: 50082 - protein, 115 aa, Zea Mays
MRCGVARLPRAPRRWRGKGRTRARARERIAVDGLVRGTLGDPGAWFLGSTAFAAVGFAEPEPTEMTVDELKLQARASGGHDLRTSSPSACACSPSTTTRPASRSSRTSCSAASTM

SEQ ID NO: 50083 - protein, 236 aa, Zea Mays
MMRQSCSKDWMISIPLLPIRLGSPSPLCPTGTKQPMELEQPMDDFHSPAANSPNCFDPSTQSACTQPIVAANSDWVRKPEGRGAWLTQNGRQDTAGGSLQPHAWWPVWEGAHCSSSDDFRNFSGQGHDEISVCYLASFTTKIILHNRFRQQKLMEFAEMPFQACSICATRLWASCLLPAVFWCFYIAINLFEIYYGDDWEGLFEAITGYGLGGSLAVLVVVFIPRLLMLVPTLWGR

SEQ ID NO: 50084 - protein, 454 aa, Zea Mays
MARSREVAGWGTVAGGGGAAAVEKAVRCLGRGVDMTGDLRLKHCKDAGGCLVVRSAGRKAAEKAVVPGFGVVADLPADVRCGKGDRIRFRSDVLEFNKMSEAFNHRNSLAGKIPSGLFNSCFDLESGSWAEDAAATKCLAFDGYFISLLDLRLDCRPLALADHVVGDVPAAWDPAAIASFIERYGTHIVVGLGLGGQDVVYVKQDRSSPLSPSEIKEHLDRLGDQLFTGTCTLPPSNRKLREHKSKVSDTRPEQLNTPPLLCYSTGLLDVDHKQVPEAFNVFDAQVTQQGLQGIMATPVSCKERGGNAAASDHSEWLLTVPATPDAISFKLVPITSLLKGVSGVGFLSHAINLYLRYKPPTGELRYFLDFQHHRLWAPVLGDLPLGPCSNRQAPSPALNFSLVGSKLYVSSSEVVVPRLPVTGMRLHLEGKKNNRHPPAASVQHPSVHRRNTGQ

SEQ ID NO: 50085 - protein, 708 aa, Zea Mays
MASRVKEDERHEKILRGLLKLPANKRCINCNNLGPQYACTNFWTFVCTNCSGAHREFTHRVKSVSMAKFTAQEVTALQEGGNERAREVFFKEWDPQRNGYPDSSNADKLRNFIKHVYVERRYTGERSTDKPPRAKDDKDEYSENRRSDGNWGGSRSPPDGSYSDRRSYSGRSDDRNSRYSYGDRSPGYDQNDYKKSPRYFEVVDDRSGKTTPVQRFEDRWSSEPRKPDSGSPDFQKEADGSSPVVRPVRDILGDNTPQLRVGEPSKPATEPPKPSVVRPIDPPKPSVVRPIGPPKPNGTRAIDPPPLTKTISSASSIGSSEGTSEQTKVASAVSLIDFSADPEPASTAPPQPTPMPQQPPFNAAAPQPILEQGKSDPSVSGGDWASFDSFGQQQTPQTSSSVNPLESALAQLSFSEAPSAPNASAYPVSLDPTLKANDGGHSSVLDQSHSLFDAPFGISGNQASTVMSGQGSSVQQSPLAAPTAGPPSQATANPQGTSGIQGAASSTDSKFSSRKELPVDIFTALYPPSTQMMPGWQRAPHFGMGYAMQYPPGVGLQSYLHGAFPQPTYQQPVYSQHAYSHPQPVKASNPFDLGNESAHIQAHMPPSGPPGASAGSAPQTLIGNSSFGVPPQQPHQLYQSEAHLSHFMMQQVPNSMPMPEQQPNSMLATQQGLGSFNMGFDQEAPLGYPQANTSPSYGSVGGGSNPFG

SEQ ID NO: 50086 - protein, 242 aa, Zea Mays
MSGQGSSVQQSPLAAPTAGPPSQATANPQGTSGIQGAASSTDSKFSSRKELPVDIFTALYPPSTQMMPGWQRAPHFGMGYAMQYPPGVGLQSYLHGAFPQPTYQQPVYSQHAYSHPQPVKASNPFDLGNESAHIQAHMPPSGPPGASAGSAPQTLIGNSSFGVPPQQPHQLYQSEAHLSHFMMQQVPNSMPMPEQQPNSMLATQQGLGSFNMGFDQEAPLGYPQANTSPSYGSVGGGSNPFG

SEQ ID NO: 50087 - protein, 260 aa, Zea Mays
MAQAASGSSKIDTKAPTSADEAAQPKSYGDLVSTLPARGGWVSLVQYQNYWLNPGRLQNIIPVKELYKPRADDIVLATYLKCGTTWLKALAFAITTRGRHHQAFAAADHPLLTVHPQEAVPHLEVHTPGQGLADIERLPSPRLLGTHLPLSLLPPAVATSGCRVVYLCRQPKDVFVSLWHFVKGMRGGRSPVELDAALAMFCEGVRGDGGGPGACREDARRLLRRPVHRRGRGARGPGGDCEAVQLRDAERLGKQSDRRS

SEQ ID NO: 50088 - protein, 101 aa, Zea Mays
MAADEHQQRDGQTPVIRFIISSSRIVTRHVSVRPSLERRECLRCAVTIQSPTQGWFRLLKGNALILRLLKNLQDDVQEQSVGSKCKEKTQLQKLLAIDYTR

SEQ ID NO: 50089 - protein, 503 aa, Zea Mays
MGWLSKIFKGPVNRVSRGHYNGNSHEGYSAQHTKSYGVHGNEDEDMDHAIALSLSEEDQRKGKTIDTGHHLDEDEQIAQALQENIGHNLAEDEQLARALQESMNDGPPRQHIPVEDVNSESTPASILPSNIFRTSGLRVCAGCRSPIGRGRFLSCMDSVWHPECFRCYACDRPISEYEFAVHENHAYHRPCYKERFHPKCDVCSSFIPTDKNGLIEYRAHPFWMQKYCPSHENDGTPRCCSCERMEPKDSQYITLDDGRRLCLECLHTAIMETNECQPLYIDIQEFYEGMNMKVEQQVPLLLVERQALNEAMEAEKSVHHLPETRGLCLSEEQIVRTILKGPIGPGNRIIDMVTGPYKLIRRCEVTAILILYGLPRLLTGSILAHEMMHAYLRLKGYRTLSPEVEEGICQVLAHLWLESEITSGSGSMSTTSDASSSSSTSSSSKKGAKTEFEKRLGEFFKYQIETDSSVAYGDGFRAGMRAIERYGLRSTLDHIKMTGSFPC

SEQ ID NO: 50090 - protein, 458 aa, Zea Mays
MDHAIALSLSEEDQRKGKTIDTGHHLDEDEQIAQALQENIGHNLAEDEQLARALQESMNDGPPRQHIPVEDVNSESTPASILPSNIFRTSGLRVCAGCRSPIGRGRFLSCMDSVWHPECFRCYACDRPISEYEFAVHENHAYHRPCYKERFHPKCDVCSSFIPTDKNGLIEYRAHPFWMQKYCPSHENDGTPRCCSCERMEPKDSQYITLDDGRRLCLECLHTAIMETNECQPLYIDIQEFYEGMNMKVEQQVPLLLVERQALNEAMEAEKSVHHLPETRGLCLSEEQIVRTILKGPIGPGNRIIDMVTGPYKLIRRCEVTAILILYGLPRLLTGSILAHEMMHAYLRLKGYRTLSPEVEEGICQVLAHLWLESEITSGSGSMSTTSDASSSSSTSSSSKKGAKTEFEKRLGEFFKYQIETDSSVAYGDGFRAGMRAIERYGLRSTLDHIKMTGSFPC

SEQ ID NO: 50091 - protein, 179 aa, Zea Mays
MVSTLEQLLIAAAFLVVAAAASTVPVSPAAAATRPYHGGGCYSHFFAFGDSLIDTGNFIRYSTARPSSTAPPAAGPTAASSLTSLLSGWGTRAGRRTWTGRARTTSGTALTSRWPAARRSTSCCSRSTASTSTASRPTPSACRSAGSRRCSPCSPPTSTSVGRSWRARCSWWARSAPTT

SEQ ID NO: 50092 - protein, 437 aa, Zea Mays
MKSGTPAKKKKHCNCKNSQCLKLYCECFAAGDYCDGCNCKQCGNTVENEKGRQEAINNTKLRNPNAFQPKIENGPIPSSVWKDAGALPSHPKHNKGCHCKKSGCLKKYCECFQANILCSKNCKCMDCKNYEGSEELRSTTQGDNSCDRNNIQQAANVALNGAIGSSGYRFSPVRRKRPPEDPHCQTLNVEGSMMQTQFRETNNVDVSQMTSSTGRDGSTVNFQGTSKLVYRSPLANTIHITDVNDLANHLVIACRKAAERFTTIVDNKVEMEIDKEICTNTDQKFDENKKGVQKAALSQLGKVTDIDQQIVDDSRLHCSDTQDDARPASPGTQALLCDEQDLTFGTVHRSSIPVAMHDQVISELHAAQESAVLKELRNNLRLIIARGKLNAEGKSASGTRMELDALRHHESSTSLAPVRAEEKSNTTDGPEITHELK

SEQ ID NO: 50093 - protein, 436 aa, Zea Mays
MKSGTPAKKKKHCNCKNSQCLKLYCECFAAGDYCDGCNCKQCGNTVENEKGRQEAINNTKLRNPNAFQPKIENGPIPSSVWKDAGALPSHPKHNKGCHCKKSGCLKKYCECFQANILCSKNCKCMDCKNYEGSEELRSTTQGDNSCDRNNIQQAANVALNGAIGSSGYRFSPVRRKRPPEDPHCQTLNVEGSMMQTQFRETNNVDVSQMTSSTGRDGSTVNFQGTSKLVYRSPLANTIHITDVNDLANHLVIACRKAAERFTTIVDNKVEMEIDKEICTNTDQKFDENKKGVQKAALSQLGKVTDIDQQIVDDSRLHCSDTQDDARPASPGTQALLCDEQDLTFGTVHRSSIPVAMHDQVISELHAAQESAVLKELRNNLRLIIARGKLNEGKSASGTRMELDALRHHESSTSLAPVRAEEKSNTTDGPEITHELK

SEQ ID NO: 50094 - protein, 486 aa, Zea Mays
MSFKFFQDLPTPTGVEFAEDEFILHMEGTAGTQRVVRHIGTTSWPGRVTLTNKALYFEASGKFSYESAIKVDLSDTGVEHQISTASTGPFGVPLFDKAIVFESLPEPVVLEFPEMTSSTRRNTWLALIREVLSIHRFISAYSIVSPVHRWEVHSRTILGVVRLHAAREMLRMSPPPASSFLVFSLYGDMPKGDFVLEQLASNLKRTSTITRLSASYVFKGLSRSSSVPPLSAEVAAEGRGADDDASGREHERPLASLEDKIGRVRDEAREVTAANAAVEGMKDEGISDSLLVLVGLVGPVGKLRPAIQRITSWERPLVTGSILAAASLIIYNEWFSYVLAASLVLAAGVMVWARQRKIGELCSEVIIDASSSSSSDKTTMDSIVEAQRSLQKVHRYIVTANVAILRLWSIALARSPKHTETVIWMLAVSAAVVAVVPFRYILIGLVAGSFALNTRVARAVMNPQGGRRWREWWESIPAVPVRTVHS

SEQ ID NO: 50095 - protein, 668 aa, Zea Mays
MVLQYNPDESNVLRVPRLMNLASSAYLRLRGNDTNMRFVFVKDMPRDGHPMKAPDMSFIVGKMVFVWIIMLLFPVILSSLVYEKQQKLRAMMKMHGLGDMAYWTISYCYFLVISLLYMFLLVVFGAVVDIKLFAVNSYVLQFLLYFIYMNLQISFAFLMTTYFSTSATATVTGYLYVIGSGLIGEYLFRPFVEDTSVSRSLITLMEFFPPMSLYRIIYELSPPPSPSGPFSDFSGVRVGDLSDPENGILVLMVVMVLEWPTFLFLTLYLDGFGWLQTRVRKLPPAAAASSHQTLQKPSTTRPQERPEASIEIDGTTDIPGEVARACAEREIVDRFLQQPDQSYAVIVDNVRKVYPPRDGNAEVVAVNGFSLSIKRGQCFGLLGSNGAGKTSLIGMVWYGMVMLTGFTKPTSGTAYIDGMDIRTDMSEIYTRIGVCPQFNLLWETLTGREHLMFYGRLKRLNGAALTEAAEQSMKVLKIFEGGVADTLVSQYSGGMKRRLSVAISLIGDPKVVYLDEPSTGLDPASRSALWDAVKLAKKDKAIILTTHSMEEAEALCDRIGITAHGRLRCTGTSKELKAKYGGTFVFTVTTAAAGEDEAVERLVRGSISPDAKRTYHIAGTQKFELPKQGVRIAEVFRAMEQAKRSLSIAAWGLVDTTLEDVFIKVAAC

SEQ ID NO: 50096 - protein, 150 aa, Zea Mays
MKTVKSMKKIVEGLKNMVEILFKLPMIKLLMAAVEEGIENSAVEEGKEKENDKEKEEENGNEKSKETGNETEYEKVKNIKLVHIDYILEKAETGVQFVGNVMRSSSQTRRAHCWFPCVDSATERCPFDLEFTVSMDFIAVSNGDLLYQLL

SEQ ID NO: 50097 - protein, 250 aa, Zea Mays
MGKYMRKRKRNVGRTTPAAEHGVRTRAQSDAVASTASAAAAAAPKRPRKQTTAAVTGNTSGAAAPGSCYLHLRTRRLQFLPGGEGEVQRPVPPLPAAAAQRSSSVASGEPVEGAGSSRCSSTASSSVDVVVLAVAPASERGGGEAEEARNDDDDYCGDVESVVSDSAECCRRDRRETTPSSQARVDRPCSDEECSQAADGPTRHRRRRKALAATATAAVACRARATPPAEEIEQFFAAAEKAQAERFAAK

SEQ ID NO: 50098 - protein, 153 aa, Zea Mays
MLQWSYPSLARTAVMALVSPNLKVSDSLSRMLLCVVGVQLQCQFTHRLPFVACSIGLNTQPSQRTNHNDCRLLHVQGTENLMQSLVSFSDFSVSVCTEENSLIKLQVHVSGTITDSIFKKVFTKNVAAAQPLPGFRRMKGGGPDCIKESECSA

SEQ ID NO: 50099 - protein, 1086 aa, Zea Mays
MMYGKSLHHEGSCEPRIQEVEAEVQDPSVHPWGGLSTTKDGILTLLDCFINAKSLHEIQNVFDNARAREREREMLYPDACGGGGRGWISPVMPNYGRGHGTRDTCALHTAHLSCDTLVDFWSALGDETRSSLLRMKEEDFIERLMHRFDSKRFCRDCRRNVIREFKELKELKRMRREPRCTSWFCVADTTFNCEVFEDAILVDWHQSLLEQDGIYHHFEWAIGTDEGKSDILNFENVGMIGQVHRKGLDLDQFEDYFVTLRACRLDGRRTEFCVKAHALKGQSCVHRRLIVGDGFVTITKGESIRSFFEHAEEAEEEDEDDVVDRDSNDPDGDIAHPQKHAKSPELAREFLLDAAAVIFKEQVEKAFREGTARQNAHSVFVSLALKLLEERVHVACKEIITLEKQTKLLEEEEKEKREEEERRDRRRTKEREKKNRRKERLKGKDKDKEKILVRSKKPGLSTFSPSSQAAPSSNESQDVLDLRYSDSEEEDNVVVREHYPDSSADQSSSKDTDERSNEHECSATAEFVPSDCDGSFLCDESNSSRNLRFRWDFPEKDVSYWYEDCRVDSGDTQLQSRERIRNNTRSYNTVFNTNNRTRDKYNPCSCGHQEDFRYFSTATRSSRETKISRKTVAEKPRLQYRRCYPPESFAVSNGRVGGTPNKNTGPKQVWEPMDARKKIGNGRGSEITPETTGAADGSDQVECSKDISECEKLEVVCETLAETCCEISAEACKSDQPCRQGEKNQSACSDGSKCVDKPNCCLTKDTVRTTNLTSSDSFSCLSEGDRDSSMSSMTSLSAQNVESSSTSDSDEYSDRNDSSPGDPPVKNVSRSLLEMCAGNGFREYQPKGLNPPNGNQFGFMVAPLQDQMLHQQKIHAPPYSSPFVGFHNHPLAVPTNGYLPYPQPGHFYPGLMTPVGCGVAGSQCVDFPMQYSNNIHPYSGPEFGFLPAKPVHKTPVSFHAVPVPPLAPLCRSEVPVVINQERQQGSAPPKFKQAVLVPENGCSAEDNTFKQKGDDTDSTPFSLFQFNLPIAPPTLATSKEEQSGAMPSMALPPAQITRAQLCSREETNVKEYNLFSGCNGVMFQLN

SEQ ID NO: 50100 - protein, 1486 aa, Zea Mays
MPASSSPAMASQHAPPRRELDLDAFLPSSPTSSGASDADPADDDHRRAVDDLLRLLSSSDSDSDSEESSRIPSTSIQTLSRVQAPAPVAEPSPSPSPSASPSPRRSASALPSETLSSLVARTFSSNGASSSSKPLPSLFRGVRPSPKPGAALAAAAAASRAVLTPHAAAIKSRRSVSAPVEKVLEEEGSGSEGSKEFLPTGSLEAEVEEKGDSEAVADATKQTAGGNVGAELGEDKQAEVGGEENAEAIKLVEASPLDALAAEDSSGHEQGNDANLAETDQVGNQIEAVYEENEDDQTGGDNHVQSGQGMDLIAIALEESSDDEHEFERSDSILQEQVESGSLIDKVIEDRVEQLEASRKAENTEKKLKVSMKPLEWAEELEKRQASSGQHWEEGAAAQPMQLEGIGKGPPAIGYMQIEMDNPVTRVMSSPSFRSDHGSPQVLAVHRSYIAMGTSKGAVIVIPSKYSIHQADDTDAKMLFFWNQGEKTQSPVTAMCFNQQGDLLLVGYGDGHMTIWDVQKSAAAKVIYGEHTAPVVHACFIRQSKAITGDSKGVVLLHTFSIIPVINRLTVKGTQRLFDGNTGIVLSACPLVMDESFGFSNSSAQGNQTTSSSGGLGSMMGGVVGGVVGVDSGWKFFNEGSSPMEDGVVVMFIMHQHALVVRLRTNIDHVDHIETFSRPDGAREGSIAYAAWKYTSYLNESSSVDEERVSWLALAWDRQVQVAKFVKSKIFKHKEWKLDSSAVGVAWLDDQMLVVLNLRGQLCLFSKDGSELRRTTFVPDGLLFDDTILHHAHFFNRFGNPERHFNSSVAVRGATVYILGPSFLTVSRLLPWKERIEALKRAGDWMGALDMAMRLYDGQTQGVVDLPRTVDSIRDAIMPYLVELLLSYISYVFEYISIALPNHTGKGGESGVLIEADRSLLTQRDEQYARVGGVAVEYCVHIGRNDILFDTVFSKFAAAESGGMFLEVLEPYILKDMLGSLPPEIMQALVEHYSGKGWLQRVEQCILHMDISSLDFNQVVRLCREHGLYGALIYLFNQGLNDFRTPLEELLSVVQNTNSKDDASSGYRMLVYLKYCFQGLAFPPGHGIIPQSRLHSVREELLQFLLEESKPLTSEVFKGFNASCGKCLNICYLLWLDTEATLEVIKCAFVQDNFESRDELPSTVNTSASDNEDGIDAGRPEGQNAMVQNVVDAIIDIVGLENDVIRSVMGRTESELWPSEKDFGYLMEFVSFFVSHKRANASKRVVMHILTYLISSYDDTRTRIQKEKEVLQLFNAVPRNDWNSDFVLNLCSDAHFYQACGLIFTARNQNLAALDSYMKDKEEPFHAFIFIDKKLLELVDDEALSFHTTVISRFPELVKLSRECAFVLAIDHFCDKIQQILAELRSDRHSLFLFLKTAIEVHLSGKLDFSKLELRNKQTVELQYSSTEVEAYQQRLSNLSKLCHNPVYIDDELVELYLELQIGTVLASLPRLWSYRCCCFLAREGW

SEQ ID NO: 50101 - protein, 1071 aa, Zea Mays
MGALDMAMRLYDGQTQGVVDLPRTVDSIRDAIMPYLVELLLSYISYVFEYISIALPNHTGKGGESGVLIEADRSLLTQRDEQYARVGGVAVEYCVHIGRNDILFDTVFSKFAAAESGGMFLEVLEPYILKDMLGSLPPEIMQALVEHYSGKGWLQRVEQCILHMDISSLDFNQVVRLCREHGLYGALIYLFNQGLNDFRTPLEELLSVVQNTNSKDDASSGYRMLVYLKYCFQGLAFPPGHGIIPQSRLHSVREELLQFLLEESKPLTSEVFKGFNASCGKCLNICYLLWLDTEATLEVIKCAFVQDNFESRDELPSTVNTSASDNEDGIDAGRPEGQNAMVQNVVDAIIDIVGLENDVIRSVMGRTESELWPSEKDFGYLMEFVSFFVSHKRANASKRVVMHILTYLISSYDDTRTRIQKEKEVLQLFNAVPRNDWNSDFVLNLCSDAHFYQACGLIFTARNQNLAALDSYMKDKEEPFHAFIFIDKKLLELVDDEALSFHTTVISRFPELVKLSRECAFVLAIDHFCDKIQQILAELRSDRHSLFLFLKTAIEVHLSGKLDFSKLELRNKQTVELQYSSTEVEAYQQRLSNLSKLCHNPVYIDDELVELYLELLCQYERRSVLKFLETFDSYRLERCLHLCLDYGVTDAAAFLQERVGDVGSALDLILAGLDEKISLFISSVESTFSGVASKSIAEIKQPDIVLEMSEAHPVLDALHASIGLCQRNSQRLDPEESQSLWFQLLDSFSEPLKKLYGIKDVNGKGVKSNWSEASMEHLKEKGLSQQMRISTKQKCLNVLRKVFSQCVGEIIEAMAGYIPLPAIMAKLLSDNGNQEFGDFKLVIHRMLSMYLYEKRILETAKSVIEDDSFYTLSLLKRGVCHGFAPQTFVCCICNCSLSKEGAISAVRLFSCGHATHLQCESEQTRSSNQESKEGCPVCLSMSDTQARSKSPMFENGLMKYSGAEHEVSHGMYQIHEVDHAERSRGLQQMSRYEILNNLQKAQKSFHIETVPPLKLAPPAIYHEKIQKRTTSVGETSKHSVRSQKPQKIWQMKEKKSKEAGSHHPQKSSFLR

SEQ ID NO: 50102 - protein, 1165 aa, Zea Mays
MLVVLNLRGQLCLFSKDGSELRRTTFVPDGLLFDDTILHHAHFFNRFGNPERHFNSSVAVRGATVYILGPSFLTVSRLLPWKERIEALKRAGDWMGALDMAMRLYDGQTQGVVDLPRTVDSIRDAIMPYLVELLLSYISYVFEYISIALPNHTGKGGESGVLIEADRSLLTQRDEQYARVGGVAVEYCVHIGRNDILFDTVFSKFAAAESGGMFLEVLEPYILKDMLGSLPPEIMQALVEHYSGKGWLQRVEQCILHMDISSLDFNQVVRLCREHGLYGALIYLFNQGLNDFRTPLEELLSVVQNTNSKDDASSGYRMLVYLKYCFQGLAFPPGHGIIPQSRLHSVREELLQFLLEESKPLTSEVFKGFNASCGKCLNICYLLWLDTEATLEVIKCAFVQDNFESRDELPSTVNTSASDNEDGIDAGRPEGQNAMVQNVVDAIIDIVGLENDVIRSVMGRTESELWPSEKDFGYLMEFVSFFVSHKRANASKRVVMHILTYLISSYDDTRTRIQKEKEVLQLFNAVPRNDWNSDFVLNLCSDAHFYQACGLIFTARNQNLAALDSYMKDKEEPFHAFIFIDKKLLELVDDEALSFHTTVISRFPELVKLSRECAFVLAIDHFCDKIQQILAELRSDRHSLFLFLKTAIEVHLSGKLDFSKLELRNKQTVELQYSSTEVEAYQQRLSNLSKLCHNPVYIDDELVELYLELLCQYERRSVLKFLETFDSYRLERCLHLCLDYGVTDAAAFLQERVGDVGSALDLILAGLDEKISLFISSVESTFSGVASKSIAEIKQPDIVLEMSEAHPVLDALHASIGLCQRNSQRLDPEESQSLWFQLLDSFSEPLKKLYGIKDVNGKGVKSNWSEASMEHLKEKGLSQQMRISTKQKCLNVLRKVFSQCVGEIIEAMAGYIPLPAIMAKLLSDNGNQEFGDFKLVIHRMLSMYLYEKRILETAKSVIEDDSFYTLSLLKRGVCHGFAPQTFVCCICNCSLSKEGAISAVRLFSCGHATHLQCESEQTRSSNQESKEGCPVCLSMSDTQARSKSPMFENGLMKYSGAEHEVSHGMYQIHEVDHAERSRGLQQMSRYEILNNLQKAQKSFHIETVPPLKLAPPAIYHEKIQKRTTSVGETSKHSVRSQKPQKIWQMKEKKSKEAGSHHPQKSSFLR

SEQ ID NO: 50103 - protein, 1916 aa, Zea Mays
MPASSSPAMASQHAPPRRELDLDAFLPSSPTSSGASDADPADDDHRRAVDDLLRLLSSSDSDSDSEESSRIPSTSIQTLSRVQAPAPVAEPSPSPSPSASPSPRRSASALPSETLSSLVARTFSSNGASSSSKPLPSLFRGVRPSPKPGAALAAAAAASRAVLTPHAAAIKSRRSVSAPVEKVLEEEGSGSEGSKEFLPTGSLEAEVEEKGDSEAVADATKQTAGGNVGAELGEDKQAEVGGEENAEAIKLVEASPLDALAAEDSSGHEQGNDANLAETDQVGNQIEAVYEENEDDQTGGDNHVQSGQGMDLIAIALEESSDDEHEFERSDSILQEQVESGSLIDKVIEDRVEQLEASRKAENTEKKLKVSMKPLEWAEELEKRQASSGQHWEEGAAAQPMQLEGIGKGPPAIGYMQIEMDNPVTRVMSSPSFRSDHGSPQVLAVHRSYIAMGTSKGAVIVIPSKYSIHQADDTDAKMLFFWNQGEKTQSPVTAMCFNQQGDLLLVGYGDGHMTIWDVQKSAAAKVIYGEHTAPVVHACFIRQSKAITGDSKGVVLLHTFSIIPVINRLTVKGTQRLFDGNTGIVLSACPLVMDESFGFSNSSAQGNQTTSSSGGLGSMMGGVVGGVVGVDSGWKFFNEGSSPMEDGVVVMFIMHQHALVVRLRTNIDHVDHIETFSRPDGAREGSIAYAAWKYTSYLNESSSVDEERVSWLALAWDRQVQVAKFVKSKIFKHKEWKLDSSAVGVAWLDDQMLVVLNLRGQLCLFSKDGSELRRTTFVPDGLLFDDTILHHAHFFNRFGNPERHFNSSVAVRGATVYILGPSFLTVSRLLPWKERIEALKRAGDWMGALDMAMRLYDGQTQGVVDLPRTVDSIRDAIMPYLVELLLSYISYVFEYISIALPNHTGKGGESGVLIEADRSLLTQRDEQYARVGGVAVEYCVHIGRNDILFDTVFSKFAAAESGGMFLEVLEPYILKDMLGSLPPEIMQALVEHYSGKGWLQRVEQCILHMDISSLDFNQVVRLCREHGLYGALIYLFNQGLNDFRTPLEELLSVVQNTNSKDDASSGYRMLVYLKYCFQGLAFPPGHGIIPQSRLHSVREELLQFLLEESKPLTSEVFKGFNASCGKCLNICYLLWLDTEATLEVIKCAFVQDNFESRDELPSTVNTSASDNEDGIDAGRPEGQNAMVQNVVDAIIDIVGLENDVIRSVMGRTESELWPSEKDFGYLMEFVSFFVSHKRANASKRVVMHILTYLISSYDDTRTRIQKEKEVLQLFNAVPRNDWNSDFVLNLCSDAHFYQACGLIFTARNQNLAALDSYMKDKEEPFHAFIFIDKKLLELVDDEALSFHTTVISRFPELVKLSRECAFVLAIDHFCDKIQQILAELRSDRHSLFLFLKTAIEVHLSGKLDFSKLELRNKQTVELQYSSTEVEAYQQRLSNLSKLCHNPVYIDDELVELYLELLCQYERRSVLKFLETFDSYRLERCLHLCLDYGVTDAAAFLQERVGDVGSALDLILAGLDEKISLFISSVESTFSGVASKSIAEIKQPDIVLEMSEAHPVLDALHASIGLCQRNSQRLDPEESQSLWFQLLDSFSEPLKKLYGIKDVNGKGVKSNWSEASMEHLKEKGLSQQMRISTKQKCLNVLRKVFSQCVGEIIEAMAGYIPLPAIMAKLLSDNGNQEFGDFKLVIHRMLSMYLYEKRILETAKSVIEDDSFYTLSLLKRGVCHGFAPQTFVCCICNCSLSKEGAISAVRLFSCGHATHLQCESEQTRSSNQESKEGCPVCLSMSDTQARSKSPMFENGLMKYSGAEHEVSHGMYQIHEVDHAERSRGLQQMSRYEILNNLQKAQKSFHIETVPPLKLAPPAIYHEKIQKRTTSVGETSKHSVRSQKPQKIWQMKEKKSKEAGSHHPQKSSFLR

SEQ ID NO: 50104 - protein, 1558 aa, Zea Mays
MPASSSPAMASQHAPPRRELDLDAFLPSSPTSSGASDADPADDDHRRAVDDLLRLLSSSDSDSDSEESSRIPSTSIQTLSRVQAPAPVAEPSPSPSPSASPSPRRSASALPSETLSSLVARTFSSNGASSSSKPLPSLFRGVRPSPKPGAALAAAAAASRAVLTPHAAAIKSRRSVSAPVEKVLEEEGSGSEGSKEFLPTGSLEAEVEEKGDSEAVADATKQTAGGNVGAELGEDKQAEVGGEENAEAIKLVEASPLDALAAEDSSGHEQGNDANLAETDQVGNQIEAVYEENEDDQTGGDNHVQSGQGMDLIAIALEESSDDEHEFERSDSILQEQVESGSLIDKVIEDRVEQLEASRKAENTEKKLKVSMKPLEWAEELEKRQASSGQHWEEGAAAQPMQLEGIGKGPPAIGYMQIEMDNPVTRVMSSPSFRSDHGSPQVLAVHRSYIAMGTSKGAVIVIPSKYSIHQADDTDAKMLFFWNQGEKTQSPVTAMCFNQQGDLLLVGYGDGHMTIWDVQKSAAAKVIYGEHTAPVVHACFIRQSKAITGDSKGVVLLHTFSIIPVINRLTVKGTQRLFDGNTGIVLSACPLVMDESFGFSNSSAQGNQTTSSSGGLGSMMGGVVGGVVGVDSGWKFFNEGSSPMEDGVVVMFIMHQHALVVRLRTNIDHVDHIETFSRPDGAREGSIAYAAWKYTSYLNESSSVDEERVSWLALAWDRQVQVAKFVKSKIFKHKEWKLDSSAVGVAWLDDQMLVVLNLRGQLCLFSKDGSELRRTTFVPDGLLFDDTILHHAHFFNRFGNPERHFNSSVAVRGATVYILGPSFLTVSRLLPWKERIEALKRAGDWMGALDMAMRLYDGQTQGVVDLPRTVDSIRDAIMPYLVELLLSYISYVFEYISIALPNHTGKGGESGVLIEADRSLLTQRDEQYARVGGVAVEYCVHIGRNDILFDTVFSKFAAAESGGMFLEVLEPYILKDMLGSLPPEIMQALVEHYSGKGWLQRVEQCILHMDISSLDFNQVVRLCREHGLYGALIYLFNQGLNDFRTPLEELLSVVQNTNSKDDASSGYRMLVYLKYCFQGLAFPPGHGIIPQSRLHSVREELLQFLLEESKPLTSEVFKGFNASCGKCLNICYLLWLDTEATLEVIKCAFVQDNFESRDELPSTVNTSASDNEDGIDAGRPEGQNAMVQNVVDAIIDIVGLENDVIRSVMGRTESELWPSEKDFGYLMEFVSFFVSHKRANASKRVVMHILTYLISSYDDTRTRIQKEKEVLQLFNAVPRNDWNSDFVLNLCSDAHFYQACGLIFTARNQNLAALDSYMKDKEEPFHAFIFIDKKLLELVDDEALSFHTTVISRFPELVKLSRECAFVLAIDHFCDKIQQILAELRSDRHSLFLFLKTAIEVHLSGKLDFSKLELRNKQTVELQYSSTEVEAYQQRLSNLSKLCHNPVYIDDELVELYLELLCQYERRSVLKFLETFDSYRLERCLHLCLDYGVTDAAAFLQERVGDVGSALDLILAGLDEKISLFISSVESTFSGVASKSIAEIKQPDIVLEMSSSSA

SEQ ID NO: 50105 - protein, 1612 aa, Zea Mays
MPASSSPAMASQHAPPRRELDLDAFLPSSPTSSGASDADPADDDHRRAVDDLLRLLSSSDSDSDSEESSRIPSTSIQTLSRVQAPAPVAEPSPSPSPSASPSPRRSASALPSETLSSLVARTFSSNGASSSSKPLPSLFRGVRPSPKPGAALAAAAAASRAVLTPHAAAIKSRRSVSAPVEKVLEEEGSGSEGSKEFLPTGSLEAEVEEKGDSEAVADATKQTAGGNVGAELGEDKQAEVGGEENAEAIKLVEASPLDALAAEDSSGHEQGNDANLAETDQVGNQIEAVYEENEDDQTGGDNHVQSGQGMDLIAIALEESSDDEHEFERSDSILQEQVESGSLIDKVIEDRVEQLEASRKAENTEKKLKVSMKPLEWAEELEKRQASSGQHWEEGAAAQPMQLEGIGKGPPAIGYMQIEMDNPVTRVMSSPSFRSDHGSPQVLAVHRSYIAMGTSKGAVIVIPSKYSIHQADDTDAKMLFFWNQGEKTQSPVTAMCFNQQGDLLLVGYGDGHMTIWDVQKSAAAKVIYGEHTAPVVHACFIRQSKAITGDSKGVVLLHTFSIIPVINRLTVKGTQRLFDGNTGIVLSACPLVMDESFGFSNSSAQGNQTTSSSGGLGSMMGGVVGGVVGVDSGWKFFNEGSSPMEDGVVVMFIMHQHALVVRLRTNIDHVDHIETFSRPDGAREGSIAYAAWKYTSYLNESSSVDEERVSWLALAWDRQVQVAKFVKSKIFKHKEWKLDSSAVGVAWLDDQMLVVLNLRGQLCLFSKDGSELRRTTFVPDGLLFDDTILHHAHFFNRFGNPERHFNSSVAVRGATVYILGPSFLTVSRLLPWKERIEALKRAGDWMGALDMAMRLYDGQTQGVVDLPRTVDSIRDAIMPYLVELLLSYISYVFEYISIALPNHTGKGGESGVLIEADRSLLTQRDEQYARVGGVAVEYCVHIGRNDILFDTVFSKFAAAESGGMFLEVLEPYILKDMLGSLPPEIMQALVEHYSGKGWLQRVEQCILHMDISSLDFNQVVRLCREHGLYGALIYLFNQGLNDFRTPLEELLSVVQNTNSKDDASSGYRMLVYLKYCFQGLAFPPGHGIIPQSRLHSVREELLQFLLEESKPLTSEVFKGFNASCGKCLNICYLLWLDTEATLEVIKCAFVQDNFESRDELPSTVNTSASDNEDGIDAGRPEGQNAMVQNVVDAIIDIVGLENDVIRSVMGRTESELWPSEKDFGYLMEFVSFFVSHKRANASKRVVMHILTYLISSYDDTRTRIQKEKEVLQLFNAVPRNDWNSDFVLNLCSDAHFYQACGLIFTARNQNLAALDSYMKDKEEPFHAFIFIDKKLLELVDDEALSFHTTVISRFPELVKLSRECAFVLAIDHFCDKIQQILAELRSDRHSLFLFLKTAIEVHLSGKLDFSKLELRNKQTVELQYSSTEVEAYQQRLSNLSKLCHNPVYIDDELVELYLELLCQYERRSVLKFLETFDSYRLERCLHLCLDYGVTDAAAFLQERVGDVGSALDLILAGLDEKISLFISSVESTFSGVASKSIAEIKQPDIVLEMSEAHPVLDALHASIGLCQRNSQRLDPEESQSLWFQLLDSKLFNSASRKTMRAYCSSQSH

SEQ ID NO: 50106 - protein, 877 aa, Zea Mays
MLVVLNLRGQLCLFSKDGSELRRTTFVPDGLLFDDTILHHAHFFNRFGNPERHFNSSVAVRGATVYILGPSFLTVSRLLPWKERIEALKRAGDWMGALDMAMRLYDGQTQGVVDLPRTVDSIRDAIMPYLVELLLSYISYVFEYISIALPNHTGKGGESGVLIEADRSLLTQRDEQYARVGGVAVEYCVHIGRNDILFDTVFSKFAAAESGGMFLEVLEPYILKDMLGSLPPEIMQALVEHYSGKGWLQRVEQCILHMDISSLDFNQVVRLCREHGLYGALIYLFNQGLNDFRTPLEELLSVVQNTNSKDDASSGYRMLVYLKYCFQGLAFPPGHGIIPQSRLHSVREELLQFLLEESKPLTSEVFKGFNASCGKCLNICYLLWLDTEATLEVIKCAFVQDNFESRDELPSTVNTSASDNEDGIDAGRPEGQNAMVQNVVDAIIDIVGLENDVIRSVMGRTESELWPSEKDFGYLMEFVSFFVSHKRANASKRVVMHILTYLISSYDDTRTRIQKEKEVLQLFNAVPRNDWNSDFVLNLCSDAHFYQACGLIFTARNQNLAALDSYMKDKEEPFHAFIFIDKKLLELVDDEALSFHTTVISRFPELVKLSRECAFVLAIDHFCDKIQQILAELRSDRHSLFLFLKTAIEVHLSGKLDFSKLELRNKQTVELQYSSTEVEAYQQRLSNLSKLCHNPVYIDDELVELYLELLCQYERRSVLKFLETFDSYRLERCLHLCLDYGVTDAAAFLQERVGDVGSALDLILAGLDEKISLFISSVESTFSGVASKSIAEIKQPDIVLEMSEAHPVLDALHASIGLCQRNSQRLDPEESQSLWFQLLDSKLFNSASRKTMRAYCCKPVIIWGKFFPNCSQFLSCS

SEQ ID NO: 50107 - protein, 1628 aa, Zea Mays
MPASSSPAMASQHAPPRRELDLDAFLPSSPTSSGASDADPADDDHRRAVDDLLRLLSSSDSDSDSEESSRIPSTSIQTLSRVQAPAPVAEPSPSPSPSASPSPRRSASALPSETLSSLVARTFSSNGASSSSKPLPSLFRGVRPSPKPGAALAAAAAASRAVLTPHAAAIKSRRSVSAPVEKVLEEEGSGSEGSKEFLPTGSLEAEVEEKGDSEAVADATKQTAGGNVGAELGEDKQAEVGGEENAEAIKLVEASPLDALAAEDSSGHEQGNDANLAETDQVGNQIEAVYEENEDDQTGGDNHVQSGQGMDLIAIALEESSDDEHEFERSDSILQEQVESGSLIDKVIEDRVEQLEASRKAENTEKKLKVSMKPLEWAEELEKRQASSGQHWEEGAAAQPMQLEGIGKGPPAIGYMQIEMDNPVTRVMSSPSFRSDHGSPQVLAVHRSYIAMGTSKGAVIVIPSKYSIHQADDTDAKMLFFWNQGEKTQSPVTAMCFNQQGDLLLVGYGDGHMTIWDVQKSAAAKVIYGEHTAPVVHACFIRQSKAITGDSKGVVLLHTFSIIPVINRLTVKGTQRLFDGNTGIVLSACPLVMDESFGFSNSSAQGNQTTSSSGGLGSMMGGVVGGVVGVDSGWKFFNEGSSPMEDGVVVMFIMHQHALVVRLRTNIDHVDHIETFSRPDGAREGSIAYAAWKYTSYLNESSSVDEERVSWLALAWDRQVQVAKFVKSKIFKHKEWKLDSSAVGVAWLDDQMLVVLNLRGQLCLFSKDGSELRRTTFVPDGLLFDDTILHHAHFFNRFGNPERHFNSSVAVRGATVYILGPSFLTVSRLLPWKERIEALKRAGDWMGALDMAMRLYDGQTQGVVDLPRTVDSIRDAIMPYLVELLLSYISYVFEYISIALPNHTGKGGESGVLIEADRSLLTQRDEQYARVGGVAVEYCVHIGRNDILFDTVFSKFAAAESGGMFLEVLEPYILKDMLGSLPPEIMQALVEHYSGKGWLQRVEQCILHMDISSLDFNQVVRLCREHGLYGALIYLFNQGLNDFRTPLEELLSVVQNTNSKDDASSGYRMLVYLKYCFQGLAFPPGHGIIPQSRLHSVREELLQFLLEESKPLTSEVFKGFNASCGKCLNICYLLWLDTEATLEVIKCAFVQDNFESRDELPSTVNTSASDNEDGIDAGRPEGQNAMVQNVVDAIIDIVGLENDVIRSVMGRTESELWPSEKDFGYLMEFVSFFVSHKRANASKRVVMHILTYLISSYDDTRTRIQKEKEVLQLFNAVPRNDWNSDFVLNLCSDAHFYQACGLIFTARNQNLAALDSYMKDKEEPFHAFIFIDKKLLELVDDEALSFHTTVISRFPELVKLSRECAFVLAIDHFCDKIQQILAELRSDRHSLFLFLKTAIEVHLSGKLDFSKLELRNKQTVELQYSSTEVEAYQQRLSNLSKLCHNPVYIDDELVELYLELLCQYERRSVLKFLETFDSYRLERCLHLCLDYGVTDAAAFLQERVGDVGSALDLILAGLDEKISLFISSVESTFSGVASKSIAEIKQPDIVLEMSEAHPVLDALHASIGLCQRNSQRLDPEESQSLWFQLLDSKLFNSASRKTMRAYCCKPVIIWGKFFPNCSQFLSCS

SEQ ID NO: 50108 - protein, 304 aa, Zea Mays
MYGNLSDSGCYEIFLASCSICYQGITKEYAIAHFPDKTTNVTLETPGKSKKWHPKFYKRDESRKNLLMGQWLDFVRDNHVQEGDICLFLPTKDEIRHTFMVYILHETTHSRCGAGFQRVGPCLGGASSAKMASEVHIEDEPTAGEHVSSDSDMPENSHEPLESGDSDDPFEPPYFVPCRSPLSKSQKRMVEQRVRAIRSEVPICVAVMKNNNVGIAQRWMLELCSRYASVYLPTKGQNILLQCKGKTWEAKMMFHNGRRWFLNGGWPDFARGNGLRVGDMCLFELKKKKSTLTMAVHIIRKEQF

SEQ ID NO: 50109 - protein, 665 aa, Zea Mays
MNTVCEVCGDIGYRQLLLCCRDCKRCAVHQYCLDKVVYEASLIKWFCYECLQRRGEVTRISSLEKLSSERPLSQVHSRSPVQQLITKSVESVRDAGPWRDRKNESIATKYPSLNRTYPSIKKHTKKKPIVKPMGNCTNRKVRMAKVTTHTSAEASRSCETIGTESSKSNHGKNQQVDHANPVALNTEQSFPLIVNSLGTLGDNHQYHLLETTEGLACKFKKVPQSLAAPLKRLEKRDNVVLGSNNLGSSCFTADLGSSVLGKSGDKSNRMKDIGANLSSKHNDHGNQANQHTLVGSKNMEGKSVKAKHTVVDAHKNTSWTVDSLINVKDKSEVYGDSNRDILNDVTVQLDHRASNELLPRSTATNIPQLATLENDVVDTVMPYSPNGGCEESFSCPGIKNTPSVRERSVDPINISSDSHDTIEASESSERFMECQKASLCRRRKTVKMAMVSSSSEESGEDTISENVSLGYVLACRSSLSKAQKKRVTKLIQEIQPEFTVFISIMRMSNVKLPGPLLGITKEYAIAHFPDKTTNVTLETPGKSKKWHPKFYKRDESRKNLLMGQWLDFVRDNHVQEGDICLFLPTKDEIRHTFMVYILHETTHSRCGAGFQRVGPCLGGASSAKMASEVHIEDEPTAGVLYLNPKREWLSSECELSDLKFPFVWQ

SEQ ID NO: 50110 - protein, 699 aa, Zea Mays
MNTVCEVCGDIGYRQLLLCCRDCKRCAVHQYCLDKVVYEASLIKWFCYECLQRRGEVTRISSLEKLSSERPLSQVHSRSPVQQLITKSVESVRDAGPWRDRKNESIATKYPSLNRTYPSIKKHTKKKPIVKPMGNCTNRKVRMAKVTTHTSAEASRSCETIGTESSKSNHGKNQQVDHANPVALNTEQSFPLIVNSLGTLGDNHQYHLLETTEGLACKFKKVPQSLAAPLKRLEKRDNVVLGSNNLGSSCFTADLGSSVLGKSGDKSNRMKDIGANLSSKHNDHGNQANQHTLVGSKNMEGKSVKAKHTVVDAHKNTSWTVDSLINVKDKSEVYGDSNRDILNDVTVQLDHRASNELLPRSTATNIPQLATLENDVVDTVMPYSPNGGCEESFSCPGIKNTPSVRERSVDPINISSDSHDTIEASESSERFMECQKASLCRRRKTVKMAMVSSSSEESGEDTISENVSLGYVLACRSSLSKAQKKRVTKLIQEIQPEFTVFISIMRMSNVKLPGPLLGITKEYAIAHFPDKTTNVTLETPGKSKKWHPKFYKRDESRKNLLMGQWLDFVRDNHVQEGDICLFLPTKDEIRHTFMVYILHETTHSRCGAGFQRVGPCLGGASSAKMASEVHIEDEPTENMFRRTVICQKILMNLWRAETRMIHLNLHTLYHAGVLYLNPKREWLSSECELSDLKFPFVWQ

SEQ ID NO: 50111 - protein, 66 aa, Zea Mays
MTWQSLLPGWSKCQLVCAFDQLTRSITGLIGIDLPARELVDADFDRELVDVDFDRSIPIICCYTTI

SEQ ID NO: 50112 - protein, 112 aa, Zea Mays
MVPPSVVADVWMESVVQVPSRANETEEFEEHAEKAKTLPATTTNESKLVLYGLYKQATVGDVSTGRPGIFSLKERAKWDAWKAVEGKSKDEAMADYITKVKQLLEAAAASTS

SEQ ID NO: 50113 - protein, 663 aa, Zea Mays
MFGSTNPFGQSSTSPFGNNNSFGTPQGFGQSSTAANNPFAPKPFGSPTTPFGAQTGSSLFATTSTGAFGQQQSAPAFGTTSTGAFGQQQSTPTFGTPSSSQFGSSTPAFGASPTPAFGATSSGSLFGQKPSFGGFGSSPSQSSPFGSTFQQTQPTFGTTPAFGTMTTPAFGTSTPAFGTTTAPAFGATTTPAFGSTSTSLFGASSTPVFGSTAFGTSATGFGTSGTTAFGVSSTTTGFGSSSTPSFGTSASVFGFGSSPSFGQTTVSSGSTPFGTTPSPFGAPVPAFGSQTAAPAFGQPQFANQAGGTRIKPYSQTPDVDSATSGTQPAAKLDSISAMPEYKDKSHEELRWEDYQRGDKGGPNTSGTQAVAPSFPSLIQQNAPNPFSTSNPFSTNNPFAPKPAPTITSPFNTSFNNASVTSSSPFTSSPSTTMFGQTGVSTLSASNSPSLFGNTNPAPVTSSLFATSVTNNPSPFGTGSLFANTQSAPLFPSAFAQPTSSTPAFSSGSLFGSTNPGSLFSSSGPSLFSTPTFQPSAPAQTSNLFSFQPPIQPASTGGFPGFSNTTNQALMGQPTPTLSSMVMQPAPVSNPFGMLPAMPHMSIGNGGSSPSVQYGISSLPVVEKLLPSRSLSMAFPRHLAQRRIKLLPRKYNPISDGKFLLLFI

SEQ ID NO: 50114 - protein, 776 aa, Zea Mays
MYNGIGLQTARGSGTNGYVQTNKFFIKPRSTSGGGPGGPHRPPLPDATGADGGGLGGMRKPNKEILEHDRKRQVELNLLVLRDALEEQGYTEDEIEERVEEARKAAEAEAAAVAAAEEAGSVSGAGRPPLPGRGFTDTQSHHVAARKEKQLETLRAALGLNVEDAKKGDVESDVESGELVPGKYYEELVTVGENNSKDSKNAKKSKKKKENDKRRQPKSSRKSKYDSDLDHDHNTKTKKSSHHDSDDDSETDYDEKKEKKYNKKHRLGSDDDSENDRKKAKRGKNSGSESDTDSGHGKKKTKHVKSDQGGRKKIQVKNSHHDSESDTDSSYGKKTEHARNDRGERKKIPVNNSRHDFKSDIDSGYGKKTEDAKSEHYERKKLLVKSSRHDSESDTDSGYGKKKMEHIKNERDERKKVLVKNSRHDSESDTDSGYGKKKMEHAKIERDERRKVPVKSSRYDSESDTDSGYGKKKMEQTKNVRDEKRKVPLKSSHHDSESDADIDYRKKKIEHTEGIRDERKKIPARSSRHDSDSGADNNGKNKRPLQSSRHDLEDEKPRSRNYNYGSRASEHEKHMLKKDVQEKRKVATSSDSSDYSSSLSSSDSDTSADSYEEQKRSQAGGRRNELTTQRQKEEERKELEKQQKREVEKKELDKQKQREEERMEMEKEKKRQREREEERQREREQYERKGGNDVERDNKRKLIDDRYDPNSSRDREEGYRDSQNRDDNRRQEEHGQHNRYMDSHDSKRSRHDSHYHSRRDFEQRYSRDEHRDRRRH

SEQ ID NO: 50115 - protein, 515 aa, Zea Mays
MRRHQAKTQTTTTTIYVVYMGEKKHDDPSLVVASHHATLASVLGSKDEALSSIVYSYKHGFSGFAAKLTQPQAEELKKYPGVVSVKPNTYHHVHTTRSWDFLGMSYGQQQSSSWSSSSRLLRKAKYGEDVIVGVIDSGIWPESRSFDDSGYGYGPVPKRWKGVCQTGQAFNASNCNRKVIGARWYAADVSEEDLKNEYRSPRDANGHGTHTASTIAGSPVRNASHHGGGLAAGIARGGAPRARLAIYKACHAVGGSASCGDASILAALDAAIGDGVDLVSLSLGGLGEIYQSLHAVAAGITVVLAAGNDGPVEQSLNNALPWGITVAAATMDRTFPTVVTLGDGEKLVGQSLYYHNRSAAASTSDDDDFAWRHLILFPSCDEKNLGSENITGKIVICRAPVFWSDYPPPRQLSRASRAAIAGGAKGIIFEQYSTNSLDTQVVCQGHLPCVVVDRESIFTIQSSDSTLPTVYPLPAMWPRFRRRRPWSDPRSPRRESRRSRRGAPVLSFPPYSSPT

SEQ ID NO: 50116 - protein, 532 aa, Zea Mays
MKPRRTQTDLKFVSSSPHEAFRWVNSFADQQCYVNLLPHPMASSKKHSSELIQFDAMFDPYVKCRSPPKILVILNPRSGHGRSSKVFHGKVEPIFKYLRNFGIVCVGGDGIVNEVLNGLLCRDDQNMSASVPIGIIPAGSDNSLIWTVLGVKDPISAALSIVRGGLTPIDVFSVEWIQSGTMHYGTTVSYFGFVSDVLELSEKYQKHFGPLRYFVAGFLKFLCLPKYSFELEYLPVSDVNGAEHKILVGQEKVDASDLYDDVIRRSRAECLPRASSLSSIDSIMSTGIMSGAELEVCSPRANNEPSEVVRGLDPKSKRLSLGRASTFKEPEEVLHPHSHGTSTPSWRRSKSKSRTEKAKPGLSATHDAKSSKVNADKEDTSSTISDPGPVAVWDSGPKWDDEPKWDNQPNWEPETSIELHSPREDIELGLTKELVPSLDERWTVRKGRYLGVLVCNHSCKTVQSLSSQFGKHISLPNVEYVKVKSVRLKAGPNTHDGCGIDGELLHVKGQVRCSLLPQQCQLMGRPVKNPVQ

SEQ ID NO: 50117 - protein, 491 aa, Zea Mays
MEVVKTTHAGHAKSLVSTIDFSTCPDGIVCVGGDGIVNEVLNGLLCRDDQNMSASVPIGIIPAGSDNSLIWTVLGVKDPISAALSIVRGGLTPIDVFSVEWIQSGTMHYGTTVSYFGFVSDVLELSEKYQKHFGPLRYFVAGFLKFLCLPKYSFELEYLPVSDVNGAEHKILVGQEKVDASDLYDDVIRRSRAECLPRASSLSSIDSIMSTGIMSGAELEVCSPRANNEPSEVVRGLDPKSKRLSLGRASTFKEPEEVLHPHSHGTSTPSWRRSKSKSRTEKAKPGLSATHDAKSSKVNADKEDTSSTISDPGPVAVWDSGPKWDDEPKWDNQPNWEPETSIELHSPREDIELGLTKELVPSLDERWTVRKGRYLGVLVCNHSCKTVQSLSSQVVAPKAEYDDNCLDLLLVGGSGRLRLLRFLVLLQFGKHISLPNVEYVKVKSVRLKAGPNTHDGCGIDGELLHVKGQVRCSLLPQQCQLMGRPVKNPVQ

SEQ ID NO: 50118 - protein, 484 aa, Zea Mays
MCAEIHMGPILVVGVLDFMMVLSMSLKQCDTKSSRRVEKREISKITDATIMLLEEMKAHGIKLKGETYHCLLNALATTRQTDQAYVVFSGTSVAGLVHRDSVQFRPIPWFFFRLCSEVGYRSYNWTERISEPTEQLMMVLSSLAWSGTQTVTTLKLQDQIQQQDIMVLIDSGSSHTFISDKLRPMLSGVEPLVNPITVQLAIRQVIPCHYHLPLAKWSMSGCHFSADLKFLLIPSFGQVITCNYQVPSAEWTMPVRSFSVDLTFLLLPLFDLVVGMDRLQRYSPMPVNWSNKWMIIPYQGATRCLQGVHPSVPTGAIVELWLLSATSQQNRFPDSKMPTINTQVQDIPSQFLDIFEDPVGLPPSRPGDHNIPLLLGAHMFTVCLYQYTPALKDHDTQAQELLTQLAIVSAYPNSPFTMQLVHGPSDLVRDGCFACNLGGRRSAEESLPISDRLGTSGVRRRGECQHQPFDRAGLAGCGTGAVER

SEQ ID NO: 50119 - protein, 262 aa, Zea Mays
MLIPDGLYMLEIDRLLQPGGYWVFSKPPVNWKSTYNISNQGTIDKQDNQVAMDDMSKRLRWTKVSEEGTISVWRKPSCNLHCDQEANAKLAGLPPLCTGEDPDSAWYANISMCMTCIPRAETFNGCAGGAMKKWPKRLGAVPPRIASGEIEWLSIQRYRYDTLVWEKRVNFYLTYLNFLSNGTYRNVMDMSAGSGGFAAAMSKHPVWVMNVVPANTTENALGVIYERGLIGTYTDWCEAFSTYPRTYDLIHGNGIFSSHIHK

SEQ ID NO: 50120 - protein, 1215 aa, Zea Mays
MGSLADPYALRCVSDLPPPFRSMFRYFNSLQSECFHVCFFSDVNMVISAPTGSGKTVLFELCILRLLSRFLSPDWRFNLNKGTLKTIYIAPSKALVQEKLRDWNMKLGPLGINCLEMTGDGEFCNTKAIHDADLILTTPEKFDSMSRHGIKSGRLGFFCDIALVLIDEVHLLNDPRGAALEAVVSRIKMLSRHDNMKSFPLANVRLIAVSATIPNIEDIGYAPAKNDFLFERKYKWNMDYRYTDATFKGEVCTYFLFYEKRCNPVPFSVGFHNGGLCLKDRGLVEGLFLKGDLQVLCTTNTLAHGVNLPAHTVVIKSTQFFNKEKGLYVEYERSMVLQMCGRAGRPPFDDTGTIIIMTRKETVHLYENLLNGCEMVESQLLSCAVEHLNAEIVQLTVSDIILAVEWIKCSYLYIRIRKNPENYGVKRGTPQDLLEKQIQDICVDKIHELVEYGLIWTDEGAFVLQPLEPGRLMAKFYLKFDTMKLIVKASGYCSLEDLLHVICHSAEITWIQLRRNDKKILNDINADKDGRLLFHIVMKNGKRKKRVQTREEKIFLLANDCLTGDSLIHDLSLNQETNAICSNGCRIAKCMREYFIYKKNYRSAINSMILANSLHQKLWESSPFLLKQLPGIGIVTAKALKTAGVYSFETLATADARKIELATGRNYPFGNHIKESMSSLPPKIDIHIEETGNRLGKSTITVTLTRLSQAVKSSKRNCADMVVASEEDNVILFHENISPYSVKVFVPCPQNARVTLKVDLIFEEYVGLDVHKKHVVSREDGLYVTKEHGIDNLEPTYNIPSEICLVSSRTTRTSRSQSHTEQNPLSKEVYVIEDDGAAVSAVSALEKADDAVGTIKFNNLASLEVPSFDLLPEEEYGAPGPAEAECKGATDSTIFDHIRKKSKDFPTLMLSKSMDCSYEPLILKKMKISRDQFGVKHGCLHAGEATTMDFDPVEPRVSPTNTAEKFRGILGRSSERSRMLFGKMDSPFEKSEMLGTTPAESSLRFAGGKDSSLEKNKTLIRTPAENSLQIAARGKESKVSKVLTNLDKSPLGFAGGKESKMSNVPSTSAENSLQFAARRVRSSEKSKMLTTPYESSQAFLGEKDSPSEKSKILINSPVEYPFKKGSPGENPFKTCSPVENSLKFAAQRDSPSEKRKSCISNPLPPFQQAVQCTKQVGVAGQPFDIKEYCKEILRSRNDSQGGDPFAGYKSIFSFL

SEQ ID NO: 50121 - protein, 457 aa, Zea Mays
MHNLQSFASVMRRRLLSENDNLAALLGNDDKSSDLQNLKEIQRSVDVNSVGSGSFSAFPGIYGQALAPLLPEDIDATTVQQLSTDVTQTTNVEMSGTTYSKWAYIITIPAAILLISLIVLILVLRKRGRAPVAPWKTGLSGPIQKALVTGAQKLNRAELEVACEDFSNIINTFPTCTVFKGILSSGVEIGVVSTTISSSKDWSRSAESCFKKKIDRLSRVNHKNFINLLGYCLENEPFTRMMVFEFAPHGSLSQHLHVKEFEHLDWAARMRVIMGVAYCLQYMHHELSPPMAIHDVRSDTTFISDDYAAKIADVGVWNELAAKAKAGKEDGSSRAEAPPDLPSNAYCFGALMIETISGRVPDPYDHKPICSWASEHLKDKNYGKLVDASLKEHKESELEAVCEVIQECIDPDPTRRPSMRDVVGKLRDALGISPEAAAPRLSPLWWAELELLSVKST

SEQ ID NO: 50122 - protein, 386 aa, Zea Mays
MAREATNAWPRPSPSARKRSKGKRAVLSPAPPTQAAATEMEAEASVPATDYVYDALPGLHLAFSPEETLDDAAAGQDEDDATATYAVFRNEITEAGDVLADIPAADFFSLDVSTSASVEPEPEPEPPSPAPTAAAATPSISRALEDQPPQGSERAWFRGGRRFRSPMLQLHKEILDFCDFISPSTEEQSSRAAAVQDVSDVVKHIWPQCKVEVFGSFRTGLYLPTSDIDVVIFESRVKTPQVGLYALAKALSQKGVAKKIQVIAKARVPIVKFVERKSGIAFDISFDIDGGPQAADFIKDAVKKLPALRPLCMILKVFLHQRELNEVYTGGIGSYALLTMLITHLQCVFFVLSWSGEEKIFSGIIGPRSTIWEFFWSGFLIFMDAS

SEQ ID NO: 50123 - protein, 148 aa, Zea Mays
MLQWAIGNSDPDKLREKAAELVKLSAEELLKRQMEIKELMEKFKAPSDAELIKIAIADLNNSSLEDRQRALQELLILVEPIDNANGTWQCRRRNKNYFSMGAGQSQSGQCSCSKPDQWIWSFGQISEDGLFQFWTRSCKGIVHYILFD

SEQ ID NO: 50124 - protein, 607 aa, Zea Mays
MHARGSRQEQGRPLVPRLTTQRSHECGIGRRRDDTWVIYHPPIRRLAAGRRAREYEAMTLASTDKVVLGCVAFSIFWVLAVFPSVPFMPVGRTAGSLLGAMLMVLFRVMTPDEAYKAIDLPILGLLFGTMVVSIFLERADMFEYLGGALAWRSRGSKDLLLRVCLVSAVASALFTNDTCCVVLTEFILKLARQNGLPPQPFLLALASSSNIGSAATPIGNPQNLVIAVQSGITFGQFLVGVFPAMAVGVAANTCVLLCYFWRYLAAPEKDQEAGPDAVVADEEVTSHRFTPARMSHASSMNGGFDGDCVSEPMRRSESLGRADALRSRSYNSEGDIQVSIRSMRASSLSQEMVDVSTVGDGPRKITRSTSQQRSVIIEDAPPEADDDAHKGKDGDDDDVKVKRWKVVVWKSAVYLTTLGMLVALLMGLNMSWSAITAALVLLALDFTDAQACLEKVSYSLLIFFCGMFITVDGFNKTGIPNALWELVEPYSRIDSARGTALLALVILVLSNVASNVPTVLLLGSRVAASAAAISPESQKKAWLILAWVSTVSGNLTLLGSAANLIVCEQARRAQFFGYNLTFWSHLRFGLPSTIIVTAIGLLIVVSY

SEQ ID NO: 50125 - protein, 550 aa, Zea Mays
MTLASTDKVVLGCVAFSIFWVLAVFPSVPFMPVGRTAGSLLGAMLMVLFRVMTPDEAYKAIDLPILGLLFGTMVVSIFLERADMFEYLGGALAWRSRGSKDLLLRVCLVSAVASALFTNDTCCVVLTEFILKLARQNGLPPQPFLLALASSSNIGSAATPIGNPQNLVIAVQSGITFGQFLVGVFPAMAVGVAANTCVLLCYFWRYLAAPEKDQEAGPDAVVADEEVTSHRFTPARMSHASSMNGGFDGDCVSEPMRRSESLGRADALRSRSYNSEGDIQVSIRSMRASSLSQEMVDVSTVGDGPRKITRSTSQQRSVIIEDAPPEADDDAHKGKDGDDDDVKVKRWKVVVWKSAVYLTTLGMLVALLMGLNMSWSAITAALVLLALDFTDAQACLEKVSYSLLIFFCGMFITVDGFNKTGIPNALWELVEPYSRIDSARGTALLALVILVLSNVASNVPTVLLLGSRVAASAAAISPESQKKAWLILAWVSTVSGNLTLLGSAANLIVCEQARRAQFFGYNLTFWSHLRFGLPSTIIVTAIGLLIVVSY

SEQ ID NO: 50126 - protein, 194 aa, Zea Mays
MPSDPLLPRKENLQISPPSPPTICARWPSTGYAHVTVVGSQVSPNSKRPRFERRPQQDVRICASPSSRGRRRWIQGHQRRPSPSSPNGRRGDVLLVHTKCAVHTKLLANDFLLFSMAASSARHRCLRPCCANKCSKKREIERQMATAKLFAEEQLAEVVALKRGIFVGTGCFAEKKIPIMEAGGRISILSKKHL

SEQ ID NO: 50127 - protein, 881 aa, Zea Mays
MAAKMAGAVQVLKDDTVKRTPMARPSNGREGKPIRLLSNHFSVKLRGVDAVFYQYSVCIKSEDDKVVDSKGIGRKVIDKLLQTYCSELDGKDFAYDGEKCLFTVGPLPQNNFEFTVILEETSSRAAGGSPVHESPTQANKKRVKRSHLAKKFSVDISYAAKIPLQSVALALRGSESEHGQDVLRVLDVVLRQQQAKRGCLLVRQSFFSDDSRNLVDLTGGVSGCRGLHSSFRTTIGGLSLNMDVSTTMVVTPGPVIDFLVTNQNVRDIRDIDWPRAKKMLKNLRVKAKHNNMEFKIIGLSDQPCSRQMFPMKVRNGNIEIKSVDITVQDYFKSKQVELTMPYLPCLDVGKPKRPNYLPIELCHMVSLQRYTKALSSQQRAMLVEKSRQKPQERMRVVTDAVKSNMYDDDPILSSCGIEIEKQLTRVDARVLSAPALVVGNSEDCIPNRGRWNYNNKRLFDPVKIERWAIVNFSARCDMSRISRELINCGRSKGIFIECPHSLVDEDSQSRRCSPVERVEKMFEKVKASLPGPPEFLLCLLPERKNCDIYGPWKKKNLHEMGIVTQCIAPSNKMNDQYFTNVLLKINAKLGGMNSKLALEHRQMIPVVTQIPTLILGMDVSHGSPGRADIPSIAAVVGSRCWPLISRYRASVRTQSPKVEMIDSLFKPLDDGKDDGIMRELLLDFYQTSQQRKPKQIIIFRDGVSESQFSQVLNVELNQIIKAYQSMGQGDLPKFTVIIAQKNHHTKLFQADSPENVPPGTVVDSGIVHPRQYDFYMCAHAGPIGTSRPTHYHVLLDEIGFSADNLQKLVLSLSYVYQRSTTAISVVAPICYAHLAAAQMGQFMKFEEFADTSSGSVNSSSPPSIPELPRLHADVCSSMFFC

SEQ ID NO: 50128 - protein, 327 aa, Zea Mays
MQTRKKGAAKNAVGYHANPKTSRPSRRATQSTVAEKKVSDLITSSSKKQRPVGVTSKKHSKGGRKLLVSCDTTDAGNDAPQAQHSDGVADDRPNDSIFSPTYHHHKEGGVNNLSKGLEEQTTHVHGSKEASLKSGSNLACNTHDGINDHSGTLKLQSAGQSTLLEVDEYSELGNLSSEVSAIYLAMQQSKLECIDEQSQDSTSTEGYGEAEETEEYDDFDPYSFIKDLPDLSMVVPKFRPVLLPKQTRSCPTMTLVLDLDESTQYMFDAAPISRNSWIGLPACLRQLFSLLVKAFMRSNFSMFLIPKESCSVIVFIVNLVSMWRETT

SEQ ID NO: 50129 - protein, 274 aa, Zea Mays
MQTRKKGAAKNAVGYHANPKTSRPSRRATQSTVAEKKVSDLITSSSKKQRPVGVTSKKHSKGGRKLLVSCDTTDAGNDAPQVPPSVFPDLQAQHSDGVADDRPNDSIFSPTYHHHKEGGVNNLSKGLEEQTTHVHGSKEASLKSGSNLACNTHDGINDHSGTLKLQSAGQSTLLEVDEYSELGNLSSEVSAIYLAMQQSKLECIDEQSQDSTSTEGYGEAEETEEYDDFDPYSFIKDLPDLSMVVPKFRPVLLPKQTRSCPTMTLVLDLDGMNY

SEQ ID NO: 50130 - protein, 573 aa, Zea Mays
MSLRSGGRQLSFELLAGDLTADDPDDISPRSLPDTSSDGQRRRRRRSKRKRGFRSPPIQEAVSEGEQQPRVEGGGNSAAAFRVLDLKSTAETVCESSDAERSAASCVTYVGVELRQRSVSGGGRVVAASADDGTSSCGSSTRESAAAAAAVADVAAMAWRPEANGGMKKKLEKESSLDWEKYMKDNNKILGEFERLDKSPFRYFLGELYGGNSLRSTIAVGNEKKRQRVYNTMFHVPWRCERLIVAGFFVCLDSFLSLLTIMPARIVVTIWRVMKTRKFRRPNAADLSDYGCFVVLALGVASLQMIDISLIYHVIRGQGTIKLYVVYNVLEIFDKLCQSFGEDVLQVLFNSAEGLSACSTDNVTFELMRFILDEAIAVVAFVVHSFVLLAQAITLSTCIIAHNNALLALLVSNNFAEIKSNVFKRVSKENLHNLVYYDIIERFHIMAFLLFVLAQNILEAEGPWFDSFLIPVAYSEFLEDLCKQILNDKPDDRQKDLTFIPLAPACVVIRVLTPVYATLLPAGPFIWRIFWILLWSVLTYFMLAIFKIIVGLILRCLANWYVNLRLTRKQHVD

SEQ ID NO: 50131 - protein, 406 aa, Zea Mays
MKQLHRQSSISKQHRPHHHRTSLSRTLASYLLREQRLLFVLLGFLLASSFFFLYPHSAAGSSSATNITAAFARKNPRSSGASSSARRLPVGVRKPSLRIVVTGGAGFVGSHLVDKLLARGDSVIVVDNFFTGRKDNVAHHLGNPRFELIRHDVVEPILLEVDQIYHLACPASPVHYKFNPIKTITNVMGTLNMLGLAKRVGARFLLTSTSEVYGDPLEHPQKESYWGHVNPIGVRSCYDEGKRTAETLTMDYHRGAGVEVRIARIFNTYGPRMCLDDGRVVSNFVAQALRKQPMTVYGDGKQTRSFQYVSDLVDGLVTLMESDHIGPFNLGNPGEFTMLELAQVVKETIDPGASVEFKPNTADDPHMRKPDISKAKSLLNWEPQVSLKQGLPRMVSDFQKRIMDEK

SEQ ID NO: 50132 - protein, 402 aa, Zea Mays
MATTAAGYGCCLAGLPPFPLLPGILSTRLRREPSPPRVALVASSPKLRAPAPRLRVSCGPRRLASSSGKANSDAVPSPTEATIDIKLPRRSLLVQFTCNACGERTKRLINRVAYERGTIFLQVQSLILRCLQMYMDQKEVVDALSHHSKIEPCITELVWRQLEHQNPLFFKAYYMRLMLKNQIMVFNKLLQDQFEVINKEFSSGIPSMSLPNGSNSNLLKQNPCFLPETAPGSAMPDGIMHNGSSRGIINGTPSGDQLLNASKDLHGLHNGIDASTSLQSDQNAAAVLYGVDNETSATIKTESCYSSNADFAFCGNTFLESCQSIGDASGGGSFSSSELNGQPLNDSILDMESSSFSFLNQMPQSFIFPDLGDDFNQSAEITQFLTPETNFSDSTGGDHTAG

SEQ ID NO: 50133 - protein, 98 aa, Zea Mays
MLQCILALHVSPAVLSSLRLLWCSFSRSALACHHCRLARCSPTPCLADGCRLLRSLHRLHHILAIWHRVPSGSDFGYDSLSQYRCLQVPLHDVLHRRV

SEQ ID NO: 50134 - protein, 118 aa, Zea Mays
MQPTTVDEEIQVCQSPSFKDKTVEELLDIDPDIFPITTMKFSCVRLISYINNKFILFAISFFSSTIQPQGYICTITISLLVQDSGWWFPSCTKCNKSLAQTSTGYRYTPCDWADIKFR

SEQ ID NO: 50135 - protein, 617 aa, Zea Mays
MPSTAEDFPAIRKLGKLFRLTEVYLWDDSYGAGPHDGQKNGRSAEAALVDSHTDKTCNEASNSTDKGHFFVEDLELVNLMGSLGLPVSFSTSKVNKNTCNKGKKKGRQAPLKAANTQINDAVRICINTEDRENSVESLDAMEQTHSCNLFVTPLGQNEPSRDDTDKRLREDSSCVEEQEESGCSTIYSAGKAPGCDAKNHLTELGAFELSDNLANSAKEEYSIQENQAYESVLLDSEEMSRNDCVDDESTHSCVGIYQDERVSTRGDQTSEETLSVPHDYNDVGREASLSLAEPSSIDEHAQSSANNFYYDYGEWRVIWDPFYNRYYFYNIQTQESTWCPPEGLEDFASYCSPDTTKELAELGSQCSSMAPQENNLATHVNHLEAQEQDHCIHDLSDIPVEKPIYQSMITTSDKAQHTENKYSDSTTTVLEMNQEVASTKTKKRIIHAKTWQGTSLMTSSSTGLSGVGGNAIQFAKKCKHVIAVDIDPQKIDCAHHNASIYGVNDHIDFIVGDFIHIAPHLKGETAFMSPPWGGPDYAKVDVYDMKSMLIPCDGYSLFKLGTMIASRVVMFLPRNIDLNQLADMSLSVDPPWAVEVEKNFLNGKLKAITAYFEEQDR

SEQ ID NO: 50136 - protein, 661 aa, Zea Mays
MPSTAEDFPAIRKLGKLFRLTEVYLWDDSYGAGPHDGQKNGRSAEAALVIKHAMKHPIALTKAISLLKIWNWSISWVLWGFLFHSAQNKNTCNKGKKKGRQAPLKAANTQINDAVRICINTEDRENSVESLDAMEQTHSCNLFVTPLGQNEPSRDDTDKRLREDSSCVEEQEESGCSTIYSAGKAPGCDAKNHLTELGAFELSDNLANSAKEEYSIQENQAYESVLLDSEEMSRNDCVDDESTHSCVGIYQDERVSTRGDQTSEETLSVPHDYNDVGREASLSLAEPSSIDEHAQSSANNFYYDYGEWRVIWDPFYNRYYFYNIQTQESTWCPPEGLEDFASYCSPDTTKELAELGSQCSSMAPQENNLATHVNHLEAQEQDHCIHDLSDIPVEKPIYQSMITTSDKAQHTENKYSDSTTTVLEMNQEVASTKTKKRVRRSRSYHSCQDMAGNVSNDIIKYWAQRYSLFSLFDSGIKMDEVGWFSVTPEPIAKHHASRVGAGVMIDCFTGVGGNAIQFAKKCKHVIAVDIDPQKIDCAHHNASIYGVNDHIDFIVGDFIHIAPHLKGETAFMSPPWGGPDYAKVDVYDMKSMLIPCDGYSLFKLGTMIASRVVMFLPRNIDLNQLADMSLSVDPPWAVEVEKNFLNGKLKAITAYFEEQDR

SEQ ID NO: 50137 - protein, 153 aa, Zea Mays
MWFLLGAVGNSLLSMVLKKMLNHERPAPALRSGPGMPSSHAQSIFYAATILALSLYYWLGTNYLTMILGPATLSVAAYLSWLRVSRRLHTLNQVMAGAVVGSVVGALWFVLWHSLVQEAFASSLLVRIAVVLGSSAFCVGFVIYMIRHWLKDE

SEQ ID NO: 50138 - protein, 486 aa, Zea Mays
MGSARVKKMSKRHYCRSRSKMEKNCMANQYWVRDKVVPMLRENPNLGAGALVKKLQEKYLIQVSYCVAWKGKELALDELMGKWEDSFDHIYAFKAAIEKESPGSVVEIQTEKVGEKIRFCKMFVAFKACIDGFLQGCRPYLGIDSTVLTGRWKGQLASAVAIDGHNWMFPVALGLFESESKDSWKWFMEKLQTAIGSPHGLVISTDAGKGIDSALTNAFNNGVEHRECVRHLFKNFQKRFHGEVFERNLWPAARAYRRTVHDKHYNIMKIASPAAIKWLEDTHKHLWARCYFSTASKCDYVTNNIAETFNCWIKDEKSLPPVELIDRIRQKILEKFFVRKNLADKLTGTILPSVMKQLHDAGRGLVGYVVHKGPDHTAEVSGVHKDLTPWRHTIDLVNRECSCKKWQLTGLPCTHALSVIGCFRNLKLEDYVDSYYSVEKFKTAYVGKIPTLTDKTEWEQPEVGYKVWPPILKRAAGSQGQEGSLE

SEQ ID NO: 50139 - protein, 822 aa, Zea Mays
MTKRERKDPGRMTSLGSLTKQPNLSWVPPGMDRSSACRIAIRVGAYWEQHRYEYHISRDVLLIRDRDLICFMDLVADLRAEIALETARKLSLHYWDKIEARYKEVDCDATLLHALSMYWEFRRLKLAATVLDEPCIESQHSAVTYTQQNEMPISLVSNANENEVAVPSSSIHVEKEQFAAGTSDQVASNLIHAANSEGVANSEDVANSEGGNAWGQYDEDEYVGADDEKATYKELFSDIEESGSEYIPDSDDEDHDDCVVDDNGDPLFVTTTDLENPNIAVGVRFEDGPTFKKAIRQWAILHEVEIGAHYSESSRYRGFCKAKKCNWRIHASQLPDGKTWQVKKMSKRHYCRSRSKMEKNCMANQYWVRDKVVPMLRENPNLGAGALVKKLQEKYLIQVSYCVAWKGKELALDELMGKWEDSFDHIYAFKAAIEKESPGSVVEIQTEKVGEKIRFCKMFVAFKACIDGFLQGCRPYLGIDSTVLTGRWKGQLASAVAIDGHNWMFPVALGLFESESKDSWKWFMEKLQTAIGSPHGLVISTDAGKGIDSALTNAFNNGVEHRECVRHLFKNFQKRFHGEVFERNLWPAARAYRRTVHDKHYNIMKIASPAAIKWLEDTHKHLWARCYFSTASKCDYVTNNIAETFNCWIKDEKSLPPVELIDRIRQKILEKFFVRKNLADKLTGTILPSVMKQLHDAGRGLVGYVVHKGPDHTAEVSGVHKDLTPWRHTIDLVNRECSCKKWQLTGLPCTHALSVIGCFRNLKLEDYVDSYYSVEKFKTAYVGKIPTLTDKTEWEQPEVGYKVWPPILKRAAGSQGQEGSLE

SEQ ID NO: 50140 - protein, 355 aa, Zea Mays
MMLAYMDRATAAAEPEDAGREPATTAGGCAAAAATDFGGLASAMPAAVVRPASADDVASAIRAAALTPHLTVAARGNGHSVAGQAMAEGGLVLDMRSLAAPSRRAQMQLVVQCPDGGGGRRCFADVPGGALWEEVLHWAVDNHGLAPASWTDYLRLTVGGTLSNGGVSGQSFRYGPQVSNVAELEVVTGDGERRVCSPSSHPDLFFAVLGGLGQFGVITRARIPLHRAPQAVRWTRVVYASIADYTADAEWLVTRPPDAAFDYVEGFAFVNSDDPVNGWPSVPIPGGARFDPSLLPAGAGPVLYCLEVALYQYAHRPDDVDDDDEEDQGMSDSPRRVSPAGFGDGGAASCQTKPP

SEQ ID NO: 50141 - protein, 513 aa, Zea Mays
MMLAYMDRATAAAEPEDAGREPATTAGGCAAAAATDFGGLASAMPAAVVRPASADDVASAIRAAALTPHLTVAARGNGHSVAGQAMAEGGLVLDMRSLAAPSRRAQMQLVVQCPDGGGGRRCFADVPGGALWEEVLHWAVDNHGLAPASWTDYLRLTVGGTLSNGGVSGQSFRYGPQVSNVAELEVVTGDGERRVCSPSSHPDLFFAVLGGLGQFGVITRARIPLHRAPQAVRWTRVVYASIADYTADAEWLVTRPPDAAFDYVEGFAFVNSDDPVNGWPSVPIPGGARFDPSLLPAGAGPVLYCLEVALYQYAHRPDDVDDDDEEDQVGPQHVGGAAGGRGLLPGGAAAVLPERRAGGGRAGGAERRHPPRLPRQRLRLQGLLPELPRRGRLGAPLRRRQVEALRGPQGPVRPAGDPRAGPEDLPSGPGVRRRVEQGGRTSQLPAKTGGGGGGEADGSPLLLPDLPCQDTSRRAFRRQKPRRGDQRGSAGPPPPPPPRVLYWRVGVLQVVPF

SEQ ID NO: 50142 - protein, 842 aa, Zea Mays
MDDVCEGKDFSFPEQEEGVIELWAKLDAFHEQLRRTEGGEEFVFYDGPPFATGLPHYGHILAGTIKDVVTRHQSMRGRHVSRRFGWDCHGLPVEFEIDKALGITNRQQVFDLGIGKYNETCRSIVTKYVSEWEAMVTRTGRWIDFKNDYKTMDLNFMESVWWVFAQLWEKDLVYRGFKVMPYSTGCKTALSNFEAALDYRTVPDPAVMVSFPIVGDADNAALVAWTTTPWTLPSNLALCVNANLTYAKVKDKSNGAVYVIAESRLGQLPVKAKASGKKQAPSKGSNIEAVQDGLDKESYELLSKIPGVSLVGLKYTPLFDFFIELQGTAFRVIADNYVTDDSGTGVVHCAPAFGEDDHRVCLAAGIFETAGLVVAVDDDGCFIEKISDFKGRYVKEADKDIINAVKDKGRLISKGSIEHSYPFCWRSGTPLIYRAVPSWFVKVEKIKDQLLECNKETYWVPDYVKEKRFHNWLEGARDWAVSRSRFWGTPLPLWISQDGEEIVVMDSIEKLEKLSGVKVTDLHRHYVDDITIPSKRGPEFGVLKRVDDVFDCWFESGSMPYAYIHYPFENRELFEKNFPGNFVAEGLDQTRGWFYTLMVLSTALFGKPAFKNLICNGLVLAEDGKKMSKSKKNYPPPKDLIDEFGADALRLYLVNSPVVRAESLRFKRTGVFAVVKDVFLPWYNAYRFFVQNAKRLEVEGLASFSPMEQVVLLKSSNVLDHWINSATESLVSFVHQEMDAYRLYTVVPYLVKYIDYLTNIYVRLNRKRFKGRTGEEDCRISLSTLYHVLVTTCVVMAPFTPFFTEVLYQNLRKVSSNSEESIHFCKFPSTTGEGNGGCASRQ

SEQ ID NO: 50143 - protein, 338 aa, Zea Mays
MDSIEKLEKLSGVKVTDLHRHYVDDITIPSKRGPEFGVLKRVDDVFDCWFESGSMPYAYIHYPFENRELFEKNFPGNFVAEGLDQTRGWFYTLMVLSTALFGKPAFKNLICNGLVLAEDGKKMSKSKKNYPPPKDLIDEFGADALRLYLVNSPVVRAESLRFKRTGVFAVVKDVFLPWYNAYRFFVQNAKRLEVEGLASFSPMEQVVLLKSSNVLDHWINSATESLVSFVHQEMDAYRLYTVVPYLVKYIDYLTNIYVRLNRKRFKGRTGEEDCRISLSTLYHVLVTTCVVMAPFTPFFTEVLYQNLRKVSSNSEESIHFCKFPSTTGEGNGGCASRQ

SEQ ID NO: 50144 - protein, 1185 aa, Zea Mays
MVVSTLCSRLPLLPNIIVLLLFTTISDSTNSNSDLNALLSFKSLITKDPMGALSSWDGDASNRSAPHFCRWNGVTCSSDQHGSHVTALRLRAFGLEGNISQSLGNLSHLQTLDLSNNNLEGEIPSSIGNLFALHFLNLSVNHLSGNVPQSIGRLSELEILNFRDNDIVGSIPSSVLNLTGLTMLSATENYMTGRIPDWLGNLTDLTDLNLAWNNFSGQIPQALGLMHFPDVIQQFERTCRNASESIRSAATGKLRVVEEKLMQQNAQLLLDEAASWSLWHIYGKEHEELSGELLVPPITSHQEACRFVAADITAQLCLRIILWLEGLASEALDLEKKVRGPHVGSYLPSSGVWHRTQRYLKRNNADSTIVKHVDFDAPTREGAQLLPDDKTCSPLPTHWAAALCPCIGSGALHRWMFLPNIVTGNDAITAGILLDIKPVQAVQHPQRWWNWVRQLVPHEEQQPQPREWRKKQDELLLEDIWTLLRAGRLEEASDLCRSAGQAWRVATLCPFGGINMFPSLNALHKNGKYRTLQAMELESGVGRQWRLWKWASYCASEKIAEQDGGRYEMAVYALQCSNLKRVLPICTDWESACWAMARSWLDVQVDLELSQYQTSRPEKQLDDDMNGAQSSVGPESWPYHVLDQQPHDLTALLQKLHSSDLVHETVSRACREQHRQIQMNLMSGNISHLLDLLWSWLSPAEENHNNTARPLDDPEMIRFGAHIVLVLRHLFSDGMDDELDEKLVTVGDLIINMYVRYLFSEDQEELVGIYASQLQHDLCITLFVEMMELRLNSSLHTMYKLFLSAVEYLPFSSDNVSKACFEEIIERVLSRSRQTKPTKYDGDFSDVAHQHHLQSLQKAMVIQWLCFTPPSSIPDFQMISWKLLIRALTHSNTLFREFSLISMRRVPELPAGPHKLLAILAEPLKQKENLISREDPEHEYYSLDATYRSWLKIEMMNAAVSPEMLSAEEKGQAVAAAKETLNLACSLLRNATSCTALTSALYSTVSEDDVLHRLLKVDVQVSSRDPCCIEVALRCLAAEGDGYGLHEANDGGLLAAVMAAGFKGELSRFQPGVSMAISRLDAWYSDRSGSVESTAAYIIRGLCRRCCLPETILRSMQACIALSAAGDDLDYSLDKCDELVELVGSAESGMMHLFSQQQLQEFLIFEREYLICTMEFEEDRLPCDG

SEQ ID NO: 50145 - protein, 928 aa, Zea Mays
MANPGLGLGLAPPGAEPSAGAPPSSRRAPRLAKRRHAPASSRSRMPQTSAGIWNPFGGGGGTDRQTGGFVFGAASAVSQQPLEPAVSVASPTEAPFVFGSVRESLPRFDEGSPASSKLPDKMEKLNLRTSSEVDDGLGQGRDRKDGSSVFGADISGLFSSNKESNVLQEKLTQLNLGHKEPLQSKKRDSANGVPQAFVFGGNGAGSFADCKNKAAPGAHSDDPSSVHGTDAKGMAGKSMQFNIGSQAPSRGGGIDRTNGAPEAFTFRSTTLSGHVDNINNVDSGANTSSSTVAKCVCDADFPLEKITRLCIGSDMPLHETKSGYQPKVFTFGSGGIPGAVFGKETGSTSDRSSEFLSANSNTSSSSSDFFSTANSNVSNSANGTYCLPPEKTPDLNAGDRVMSQSLEGDNSNCPTETFLFERNETRSSVSHSASIAMDDGGNFVNDENTDTCSSAHSTVECAGALPEKMTKLGIGCRIPHHSRKDETATDPPEVYVFGCNLSSFSSAQTSSKSNDRTTPEFCFQSKTGATSGYGAVPQTKVQDSYPFTILNNSCTFSTFENAVPAFSFGTLNAETETAPDDPFSFSVKHDLPGYSRETLFGLDSIKSAYKDKREACKGKMKNKRPTRLKQHAQLHQVISKEACTSGEASDLAGDCSPMDCSPYPAESEHVPTEAYVASDQPVHIGDTVISNGNTSCAEDDVVSAAEHLVTDADLLMFGDEGRGPKLDASESNFGSSVSSFEGDQSNASQHSFTNIGQNCNENTYRTPHDFVEAAAFQSNSSNFSGLNFRFGVSSSPQISAAAQRRSTRRKLRTKGSLASKPSTIDSLEQPKSSQDTKGMQFFCEASKNEDSVKAQQSRDSSTSVALETCETWRTRGLLYPWNKLCYPQWRFWTMFPCIDAVLQQPCSYKNVTWHDVGGASGLFDCYIN

SEQ ID NO: 50146 - protein, 1129 aa, Zea Mays
MANPGLGLGLAPPGAEPSAGAPPSSRRAPRLAKRRHAPASSRSRMPQTSAGIWNPFGGGGGTDRQTGGFVFGAASAVSQQPLEPAVSVASPTEAPFVFGSVRESLPRFDEGSPASSKLPDKMEKLNLRTSSEVDDGLGQGRDRKDGSSVFGADISGLFSSNKESNVLQEKLTQLNLGHKEPLQSKKRDSANGVPQAFVFGGNGAGSFADCKNKAAPGAHSDDPSSVHGTDAKGMAGKSMQFNIGSQAPSRGGGIDRTNGAPEAFTFRSTTLSGHVDNINNVDSGANTSSSTVAKCVCDADFPLEKITRLCIGSDMPLHETKSGYQPKVFTFGSGGIPGAVFGKETGSTSDRSSEFLSANSNTSSSSSDFFSTANSNVSNSANGTYCLPPEKTPDLNAGDRVMSQSLEGDNSNCPTETFLFERNETRSSVSHSASIAMDDGGNFVNDENTDTCSSAHSTVECAGALPEKMTKLGIGCRIPHHSRKDETATDPPEVYVFGCNLSSFSSAQTSSKSNDRTTPEFCFQSKTGATSGYGAVPQTKVQDSYPFTILNNSCTFSTFENAVPAFSFGTLNAETETAPDDPFSFSVKHDLPGYSRETLFGLDSIKSAYKDKREACKGKMKNKRPTRLKQHAQLHQVISKEACTSGEASDLAGDCSPMDCSPYPAESEHVPTEAYVASDQPVHIGDTVISNGNTSCAEDDVVSAAEHLVTDADLLMFGDEGRGPKLDASESNFGSSVSSFEGDQSNASQHSFTNIGQNCNENTYRTPHDFVEAAAFQSNSSNFSGLNFRFGVSSSPQISAAAQRRSTRRKLRTKGSLASKPSTIDSLEQPKSSQDTKGMQFFCEASKNEDSVKAQQSRDSSTSVALETCETWRTSGNKAYANGHFTAAEDYYTRGINSVTHNGVSGQCSRALMLCYSNRAATRMSLGMMWEALQDCLTATSIDPTFLKAKVRAAKCQLALGDLEDASMSYMSCLNSNTESSDPKIFAEASDGLEGVKRVTDWVSQCKEFLERRTSPEATKALELISNALHICPHSDSVKEMKAEALLMLRRYEEVIQLCQESVNLTERNSVLFKDNGEPKNSRVSERMQFSGRYWRPYLICKSYFLSGKLDEALELLKKHEQVTPVKER

SEQ ID NO: 50147 - protein, 965 aa, Zea Mays
MANPGLGLGLAPPGAEPSAGAPPSSRRAPRLAKRRHAPASSRSRMPQTSAGIWNPFGGGGGTDRQTGGFVFGAASAVSQQPLEPAVSVASPTEAPFVFGSVRESLPRFDEGSPASSKLPDKMEKLNLRTSSEVDDGLGQGRDRKDGSSVFGADISGLFSSNKESNVLQEKLTQLNLGHKEPLQSKKRDSANGVPQAFVFGGNGAGSFADCKNKAAPGAHSDDPSSVHGTDAKGMAGKSMQFNIGSQAPSRGGGIDRTNGAPEAFTFRSTTLSGHVDNINNVDSGANTSSSTVAKCVCDADFPLEKITRLCIGSDMPLHETKSGYQPKVFTFGSGGIPGAVFGKETGSTSDRSSEFLSANSNTSSSSSDFFSTANSNVSNSANGTYCLPPEKTPDLNAGDRVMSQSLEGDNSNCPTETFLFERNETRSSVSHSASIAMDDGGNFVNDENTDTCSSAHSTVECAGALPEKMTKLGIGCRIPHHSRKDETATDPPEVYVFGCNLSSFSSAQTSSKSNDRTTPEFCFQSKTGATSGYGAVPQTKVQDSYPFTILNNSCTFSTFENAVPAFSFGTLNAETETAPDDPFSFSVKHDLPGYSRETLFGLDSIKSAYKDKREACKGKMKNKRPTRLKQHAQLHQVISKEACTSGEASDLAGDCSPMDCSPYPAESEHVPTEAYVASDQPVHIGDTVISNGNTSCAEDDVVSAAEHLVTDADLLMFGDEGRGPKLDASESNFGSSVSSFEGDQSNASQHSFTNIGQNCNENTYRTPHDFVEAAAFQSNSSNFSGLNFRFGVSSSPQISAAAQRRSTRRKLRTKGSLASKPSTIDSLEQPKSSQDTKGMQFFCEASKNEDSVKAQQSRDSSTSVALETCETWRTSGNKAYANGHFTAAEDYYTRGINSVTHNGVSGQCSRALMLCYSNRAATRMSLGMMWEALQDCLTATSIDPTFLKAKVRAANLHWAILKMHQ

SEQ ID NO: 50148 - protein, 541 aa, Zea Mays
MASEMSKNVKALDEQEVTSQHSRAQTSAAAEEQQQQQAVDPLARQSSIMSLTLEELQNSLCEPGRNFGSMNMDEFMANIWNTEEFQAATAGCNKEGAYREPVPVATTTGTTVHKQKLEASRSTHQLGDDGARNEIHDYTSREEVRRASRKAPSKQRHCTRSCNASASTHHRPPARSLHSPPPARTNNSSPMSAAASSATACFLSPLPPPRRPRHFLRHLARAAVTKPEPASASSLALPSPWLWARRLCELVPAEAGGRLLSSAAGSLIVALASASLVLGDTGAASAFVVSTPRKLQADELATVRLFQENTPSVVYITNLAVRQDAFTLDVLEVPQGSGSGFVWDKSGHIVTNFHVIRGASDLRVTLADQSVYEAQVVGFDQDKDVAVLGIKAPKNKLRPIPVGVSADLLVGQKVYAIGNPVGGIVDQLIKFGRVTRPILGIKFAPDQSVEQLGLSGVLVLDAPPNGPAGKAGLQATKRDPYGRLILGDIITSVNGTKVTNGSDLYRILDQCKVGDTVTVEVLRGDHKEKIPVVLEPKADES

SEQ ID NO: 50149 - protein, 727 aa, Zea Mays
MPDGRYSSLVDILQGCDFLTELVQRIEFCLDSTLSLVLDRASKKLEIIRRERRRNIEMLESLLKDTAAKIFLAGGIDNPLVTKRRSRMCVGVKASHKHLMPGGIVLSSSGSGATYFMEPQDAVELNNREVKLSGEERAEELVVLSLLTSMIADSQLKIRNLMDNVLELDLACARGSYALWTNSVRPTFTDSYTISQSDQCNDYSIYIEGIRHPLLLEQSLMAEESTTEASEMPVPLDMWVKKNARIVVISGPNTGGKTATMKTLGLSSLMSKAGIFFPAKGRPRIPWFDQVLADIGDHQSLEHSLSTFSGHISRLRKIVEMVSKDSLVLIDEIGSGTDPAEGVALSTSILKYLASRVNLAIVTTHYADLSRLQSVDNRFENAAMEFCVETLQPTYRILWGSTGNSNALSIAKSIGFDQKVLDRAQEWVEKLLPDKQKERQGLLYDSLVDEKELLESQANEAASVLSQVEGLYNEIRLEADDLESRVAALRARETQKVQQELKVVKYRMDTIIKNFEAQLKNSKLEQYNSLMRKAEAATASVVAAHQPSEIAFDDDDENRISFVSQVGDKVYVQGLGGETMATVVETLGEDESCMVQYGKIKVRVKRSRIKLVQRGTNNEATTSSSVKAKGRTPKQRSATTTDVSFGPVVQTSKNTVDLRGKRVSEAAFELRMAVDACRPYQVLFVVHGMGTGAVKDCAIDVLRKHPRVARFEDESPLNYGCTVAYIQ

SEQ ID NO: 50150 - protein, 636 aa, Zea Mays
MEEAPPSSSPPSPPVMLLLLLLLIVSSPCSSSALLSPKGVNPEVQALMTIKNTLKDPHGVLKNWDQDSVDPCSWTTVSCSLENFVTGLEVPGQNLSGLLSPSIGNLTNLETILLQNNNITGLIPAEIGKLTKLRTLDLSSNHLYGAIPTSVGNLESLQYLRLNNNTLSGPFPSASANLSQLVFLDLSYNNLSGPVPGSLARTFNIVGNPLICGTNNAERDCYGTAPMPPYNLNSSLPPAIMSKSHKFAIAFGTAIGCIGLLVLAAGFLFWWRHRRNRQVLFDVDDQHMENVSLGNVKRFQFRELQSATGNFSSKNILGKGGFGYVYRGQFPDGTLVAVKRLKDGNAAGGEAQFQTEVEMISLALHRNLLRLYGFCMTATERLLVYPYMSNGSVASRLKASSTTSIRFLSSLYSTMIATPTGKPPLDWVTRKRIALGAGRGLLYLHEQCDPKIIHRDVKAANILLDDCCEAIVGDFGLAKLLDHRDSHVTTAVRGTVGHIAPEYLSTGQSSEKTDVFGFGILLLELVTGQTALEFGKTANQKGAMLDWVKKTHQEKKLDVLVDQGLRGGYDKMELEEMVRVALLCTQYLPGHRPKMSEVVRMLEAGEGLAERWEASHSQSQSADSHEFKAVELSGPR

SEQ ID NO: 50151 - protein, 163 aa, Zea Mays
MTRLPPMHHRSLPRLGRGGVAVAAGSDDGLAVTEQQVAKLMEEDMGTAMQYLQGKGLCLMPVSLASAISSATCHMRPPVGGPGLGVAAAAAHHMAAMRLPPHAMNGGAGAGADAVPASPSMSVLTAQSAMAPNGAGGGTDGEGSHSQQQQRHHPKDAASVSKP

SEQ ID NO: 50152 - protein, 149 aa, Zea Mays
MIAAAAKDIGAAKLNGEDPRDFLAGLASNIGLDKFRAATLVCASVATRTRTCFLQCWALEIQGKRPEALDELVKICRIHYIFPPEDNSAEMEMVAAGLEKNLHVAERVHLLYLYRSVCTAGNLKTAAQALGLSLPNENTEGFAMPIRQP

SEQ ID NO: 50153 - protein, 184 aa, Zea Mays
MQLRQLCKISGVKVCFDTENARDSFYRAAVNFVLDDCSRAAKDIGAAKLNGEDPRDFLAGLASNIGLDKFRAATLVCASVATRTRTCFLQCWALEIQGKRPEALDELVKICRIHYIFPPEDNSAEMEMVAAGLEKNLHVAERVHLLYLYRSVCTAGNLKTAAQALGLSLPNENTEGFAMPIRQP

SEQ ID NO: 50154 - protein, 460 aa, Zea Mays
MARRGMNPTVSDQAIRLDLIAKSRGIAAAEKYFLDLPETSKTHLTYGALLNSYCKELMTEKAESLMEKMKELNFAFTAMSFNSLMTMYTKVNQAEKVPSIIQDMKADDVLPDVFTYNVWMRALAALKDIPGVERVIEEMKRDGRVAPDWTTYSNLASIYVEAGMFEKAEAALKELEKRNTSNDIEAYQFLITLYGRTQNLVEVHRVWRSLKRDNPRMANMSYLNMIQVLANLKDLSAAEACFKEWEARHIHPPKTNTKGSGADNTPGADPKSPSNPPNNQSGTKETGDETAEDLQPKHPKYDIRVANAMIKAYITEGMLDKAVAMKKRAKMRGGRLNAKTWEIFMEHYLKTGDLKMAHWCADRAMKKGHSSGRIWVPPPAVTETLMSYFEENKDVDGAERYVGALKKVQKDLGAPVFEPLVRTYAAAGKKFPGMRQRLKIENVEVGEGTAQLLDSICADQ

SEQ ID NO: 50155 - protein, 561 aa, Zea Mays
MPESSRGVVSSNAFDEDAKKRAADTVDDGALADGKGKKRREDLCCEICEGDHVPLDCQVYNGPKPHAILCGFGSGESGFFQIPNFGSKGLIPLKESSTAFITAKEGTITAELVKSELARLIPVRWTWAVQSHANGFVVPFPSKVELQRMVAMKFVHAVDGKSIMVIQELEQKIEPVQHLEKAWVNIYGVPYEIRSFLPLWAVGTIIGATQKVDLRYTKQMGVVRLLVGVTNVDKIPESVDIVVGEGLYEIFFKIDKVCKDGVWSEYYYPSDKKDDDFESKDEDFDGLDDIQPKFDDTTRDTVMKDVSGSKVDNSSNVQHATQQNCDIRQTDALEKCLVAVNRSSVFRENVAAPTAVAHGVVYDNKWTEAEGTIILNAKQTAQKRGEFSRTGGPSSYLASMVQLNEVSRTVGREGHVDADAFNLNTICHESGKKAAAPFVVVCTADASEGSVDANSICLNSFPGVPASAAAVYPISLEDINTDLNSVAIEFSPATNIHAAIPNVSVEQIHEHVRGAEHSVAQLTSPGGADGSGALVENFSLQDMETLISCIHAWTMVVVPSI

SEQ ID NO: 50156 - protein, 1478 aa, Zea Mays
MSDAEPPPAMEVATLTTPDVMLGEDYKDIEAIEGQKDYETCYGGGGSVIVANELVGISEDPNQPDIATADEPEEGADVEGQTNDISAAVSTSKLVDDPMEVGMQTEVSAAADDLIEVGAALVSSAEDCTAVAACLVNDDCNIIFPGGVHRSDDQTDQEFGGNSLDADEVALLVNDIQDDSARMDMDVSAHGDVHAQDRESSQLDVATALLNEVGTELVEAGDHAVQECTNMDMRIQAGDNNEAERVGTIADTATNEEHRHMGEVTMTRDDSEKHDVAGGVDVPDERIQMGRGGLPGDDNEQKEVATADEDRVEDEGMQVDAVNITGDMVEEGRIAVEYIAGEAVIGEGGIDVPEEKAAQIDRAGNDIPEEEGLQMGEAGLIGSDNGLKEAVIADHDGVEVNAIPTEATGTTNDDDENNTIVGEDVAEAVNDITGDDVPDEEAAHMEDDDDDEPPPLVEKKGGGRRKRGRPSSKVQGVVKPSVKRKDEEEVCFICFDGGDLVICDRRGCPKAYHPSCVNRDDDFFKSKGRWNCGWHICSNCQKPARHMCYTCTFSLCKACMKDAKFSCVRENKGFCDTCMNTVMLIENREEAADPMEVDFDDKGSWWYLFKDYWLNLKTNLSLTVEEISAAKSRKSGELPDTNDEVNSESSSGRNLESNTSKKRGRKRSKQAAINEGSEGKASTRKSAKRDLSGIHDVQTSSGKKVRKLSRRSLSSQHSSKDSESVGTSTSSAEEDSWASKELINFVAHVRNGDKSVISRYDVQPLLLDYIKRNKLRDPRRKSQIICDSLLQSLFAKERVGHFEMLKLLESHFFMSEVSPIDADENHGGVVDPDPSQDADGNSEASVVMSSEKRRKSRKYDLRHQPNLDDYAAIDNHNIGLMYLRRNLMEELIGDVDTFDEKVVGSFVRIKIPGTGQRQDIYRLVQIVGTGRSAEKYKYGKRTTDITLEILNLDKREAVTIDIISNQEFTEEECKRLRQSIKYGFIPRLTVGEVQEKARVLQTLKVNDWIESEKMRLGHLRDRAIFTLRECVEKLRLLSTPEERARRLNEELEIHADPAMDPYYESPEEQEQEIEKSSFNKSRGSFLRKDGNPVPPGKGDGRNAAQRDSKTNWESNRNTWAESSSHMESPLPRRSTFSSQGESAGYTSKSESPNTGAQTVKLEGTTRSAPQGSPGASSGILANNICSGAKTAPQSAINESEKIWLYMDPSNKIQGPFSIIQLRKWNSNGYFPPSLKIWKASEKQDDSILLTDALAGKFEKDLPPWEPPHVSLFQINKTPLEQSTIAGEQTPKSVVAKSFSSSNQRHGYSSTNLGTTMIHSGTQGYYGMQNSHAAYTSQHSLTGSWNATSSQFGVAVNPVTPTQPAMGSFSGQNIVSAENMGHLTPGTAPAAANAEMVNSDLTSQKQISYLPQTDGILADDIESKSGEDVSHGKVSSSAKAIGPLGAQLGQGQLNTQQHEDDVNTIRCISTTFIVNHCWQ

SEQ ID NO: 50157 - protein, 727 aa, Zea Mays
MGSRGRMLFDLNELPAEVEEAAAAVVPKESAAVVPKESAAVVPQEAVVVALQEAAVVVSQPQKSLRVPTTYAPTLFQRGEGSQSQGILNNNAFKHASIGSGFQPFVRNSKDSNNTKEPMKVEDNHNSSIASLSMVNNQITDSAASKVETCNKVSQAIEREEGEWSDADGISENAGSSNKDEFTGTASTNLKKESQESEPHLIKSGDVTKDDTAAECSDAEKVDASEDRVHGSTGSDNMQNSECKGNQPGDDLDLCNRSRDVKGVEANYALRFASNPAKRPKLNEHKEAMLGKKRARQTVFINVEDAKQAGTMKTSTPRRQSSFPAPIVTRTVKEASRGAGEKAAEKQSQQAIRDQRQPEMMGSERSNSADPSDQYTESNGDAELGTQGRSKKMNAEDPASDGYQQPVQRQASFKQSMDLKQPKSRSFSSQRTFLTGTNNADQKPASKRSIISKKQTFVNNVQDSSVERLIREVTNDKFWHNPEEAELECVPGSFESAEEYIRVFEPLLFEECRAQLYSSYEESLEAVGRDAHVAVRVKTVDRRERGWYDVVVLPIHEQKWNFKEGDVAILSFPRPGSAAQSGRSSRRAMGSNEDAVSECGRLVGTVRRHMPIDTRDPIGAIIHFYLGDSFDSNSEANVLNKLQPRSTWYLTGLGSLATTQREYVALHAFRRLSVQSISRSIKSNHQSCQTASPQISLTISIVASMVLNCRQFIGLQHIQLLAQTMVS

SEQ ID NO: 50158 - protein, 1009 aa, Zea Mays
MSDSTIKVFGALRMSVKMLLMWNSRMTIDGGRELGVGTSLLEGSNLIVLKEASVIHSNANLGIHGQGVLNLSGQGDTIEAQRLILSLFYNILVGPGAVLRGPLINGSRDEMAPKLNCEDESCPMEIFHPPEDCNLNSSLPFTLQICRVEDIDVSGLVQGTVVNFNRARSVTVQTSGTISATGLGCRGGIGRGKMLSSGFSGGGGHGGKGGDGIYNGGHVEGGSAYGHADLPCELGSGSGNVSGSSTAGGGIIVMGSLEQSLPNLSLSGSIEANGGNFTGLMSHATIGGPGGGSGGTILLFVRTLLLKKDSVLSSVGGVGGNGSGGGGGGRIHFHWFDIPTGDDYIPFATIKGTILARGGVSEGQGFSGENGTITGKDCPKGLYGTFCKECPSGTYKNITGSSKSMCSPCPPNELPRRAVYISVRGGVAEPPCPYKCVSDRYSMPHCFTALEELIYTFGGPWLFGLLLSGLLVLLALVLSIARMKFVGTDELPGPAPTQQSSQIDHSFPFLESLNEVLETNRAEESHCHVHRMYFMGPNTFSEPWHLPHTPPEQISEIVYEDAFNKFVDEINALAAYQWWEGSVFSILCILSFPLAWSWQQWRRRKKLQKLREFVRSEYDHSCLRSCRSRALYEGLKVAATPDLMLGYLDFFLGGDEKRTDLPPRLHQRFPMSLIFGGDGSYMAPFSLHSDRVVTTLISQAVPSSIWHRLVAGLNAQLRLVRRGNLNTSLLPVLKWLESHANPELNTYRVRVDLAWFQTTALGYLQFGLVLHAVGGVVAAELQDGCTSKTDQHSVNQNTCTDSQMGHSRTNDVLRKRITGTILNVDNLRMLGGRRGFFYLLSLILHNTKPVGHQDLVGLVISILLLADFSLVLLTFLQLYSYSMVDVLLVLFILPLGILAPFPAGINALFSHEQRRSAGLARVYALWNITSLVNVVVAFVCGFLHYKSSSKKHPSMQPWSFGGEETSWSLFPIGLVLCKCIQARLVDWHVSILEIQDRAVYSNDPTIFWQ

SEQ ID NO: 50159 - protein, 810 aa, Zea Mays
MGRKGSEMSPSKRYPLRSPHSSGRVLRSALANDNKDSEPLNAAAATQAAVKKRSGSQLDSPNSSVRLFHSTSKNKNEACSGPLNDRIPDKPAANKRKRASPSQVGSSSNSVRVLRSAIKNKDEACSKSLSDRTAGEPAANKRKNVNRSKTGSLSCGVRVLLSASKAKDETSTKPLNDSAAVEPASGKRKGTSPSKVGSASNSVRVLRSTSKYKNETCTEPLNDSGAVEPAANKRKGVSRSKKRSLNSSVRVLRSASNNKIEVSIKPLGNSTAGQPAAKRRKSGSSFEAGSPVSSARVLRSTSERKNEASKPLNESTAAQPAARKKKAGVISKTDNPKIGLRVLRSASGKKNEACIGHVNDSTSAEPTVTKRNRKPSMDRSPKKDYLKICQRVRYILNRMNYQQTFIQAYASEGWKGQSLEKIRPEKELERAKAEILQCKLRIREAFRNMDSLLSKGKLEESLFDSAGEISSEDIFCAVCGSKDVTLQNDIILCDGACDRGFHQNCLNPPLLTEDIPPGDQRWLCPACVCKADSIDALNELQGSKLSIHDSWEKVFPEAASIANGSKQVDTSDLLPDHIKHSDNPALVEGLMVNEVRLSAEDDSKGDGDFDPSGPDSSEDQKDGLNSEESDFTSDSDDFCAEIAKSCGQDEVSASPLSNVINHTYRMKLRASNNRSNEENHDHVFMDMELGQDMVLPVSSRRQVERLDYKKLYDEAYGKESSNSSDDKEWSGKELLEGSETDSLSERPHPVKRCSRRAQAEQQNNEHTPQRERLHGSESEQKTGILRSNGSSSTGRKFGPVATQLCHWHYI

SEQ ID NO: 50160 - protein, 1552 aa, Zea Mays
MGRKGSEMSPSKRYPLRSPHSSGRVLRSALANDNKDSEPLNAAAATQAAVKKRSGSQLDSPNSSVRLFHSTSKNKNEACSGPLNDRIPDKPAANKRKRASPSQVGSSSNSVRVLRSAIKNKDEACSKSLSDRTAGEPAANKRKNVNRSKTGSLSCGVRVLLSASKAKDETSTKPLNDSAAVEPASGKRKGTSPSKVGSASNSVRVLRSTSKYKNETCTEPLNDSGAVEPAANKRKGVSRSKKRSLNSSVRVLRSASNNKIEVSIKPLGNSTAGQPAAKRRKSGSSFEAGSPVSSARVLRSTSERKNEASKPLNESTAAQPAARKKKAGVISKTDNPKIGLRVLRSASGKKNEACIGHVNDSTSAEPTVTKRNRKPSMDRSPKKDYLKICQRVRYILNRMNYQQTFIQAYASEGWKGQSLEKIRPEKELERAKAEILQCKLRIREAFRNMDSLLSKGKLEESLFDSAGEISSEDIFCAVCGSKDVTLQNDIILCDGACDRGFHQNCLNPPLLTEDIPPGDQRWLCPACVCKADSIDALNELQGSKLSIHDSWEKVFPEAASIANGSKQVDTSDLLPDHIKHSDNPALVEGLMVNEVRLSAEDDSKADDLGLPSEDSGDGDFDPSGPDSSEDQKDGLNSEESDFTSDSDDFCAEIAKSCGQDEVSASPLSNVINHTYRMKLRASNNRSNEENHDHVFMDMELGQDMVLPVSSRRQVERLDYKKLYDEAYGKESSNSSDDKEWSGKELLEGSETDSLSERPHPVKRCSRRAQAEQQNNEHTPQRERLHGSESEQKTGILRSNGSSSTGRKFGPVATQKLKVHFEKDPYPSRETKENISEELGLTFNQVSRWFSSTRHYSRVASARKEMHPDGHTSENNDTTTVDSMQARQPNTVVMEKLTGNRNDIVSEKPMVQNNLNQGVAEKLTRDRNDIVPEKQVVQSNLNQCNNEDIPLSGTEIEMESYEQESSESSDEEWSTLSTPRKTKLQGNEKVSLTESLRSAKRCSRRAPAREQNNEHTQSEQLHGSASEQQAREQLHGSVSKQQTEVLRSNVSSGDASKCHFGPIVTQKLKEHFEKDPYPCRATKEGLAQELGLTFNQISKWFSATHHYSRDAVAKNQKYPGENTTENNSSTIFDGIQVIEPNFGLIDKPDADTNDMISEKLMVQINLNEGIEEDIPPSQYTTRCEEKLTMTQAAISREAGPPGYGPGENFLQVSSRITSCEQSVIMAPSAIARGVGPPGYTPGEHQGNGAPWNTSYERRPFTSPTTSSREVGPPGYGPEENQGSGISCNTSREQILFMSPTTISRELGPPGYLPRENQRSDTSWNTSCESGLFMSPATTSIEHGPPGYGPGENQENDSTSCELRMFTSPTIVSREVGPPGYQQGVFMSPKTISREVCPPGFGSGENQGNDTTWYKQSAFTSPTTISREVGPPGYGQEDQGNGGSWNTSCEQGVFTSPTRGISREVGPPGYGPGESQGNTTSWISTCQQRMLAGIQRTGGSRSMDLEAFPPGYGPGGASGSVISPQARSAENVEFSDEARKKAIQRELRRRQKFR

SEQ ID NO: 50161 - protein, 1541 aa, Zea Mays
MGRKGSEMSPSKRYPLRSPHSSGRVLRSALANDNKDSEPLNAAAATQAAVKKRSGSQLDSPNSSVRLFHSTSKNKNEACSGPLNDRIPDKPAANKRKRASPSQVGSSSNSVRVLRSAIKNKDEACSKSLSDRTAGEPAANKRKNVNRSKTGSLSCGVRVLLSASKAKDETSTKPLNDSAAVEPASGKRKGTSPSKVGSASNSVRVLRSTSKYKNETCTEPLNDSGAVEPAANKRKGVSRSKKRSLNSSVRVLRSASNNKIEVSIKPLGNSTAGQPAAKRRKSGSSFEAGSPVSSARVLRSTSERKNEASKPLNESTAAQPAARKKKAGVISKTDNPKIGLRVLRSASGKKNEACIGHVNDSTSAEPTVTKRNRKPSMDRSPKKDYLKICQRVRYILNRMNYQQTFIQAYASEGWKGQSLEKIRPEKELERAKAEILQCKLRIREAFRNMDSLLSKGKLEESLFDSAGEISSEDIFCAVCGSKDVTLQNDIILCDGACDRGFHQNCLNPPLLTEDIPPGDQRWLCPACVCKADSIDALNELQGSKLSIHDSWEKVFPEAASIANGSKQVDTSDLLPDHIKHSDNPALVEGLMVNEVRLSAEDDSKGDGDFDPSGPDSSEDQKDGLNSEESDFTSDSDDFCAEIAKSCGQDEVSASPLSNVINHTYRMKLRASNNRSNEENHDHVFMDMELGQDMVLPVSSRRQVERLDYKKLYDEAYGKESSNSSDDKEWSGKELLEGSETDSLSERPHPVKRCSRRAQAEQQNNEHTPQRERLHGSESEQKTGILRSNGSSSTGRKFGPVATQKLKVHFEKDPYPSRETKENISEELGLTFNQVSRWFSSTRHYSRVASARKEMHPDGHTSENNDTTTVDSMQARQPNTVVMEKLTGNRNDIVSEKPMVQNNLNQGVAEKLTRDRNDIVPEKQVVQSNLNQCNNEDIPLSGTEIEMESYEQESSESSDEEWSTLSTPRKTKLQGNEKVSLTESLRSAKRCSRRAPAREQNNEHTQSEQLHGSASEQQAREQLHGSVSKQQTEVLRSNVSSGDASKCHFGPIVTQKLKEHFEKDPYPCRATKEGLAQELGLTFNQISKWFSATHHYSRDAVAKNQKYPGENTTENNSSTIFDGIQVIEPNFGLIDKPDADTNDMISEKLMVQINLNEGIEEDIPPSQYTTRCEEKLTMTQAAISREAGPPGYGPGENFLQVSSRITSCEQSVIMAPSAIARGVGPPGYTPGEHQGNGAPWNTSYERRPFTSPTTSSREVGPPGYGPEENQGSGISCNTSREQILFMSPTTISRELGPPGYLPRENQRSDTSWNTSCESGLFMSPATTSIEHGPPGYGPGENQENDSTSCELRMFTSPTIVSREVGPPGYQQGVFMSPKTISREVCPPGFGSGENQGNDTTWYKQSAFTSPTTISREVGPPGYGQEDQGNGGSWNTSCEQGVFTSPTRGISREVGPPGYGPGESQGNTTSWISTCQQRMLAGIQRTGGSRSMDLEAFPPGYGPGGASGSVISPQARSAENVEFSDEARKKAIQRELRRRQKFR

SEQ ID NO: 50162 - protein, 169 aa, Zea Mays
MVAGGAVKGDDDVQLPCGRGEDDVVKTASLYTVSSKCRCPGHGEQGDPWASKVSSTEGKGQQNDSWSSKMTSRGAEDTRGGWDSKVKGSSCNDGGISINHMKEVDSHAPVKQKLQLFPINEATLKPFEKVDLLDSPIARLPDIETTTLGATYVASLDAGVWTKEQVFAG

SEQ ID NO: 50163 - protein, 694 aa, Zea Mays
MEHVLSSRRFPTDPNEYKLYEEIGDGVSATVYRALCVPLDILVAIKVLDLEKCNNDLDGIRREVQTMSLIDHPNLLRAYCSFTNGHQLWVVMPYMAAGSALHIMKTSFPEGFDEPVIATLLREVLKALVYLHSQGHIHRDVKAGNILIDTNGAVKLGDFGVSACMFDTGNRQRARNTFVGTPCWMAPEVMQQLHGYDYKADIWSFGITALELAHGHAPFSKYPPMKVLLMTLQNAPPGLDYERDKRFSKSFKDLVATCLVKDPRKRPSSEKLLKHSFFKHARSAEYLARSILDGLPPLGERFRELKSKEAELLLNNKLGQESKEQLSQKEYIRGISGWNFNLEDLKNAAALIDSSNGTCYLDVRENRVKDDSQEAYNGPEHIYQERLNHVASRRPEEDEIQEVEALNDAVSSSFSSRSLEALKSCFDVCGVDDPSPTATDSRAQPSVGTLPFQQLQKFEHCKSGDCNGESLERSVSVPTNLVTSGYHKHSSGSLIPEQVLSPYLSSDLERDGFRQKNLSSRNCSGPLLFRQMKDSRTHQSVAPDESSEGKIIRRRGRFQVTSDSISEKVATSSCNSSRINLPIDAARSSPKLSAILPTLQFLMKQNTMQKEVLSRLISSIEETSDDSEATGSSSYQSSGGPAREKELHLYVLQLQRSVTELAEEVQRLKLQNNKLEHQINILSRKDERSSTQDN

SEQ ID NO: 50164 - protein, 60 aa, Zea Mays
MTSLSITVMTLNLHEGEQPSESPNSWEKRRDICVSVITSYSPTILCTQQDLACTKSLGSK

SEQ ID NO: 50165 - protein, 92 aa, Zea Mays
MPFCVVCTCPFSSLPLYTLPKPPSPRRQSERKFFVAVASSRNVNAFAVLATEQLPLGGSMLAAVSDDGLCLCFEVTSDGLMDPAKFEQCKTC

SEQ ID NO: 50166 - protein, 830 aa, Zea Mays
MAAAACAGAEAGRGCGGKDALFVELWKACAGPLSCVPPLGEKVYYLPQGHIEQVEASTNQLAEQQGTPLYNLPWKIPCKLMNIELKVEPDTDEVYAQLTLLPDKKQDENTSTTVEEEEVVVPPALPATNEGPHIHSFCKTLTASDTSTHGGFSVLRRHADECLPPLDMSQHPPNQELVAKDLHGAEWRFRHIFRGQPRRHLLQSGWSVFVSAKRLVAGDAFIFLRGENGELRVGVRRALRHQTTIPSSVISSHNMHLGVLATAWHAVNTDSMFTVYYKPRTSPAEFVVSRDRYYESLKRNYSIGMRFKMRFEGEEAAEQRFTGTIVGIGASDPSGWADSKWRSLKVRWDEPSSISRPERVSPWQIEPSVSPCHVNPLPVRFKRSRSSVNALPSDVSTVTREVTSKVMADSQQNSLTRALHNQGRTQLTVRYHDNSDVKTTQDLTVWSSGTEQQRNNIAAQTKLCLEGWTPTRSPEGYNQIFSAFKPLKDIHNPLGPFPSQISGTHSNSWDTADARYPVQQANYSMLPGTWSLRPHNSGFRMNQQNYLVMPEGANFTGKSAFTSLQDHGTDKCSTGCFGHIESSSHTDHASSSLIRPQPLVLGNGVQKSKGTSFKLFGIPLGSPEKSEPLVSPPSVAYDGKLQTSPSEKGNQLDVVEVDNCSHPSKTVKPLDGPQSDSITENNQPSPEATLNIQNKVQSSSTRSCKKVHKQGSALGRSIDLTKFACYDELIAELDQMFDFDGELKSPCKSWLVVYTDNEGDIMLVGDDPWNEFCDMVHKIFIYTREEVERMNPGALNSRSEDSLSDSLGRGVASRDPRGGGSTSALDSENC

SEQ ID NO: 50167 - protein, 312 aa, Zea Mays
MLGLPDHILVAAASDSIESLPSCEATNKFGASFETPSGRRLVKPSDYMELISCMKPNIWASLADEVPAWVTEKRNKVSVDRTLRWLDACIALDVASGTNSFGVIVGGSSLEQRKLCATEVSKRNVSGFWIAGFGFGESIEERCTLLNATTDCLPREKPRLVSRLGLLEEVLEGVAAGIDLFDSTYIYQLTMGGFALIFPVDMVEREMQNGVLNTTDGDSTKINLRATTYRKDTSRLVDSCNCFTCQNHTRAYLNHLLNVHEMLAQILLEIHNTHHYLRFFHSIREAIKVGEFDLFRQEFVKKRRTHFAAVVV

SEQ ID NO: 50168 - protein, 680 aa, Zea Mays
MKWKNVLKEMAPLRSTGRFFQRHPSAICLLIFLLVLYKYFFGWFTLIVTTSPIFLIAGIFLGIVLVYGEPNNPEKDHVYKKNDNTRSLNIHDSSKSIRGVPLPRIPSGEERAPKHKNSVKKIRKQSRGVASSSEPGSSESGGSDTDIAPMLHAFHHLRSGSNSSNSSQDGDSDSSTEDTTENQQGNDGRISREGKQHVKVVAWTADDQKNIIKIGCLEIERNQRLETLIARRRARKYADRNLAEFGSTDSLPTIEELSKFNVQIPAVFAPRKNPFDLPYNEDNFPDSAPSAVLETRYPFDLPSEQANESSSYGANSSHDEPIPVACHLQSALLRRHESFTEGAPFLSDFLQDTQPSRFRPYFMTEKMANEEMTDPVLEGETSEKSNSKASSAQDSDSTSSVADQESQKDVLEDCSNQGQQSSFSQTEEHAHIARHAREVSLSLDMEPPVLISDSSDDDISLSGEHINDWEEAQQSENFSLSQNTWQEDPNVMQHHQEIDITSNGLNQMSPHSNDLELTSSSTETTDDPFEVNDIEPPAKEVVVVDDTHVVDPVYDSSPSGSERPAPTGLVIDGPVLKDGHACTLVVEATIEEGGSSSRMEVSSSEVAGPSLSSVEQSESPEKEASEIREQSMVGHVEAHGGSVSHADPSVSDISSQPSTESSTNGDSGSGVTPSFTNAVL

SEQ ID NO: 50169 - protein, 346 aa, Zea Mays
MEVGITMVIKNKNGSLALSVSQCGCYVKDLVISLDGGASWFYQGFINAFEDHIKAAVEKAVPENIIEGAGKLDSFLQGLPRTISLDDVAAFNLTFINDPHYGNSSIEFDINGLITSAVAETANLQKHPQLSLACGGASKMLLLSLDEDVFNSALEVHFKAGSMHWVVDKVPDQSLLNTANWKFIIPRLYWNYPNDDILLNISMASSPVIRVTSEKIEATINGDMIIDVVDNKEIVPVACISVIVSASGVVDASGNKVYGRVGLDNFSLALKWSKIGNFHMSLIQGVIRVLLNTVCMPYLNSRLGNGLILPVVHGFTLQDVYVLTSAEQLTLCSDVTFNASSMASLL

SEQ ID NO: 50170 - protein, 409 aa, Zea Mays
MASSLLQQLLSLLLLLLPSPLRLREHLSGNHAVSANNFHPIFLGWFGLWKNSSELLSRDYVQCFEEQMSLVYDPAINEYRNLAGVETRVPNFGSTRAFSHKNPLKSDWCLGKLRAALEDMGYRDGDTMFGAPYDFRYAPPSPGQTSEVYSRYFKELMELVEAASERTRKKAVILGHSFGGMVALEFVRNTPPAWRREHIERLVLVAPTLPGGFLEPVRNFASGTDILYVPATTPLATRAMWRSFESAIVNFPSPAVFGRLQAPLVVTRERNYSASAHDMERFLAAVGSGEAAEPFRRRAVPKMGSFAAPMVPMTYISGVGNRTPLRLVFWGEDFDAAPEVAAYGDGDGKINLISVLAFEKEMRRQPEQKKQFKSIKINKAQHSTIVTDDFALHRVIQEIVEANNQKIPS

SEQ ID NO: 50171 - protein, 428 aa, Zea Mays
MDSASSPAHAECQINDKGSEWIRDLAVNCPVLATLNFHMTELEVMPVDLELLAKSCKSLISLKIGDCDLSDLIGFFQSATSLEEFAGGTFNGQGELTKYGDVKFPSRICSLGLTFMGANEMPIIFPFSAILKKLDLQYTFLTTEDHCQLIAKCPNLLVLAVRNVIGDRGLGVVADTCKKLQRLRIERGDDEGGVQEEQGGVSQVGLTAIAVGCRELEYIAAYVSDITNGALESIGTFCKKLYDFRLVLLDREERITDLPLDNGVRALLRGCTMLRRFALYLRPGGLSDAGLGYIGQCSGNIQYMLLGNVGETDDGLISFALGCVNLRKLELRSCCFSERALALAILSMPSLRYVWVQGYKASQTGRDLMLMARPFWNIEFTPPSSQNAGRLIEDGEPCVDSHAQILAYGSLAGKRLDCPQSVVTLYPA

SEQ ID NO: 50172 - protein, 576 aa, Zea Mays
MQVPVGFLGKLWSFVSFVPFFVLLLLLGSIKAALVGPVTASIVFFGSSAVIIGLWPAHFIWTYYCVLKTERIGLQLKILTGLLLPLPLLLLPVLASIGSLLGGTGYGVCVPLMATFEAVGEGVTDKLTHCFTLQDGTVSAMAGACTVVRDVTDFCFHSYFSFMDDLIDKMGDNEEAPLDIKLSYLPRSMVVALIAVPVDVLLISAVALWKSPCMLFKGWQRLCEDLVGREGPFLETVCVPFAGLAIVLWPLAVIGGLLASFFSSFFFGFRAGLVAYQEASFQMGLAYMISAVAIFDEYTNDLLYLREGSCLPRPKYRRADIMRECETEPAERQQTGHHKHRRTLPRSKTFMQTVQRLRPIQIWDWFFRSCELNGRILLSEGLITAQDMEQYITNGKCKKLDTKLPCWCIFQCLLRSANSDSDGLVISDHVQVTTLNWPKDRVLDWLLGPLLLIKDQMKKLEVTEDEEMCLRKLIMTSKNEKPSDWDDSGFPSDDNIKRGQLQSIIRRLQGIVAYMSRVPSFRRRFINLVKAMYLEAIEAGAIDGSRKVKADVADRCAEDIAGSCSSTDTPANIHMV

SEQ ID NO: 50173 - protein, 463 aa, Zea Mays
MRKATDGREEPSDSGPTTPLPNKKLLLFILDRLQKKDTYGVFSEPVDPEELPDYHDIIKHPMDFSTIRKKLDKEAYFNLEQFEDDVFLITSNAMCYNSPDTIYYRQARGIQEIAKKDFENLRQDSDASEPEPEPEREPKPEPEPEEPKPQPRRGRPPNKNNAKQKVGKPPAERATADFSGATLATAANIGRHAQADVDLSRRVMDKAMIADVLRASFANLRNEHNWSGYGGTWSAKTGKRPILMEDSRRSTYYETQPSSSIYELPVSSSYNGTEKLLVPVGVQLPQSYSHSLARFAAQLGPVGWEIASRRLERSLAPGTKFGRGWVGDGETPPNPFQTPVLAAFSETMAPPSSIAASGEQPSMNAPPATEACAGSISHRVGSQPCASISTVQTINSEALASQQCGSVPQVSINRGERAVEMKGSTNNLHGHPAMPQTMNGFNAVPGRVLFPPAAQLVVPQSTV

SEQ ID NO: 50174 - protein, 574 aa, Zea Mays
MGKQQQAPPARRSPAMSAPPPPKRRKKKGRPSLLDLQKRSLRLEQQQLPQGRRSNRRSAGSADEDDDGPASGSGRREKKLRLVMGLHDGSAKGEKMRKATDGREEPSDSGPTTPLPNKKLLLFILDRLQKKDTYGVFSEPVDPEELPDYHDIIKHPMDFSTIRKKLDKEAYFNLEQFEDDVFLITSNAMCYNSPDTIYYRQARGIQEIAKKDFENLRQDSDASEPEPEPEREPKPEPEPEEPKPQPRRGRPPNKNNAKQKVGKPPAERATADFSGATLATAANIGRHAQADVDLSRRVMDKAMIADVLRASFANLRNEHNWSGERKFERLEAYSGYGGTWSAKTGKRPILMEDSRRSTYYETQPSSSIYELPVSSSYNGTEKLLVPVGVQLPQSYSHSLARFAAQLGPVGWEIASRRLERSLAPGTKFGRGWVGDGETPPNPFQTPVLAAFSETMAPPSSIAASGEQPSMNAPPATEACAGSISHRVGSQPCASISTVQTINSEALASQQCGSVPQVSINRGERAVEMKGSTNNLHGHPAMPQTMNGFNAVPGRVLFPPAAQLVVSQMQTHTAD

SEQ ID NO: 50175 - protein, 287 aa, Zea Mays
MAKARKQKGDGSGTGGGATVLHQKLCLSIDMENQLIYGYTEIKALLAENDTFALHADNMTIRSILVDGETVEFDYSPHWKNETDQPNWSSISCLNTVADAACSTYTSSLNREATPNLIVSSERSIKSMIEQQLDENSEKYEENSGRLEKHGGKTIQTSYDQIVNGCNGSAVEEGIENSAVEEGKKKEKEKEKEEKNGNEKSKENGNETENEKVKNIKLVHIDYILEKAETGIHFVGNVMHSSNQIRRAHCWFPCVDTATQRCPFDLEFTVSTDFIAVSNGDLLYQLL

SEQ ID NO: 50176 - protein, 353 aa, Zea Mays
MAKARKQKGDGSGTGGGATVLHQKLCLSIDMENQLIYGYTEIKALLAENDTFALHADNMTIRSILVDGETVEFDYSPHWKNETDQPNWSSISCLNTVADAACSTYTSSLNREATPNLIVSSERSIKSMIEQQLDENSEKYEENSGRLEKHGGKTIQTSYDQIVNGCNGSAVEEGIENSAVEEGKKKEKEKEKEEKNGNEKSKENGNETENEKVKNIKLVHIDYILEKAETGIHFVGNVMHSSNQIRRAHCWFPCVDTATQRCPFDLEFTVSTDFIAVSNGDLLYQVLSKEDPSKKTYVYKLNTPVSAQWISLVVGPLEILLDRNDINVSHICLSPALSKLQNTIAFFHDAYLL

SEQ ID NO: 50177 - protein, 611 aa, Zea Mays
MGAQGWSACLQILDKSPRFEQLHGRRNAEAAKLENKKELRQLSLEWTSGKEEEQQCHEVLESLEAHDGLLALEIYSYQGTRFPSWMGMLKNILELRLFDCCKVEQLPPLCQLAELQLLHLKRLGNLRSLCSRCTSSTFGKLKDLKLVDLHVFEGFCKTMHGSTVAFPQLEILHIERCGNLAALTEASHCGGDYTVARSTFPELKRLILEDLCSFERWVAGLLEIEEEHALFPVVEIVVISKCPKLTTVPRAPKVKELVLRDVHEHISLGGIRCMTSLSTLLLDGVKLDVKERWDHPSSVVDMQLWRCSLFFQPRALVMWVCYWQLQDLTIYRCDELVSWPEKVFQSLISLRRLWIGNCKNLIGYAAANVPDQATSGRSELLPHLEYLEIWGCQNLVELFNSSPALKRMEVRECCKLESLYGKQLLDEAASSTDDVTASAHVEEKLSPSSLESLTILDCDRLSEVVNLPSSLRVIDIQGCFKLRFMSGQLDALNTLAITNCPELRSLETCIVDLTSLEILALCGCKSLASLPSAWAGRQEYSSLRQLTIRECPGIKSLPSTLQQRLDNGLLDFTNLDSRRREDRPPRRLLGCLFLLPLFCLVSRAKCCFVSD

SEQ ID NO: 50178 - protein, 185 aa, Zea Mays
MISMAVHRNLLRLRGFCMTPTERLLVYPYMANGSVASRLRDRAPAEPPLDWQTRRRIALGSARGLSYLHDHCDPKIIHRDVKAANILLDEDFEAVVGDFGLAKLMDYKDTHVTTAVRGTIGHIAPEYLSTGKSSEKTDVFGYGITLLELITGQRAFDLACLANDDDVMLLDWVINYAISSVQIAT

SEQ ID NO: 50179 - protein, 87 aa, Zea Mays
MFIATMKPFCCLLSAAVFGVFACLYGLRADRGLQDLLGPRNRSPPATSLLPFVSGLPLYLHQSEGSEATPLGGEERNCEPCVGEVED

SEQ ID NO: 50180 - protein, 362 aa, Zea Mays
MDSPRGPASFATQANALLRKNLCVQKRNLKTNIGITFFPILICVLLIVLQNVINSELDKPKYKCGCVCLETSANGRCVRKECGIQYSTLDQVGSCPIPSPPQWPALIQIPRADFRAARTFSQPFNDLPDPFCRDSWSCPATVLVTGKDRAVAEAISRGLFPVLSPSLNATDLLDLFSKIVAGSDTQPWYTQLLEPAFFSGRTLYVIQPECTPVMSQTITYNTGGIPFQLNIQCVEGAPLWRETASIINHEFLKGYRQRGGQINEFIAGYDFLGTTQYGLGVNVWYNSTYNDNNAYSFISTLRVPRLVNAVSNAYLKLIKGTGVDMLLEFVKDMPKVGTSFQLDLSSLLSVLFFTWIIELLFP

SEQ ID NO: 50181 - protein, 624 aa, Zea Mays
MLLEFVKDMPKVGTSFQLDLSSLLSVLFFTWIIELLFPVMLTYLVYEKQQKLRIMMKMHGLKDGPYWLISYSYFLALSIVYMLFFMIFGSLIGLNFFRVNEYSIQAVFFFVCINLQIALAFFVASFFLSVKMATVIGYMYVFGSGLLGAFLFRFFVEDKTFPYGWTLVMEIVPGFSLYRGLYELGQYAFSGSSIGTTGMTWRSLKDPLNGMRDVMIVMSVEWAVLLILAFYLDQTSLLGGGVRKNPFFCFRCLQKKCATSLHEPSFVQQDSKVILDMEKSDVALERKVVEQFLIDPNANQAIICDNLRKVYHGRDGNPDKLAVRGLSLVLQKGQCFGMLGPNGAGKTSFINMMIGLIKPTSGTAYVHGMDINMDMGDIYTNMGVCPQQNLLWETLTGKEHLFFYGKLKNLKGSALMKAVDHSLKSVNLSHGNVGDKQVKKYSGGMKRRLSVAISLIGDPKVVFMDEPSTGMDPASRNNLWNVVKEAKKNRAIILTTHSMEEAEVLCDRLGIFVDGDFQCLGNPKELKARYGGTYIFTVTTPPDQEMEVEHLVRQFSPSANKIYHLSGTQKFELPKQEVKIAHVFDMVEKAKRRLSIHAWGLVDTTLEDVFIKVARGAQVFNEFA

SEQ ID NO: 50182 - protein, 275 aa, Zea Mays
MATVIGYMYVFGSGLLGAFLFRFFVEDKTFPYGWTLVMEIVPGFSLYRGLYELGQYAFSGSSIGTTGMTWRSLKDPLNGMRDVMIVMSVEWAVLLILAFYLDQTSLLGGGVRKNPFFCFRCLQKKCATSLHEPSFVQQDSKVILDMEKSDVALERKVVEQFLIDPNANQAIICDNLRKVYHGRDGNPDKLAVRGLSLVLQKGQCFGMLGPNGAGKTSFINMMIGLIKPTSGTAYVHGMDINMDMGDIYTNMGVCPQQNLLWETLTGKEHLFFYGC

SEQ ID NO: 50183 - protein, 268 aa, Zea Mays
MYVFGSGLLGAFLFRFFVEDKTFPYGWTLVMEIVPGFSLYRGLYELGQYAFSGSSIGTTGMTWRSLKDPLNGMRDVMIVMSVEWAVLLILAFYLDQTSLLGGGVRKNPFFCFRCLQKKCATSLHEPSFVQQDSKVILDMEKSDVALERKVVEQFLIDPNANQAIICDNLRKVYHGRDGNPDKLAVRGLSLVLQKGQCFGMLGPNGAGKTSFINMMIGLIKPTSGTAYVHGMDINMDMGDIYTNMGVCPQQNLLWETLTGKEHLFFYGC

SEQ ID NO: 50184 - protein, 438 aa, Zea Mays
MDSPRGPASFATQANALLRKNLCVQKRNLKTNIGITFFPILICVLLIVLQNVINSELDKPKYKCGCVCLETSANGRCVRKECGIQYSTLDQVGSCPIPSPPQWPALIQIPRADFRAARTFSQPFNDLPDPFCRDSWSCPATVLVTGKDRAVAEAISRGLFPVLSPSLNATDLLDLFSKIVAGSDTQPWYTQLLEPAFFSGRTLYVIQPECTPVMSQTITYNTGGIPFQLNIQCVEGAPLWRETASIINHEFLKGYRQRGGQINEFIAGYDFLGTTQYGLGVNVWYNSTYNDNNAYSFISTLRVPRLVNAVSNAYLKLIKGTGVDMLLEFVKDMPKVGTSFQLDLSSLLSVLFFTWIIELLFPVMLTYLVYEKQQKLRIMMKMHGLKDGPYWLISYSYFLALSIVYMLFFMIFGSLIGNCITTLLMNILLWQINLHCLD

SEQ ID NO: 50185 - protein, 507 aa, Zea Mays
MSAPLDRLARPCFEGFVHNDERKESRSDADNSEGDKKTKIGSFKKKAINAGNKFRHSLRRRSKKKTERGDSIKDIRDIKELQDVETFRQCLIDEDLLPPQHDDYHMMLRFLKARKFDVEKAKNMWSDMLKWRKEFGVDKIEEFEYAELDEVKKYYPQFYHGVDKEGRPVYIELIGKVDANKLVQVTTLDRYVKYHVKEFERCFQMRFPACSIAAKKHIDSSTSIFDVQGVGFKNFSKSARELITRLQKIDNDNYPETLCQMYIINAGQGFKMLWSTIKSFLDPKTASKIHVLGNKYQHKLLEIIDECELPEFLGGKCKCIEGCERSDKGPWKDPNIIKRVLNGEANYGRQIVTISSTDGRIVSYAWPVHPNRKGSDASAESGSEVEDVTSPTASRNLITHPILTPVHEESKLSAHGSSSVVHASIGENIPVVDKIVDDGWGSPRSSPQAASSGSLSLRNLHGTFEGLRAQTITWLTFLMMTLFAMLCSVPSKMARRISNQSGQGAGA

SEQ ID NO: 50186 - protein, 586 aa, Zea Mays
MASSPSPSPGTIRAPLPPSSATPSPATTTPTPASPAPVTQPNATPADPPSSPVAPPPVPSASTPPPQLTSPPPSLPPPPPDAVPPPPLVASPPPAPAAVVPPPSPPAPVAVPPPPTPAAPPKASPIHIRPPAAASPPPTILPTPNPPADPTPPTLAQPPPPRRRPPRTPQTEPPPLAPPPSGIPVKPSTSSPSPTSADPLIPTPSSPSPPGTTTPGSGSTPSVPAPAMAADPVRPVTTGGSNKSSSPASQSSGSPVDSGGMSSGAKAGIGAVVAILVLISFVGAAFWYRKKRRRVHGYHAGFLMPSPASTTTQVLAKTNFSAGSPESKDSMPEFSMGNCRFFTYEELYQVTNGFSAQNLLGEGGFGSVYKGCLADGEFAVKKLKDGGGQGEREFHAEVDIISRVHHRHLVSLVGYCISDEQRLLVYDFVPNNTLHYHLHGLGVPVLEWPSRVKIAAGSARGIAYLHEDCHPRIIHRDIKSSNILLDNNFEALVADFGLARIAMDACTHVTTRVMGTFGYLAPEYASSGKLTERSDVFSFGVVLLELITGRKPVDASKPLGDESLVEWVSYISNLIHEKVSSFLTLQ

SEQ ID NO: 50187 - protein, 133 aa, Zea Mays
MYSWEKLFTERLVERRESEVKHLAVFTCVALFNTLISPLNSFPWVINGMIDAVISSRRLSNYLSTPEHHSSELNASADLLNHHFKRYSKVTHNPMAIIFQNVSCSWSSSSVAELNIVLRDISLQLQKGSLLQL

SEQ ID NO: 50188 - protein, 674 aa, Zea Mays
MEPPAPAAPRGAERAEAVAAEPASGAGARVEVQQTGPEGSVKASRGGREVPLRLRLGRARRRAGPVTPTPSWKMEDDGVREGPSALAPAAASAAARRSSASARQLGASLWEIHDVAREVRRSRRRGGRAIAAGREHGGGGELDQSSGGIRRHVADSSMKHHKFDQERSHRIQPFSPASYTSSVGDSNVNLTRSPTRSLGIMGRSMGEGYSLKTSTELLKVLNRIWSLEEQHTANLSVVNGLKLELQQAQTHIQELLQERRQYRHEVSSLMRQLSENKLVRKNKDHMKVDTAVRSLQGELEDEKRLRRHSEDLLRKLGMELSEIKSAFLKSVKDLEKEKKGNRLLEDLCDQFAMGIRNYEEELRVVKQRNVKNYELKFDNSVLHMSELWLDERMQMQNTDVNGELAHKTTITERLSGEIQAFLLSKKAGSSMNNEKHMNDNTRLRRQSLESVHLNGATSAPQFAEDDDDSIASDLNCFELNMHGHMGSRRSGTGAMNVHKRRSEHPHVISAEGLCMSSVPVYLQKGIARPSSSKLQPASKIPEISSQSNARITPAEEQNGSTGTQIIQGSNNGSTMNNPDAHHVDYLGQESFDHFSRTSLFCEGTTSGDLGNVGSPTRQLKYQSTSLDPEITECSPEQPVGVMENTLKAKLLQARLEGRHARLKASGGSSTSRRK

SEQ ID NO: 50189 - protein, 810 aa, Zea Mays
MLVNQMLLCYGSIFACQENTVKISLLNNLDQCLKSGKKYLWFKFLITNACVALLSGLKEFLALRGAQSLPIDILSMIQSIFKAILVEPEISTAQRRAACEGLGLLARAGNDIFTARMARSLLGELVTTTDLSYTTSVAFSLGCIHRSAGGMALSTLVTPTVSSLSHLSKSSNFNLQLWSLHALLLTIEAAGLSYVSQVQGTLFLAMEILLLEENGYVDLRQGIGHLINAIVAVIGPELAPDSTFFSRCKSVIAEISSSNEMATLLESVRFSQQLVLFAPQAVPVHLHVQGLIPMLYSRQPSLRYLAVSTLHHLIERDPAAMIDENIEENLFSMLDEETDSETAMLVRATIIRLLYTSCPVLATSIRRNTGEVLSCFGHNPPDSTSENDVYYGEDEDNMISSSKQQQIRCAGSISSQFPPRNKHLRYRTRVFAAECVSHVPIAVGAEPAHFDLLLARSAISQGTYLSNDWLVLKLQELVSLSYQFGKAVDPEFPGHILLEQFQAQLVSAVRMAISTASGPLLLEAGLELATRVMTSSIIGGDRLALSRLFSLITRPLSDIEGLLYPSFADWVVCKIKVRLLTAHAAVKCNTYQFLRMRENAPNEYQQLAPSLVNSSTLLGKYWIRALKDYVSISFGLHSKINYKPFLDGIQSLLVLSKVQRYLDEVWLLILKATALDAAPLDFDENNPKNLLEQTFISGHCMVKLDRTEFQFLWGLSILVLFHSCQSMKNNSLKINLDFKQDKNFGEFIVHGLDDKRPCDQVLRVLSSLTTEVFFSNNFISVDICQQLLQALTYADCSSAPIIHLFTQILP

SEQ ID NO: 50190 - protein, 1380 aa, Zea Mays
MLVNQMLLCYGSIFACQENTVKISLLNNLDQCLKSGKKYLWFKFLITNACVALLSGLKEFLALRGAQSLPIDILSMIQSIFKAILVEPEISTAQRRAACEGLGLLARAGNDIFTARMARSLLGELVTTTDLSYTTSVAFSLGCIHRSAGGMALSTLVTPTVSSLSHLSKSSNFNLQLWSLHALLLTIEAAGLSYVSQVQGTLFLAMEILLLEENGYVDLRQGIGHLINAIVAVIGPELAPDSTFFSRCKSVIAEISSSNEMATLLESVRFSQQLVLFAPQAVPVHLHVQGLIPMLYSRQPSLRYLAVSTLHHLIERDPAAMIDENIEENLFSMLDEETDSETAMLVRATIIRLLYTSCPVCPSRWLAVLRNIVLATSIRRNTGEVLSCFGHNPPDSTSENDVYYGEDEDNMISSSKQQQIRCAGSISSQFPPRNKHLRYRTRVFAAECVSHVPIAVGAEPAHFDLLLARSAISQGTYLSNDWLVLKLQELVSLSYQISTGQFEGMQPIGVKLLCLIMDKFGKAVDPEFPGHILLEQFQAQLVSAVRMAISTASGPLLLEAGLELATRVMTSSIIGGDRLALSRLFSLITRPLSDIEGLLYPSFADWVVCKIKVRLLTAHAAVKCNTYQFLRMRENAPNEYQQLAPSLVNSSTLLGKYWIRALKDYVSISFGLHSKINYKPFLDGIQSLLVLSKVQRTEFQFLWGLSILVLFHSCQSMKNNSLKINLDFKQDKNFGEFIVHGLDDKRPCDQVLRVLSSLTTEVFFSNNFISVDICQQLLQALTYADCSSAPIIHLFTQIIRFCPDNFFEVEAFVFSAIELLSQYLGLILQCRDGSSQNNSSNTLISELSIASETMAYRIKGEYLWKLVMLVVSTSHQSFQQVSTNLCFSNIICFLQNIFPFMRKIFRERVESDGECTSPKVVFGAMVGLVGYFYVECDKKISLLENKISDSYKLLNKILLFCLGEATALAKLVPEIIYRSENVSNNDVLLWGSFRLCVQVIQGSFRSTNIQVHMLGLQVLRSYAQKELTEGSETKLDSFMMLLTELLGDLFLVMETTLKECSNKKSVSVVDECLKLVFLFHTLAQSKKYRQDATTLLLEALLMVFSLSSDTVSQELAEVNTISRKLFSHFIQIPSVAIQIKDIMLSAPAERRLQLQDMVRASVSQGQITVPVATSAHSEQNIQDSCSKNPGSTSEASDCVATHGNNDNEVVDDDWDDDWDAFQSLPAIANDGVDSGEISLTTRYNEQIPQENSSYGSCNADITARAMEDITCVDKELEEPSDLQFSSTEQQPKHDLPGSSHEGCAKLERHPSVDCKEQLADDETADELQQQVHEDTDHVNKDSEVLSAEIHGVKLDILDEDVEDDSPMNSNNLSDIAEEES

SEQ ID NO: 50191 - protein, 874 aa, Zea Mays
MLVNQMLLCYGSIFACQENTVKISLLNNLDQCLKSGKKYLWFKFLITNACVALLSGLKEFLALRGAQSLPIDILSMIQSIFKAILVEPEISTAQRRAACEGLGLLARAGNDIFTARMARSLLGELVTTTDLSYTTSVAFSLGCIHRSAGGMALSTLVTPTVSSLSHLSKSSNFNLQLWSLHALLLTIEAAGLSYVSQVQGTLFLAMEILLLEENGYVDLRQGIGHLINAIVAVIGPELAPDSTFFSRCKSVIAEISSSNEMATLLESVRFSQQLVLFAPQAVPVHLHVQGLIPMLYSRQPSLRYLAVSTLHHLIERDPAAMIDENIEENLFSMLDEETDSETAMLVRATIIRLLYTSCPVCPSRWLAVLRNIVLATSIRRNTGEVLSCFGHNPPDSTSENDVYYGEDEDNMISSSKQQQIRCAGSISSQFPPRNKHLRYRTRVFAAECVSHVPIAVGAEPAHFDLLLARSAISQGTYLSNDWLVLKLQELVSLSYQISTGQFEGMQPIGVKLLCLIMDKFGKAVDPEFPGHILLEQFQAQLVSAVRMAISTASGPLLLEAGLELATRVMTSSIIGGDRLALSRLFSLITRPLSDIEGLLYPSFADWVVCKIKVRLLTAHAAVKCNTYQFLRMRENAPNEYQQLAPSLVNSSTLLGKYWIRALKDYVSISFGLHSKINYKPFLDGIQSLLVLSKVQRTEFQFLWGLSILVLFHSCQSMKNNSLKINLDFKQDKNFGEFIVHGLDDKRPCDQVLRVLSSLTTEVFFSNNFISVDICQQLLQALTYADCSSAPIIHLFTQIIRFCPDNFFEVEAFVFSAIELLSQYLGLILQCRDGSSQNNSSNTLISELSIASETMAYRIKGELQAVRTGYSRFIS

SEQ ID NO: 50192 - protein, 274 aa, Zea Mays
MNNLLSDSFERDEKPESERDIEMGNRNPKDNSDYGLKDFFEQVKEIEVLLDKMSNIVHKLQEANEESKSVTKASAMKVIKERMEKDIDGVLKIARNVKVKLEQMDRNNLENRQKPGCGKGTSVDRSRMSMTIALKKKLKERMNDFQVIDRLIETGSSEQIFERAIQGTGRGQILDTVEEIQERHDAVMEIEKRLLELQMIFADMAALVDAQREDLDNIENLVQNAVNHVVSGTEALRTAKSLQKKSRKCMLIAIIILLVIAAIVVLSILKPWAK

SEQ ID NO: 50193 - protein, 292 aa, Zea Mays
MNNLLSDSFERDEKPESERDIEMGNRNPKDNSDYGLKDFFEQVKEIEVLLDKMSNIVHKLQEANEESKSVTKASAMKVIKERMEKDIDGVLKIARNNLENRQKPGCGKGTSVDRSRMSMTIALKKKLKERMNDFQNLRQTIQEEYREVVERRIFTVTGTKPSEEVIDRLIETGSSEQIFERAIQGTGRGQILDTVEEIQERHDAVMEIEKRLLELQMIFADMAALVDAQREDLDNIENLVQNAVNHVVSGTEALRTAKSLQKKSRKCMLIAIIILLVIAAIVVLSILKPWAK

SEQ ID NO: 50194 - protein, 303 aa, Zea Mays
MNNLLSDSFERDEKPESERDIEMGNRNPKDNSDYGLKDFFEQVKEIEVLLDKMSNIVHKLQEANEESKSVTKASAMKVIKERMEKDIDGVLKIARNVKVKLEQMDRNNLENRQKPGCGKGTSVDRSRMSMTIALKKKLKERMNDFQNLRQTIQEEYREVVERRIFTVTGTKPSEEVIDRLIETGSSEQIFERAIQGTGRGQILDTVEEIQERHDAVMEIEKRLLELQMIFADMAALVDAQREDLDNIENLVQNAVNHVVSGTEALRTAKSLQKKSRKCMLIAIIILLVIAAIVVLSILKPWAK

SEQ ID NO: 50195 - protein, 781 aa, Zea Mays
MDSVPGKENNGIAPNLNGVVSPAKQQLEGKEAMRYANILRSRNKFADAINLYTIVLEKDGTNVEALIGKGICLQAQNLPRQAIECFTEAVKIEPGNASALTHCGMIYKDEGHLVEAAEAYQKARMADPSYKPASEFLAIVLTDLGTSLKLAGNTEEGIQKYCEALEVDNHYAPAYYNLGVVYSEMMQFDMALSCYEKAALERPLYAEAYCNMGVIYKNRGDLDAAIICYERCLTISPNFEIAKNNMAIALTDLGTKVKIEGDINRGVAYYKKALYYNWHYADAMYNLGVAYGEMLNFEMAIVFYELALHFNPRCAEACNNLGVIYKDRDNLDKAVECYQMALSIKPLFAQSLNNLGVVYTVQGKMDSAASMIEKAIHANPTYAEAYNNLGVLYRDAGSITLAIHAYERCLQIDPDSRNAGQNRLLAMNYIDEGSDDKLYEAHREWGKRFMKLYPQYTSWDNSKVADRPLIIGYLSPDYFTHSVSYFIEAPLTHHDSTVCKVVVYSGVVKADAKTLRFKDKVLKKGGLWRDIYGIDEKRVASLVREDKVDILVELTGHTANNKLGTMACRPAPIQVTWIGYPNTTGLPTIDYRISDSLTDPPMTKQKHVEELVRLPESFLCYTPSPEAGPVCPTPAISNGFVTFGSFNNLAKITPKVLQVWARILCSVPNSRLVVKCKPFCCENIRQKFLATLEELGLESLRVDLLPLIHLNHDHMQAYSLMDISLDTFPYAGTTTTCESLYMGVPCVTMAGAVHAHNVGVSLLSKVGLGRLVAKTEDEYGA

SEQ ID NO: 50196 - protein, 1129 aa, Zea Mays
MKDLVKAIECQPIMGFGAGIPEPETEEPSDDAHMLTNQKIQLSIPSCSGAELDLQGKELGQGQHSVQECINPPIVVPVSRLHEVEKARRDLPIIMMEQEIMEAIYENSVVILCGETGCGKTTQVPQFLYEAGFGTSDRADRKGMIGITQPRRVAVHATAKRVSYELGLKLGREVGFQVRHDRKVGSECSIKFMTDGILLREIQGDFLLKRYSVIILDEAHERSLNTDILIGMLSRIIKIRKDLYAKQQEKLRSGFKIKPEDKISQLKVVLMSATLQLKDFISNRRLFGVIPPAVKVPVRQFPVSVHFSKRTHDDYLGLAYKKVMSIHKRLPPGGILVFVTGQREVEYLCKKLRRASKVQTAKNPGKTDGEDNGPCPKVDEKEIFEAYDIDRDEPEHRYDMFSSYDDDGMYDDDGMNVETNIDSSDNETESEMDTETDDEESVTIETTEEDVPVLAFLKDAESSSALKASFGALSGIPNVLESVEELSDAKCEEKTSTSLRCFSKCTEHKPVSHGRLRVLPLYAKLSASQQLQVFEDVPEGERLVVVATNVAETSLTIPGIKYVVDTGKEKVKNYDHATGMSSYDVQWISKASASQRAGRAGRTGPGHCYRLYSAAAYGKDDLFPEFAEPQIKKIPVEGVVLMLKFMSIDKVENFPFPTPPNKESLVEAERCLKTLEALHSDGKLTPMGKAMAQYPMSPRHSRLLLTVIKNLKNKQQGFARSNFILGYAAAAASGLNFTNPFLKQLDECDTYGESVENTNLEANGPWERKRQKKLKAVVREAREKFSNPSSDALTIARALQFFELSENPVEFCRANSLHLKTMEEMSKLRKQLLQLIFRHSKWCEEFAWNSGDSAEVERAWRNEPSILQLNEEELLGQGICAGWADRVARRIHTYLKPSEDDRKVRAVRYQSCALDDTIYLHRSSSVAQVAPELVVYSELLSTKRLYMHGVTTVKPGWLLKYASSLCTFSAPLEDPKPYYDPLNDQVYCYVSPVFSRHNWQLPLHSLPIKDGASRLQVFACALLKGDVLPCLRDAKDFLALSPSAVLGPARQRRVGDLLSRMKIGPKLVDSRAALRGVWNFDPGFLYPELKLWYQDRFHDQFDLVWEQMHQQVLLEGRKLFPKRSKKVKG

SEQ ID NO: 50197 - protein, 1279 aa, Zea Mays
MEDSNALILPCKRKNKAQVKAKDGKKAKKEDPKMSKTKLKKLQKLEEEKKKKLLQAKSIEVLQKHKISEDAYSLLHASGTIGQAETLKEKRRRAVQFSKAGLDVPEELSLFKKSGGTKVPENSDVGEQVSPLKFVEPAPIVDSGRECNNKMKDLVKAIECQPIMGFGAGIPEPETEEPSDDAHMLTNQKIQLSIPSCSGAELDLQGKELGQGQHSVQECINPPIVVPVSRLHEVEKARRDLPIIMMEQEIMEAIYENSVVILCGETGCGKTTQVPQFLYEAGFGTSDRADRKGMIGITQPRRVAVHATAKRVSYELGLKLGREVGFQVRHDRKVGSECSIKFMTDGILLREIQGDFLLKRYSVIILDEAHERSLNTDILIGMLSRIIKIRKDLYAKQQEKLRSGFKIKPEDKISQLKVVLMSATLQLKDFISNRRLFGVIPPAVKVPVRQFPVSVHFSKRTHDDYLGLAYKKVMSIHKRLPPGGILVFVTGQREVEYLCKKLRRASKVQTAKNPGKTDGEDNGPCPKVDEKEIFEAYDIDRDEPEHRYDMFSSYDDDGMYDDDGMNVETNIDSSDNETESEMDTETDDEESVTIETTEEDVPVLAFLKDAESSSALKASFGALSGIPNVLESVEELSDAKCEEKTSTSLRCFSKCTEHKPVSHGRLRVLPLYAKLSASQQLQVFEDVPEGERLVVVATNVAETSLTIPGIKYVVDTGKEKVKNYDHATGMSSYDVQWISKASASQRAGRAGRTGPGHCYRLYSAAAYGKDDLFPEFAEPQIKKIPVEGVVLMLKFMSIDKVENFPFPTPPNKESLVEAERCLKTLEALHSDGKLTPMGKAMAQYPMSPRHSRLLLTVIKNLKNKQQGFARSNFILGYAAAAASGLNFTNPFLKQLDECDTYGESVENTNLEANGPWERKRQKKLKAVVREAREKFSNPSSDALTIARALQFFELSENPVEFCRANSLHLKTMEEMSKLRKQLLQLIFRHSKWCEEFAWNSGDSAEVERAWRNEPSILQLNEEELLGQGICAGWADRVARRIHTYLKPSEDDRKVRAVRYQSCALDDTIYLHRSSSVAQVAPELVVYSELLSTKRLYMHGVTTVKPGWLLKYASSLCTFSAPLEDPKPYYDPLNDQVYCYVSPVFSRHNWQLPLHSLPIKDGASRLQVFACALLKGDVLPCLRDAKDFLALSPSAVLGPARQRRVGDLLSRMKIGPKLVDSRAALRGVWNFDPGFLYPELKLWYQDRFHDQFDLVWEQMHQQVLLEGRKLFPKRSKKVKG

SEQ ID NO: 50198 - protein, 458 aa, Zea Mays
MLSSKPATGPSNSTRGVRLPPEGEGCRPRPSTSRDIHDGLDGGTEALRIKRTRISASCSIDPQSPVSAAEALDEPIGVSSELSHPQMGTSTQCQRPTAYGGVPSHGNTAHKKRAIQMMDEDFQHTVFLREPKPEPDTDDLQCSAPASSCQNAQLGRIASHPLNASTLDALPVQAPLKISGANGRTVQHYRSTAPSSFVEPINSKTKQPQSLENGLDHATMMHNAGTGSAAGKTQEAPCLHTLVASSTMGEVEMSIKCCIDPSKFHMPDLEAVFKMVEEKCLRSHKSLPPDFSIAGLIKQICQCVARLGSDHAAEHNKQSDAFGKIRSSQDKPTTSSAPSLEPIDCMNSRSGEYKAVEESLIVEASENGPPNSTTHQQAHLVLPPNGCTHDLSDISKGKERTPMLTLLKQLATRTVVLIALATACMPLNHVPVQEKLVVNLPIHETDWLGQSSLMSASL

SEQ ID NO: 50199 - protein, 516 aa, Zea Mays
MDSLSRRERAHRAVDAMKPLGFSKKEVFAVLKNLLQLFDNSWEPIEDECYRALADAILEARDRPQMHCSNSTRGVRLPPEGEGCRPRPSTSRDIHDGLDGGTEALRIKRTRISASCSIDPQSPVSAAEALDEPIGVSSELSHPQMGTSTQCQRPTAYGGVPSHGNTAHKKRAIQMMDEDFQHTVFLREPKPEPDTDDLQCSAPASSCQNAQLGRIASHPLNASTLDALPVQAPLKISGANGRTVQHYRSTAPSSFVEPINSKTKQPQSLENGLDHATMMHNAGTGSAAGKTQEAPCLHTLVASSTMGEVEMSIKCCIDPSKFHMPDLEAVFKMVEEKCLRSHKSLPPDFSIAGLIKQICQCVARLGSDHAAEHNKQSDAFGKIRSSQDKPTTSSAPSLEPIDCMNSRSGEYKAVEESLIVEASENGPPNSTTHQQAHLVLPPNGCTHDLSDISKGKERTPMLTLLKQLATRTVVLIALATACMPLNHVPVQEKLVVNLPIHETDWLGQSSLMSASL

SEQ ID NO: 50200 - protein, 291 aa, Zea Mays
MEMLSMLKVGYTILRSETPATDLVNTFMDWAARRGRRREGCAHHRRRLRHRPGRELLGRSSCDPLRSSPSEEERRWEGLRQLLGCGGAGNARNEPLQCQRGCCSQLLRDPAGRAPRRGRHHHRDFRVDRVGDDRREAAVQGRDGGGRRAVRRGHRGRHLPRPAPPHRPAVVPGAVPVAGARARGGGVQPETVVPTDRGRPRSSGEGQEVAGGHRRRPAGAAAQLGHQTGVVVGFGKAAGSDMVLAAACLFGQMWTSCKSAVTFVRCVTLNFVHTVCCCPDFSSCGRSYCIA

SEQ ID NO: 50201 - protein, 284 aa, Zea Mays
MLDFLIKCVFMQVFIAISIILGDGLYNLVKIFIVIARELCSMQSKQHELPVQALEDDGSCEQLADEKLQTEIFLKDSISPWFAASGYIVLAAISTASVPAIFPQLKWYLVLLCYFFAPVVAFCNSYGMGLTNLNLAPTYGKIALFALASLVGSDGGGVIAGLAACGIVMSVACSTADLMQDLKSGYLTLSSPRSMFTAQLIGIALGCVIAPLTLWLFWTAFDIGDPDGEYKAPFAIMFREMAILGMEGFSALPLHCLDICYAAFFLALATSLLKDVAPANVSRS

SEQ ID NO: 50202 - protein, 599 aa, Zea Mays
MVALAAQSCDYLRVSSKRRYRSSRLDIPVPALNEFEDLNLPSCQGKLATGEHLVDAQPELFDEKTRPGNNLSYKVVVDASVANTLKSAPSTVKQILRWAFNDVLHACVPFNNCQLAEHLFTEMQKLGLQPTSYTYDGFIKTVIAGKGIAYANKVINAMERRGIEPYSDTLAALSEGHSNSLQLDLAEEFLERISEIKPKHIGSFNALLSGCAIMNEPERAVRILAKMKHVNMKPTLRTYELLFSLFGNVNVPYEQGDVLSHVDVSKRISIIEMDMFNNGIQHSFVSMKNLIRAFGAEGMIEEMLRYLNIAENTLWNINPHQKSDLYSTALHALVDVKETHRAVKMFKIMRSCSLPTNISIYNTMIECCKWLPCFKSASALLSLMLRDGFNPTVVTFTSLLKVVLENDNFEGALDLLDICKIEGLQPGIQTFNTVLLRAYARGQIHVLEYILECIHRSKIQPDPSTLWYTFCAYEEHELYNTAIESLLVLSMRMISEDAGIPSEKRIVFEDLILSEEPDAEFRIIRAFQAGEEFLATALLNLRWCATMGATVSWSPEESLWAMRLAASYDANKRPHINPSDAPKSWGRNPLNRPYWEANG

SEQ ID NO: 50203 - protein, 822 aa, Zea Mays
MQRILSRAARRCTNSSAAFNSPHAQANAASVHSEDAPTCSNMITENDDFTWKTSFVRPMQSEVVNALRRGDRQRASLILSNFHHTKESLTKEDFSYILEYCAEAPDPLFVMETLELMEEKAIGMSKSIYRYVIRALSRGGYAKEALHWLALLGEKESTHATTPIFNIFLNACGRANLKDAENCLEILENLFLGKSEITYCELLKLAVLQGNLPAAYDIWKECSRYYSPSIVTQRRFIRALTALGDLQSAYHILQHMVALAAQSCDYLRVSSKRRYRSSRLDIPVPALNEFEDLNLPSCQGKLATGEHLVDAQPELFDEKTRPGNNLSYKVVVDASVANTLKSAPSTVKQILRWAFNDVLHACVPFNNCQLAEHLFTEINAMERRGIEPYSDTLAALSEGHSNSLQLDLAEEFLERISEIKPKHIGSFNALLSGCAIMNEPERAVRILAKMKHVNMKPTLRTYELLFSLFGNVNVPYEQGDVLSHVDVSKRISIIEMDMFNNGIQHSFVSMKNLIRAFGAEGMIEEMLRYLNIAENTLWNINPHQKSDLYSTALHALVDVKETHRAVKMFKIMRSCSLPTNISIYNTMIECCKWLPCFKSASALLSLMLRDGFNPTVVTFTSLLKVVLENDNFEGALDLLDICKIEGLQPGIQTFNTVLLRAYARGQIHVLEYILECIHRSKIQPDPSTLWYTFCAYEEHELYNTAIESLLVLSMRMISEDAGIPSEKRIVFEDLILSEEPDAEFRIIRAFQAGEEFLATALLNLRWCATMGATVSWSPEESLWAMRLAASYDANKRPHINPSDAPKSWGRNPLNRPYWEANG

SEQ ID NO: 50204 - protein, 852 aa, Zea Mays
MQRILSRAARRCTNSSAAFNSPHAQANAASVHSEDAPTCSNMITENDDFTWKTSFVRPMQSEVVNALRRGDRQRASLILSNFHHTKESLTKEDFSYILEYCAEAPDPLFVMETLELMEEKAIGMSKSIYRYVIRALSRGGYAKEALHWLALLGEKESTHATTPIFNIFLNACGRANLKDAENCLEILENLFLGKSEITYCELLKLAVLQGNLPAAYDIWKECSRYYSPSIVTQRRFIRALTALGDLQSAYHILQHMVALAAQSCDYLRVSSKRRYRSSRLDIPVPALNEFEDLNLPSCQGKLATGEHLVDAQPELFDEKTRPGNNLSYKVVVDASVANTLKSAPSTVKQILRWAFNDVLHACVPFNNCQLAEHLFTEKLGLQPTSYTYDGFIKTVIAGKGIAYANKVINAMERRGIEPYSDTLAALSEGHSNSLQLDLAEEFLERISEIKPKHIGSFNALLSGCAIMNEPERAVRILAKMKHVNMKPTLRTYELLFSLFGNVNVPYEQGDVLSHVDVSKRISIIEMDMFNNGIQHSFVSMKNLIRAFGAEGMIEEMLRYLNIAENTLWNINPHQKSDLYSTALHALVDVKETHRAVKMFKIMRSCSLPTNISIYNTMIECCKWLPCFKSASALLSLMLRDGFNPTVVTFTSLLKVVLENDNFEGALDLLDICKIEGLQPGIQTFNTVLLRAYARGQIHVLEYILECIHRSKIQPDPSTLWYTFCAYEEHELYNTAIESLLVLSMRMISEDAGIPSEKRIVFEDLILSEEPDAEFRIIRAFQAGEEFLATALLNLRWCATMGATVSWSPEESLWAMRLAASYDANKRPHINPSDAPKSWGRNPLNRPYWEANG

SEQ ID NO: 50205 - protein, 854 aa, Zea Mays
MQRILSRAARRCTNSSAAFNSPHAQANAASVHSEDAPTCSNMITENDDFTWKTSFVRPMQSEVVNALRRGDRQRASLILSNFHHTKESLTKEDFSYILEYCAEAPDPLFVMETLELMEEKAIGMSKSIYRYVIRALSRGGYAKEALHWLALLGEKESTHATTPIFNIFLNACGRANLKDAENCLEILENLFLGKSEITYCELLKLAVLQGNLPAAYDIWKECSRYYSPSIVTQRRFIRALTALGDLQSAYHILQHMVALAAQSCDYLRVSSKRRYRSSRLDIPVPALNEFEDLNLPSCQGKLATGEHLVDAQPELFDEKTRPGNNLSYKVVVDASVANTLKSAPSTVKQILRWAFNDVLHACVPFNNCQLAEHLFTEMQKLGLQPTSYTYDGFIKTVIAGKGIAYANKVINAMERRGIEPYSDTLAALSEGHSNSLQLDLAEEFLERISEIKPKHIGSFNALLSGCAIMNEPERAVRILAKMKHVNMKPTLRTYELLFSLFGNVNVPYEQGDVLSHVDVSKRISIIEMDMFNNGIQHSFVSMKNLIRAFGAEGMIEEMLRYLNIAENTLWNINPHQKSDLYSTALHALVDVKETHRAVKMFKIMRSCSLPTNISIYNTMIECCKWLPCFKSASALLSLMLRDGFNPTVVTFTSLLKVVLENDNFEGALDLLDICKIEGLQPGIQTFNTVLLRAYARGQIHVLEYILECIHRSKIQPDPSTLWYTFCAYEEHELYNTAIESLLVLSMRMISEDAGIPSEKRIVFEDLILSEEPDAEFRIIRAFQAGEEFLATALLNLRWCATMGATVSWSPEESLWAMRLAASYDANKRPHINPSDAPKSWGRNPLNRPYWEANG

SEQ ID NO: 50206 - protein, 987 aa, Zea Mays
MDGEQAARWAAAQEGVPVGADLVAAALRQLRFLAAVDRRRWLYDEGPLLDRAIRRYKACWLPLLDKHTKGVVVDGPLVVPLDCEWIWHCHRLNPVQYIRDCKKVYGRILNNNNVESSTQTKSTLESEKVWKELYPEEPFELLFTRTFDTAVDVNPAGAEEDITYDLVSAVKRQSSFYYQVGTPTMHDPRFLQEALARYKAFLYLIKMNQEKGLQRFRVPTYDVDLLWHTHQLHPITYRNDMVKLLGKVLEHDDTDADRSEGKKLDVGFTETTEQFESTFGVRYWKAGCMYRGNVPSPVTSTPQTFSAEVGTGSYICKAQKDLNALDVTVVELYLQIVDIKNLPSAVQKENVYVRFAKNQSDMFISDGGRLDISTVTGKNTGVCLQCEPTGELILAVMVDQLSKKPEPIGKVSFPLHDLTGPDSKLSFEKWFELKAHGGHAASPPVSLRVAASATVPSSAQKVFTMVRMEPFSLKSCLLPHSIKDQNTGSWTRFVNDCGTELIRLQIREHKAKNSMAVVRELVGVLKSTKKQIQLAEFKENKWTLKDSNLPISHGTDGSLLDLKGDNHLIKLYRGRKLEYERKCCSAHSEDVSAVTAVKFCAEHPYGKAVALLDTEAQLIMVNEDWLLLPWISISVLFMDGDGGTKLGGGAMVQKGTVFGSDTSMVLETQTVGAGSVASNLAQCGTCSAVFGGDDKEMANCKVEHASSGASRTVVASGENGHTETAGCGGGCGSNCGPMMAEDPKAGNAKSGGCGSGCGGGCGGAGGCGTMANEGQSRSGGVGTLLSSNAMGGEGQQAHSAGCGSGCGGGCGSGMVIEGSKVNNVNAMSGGCGSGCGGGCGSGMVIEGSKANNAMSGGCGSGCGGGCGSGMLIEGSKANNAMSGGCGSGCGGGCGALFNASTAAGEGLHNKSAGCGGGGCGSGCGGGGGCGSGMAIEGFKANHAKSGGCGSGCGGGGCGTGSMVAEGSNGGNAKSGGCGGGCGAVFNA

SEQ ID NO: 50207 - protein, 705 aa, Zea Mays
MSSPAPTSPATPSPPPPAPVPPTPSPQPPTPAPVPPTPAPVPPTPAPVPPTPAPIPPTPAPVPPTPTPSPPPPSPSPPPPVTPSPPPPATVPTPSPPPPASPPPPTVPTPSPTPPASPPPPATAPTPTPPPPVLRPPPPSAVPASPPPPDSVPSPPPSPNGVPASPASPPSHQLLAPPPPASSTGTSSTSSSPSKSSSNATVVGIGVAVGAVVLIGLAVGLIYCFAGRKRRRRSPLPSQGFPGEFYDPRRGPMTPLHMSHVQSTTPSSTPPLMHSWQQSSHGLSESPLPPLNPSPAITGGTFAYDDLAAATDGFSDANLLGQGGFGHVYRGTVAGQEVAIKKLRAGSGQGDREFRAEVEIISRVHHKNLVSLVGYCLHGEQRLLVYEYVPNKTLEFQLHGSGRPTLDWPRRWKIAVGSAKGLAYLHEDCHPKIIHRDIKAANILLDYNYEPKVADFGLAKYQAAEVTSVSTRVMGTFGYLAPEYAATGKVNDRSDVFSFGVMLLELITGRKPIMTSSEYQPETLVSWARPLLTRAVEEENYDELIDPRLETNYDAYDMARLVACAAAAVRQTARSRPRMSQVVRYLEGELSVEDLNAGVMPGQSAMQRSSGGTTDQINRLRRMAFGPGAGGSTGTGAITEYTSSEFSDPTTEYGLNPSSEYTASSAGDTGEVAAGAQGQQQWHGRRAPGDTERMSRRTTGRRTQS

SEQ ID NO: 50208 - protein, 94 aa, Zea Mays
MEQRKEREGLTLIKQSMGRIPRSPKADLKKVSKVKVLSKVKLLSKIMVLSKLKLLFKLVQVEVSLPVQSPIIRTRESILQDNLISQLAMLLGDG

SEQ ID NO: 50209 - protein, 733 aa, Zea Mays
MLGSKTKSGSAEAKSNGKPDKEKKGGGGGTPPTPKDSKPRKPAEQHAQLAAIREELVKAKEQLVENEKEKCKVFAELERAKKVADEANAKLQDALDVQRRAIEAQEADKLPARESEQASIHGQQEADDAVLRSTVEQLEKARYELADAIDAKNEALSQVDDAVRASEVKAQEVEHLTVEVTRLKGLVDSKVDGNRKKTAERIQNLEEENFALKLELEKKKAAEEKAVRLERMIDELKSDVDDARNFGSKSKQLADEWQKKAQLLEVRLEEADQSNILKGESLNSAMEELDSTSSLLRDRESEVAALRDKVRFLEDELTKLKSDIVVSGQRADAAEKETTDLWTEIEGLRLKLHTVEEEKMEALNSDKNTSSEIETLNEQKNQLADELEASKDELEKIKKAMEGLASALQEMSAESREAQEKYLLKQDEMERAQAQVEELNLSLKNIKENYELLLDEANYEKVCLTKAVERLEAEAKRAHEEWQSKELSFVSSIKNSEEEIVAVRVQMDRTLEVVKEKENENTELQEKLQQLESQLMEANRIREEGNTETIRWKENILDQENELQNIKQENDDLQAKESAASEKIKELSSQLTNAKDGTINSNTKDGDNEKGGTEEDDEPVVVVAKMWENSKFADYDSAKEENDGDSQDDEPVVVVAKMWENGKFADCDSSKEKDNDGDSQVDLESNKGDAGLDSNGLHSTNESSGRASTKQPQQHKKPLLKRFGGLLKKKSEK

SEQ ID NO: 50210 - protein, 85 aa, Zea Mays
MVDTPKVNTFKWIQVPPEPVKEVPKEPKLSCPICMNEITEAASTVCGHIFCQPCIKAAIKAQKKCPTCRRKLTPRQQHRVYLPSP

SEQ ID NO: 50211 - protein, 191 aa, Zea Mays
MRSEGGNKSSGDGGPTQRASALAALSSALNPSSQGKQSDERPTKPSSTQAQSHSGQGSQRAAAVAALSNVLTAEGSHSPRHSRSSPTADAEKTELAPASPHQLETGPAEDVRTEPDVSQEQTANENGGQTTFSYDRLVSKSTDPVSGIDHKRRETYLVDNEFETVFGMTKEEFYEQPRWKQELQKKKADLF

SEQ ID NO: 50212 - protein, 605 aa, Zea Mays
MARTRSGIPDERSHSTGIPQSQKARQNPLGGYPSLPMATAAAAAVAAPEQPRRRKPAPGRGGVALPAGLSEEEARVRAIAEIVSAMGELSRRGEDVDLNSLKSAACRRYGLARAPKLVEMIAAVPEADRATLLPRLRAKPVRTASGIAVVAVMSKPHRCPHIATTGNICVYCPGGPDSDFEYSTQSYTGYEPTSMRAIRARYNPYVQARSRIDQLKRLGHSVDKVEFILMGGTFMSLPAEYRDYFIRNLHDALSGHTSANVEEAICYSEHSAVKCIGMTIETRPDYCLGPHLRQMLSYGCTRLEIGVQSTYEDVARDTNRGHTVAAVADCFCLAKDAGFKVVAHMMPDLPNVGVERDLESFREFFGSPAFRADGLKIYPTLVIRGTGLYELWKTGRNYPPELLVDIVARILSLVPPWTRVYRVQRDIPMPLVTSGVEKGNLRELALARMEDLGLKCRDVRTREAGIQDIHHKIRPDEVELVRRDYAANEGWETFLSYEDTRQDILIGLLRLRKCGRNVTCPELVGRCSIVRELHVYGTAVPVHGRDVDKLQHQGYGTLLMEEAERIARKEHRSKKLAVISGVGTRHYYRKLGYELEGPYMVKCLA

SEQ ID NO: 50213 - protein, 355 aa, Zea Mays
MGVYLSTPKTDKLSENGENDRLKFGLSSMQGWRATMEDAHSALLDLDSETAFFGVFDGHGGRVVAKFCAKYLHGQVLKSEAYSTGDLGTAVHRAFFRMDEMMQGQRGWRELSALGDKINKFSGMIEGLIWSPRGSDSNNQQDDWASEEGPHSDFAGPTCGSTACVALIRNTQLVVANAGDSRCVISRGGKAYNLSRDHKPELAAERERIMKAGGFIHMGRVNGSLNLSRAIGDVELKQNKFLPPEKQIVTANPDINVVELCDDDDFVVVACDGIWDCMSSQQLVDFIHERINTESSLSAVCERVLDRCLAPSTIAGDGCDNMTMILVQFKKPVDRNKKAEAAGQSASNVDEAKSR

SEQ ID NO: 50214 - protein, 400 aa, Zea Mays
MEMEQLCSLLRDLDALKQHPDDLTSTIDRMRERLVAMMNPAAGAASRSKIKDMSAEVVDNNPYSRLMALQRMGVVENYERIRDYSVAIVGIGGVGSVAAEMLTRCGIGRLLLYDYDTVELANMNRLFFRPEQVGMTKTDAAVQTLSGINPDVVLESYSLNITTVKGFETFLASLKAQSSHERSTGVNLVLSCVDNYEARMVVNQACNELGQTWMESGVSEDAVSGHIQLLVPGETACFACAPPLVVASGVDERTLKREGVCAASLPTTMGYNSLKDYFPAMEMRPNPQCSNPACVLRQKEYMESKPARDAAAKTKMEAEASTENECPVHLDNEWNISVVDDETETSSIRNTPDILPEGLVRELPDADSYAGPAAPVSSSAIDDDDDLEELQRQLDALNAS

SEQ ID NO: 50215 - protein, 690 aa, Zea Mays
MKENDSVDCSASFTGVSASVRLDNLQLSAFGIHVPKTCWKISPKFAPSLLVILDIANQKEDYAVRNGRELWKAAAQKVDNSVVCQRFSLRKAVSCAAFWRSYVHAYVLLLTLAGYPSDKIVVRNCGRVSRNKKFLGTIRHQWKTVVDLEDKIPVEAIARARRAARSKLIVSQQLKKQESSKAVLVSFLLKILMPFLCLWRFLVFIWRPVWAMMGPRNKASYAYFFPGSTYDVDMELHVSVHLGELSVTLLPFVDCFTDMKGSDRRNTQNELASVHLVMKSSCLLYSAGCTTQSFYLVLGELKTCLSSVPKLVQADSNNSPRRSSSFGTSEFIKDTDSRIILWCDSASMSPFSRQQADRSLYFNDDLSTALIKSDMDELWSNWMIISNAYNESGVIHHEKPSIIFEFKSFLIDPYISISGYQQCRFTIGRLNLDLDYLCVSSTYLLYRQFMHHKQAKEPTERSADFSNNDDTHLDSTSGVADKLRSSNHRIKVAMLDVIPENTLRIVALVTGPSIRLFFDKYNMLQNSKDVYKPLLSQMNSRSCIVFSLAYVECALWPASLSSTPPIANFHTKESHKTFVSAKEPQEHHQLQIESSARNVYPGHVMLDARFIFAGLTLLIDNLDANQQSHICGPLSCSFLISASRNYVYSFFGVRNVISTNLEGKIIGFLAFFCMDELFMVCQVEVEDLKH

SEQ ID NO: 50216 - protein, 486 aa, Zea Mays
MSNLDSATPAAAVAEIGTAERDSTTASVSALNGTHRCKKKKIKKNTTREQQELQLDLDSTLTAEAEGQVEAKGNEVEEQDATDAVASVMEGTAKYYEEDSKVKVSLMPEKEANTTVVSDVVGASGHADINMDPINGDDLSSAQSKANDADVLLKNKDGNKGDKNCAENSVLLQESSARRKRRRGKRKWGSAGGGPGFSSDNGGVVAEHSLHSSANHGLSCICAPCLVEAHEKKIQNIYSPRGSLVRFQRKKLLILDLNGLLADINQDYHNAHLAHAKVRTKLVFRRPYCDDFLRFCFQNFELGIWSSRKRENVESVVDILMRGLKQCLLFCWDMSYCTVTGCKTIDNKDKPLVLKELKRVWNKDEPDLPWGQGEFSPSNTLLVDDSPYKALCNPPNTAIFPEPYNYMNQRDDYSLGPGGDLRVYLQRIAAADNVQNFVRDNPFGQKSITESDPNWNFYVKIVDKMEKQIVDQVETKIVDEVERSLG

SEQ ID NO: 50217 - protein, 766 aa, Zea Mays
MSQILRHRLSAHYHGVCGHCCRRLSSAVYGGGGSRRAVAAPPQDGEGSRAVRVSVWWDFENCHIPNGVNVHRVAPRVSAALRAAGIRGPLSITAFGDVLQLARSSQEALAATGVSISHVPSSGKNSSDRSFMADLVYWIAQNPPPVHFFLISGDRDFANILHRLRMSNYNVLLACPSSATSVLCSAATIMWPWEGLVRGEDLSPKRFNNPPDGLHGSWYGHYRGALDDPPLEKESEEPIKVASVPKQFSVPSNTKHCPVPKHVKNAILEVLRSYPEGVNISLLRNQLVKNKIDLGTNFFGHKKFSSFLESMPHVVKLLGSRLGENELYAIAANKKFLQPGDGALDDPFLEKGAEEPIKVSSDSQHCSVPSDTKSSSIPKYVTDAILEALCSYPEGINLSLLQEELAKKKICLGPDFFGHKDFSCLIQSIPDIVELVCPQTGGQLYAIAVNRRSLQPGDGSTKTLSSAQGNARENNPTGTAHSNKKNTLSSLRSIYKSRSFTETLSEHPPTFSVLPSPSNGLSEDQTECPVVDVNGSTESPAKHREVGEMTTPGTPSSSGVENAANEYGFFKRIWTMWNGPKNVKSEVSQNCESTSAEVIDDLIHETSSKNDRSDGTEGMLAVSDNLSISLGDDHSEKIKRDPSIPENPEPCRKPAAVSMIKSGKKDDISEMNRGMFNWASRWWPFGKSDADSSTTNINATDEPRTDSIEEFESSNAPTNGSAQQVVHEIFTKPDLWSVLEQQLSEPLGSEVVLKAKTRNWHTDCRS

SEQ ID NO: 50218 - protein, 842 aa, Zea Mays
MAATPAWDWEESLVFFLQPFFLHGVSAAAHLILALAVAGRLLFRRLSASRTKDGEVGGGDASRGVGRFRYWYGVSVCTTWAMGAFEVLLAVYSWYANGGAGWSRDAVVEQVDAAARAVSWLLLAAYLQFDFWWRRQRQERFPVALRLWLALFMLLSVVTVGVHAAMILDGSLVPGRSWALDAVSVTAAAVLLSVSAGFFGRKEGEGGGHASEAHEPLLNGAHEGSGDDDENSSSAADASLFTGAGFLSVLTFSWMTPLLGVGHRKTLVPEDVPGLEPGDSVAGVLPPFKANLEALTGDGGRSSRKAVTAFKLTKALLRTLRWHVAVTAFYTLVYCVAVYVGPYLIDSLVQYLYLNGDERYASKGQLLVLAFVVAKVLECLSQRHLFFRLQQAGIRARSALVAVLYQKSLALSSQSRRSHTSGEMINIVSVDADRVGIFSWYLHEVWQVPLQVVMAMFILYSTLGVASLAALGATVATGLATVPLGRMQERFQEKLMDSKDGRMKATSEILHSMRILKLQGWEMRFLSKIIELRKTEANWLKRYLYTSATMTFIFWGTPTFVAVVTFGACMLMGIPLETGKMLSALATFRVLEEPIYELPGTIAMVIKTKVSLDRIASFLCLDELPSDAVQRLPRGSSADFAVSVGNGCFSWEASPDAPTLKDLNFQARPGMRVAVCGTVGSGKSSLLSCILGEIPKLSGEVRTCGTTAYVSQSAWIQSGKIQENILFGMEMDRDKYDRVLESCALKKDLENLPFGDQTVIGERGINLSGGQKQRIQIARALYQDADVYLFDDPFSAVDAHTGSHIFKECLLADLASKTVVYVTHQIEFLPAADLILVRISWS

SEQ ID NO: 50219 - protein, 545 aa, Zea Mays
MSQTNWEADKMLDVYIYDYFVKRNLQATAKAFQAEGKVSSDPVAIDAPGGFLFEWWSVFWDIFIARTNEKHSDVAASYIETQLIKAREQQHQQPPQQQQQQQQIQMQQMLLHRAAQQQQQQQRRDGSLLNGTASGFSGNDPLIRQNPANANSMAAKMYEERLKLPPQRDSLDEASIKLQQRYGENVGQVIDPNQALLKAAAAGQSSGQILHGTASGLSGTPQQVQARSPQQPPTAEQNIRTEINPVLTPRAAGTEGSLIGIQAGSNQAGNNLTLKGWPLTQKPFMQSPQQFQQLQFLTPQQQQQLLLHAQQNLSSSMSSDVDTRRLRMLLNNRNVVLGQDGQTNSGGDVIPNIGSPGQSGGSRNDIDILIKQQQQQQSHSQQQQLQQPALSGQQSQSSNQLLHQHGKPGVGSLPIDGNLPNSFGFPEQGSKKRKKPVSSSGRANSSGTANTAGPSPSSAPSTPSTHTPGDAMSIPQLQYNGGPSKPLMMFGSDGTGSLTSPANPLGDVERLLEDGSLDENVESFLSQDDMDPRETMGRCMDSSKA

SEQ ID NO: 50220 - protein, 309 aa, Zea Mays
MQSPQQFQQLQFLTPQQQQQLLLHAQQNLSSSMSSDVDTRRLRMLLNNRNVVLGQDGQTNSGGDVIPNIGSPGQSGGSRNDIDILIKKKFALLQQQQQQQSHSQQQQLQQPALSGQQSQSSNQLLHQHGKPGVGSLPIDGNLPNSFGFPEQGSKKRKKPVSSSGRANSSGTANTAGPSPSSAPSTPSTHTPGDAMSIPQLQYNGGPSKPLMMFGSDGTGSLTSPANPLGDVERLLEDGSLDENVESFLSQDDMDPRETMGRCMDSSKGLGFTEVAKARASTNKVVCCHFSLDGKLLATGGHDKKVWMPR

SEQ ID NO: 50221 - protein, 976 aa, Zea Mays
MYITQPKKKRIEFVSFTAHGMGSWRQKLPGLGEGSGSGSQAAEAGGGGRGFRGRGGFYHQQQSPQGGRGRGTGYYSGGGGGRGGRGAVPSAIAPELRQAMQTSNEPDNIPAPEAGSQSQDAPSPSEEAVDQLKGLSVQDIVQAFPVSSKFPHRPGNGSVGTRCLVKANHFFAELLPAKKDLHQYDVSVTPEVTSRIVNRSVMEELVRLHKLSYLGGRLPAYDGRKSLYTAGPLPFTSKEFHITLLEEDDGSGVERRKKTYKVVIKFAARADLRRLEQFLAGRQAEAPQEALQVLDIVLRELPTTRYAPFGRSFFSPDLGRRRSLGEGIESWRGFYQSIRPTQMGLSLNIDMSATAFFEPLPVIDFVAQLLNTDDIYSRPLLDAERVKIKKALRGVKVEVTHRGNMRRKYRIAGLTSQETRELTFPVDQGGTVKSVVQYFQETYGFAIQHTYLPCLQVGNQQHPNYLPMEVCKIVEGQRYSKRLNQSQIRALLEETCQRPHDRERDIIQMMNHNSYHEDPYAKEFGIKISERLASIEARILPAPRLKYNETGREKDCLPRVGQWNMMNKKMVNGGRVRSWTCVNFARNVQENVAIGFCRELARMCQASGMDFALEPILPPIYAHPDKVERALKARFHDAMNLLGPQRREQLDLLLIGILPDNNGSLYGDLKRICEIDLGLVSQCCCAKQVFKMNKQILANLALKINVKVGGRNTVLADAVSRRIPLVTDRPTIIFGADVTHPHPGEDSSPSIAAVVASQDWPEVTKYAGLVSAQSHRQELIEDLYNVTHDPQKGTVCGGMVRELLISFKKSTGQKPQRILFYRDGVSEGQFYQVLLHELDAIRKACASLEANYQPQVTFIVVQKRHHTRLFAHNHNDQNSVDRSGNILPGGNCRGLEDLPPYRVRLLPVQPCWHQGHQPSCSLPCLVGREQLHSRRTADPHQQPLLHLREVHALCVHCPAGVLRSPGRIPRPVLHGA

SEQ ID NO: 50222 - protein, 227 aa, Zea Mays
MEVHVKANRHAVRSLLDLYAILGRPVDVERVWNLCAEPKLEDFLAAIKAWSKLGHIERAEEIFDVLVKTFPKLTSKYFNAMLEVYAENKLLDKSKKFIERMCLDGCTIGPLTWDAVVKLYVNLGELSKADSFLMNVTEDNPDRHPLFSSYVILLKAYAEKGDIHNAEKIFDRVKQTNFPARTLPYNLLLAAYASAQVTPYGFRERMKADKFSPGKSQIEQLKQLDSL

SEQ ID NO: 50223 - protein, 308 aa, Zea Mays
MAAAALIRRLPAARAQAPAFMAARPISDSTAAFTIETSVPFTSHLVDPPSRDVTTTPAELVTFFRDMSLMRRMEIAADSLYKAKLIRGFCHLYDGQEAVAVGMEAAITRSDSIITAYRDHCTYLARGGDLVSAFSELMGREAGCSRGKGGSMHFYKKDANFYGGHGIVGAQVPLGCGLAFAQKYKKEDTATFALYGDGAANQGQLFEALNISALWKLPAILVCENNHYGMGTAEWRAAKSPAYYKRGDYVPGLKVDGMDVLAVKQACKFAKDHAVANGPIIQHWPCLGPWSVAARCGNRAVVPQLRYR

SEQ ID NO: 50224 - protein, 129 aa, Zea Mays
MEEKNKSATNTQKELEAVLSEKDRRIRQMEEKATGSNPDQMAALMEILQRKEAELEEIKTRFQDFKKPDRVEVNNKSTPMQMNNASATPDVMIVTKATNSSSVAVPIKSEEKRPFLFHSNGKCQTEEKT

SEQ ID NO: 50225 - protein, 59 aa, Zea Mays
MSLAFCLPIDFLLLLPMSFFPLVIFIIGTLSNKMTCITAFEAGALSPCLILVGVFLASF

SEQ ID NO: 50226 - protein, 141 aa, Zea Mays
MTSVVHSVSGDHRAEDQNQQKKQAEPGDQQEAPVTSSDSQPTVGTPSTDYVAPYAPHDMSHAMGQYAYPNIDPYYGSLYAAAYGGQPLMHPPLVGMHPAGLPLPTDAIEEPVYVNAKQYNAILRRRQSRAKAESERKLIKG

SEQ ID NO: 50227 - protein, 153 aa, Zea Mays
MWKTPAERCFLWLGGFRPSELLKLLANHLEPLTEQQMLGLTNLQQSSQQAEDALSQGMEALQQSLAETLAGSLGPAGSSGNVANYMGQMAMAMGKLGTLENFLRQADNLRQQTLHQMQRILTIRQASRALLAIHDYFSRLRALSSLWLARPRE

SEQ ID NO: 50228 - protein, 142 aa, Zea Mays
MENGSGAVVPSNSSDRSDRSDKPLDQKTMRRLAQNREAARKSRLRKKAYVQQLESSKLKLAQLEQELQKARQQGIFISSSGDQTHAMSGNGALTFDIEYARWLEDQNKQINELRTAVNAHACGRHLLKGASYGLGVFVHLSF

SEQ ID NO: 50229 - protein, 198 aa, Zea Mays
MPNAAARVCVCGGGGGGGGGRRDEDGGWPHWKESESEETFLHEHTTDSAAASRQRPPLPLQPEPGGALLQPTHDARVLNAPNDLDSLFPEPQQQQRVARASQRDSEPEPEPQPQTNDEKGQTAADLPEVGGRAKGPIPPPRRLPRSCHGAVAPSTPADSVHYGLLLLRASWYCWETQVLGKVALFFVLFVVSLILLPR

SEQ ID NO: 50230 - protein, 976 aa, Zea Mays
MMMMMEWTHKLRMSTDTTLRMVKRNQFVSVSCLSSLEVVAWKIRLDSEHPNIYVLSIEHKWIKLLKPRKCYGDIVRSTLITVQMLHFFGRGEQRSSNHLWDHLDEVFGKYNPKPVEDDLMKHHTLIKLFVEKDQTLMKSKILQRLIENGFKRTKKALGMEAQSIVSDGWRARKNDDNNYGNKDDSGDDCDGDGSSDDGDGSSDDDVTDQICALCDDGGHLLSCDGPCKRSFHPTKKDGRESKCESLHYTSAEVKRIGTYLCANCKNKQHQCFRCGELEPSHGPNAKVFQCNQASCGYFYHPKCIAQLLDPNATDGELERRIMSGMSFPCPIHWCFKCGHMENKAQRALQLAVCRRCPRAYHRECLPRDLSFGTKDKDGNQRAWKLSDTIFIYCLDHEIDKDTGTTSRNHIKFPATPEYTKTKGLGNSKGRMTGKRRKNKRRKNTDQSTKPTDLPNRLCGAESEQADNVGAKSTLPQIVVEPHCAAKHLKGDPQIAKQGVAARQNGAETMKGHENQFGISFCVASTETEKRVTCLAQRGTCLGTQYDGPSTKGMYDCSVQDTPMDDDVELDNVACIIAVDKYVNGRGKTQEDYTRKEAAQRKDSSENQGQNDALELDNLRMEMQADERPLEPGNKRDRKWQKNVYGLGSASGQKETLSRRENPRSDRGMVHSNDSKTIYYRKGGTEVDNVDDHPLEKQDHQDTSSDGSKKRSRPVDNASGGNRPYLDENKKRNLREDGRYAHYEDWRSERNTAADTSGYKAQSEEKPVWTNTRTGSREHSLDRQRIECGDSYRGTYNNRQRHEWLHPHASGNSSRIGWDDRRQWSSSRSPFPSAEFGGDRSCSRAHPRGSKYRTGGRHDHPQYLGLGTPQHGTSRPHHTMGWDRDTFHDHQHGRRPPHHTMGWDRAPFRDHQHGEYDDSRYGEYDATDNGPDSAHRPYTAAGVAGRSAPSYQLAGGYGEGSRAWRPVTDKYAPWPLP

SEQ ID NO: 50231 - protein, 801 aa, Zea Mays
MNIVRGVADLLRKAPPPPPAPDAGAAPTASFSAGDFDDAPTPRVVFSGSLEEGALNALWKNYENALDKVEKEKSLQIFVLQFVETFRDWDPNPIEQLVDQELGNNETVVGCSCGHPSEVILILIQEISLITSTFTESGNSPVSPTNHYSGQQNNLGLSSQILQVLECLEILTRSLHNCRVFSYYGGVQKITSLLKAAVAQLKNLNCLLAAEDQSADEAVKNSRVMLNILVCIITIISNFMKLDITVGRIPHITDTTKHTPSCNHLAAVTSSSPDRTISDTLRHWQQKATVLVMEARCVNWLVELLHTVQRLNLKEQCIDLSLHFITLCILRSTVSGTRAQNHLRSIGGLEILLDGLGLPSSKFSVPRQSSISKNERDEILLLQIQYLQTLSEAVFGNVNNLQILFENGRVHKFANCICWPAFMIQMFHWQNDSTKASLTLDSVSGPTYSLDRTEWIDYSIKLSNAFCSFVLPSEDIGYCSDEIAVSQIVLSIPLAYLEQSVRWIIRILMTVFLCIRACTKETELPHHIKIFAKTLQYYVIRMFKRVLISTPALLPAFREEGVWDLLFSGNFFYFGSSIEDTCFHTVTDIQNGNVSSNRISIHSESLYRTDVKILQVEAISFLEFAATLHENTYNMPECSALLDALEHCISDPLLVSTLLKSFRVILQLATEHTLASFESLDVITRVLKAACRQAQELRNFSNFLCSNVSISQDSSQFKNIEGRTEDTLICTELALSLFMEYVTISIDGRILVLHNADCIDCLFDLFHEQNIREHVLEQVLALFRVYLCLSFVLKKFMFTIC

SEQ ID NO: 50232 - protein, 961 aa, Zea Mays
MNIVRGVADLLRKAPPPPPAPDAGAAPTASFSAGDFDDAPTPRVVFSGSLEEGALNALWKNYENALDKVEKEKSLQIFVLQFVETFRDWDPNPIEQLVDQELGNNETVVGCSCGHPSEVILILIQEISLITSTFTESGNSPVSPTNHYSGQQNNLGLSSQILQVLECLEILTRSLHNCRVFSYYGGVQKITSLLKAAVAQLKNLNCLLAAEDQSADEAVKNSRVMLNILVCIITIISNFMKLDITVGRIPHITDTTKHTPSCNHLAAVTSSSPDRTISDTLRHWQQKATVLVMEARCVNWLMFHWQNDSTKASLTLDSVSGPTYSLDRTEWIDYSIKLSNAFCSFVLPSEDIGYCSDEIAVSQIVLSIPLAYLEQSVRWIIRILMTVFLCIRACTKETELPHHIKIFAKTLQYYVIRMFKRVLISTPALLPAFREEGVWDLLFSGNFFYFGSSIEDTCFHTVTDIQNGNVSSNRISIHSESLYRTDVKILQVEAISFLEFAATLHENTYNMPECSALLDALEHCISDPLLVSTLLKSFRVILQLATEHTLASFESLDVITRVLKAACRQAQELRNFSNFLCSNVSISQDSSQFKNIEGRTEDTLICTELALSLFMEYVTISIDGRILVLHNADCIDCLFDLFHEQNIREHVLEQVLALFRLPSSSAEDHTAKLQLCSKYLENLARANEKEKVNTELLIDLLVNMREIIMMDHMYYQNLFRDEGCFLHIISLLNGNFNKVTDERLVLNVLQTLTLLLEGNDASKNEDAVVLLLNILQKERDDTVIAITELIQILGAHSICGKDIRKIFALLRCEKIGAKHKHTSLLLTSLSHMLKEKGPEAFFEFSGHDSGIDIKSPFLWPYNRGISFSCWLRVENFPDSGMMGLFSFFKEDGKGCSAVLNRSALVYESIYQKHQCVLLPLKLPPKQWRFLSITHTIGRAFSGGSQLRCYVDGELVSSEKCG

SEQ ID NO: 50233 - protein, 361 aa, Zea Mays
MNPYDLRFADPSSYHDRRSDLTVAPTFAPPAPVAAANLNPYAAAYPLPVPVPVPAAPAGGDYQRYGQGGRGRGGGGRGGGGGYGGGGRGGGRGRDGLDSLALPKPDFRSLIPFEKNFYVECPSVQAMSEADVAQYRRLRDITIEGRDVPKPVRYFQEANFPDYCMQAIAKSGFVEPTPIQSQGWPMALKGRDLIGIAQTGSGKTLSYLLPGLVHVGAQPRLEQGDGPIVLILAPTRELAVQIQEESTKFGSYSRTRSTCVYGGAPKGPQIRDLRRGVEIVIATPGRLIDMLEAGHTNLRRVTYLVLDEADRMLDMGFEPQIRKIVAQIRPDRQTLYWSATWPREVEALARQFLQNPYKLIL

SEQ ID NO: 50234 - protein, 454 aa, Zea Mays
MASDGHPPEPGKKEDVATTAAGPGANDLDDPQFMCCVCLDLLYKPVVISCGHMSCFWCVHKAMHIFRESHCAVCRQPYIHFPSICQLLHHLLLKLETNDYKRREKEVLEEEKRMQTYSPQIIEFLNYKTNVGSYKENRNEDSKARPPQEVPLNDSVPDEHLKKIKLEDVSCPLCMEMLYQPAVLNCGHVYCVSCLSSLNEETLKCHVCGSLHPGDFPNVCLDLDHFLEEYFPAEYELRGQKVQFKKDQCNRETSSSGRKGSTRALHAEDPSNIHIGVGCDSCGVYPIRGKRYKCQDCTELIGFDLCEACYNSSSKLPGRFNQRHTPNHRMEVDNSALVHRILRHHGIPEEGPEGLMMEVVGPDAMVQILIDNQGMEEGNDEGPGEAAIEEPVGSLGSMSRLSHLFMYNPEMEDGNDEDSGEEAAIEEPVGSLGAMAPLFMYDQEMEDNEEDQAH

SEQ ID NO: 50235 - protein, 181 aa, Zea Mays
MMNLSMNGGAKKLDGKSMTMLWRNSYNGMQAKFAARQMPDDWQETSTLLATLEKIESWIFSRIVETIWWQVMEQCVARLNVAMFNAILRESSSEIPTDSISDPIVDPKVLPIPVGDLSFGSGAQLKNSIGNGSRWLTDNLGIDHDDFEDIGDVEDERRVAAETKSFQLLNELSDHLFFSFS

SEQ ID NO: 50236 - protein, 131 aa, Zea Mays
MCPLSAGGHECGCLPILAKLVMEQCVARLNVAMFNAILRESSSEIPTDSISDPIVDPKVLPIPVGDLSFGSGAQLKNSIGNGSRWLTDNLGIDHDDFEDIGDVEDERRVAAETKSFQLLNELSDHLFFSFS

SEQ ID NO: 50237 - protein, 131 aa, Zea Mays
MCPLSAGGHECGCLPILAKLVMEQCVARLNVAMFNAILRESSSEIPTDSISDPIVDPKVLPIPVGDLSFGSGAQLKNSIGNGSRWLTDNLGIDHDDFEDIGDVEDERRVAAETKSFQLLNELRDEQGCSHN

SEQ ID NO: 50238 - protein, 166 aa, Zea Mays
MMCMLASGQETQKYFIDECDIFHKNEIRNGQGLLTMMTTWPPSLPSVVLREIIVQTFGISHQFTPSMMNLSMNGGAKKLDGKSMTMLWRNSYNGMQAKFAARQMPDDWQETSTLLATLEKIESWIFSRIVETIWWQALTPHMQKRVEGSSTPKAGRVLCPTLGDQQ

SEQ ID NO: 50239 - protein, 1289 aa, Zea Mays
MPPGGRRGAKQRSNWTREPQLGDLVLAKIKGYPSWPAKISKPEDWKRKPTPKKFFVCFYGTGEIAFVPLADLEEFTEKKKNDLLDRALKVQRKYVQQFNVAVEQICKAYNELPKTSEAANVALPDQSEKTTEHLVRSPDIGGTPGLGQMEDDPPTDCSSTSGQGSGTEEDVKDGGHEIEQEHSPTSLRAERQIEEVKIEEESCHLEGFVLEPNLEVVCALEVPKNFKSNKLLRNAESKENEHVGVGSPTGRIAVEAASDVVLNMSAEEESREFKKSKIMTKQSLTTGSEKRDNKIVHGKPDKQLTGKSSAGFSLNQKSLTGSGQHKMDSSADTRPAKKARLMDRAGETDKTVAKSETKLNINYENHNAVKHEQSTAVETCKNTILKTGIGDDRARKSGGAVSPISKLHSEIMEPASGSSVTQSTVADSLKKGSSRKEDVSRVDRKLVKPKRRACRFDDDEDEGQQTPLHRTSAKSLSTHIVPTEKPGSRGNFASHVGNASGKKPGPAREEKSRSVRMSPVKHEPVFSSPSQDKVHARHQLMGRNLITGSVETPVIGNKMSLVDGKSSAQVKMPACSEVKKLHSTSKPLQVTSGKSHSRNYPASEKIALVPKSEETKAKSKPATSVEHKVATTLSTERTGKRDHLKEERSSSVDKAAYSEPNPDSAKSIKHLIAAAQARRNLMASALAKFDGSSTDNSAITSTSYAIARDALEGMIETLSRTKDSIGRATRHAIECSKYGIAGEKLENEHNLHRRIDLLFLVDSITQCSHSHRGVAGASYVPTVQAALPRLFGAAAPPGAGARENRRQCLKVLRLWLERKIMPEDILRKYMGDIEVPNDDTSTSLMLKRPSRSERSVDDPIREMDDMLVDEYGSNATFELSGILSSKVFEDDEDFPQNNGSSSFVSRPVEGGVIHETEDNIAPASVEEHIIRVEHVATDAAMEDALELLGNNQQTHGAVIIEHDSSQGPGSEQALIAQNELPPLPDGPPPLPSDSPPPPPPLPPSPPPATPPPPPPLSPASPLPPPPPPLPSGPPPQPAPPPLPTQDPPLPSIPLPVSSSPLSLGYQPPAPEYFMTPNGNQLAQMTVNTSIQAIGNTTTFIPGGPVNGQAAVNFVTSMPAEFGNTSVFMAQASNGNYQFRPTGVPFQQGNFSAFPSAQTPPVHPHSRMAHMNPMGQQAVAPPHNPYAAQSFPNSQSHYPSEEHWRMASGNFSPDDQHNWIASGRSLPCSEGPFVHDGYSRSNIDRSSMNPMNHQHTVLNHLPSGAPLPGHISQMLPARSDMHTLNCWRPS

SEQ ID NO: 50240 - protein, 495 aa, Zea Mays
MASGIGSGQQQPPGSAVRLDALAAPAADADPGAVGDKLVFEAPPQPVREDYVQNAVKFLSHPKVRGSPVVYRRSFLEKKGLSTEEIDEAFRRVPDPQPSTTATTSPQQQVNSQNQSVGVQAYAPAQPVHPANAGPVVLPTQPRFSWYQAFLAAGLLLGFGASAAVFIKKLFLPRLKSWIRNVVAEGNGTEGNQLKPRIDDETADAVKASASAVSAIAKTNQQLLASKDEAEKKILVTLTQALDSQAKELKSLTDSIGHTREPINITRDDRFSQYRPLEDHAPTVIRNGAINSSWRASQQTNMYGVSNGDFGSAVRSSFAPAPAEPTAGSFSRSYGEPMSTAQRSDRSSGSKPWEMHSYSQQRPGYGSNSQLSDDGSYSDAQDSYAPSYHQNGKAPDFQADEPRPLTYNTGVEERPPPQRRWVPPQPPGVAMPEAAAAIRQPKALPKQPSSDASEAAGEMQVNGSSASDAVTEVPVNGATASDAGRSEIQEQSVAA

SEQ ID NO: 50241 - protein, 183 aa, Zea Mays
MKLWDWDKGWECARTFRSGGINVDHIAFDPKETNRFVATDCLDGKVMIWSLDSPEPEYHLPKTDFKGIMFLEFFTRYGRQCLIIAHEDHKAHVWDFRLRKFVSEKRKLLSREASVFLRPNVSLLLTPSSKGTCRFWDAKKFSFYGVIDNSAGGDVLGIACLMGSKTRVKMVSQMWHTCAKEAH

SEQ ID NO: 50242 - protein, 632 aa, Zea Mays
MASSPPRAPQLFPFDLNVAQEEVDEEPIEVLEEDVDEEGAPLAQPQEVVVEEVVEKLVEHAVPITEDEPAEDVIMEEPSEEVIMEDEEPTPSPAEEVVGEGKRRKKRVDYEVFVSGLPQDAAEEDVAQALADAGDIEEVRLVRDPADQRLNKGFAFVRFAAAWQARWAANDLREATIKGKACGICKNSETETLHLRNICFDWSKDDLAEKLKPFKLENLDRINLIEHPDRKGKNRGYAFLDFRTHVDAVEAFVKLQKIDLYLGTDSRANISFSNTLSQDDEIMEKVKSVFLDGVPPHWDEDKVREIFGKFGEIDSIQLARNMFTAARKDFGFIGFTARQSALDCIKMVNKDGVGEGSGKVPIKASLQRPRHAFKKYSRQGSSSLLGVRRGFVDKSSSGRGHHSDRYRHFSPVRRSYSDNHSRRHSIDVEERHTSVRGYRAYYRRDSPVHAPSYKYGRTHLETRISEEYTEGRYTSKYPKHRHTMHGTMERDANRRIKYGHSYQERAHRTCPGCKLCGQNYNYPNGEEFSAISGCQEAYYQTDHDLIPSTSQVASHCEGSCCKLLTIETCILQNQESTPSSSDHARTRSNLPAPPHHWHVKHSNEHRRESRSWYLSSKDAPSTHSRKHHRPAR

SEQ ID NO: 50243 - protein, 640 aa, Zea Mays
MASSPPRAPQLFPFDLNVAQEEVDEEPIEVLEEDVDEEGAPLAQPQEVVVEEVVEKLVEHAVPITEDEPAEDVIMEEPSEEVIMEDEEPTPSPAEEVVGEGKRRKKRVDYEVFVSGLPQDAAEEDVAQALADAGDIEEVRLVRDPADQRLNKGFAFVRFAAAWQARWAANDLREATIKGKACGICKNSETETLHLRNICFDWSKDDLAEKLKPFKLENLDRINLIEHPDRKGKNRGYAFLDFRTHVDAVEAFVKLQKIDLYLGTDSRANISFSNTLSQDDEIMEKVKSVFLDGVPPHWDEDKVREIFGKFGEIDSIQLARNMFTAARKDFGFIGFTARQSALDCIKMVNKDGVGEGSGKVPIKASLQRPRHAFKKYSRQGSSSLLGVRRGFVDKSSSGRGHHSDRYRHFSPVRRSYSDNHSRRHSIDVEERHTSVRGYRAYYRRDSPVHAPSYKYGRTHLETRISEEYTEGRYTSKYPKHRHTMHGTMERDANRRIKYGHSYQERAHRTCPGCKLCGQNYNYPNGEEFSAISGCQEAYYQTDHDLIPSTSQVASHCEGSCCKGQQLKPKSYSVMRDYDYINQESTPSSSDHARTRSNLPAPPHHWHVKHSNEHRRESRSWYLSSKDAPSTHSRKHHRPAR

SEQ ID NO: 50244 - protein, 1198 aa, Zea Mays
MGGKVSLSNPADAESLVSRGMLKRSTAATNANSNSSRSQCIITIRADSEHLLSSAVLTIADLAGAEREKRTRNQGSRLLESNFINNTSMVFSLCLRSLLEHQKNQKKPLEKHFKNSMLTRYLRDYLEGRKKMTLILNVKPGDDDYLDTSFLLRQASPYMKIKYTSLDDSFDLASQKRINVSLICQENKKKRKVQKPAVLVVERKENVDTDDISKVSEKDGVHHVSLNPEMPRESENAVESMKELIRDKDIEIMELKKELKAVRYCSCKSSPINEDDSVDHDDSSSFGQAAQSLVNISNQADLGSNDASEDNFHVELQALHKESDKSESFTVPTPAPTGGAMPASSYSDQSFTEDDALLCLNTEQTSTVGQSDEETEELSKITLENKDIQLDINIREEKHHESCSSSQQVNFDTEGTRSSEASLLGTVGSEKKLEELKQKSGRCVSAVEKANVELEHGIDGGQALDEKCDHASAKAAKAPPSKGREADETADTDKEAFGSRTEKTRRRLQPAAAMLLREFTGADIDADNEREERGRSSSSVATGRSDALVQLLMKGRPAHGDESRQLQSLMQLCEMRSIGSEDLLAAFVPILVGMLGQPATAGASPGVMLLAARALANLVYVLPSCSAISEEHAPNRLFASWNLPADASEFVMEAVPSLTNLLNHHDSKVLEHASVCLTVTRIAEAFAYYPDELDELCNHGLVAQAASLIALGNSSGQEPLSTSTYTGLIRLLSTCASGSLLAVKTLLLLGISGTLKDFLSGPALISGTLVPRAVTRPADQIFEIVILADNLLPHMPAIIIELPTYYHAYKDSSTNKSASIKQEGAGSTGNEKSGNERLLRDQPKLLEQFGMDLLPTMTQVYGSSVNAPIHRKCLSIIGKLMYYSSAETVQSLLGTTNISSFLAGILAWNDLQVLIPALQIAEIMMEKLPETFSKLFVREGSNTMARQVPPQDKEQLDKIISEMLSELSKVNGVSTFEFIRSGVTTALLDYLSCGTFGKEKSSRIGNGGSRLTSGLSALAQPFKLRLSPAQGEKPLRDYSSNIVLINPFASLAAVEGFLWPRVQHSEVASKPIIPSGNNSESVVPGTIAGASLATAMDQSGRRPTTRSKSSAAWGGTSKKDSHDESTTTAKGKLGDSNECNIGSASFSQVQPSSGSGARNTSSRGPDSTEFQSTSTFGSFVAATMAGLASVGGRSVIGG

SEQ ID NO: 50245 - protein, 1427 aa, Zea Mays
MEATSPHPPTTIRRNPPRRARPPPTPLAGDKSKPSPLSRLLEGEAAFAASVPCPPQEERLKVFLRIRPLPDRDRSRPLPAAKDPRRKPKQVGAPGELCLAPDGPNSVVLTVPRSKLVDPKRGRTEVFDGFSAVFPSDSTQHDIFAQVMNPLVDDFLGGKSGLLVAMGPTGSGKTHTIFGSPRNPGILPLTLRRIFNAQGESKVSRKPTRSFFFSMFEIFSEGKGERILDLLSDTVECVLQQSVIKGLQEVSLSNPADAESLVSRGMLKRSTAATNANSNSSRSQCIITIRADSEHLLSSAVLTIADLAGAEREKRTRNQGSRLLESNFINNTSMVFSLCLRSLLEHQKNQKKPLEKHFKNSMLTRYLRDYLEGRKKMTLILNVKPGDDDYLDTSFLLRQASPYMKIKYTSLDDSFDLASQKRINVSLICQENKKKRKVQKPAVLVVERKENVDTDDISKVSEKDGVHHVSLNPEMPRESENAVESMKELIRDKDIEIMELKKELKAVRYCSCKSSPINEDDSVDHDDSSSFGQAAQSLVNISNQADLGSNDASEDNFHVELQALHKESDKSESFTVPTPAPTGGAMPASSYSDQSFTGQSDEETEELSKITLENKDIQLDINIREEKHHESCSSSQQVNFDTEGTRSSEASLLGTVGSEKKLEELKQKSGRCVSAVEKANVELEHGIDGGQALDEKCDHASAKAAKAPPSKGREADETADTDKEAFGSRTEKTRRRLQPAAAMLLREFTGADIDADNEREERGRSSSSVATGRSDALVQLLMKGRPAHGDESRQLQSLMQLCEMRSIGSEDLLAAFVPILVGMLGQPATAGASPGVMLLAARALANLVYVLPSCSAISEEHAPNRLFASWNLPADASEFVMEAVPSLTNLLNHHDSKVLEHASVCLTVTRIAEAFAYYPDELDELCNHGLVAQAASLIALGNSSGQEPLSTSTYTGLIRLLSTCASGSLLAVKTLLLLGISGTLKDFLSGPALISGTLVPRAVTRPADQIFEIVILADNLLPHMPAIIIELPTYYHAYKDSSTNKSASIKQEGAGSTGNEKSGNERLLRDQPKLLEQFGMDLLPTMTQVYGSSVNAPIHRKCLSIIGKLMYYSSAETVQSLLGTTNISSFLAGILAWNDLQVLIPALQIAEIMMEKLPETFSKLFVREGSNTMARQVPPQDKEQLDKIISEMLSELSKVNGVSTFEFIRSGVTTALLDYLSCGTFGKEKSSRIGNGGSRLTSGLSALAQPFKLRLSPAQGEKPLRDYSSNIVLINPFASLAAVEGFLWPRVQHSEVASKPIIPSGNNSESVVPGTIAGASLATAMDQSGRRPTTRSKSSAAWGGTSKKDSHDESTTTAKGKLGDSNECNIGSASFSQVQPSSGSGARNTSSRGPDSTEFQSTSTFGSFVAATMAGLASVGGRSVIGG

SEQ ID NO: 50246 - protein, 270 aa, Zea Mays
MSNTSSSSSGERAMERQRARGLSWVGLEGSANGQWWISSIGKTLDEGISFHRVGSRQWQDYLLLHVPCGLGRAIGNKVPALHELDPVFKKFSFSESVASLFSSLGYKRPAVIQSMYIFKQPGIGGEVVPHQDNTFLYTEPRTCTGLWLALEDATINNGCLWAILGSHKKGLVRRMVRDENGTHFDRPSPVYDQKEFVPLEVKSGALVVIHGDLIHQSFENLSPASRHAFSLHVVDTEGCKWSEDNWLVHIHNGIIEEFFIYNTILIFHCP

SEQ ID NO: 50247 - protein, 874 aa, Zea Mays
MRARTLSLLLHLLAAAASSFTPSASTDTIYRNTTLTGNQTLVSAGGIYALGFFSPAGADGRTYLGIWYASIPGPTTVVWVANRRDPVANAPAALQLSAGGRLVILDGNNDTVWSTAAPTVGNVTAAQLLDSGNLVLSADGGGQSVAWQSFDYPTDTLLPGMKLGVDIRAGITRNITAWRSPSDPSPGDVTFKLVIGGLPQFFLLRGATRVYTSGPWNGEILTGVPYLKAQAFTFEVVYSPDETYYSYFIREPSLLSRLVVDGAATQLKRFSLNNGAWNSFWYYPTDQCDYYAKCGPFGFCDTDRSPPCSCLPGFVPRSPDQWGRREWSGGCVRSTSLSCDGGDGFWVVNRMKLPQATDATVYAGMTLDQCRQACLGNCSCGAYAAANNSGGIGVGCVIWTVDLLDMRQYPIVVQDVYIRLAQSEIDALKAAATGDHQHLHKSKLIVVIVATISAVLFLLAAAGCCFFWTKKKKASKKGEGEDMTSLPPSTADFALPYRVRSQPSLSPVRDHKQLLDASEETRYATDKDVDLPLFELEVILAATDNFAGRKRIGAGGFGPVYMGVLEDGQQVAVKRLSQGSTQGVSEFMNEVRLIAKLQHRNLVRLLGCCIENDERMLVYEYMHNQSLDTFIFDEGKRRLLRWQKRFEIILGIARGLQYLHEDSRFRIIHRDLKASNVLLDRNMVPKISDFGIARMFGGDQTTAYTRKVVGTYGYMAPEYAMDGQISIKSDVFSFGVLVLEIITGRRNRGSYEPDLDVNLLGYAWMLWREGRSMELLDEALGGSFHHSRALRCIQLALLCVEAQPRNRPLMSSVVTMLASDNAVLPEPSEPGVNPGIMSASSDTESSRTRSATANYVTVTRLEARSTTSTGHSSL

SEQ ID NO: 50248 - protein, 369 aa, Zea Mays
MKMVLPVAVEDVKREVKILKALQGHENVVHFYNAFEDDNYVYIVMELCEGGELLDRILAKKDSRYSEKDAAVVVRQMLKVAAECHLHGLVHRDMKPENFLFKSKKEDSPLKATDFGLSDFIKPGRQFRDIVGSAYYVAPEVLKRRSGPESDVWSIGVITYILLCGRRPFWDKTEDGIFKEVLKKKPDFRRKPWSNITSSAKDFVQKLLVKDPRARLTAAQALSHDWVREGGKASEIPLDISVLHNMRQFVKYSRFKQFALRALASTLNSEEMSDLRDQFNAIDVDKNGTISLEELKQALAKDVPWRLKGPRVLEIIEAHTGMKGSIDPLLEEADIDKDGKISLDEFRRLLKTASMSARNVQTPRGVRKS

SEQ ID NO: 50249 - protein, 963 aa, Zea Mays
MSAGSSVPQNKQPSSVMKLLGLDNIISFVNWKQADDRVVGANDLLIKTIQEKFKLKSGKSESVFSVITDTTILRFMMEVCWAPMMAAFSVTLDQSDDKAATSQCLQGFRSAVHVTSVMCMETQRDAFVTSVAKFTYLHCAADMKQKNVDAVKAIISIAIEDGDYLQEAWEHVLTCLSRFEHLHLLGEGAPTDASFLTVPLVDSEEKTQKSTSMSSKRTNALQNPAVMAAVRGGSYDSTTAKNKASPLVTPEQINNFISNINLLDQIGIFELNHIFAHSPRLNSDAIVAFVKALCKVSMTELQSPTDPRIFCLTKIVEIAHYNMNRIRLVWSRIWKVLSDFFVSVGLSENLSVAIFVMDSLRQLAMKFLEREELANYNFQNEFLQPFAVVMQKSNASEVRELIVRCVSQMVLSRVNNIKSGWKSVFTVFTAAAADDRKNIVLLAFETMEKIVRDYFPYITETETTTFTDCVKCLITFTSSKFSSDASLNAIAFLRFCAVKLAEEGFISHEKDTEQQPSKIDSSDGNSMVHKDDHVYFWVPLLAGLARLTTDSRPTIRKGSAEVLFDILADHGHLFSQSFWANIFESVIYPLFSSESFAPNGQISSVNSTEDDSWNFETKTVALKCLADLYIMFFEVMRPELSRVTSVITNFIRSPYKQSASTGISVFQRLTEGLASKLSNDEWGTVLLCFKESASHTFVVFDKIVKMMKVIEIPDRNESYSEAEQYSDHDIYNDEEEEANMETASYAIVRMKNHMALQLLIVEGIIKLYEVHRSFLGAEHIVIMLEILSAIASHASEVNSESNLHRKLHKACSILEVPEPAVIHFESESYQSYLKLLQALLHDNPSLSETMNVESQIMLVCEKILRMYLTCAEHELSNGVSGRGPALQRMPLGTSKKEELGARTPFVLHVMGLLGSLEKNCFRRNLPRFFPLLANLIRCEHNSGEVQVALYDIFQSSIGPIISA

SEQ ID NO: 50250 - protein, 939 aa, Zea Mays
MATSTMPLGGASPSGRVLGPALDRIIKNAAWRKHSALVAAAKAALDLLSSSPAYPSSDPISPQSSLLLGLPSAAADAALHALLLALESASPKVVDPALDCVTKLLYHRLLFGDLGCAGDDASSPTSRLFTAVLTCGALSDDAMELATLRVIIAAARCPTVAIRGEGLGQVLKTCYNIYLSSNSGANQLCAKLALAQVLLIVFARVEVDSMDVRIRTVSITEMMDVSDRNLNDSSIVQVAQGFINETMEGSVAPEPGSHLEPTEVDGKEDTGMSKIREDGLALLKNLCKLSMKFSTPDNPEDQMLLRGKVLSLELLKMVIDNAGPFWRTNEKYIGAIKQYLCLSLLKNSALSAMSIFQLLCSIFVGLLSRFRSGLKEEIGIFFPMLVLRVLENVHQPSFLQKMTVLNLLEKICKESQVLIDIFVNYDCDVDAPNIFERVVNGLLKTALGVPPGSTTTLTIAQDQTFRIESVKCLATIIKSMGSWMDQQLRIGDFSPKISEASLSSLSSIDNPNILIGEDGSGIDYELQSDSGSPDVSGAPSLEQRRAFKIELQKGISLFNRKPSKGINFLVKSKKIGHTPEDVACFLRNTAGLNATMIGDYLGERDEFPIKVMHAYVDALNFEGMDFGEAIRYYLRGFRLPGEAQKIDRIMEKFAERYCKCNPNSFTSADTAYVLAYSVIMLNTDAHNTMVKDKMSKSDFIRNNRGIDDGKDLPETYLGTLYDQIVKNEIKMSAGSSVPQNKQPSSVMKLLGLDNIISFVNWKQADDRVVGANDLLIKTIQEKFKLKSGKSESVFSVITDTTILRFMMEVCWAPMMAAFSVTLDQSDDKAATSQCLQGFRSAVHVTSVMCMETQRDAFVTSVAKFTYLHCAADMKQKNVDAVKALQYEPHSFGLVPYLESSVRFFCFCWVVREPFSCNICYGLFKAASYEVSGKRRTGKL

SEQ ID NO: 50251 - protein, 371 aa, Zea Mays
MSVSMKDLDPAFRGSGQKDGLEIWRIENFKPIPAPASSYGKFFMGDSYIILKTTALKNGSLRHDIHYWIGKDTSQDEAGTAAILTVELDAALGGRAVQYREIQGNETEKFLSYFRPCIMPQPGGVASGFNHVEVNEQDYKTHLYVCHGKHVVHVNEVPFARSSLNHDDIFILDTKSKIFQFSGSNSSIQERAKALEVVQYIKDTFHEGKCEIASVEDGRMMADAEAGEFWGFFGGFAPLPRRAPAEGNEKHDETAFKLLCFDQGKLEPVDCQSLAHELLETNKCYFLDCGAELYVWMGRITSLMERKGASEAAEKLLSDSNRTRTHIIKVIEGFETVTFKSKFKEWPQTPELKLSSEDGRGKVAGCYLQIF

SEQ ID NO: 50252 - protein, 402 aa, Zea Mays
MTTAKDLLAGEDLARFLSQLHADISNLKAMLRAIYIAGHATESFSDFVVGHGELWSAQMLSYAIQKSGTPCSWMDTREVLVVNPSGANQVDPDYLESEKRLEKWFSRCPAETIIATGFIASTPENIPTTLKRDGSDFSAAIIGSLVKARQVTIWTDVDGVFSADPRKVSEAVILSTLSYQEAWEMSYFGANVLHPRTIIPVMKYNIPIVIRNIFNTSAPGTMICQQPANENGDLEACVKAFATIDKLALVNVEGTGMAGVPGTANAIFGAVKDVGANVIMISQQATWEVAVGSGRPRALAGDGAAALPGVVAGLLGPSGAVECCTGGRHVKTWPNRCGTDGAPSGADAGVPGTPGESLGDPGEVGATGVEEPGNTRGVRTSGTAGASRAAFGAVGALGAVAP

SEQ ID NO: 50253 - protein, 302 aa, Zea Mays
MEENDIISWTALLTCYTQNGLDEEVLLFFRKMLRKGLGSPVFCITSVLRASSSISNLAVGLQIHSRTLKLGIDDDNSVQNALVTLYANCGSVQVALKIFNSMSNRDIVTWNALLTSFSQHGSEVAAIQLFDLMQEEGICPDAYTFVGLLSSCSRMGLVKEGCEYFNEMKEKYNLEPKMVHYTCMVDLLARAGRFCDAMDFIDAMPYEPDQILWEALLASCKVHGNLGLGRIAAKKILEITPHDYSAYIILSSIHASVDMWDEKYWNRTVFDTQRARKDTGRSWIDAQELSENIFDALQIGVT

SEQ ID NO: 50254 - protein, 343 aa, Zea Mays
MPRPPCSPSRPSRDPPSPLPPSSRPRSIDGRCRPAILASLPATRGASLCRIFYLFTSKVPGTEPSRILEPSRILEISHWHLVTVSGGWASDAAGRYRCLELDHPCKAPWCDGPLGALESNGWVYSAHCSFKLFVADASWWCLDGKWLFFWGDSNHVDTIRNLLTFVLGITDTSAVTRQFDAVFTNPIGGAGTLRITSIFNGHWNMSMNYLGLHSLRNRGFRQLIRSYFMSGDRVPDVMVLNSRLHDGCYWTSVRIYAQAADFAAQFWSGVMDKVRARGHAVPRVFYRTQMPQGGIDAGKNHATPFTELRDEAGVTYSHPQGWVTLQTLPNEVLVVLRKVIRFC

SEQ ID NO: 50255 - protein, 339 aa, Zea Mays
MCHKHEMLPVEYQCFIAVFLLVCPNVGKSALFNRIIASLRANQFCERLPSPNGESIVDCHQISKMPNLAFTIANKIFTLTPEQYIVKLEQAGQTICISGFMAFDVPPPCGPLCYAKHICTTLKCAMRASTEGITVPPLAPPRPRLSVSAPFVSPQWPRPYLMSTTTTRVNMKKSSGSGSVSLARSIPELYEERGASSLREFGFQELRAATSDFSRLLKVGEVALGAFTRASSAFLAGPPAARSSRLSHSGISHLPADEVKPLVKYDNDEDAHSPSGRGRGRGGRGRGRGRGRGGRGNGFNEYVDAGWEDDHAPAYMGNGYARGRGRSFRGRGRRGDDDN

SEQ ID NO: 50256 - protein, 761 aa, Zea Mays
MEAPPSALPWWLATTACSAPPTPAASSVAGRLAFLFLSPCLQRALLAAIDLLFLVVALAVILRARLARSNDGLSLGLDHREREPLLAKPATTDQAPPPLRRSWSFQHGLALATSAVQAAAALVLLLLLALLRRSGRTTGLLAAECAFLAAHAVAHLAAAWVVAVEKNTAGTSPARLHPLHLRFFWLATAAFAALYAGCAAARYAAAEPLVPDDPLAFAWLALSLPLLYFSATGSTGLVVDSNGGGRAAAATEETYATASWFSLATFGWINPLIAKGSRATLAADQVPPVAPPDTAEAAYVLFTSNWPAPAPGSSKAQRPVLTALLRSFWPQFLLTAVLGVAHLSVMYIGPSLVDRFVEFVRRGGEFTEGLQLVAVLLVGKAAETLASHHYEFQGQKLGMRINAALLAAVYRKSLRLSTGARRAHGAGAIVNYMEVDAQEVADVTHQLHNLWLMPLEIAVALALLYTHLGPAVLTAVAAIAVVTVVVAFANKLNIEYQFKFLAKRDERMKAITELLNYIGVIKLQAWEETFGNKIRKLREEELGWLAKSMYFMCANTVVLWSGPLAMTVLVFGTCVLTGIQLDAGKVFTATAFFRMLDGPMQSFPEAIAAVTQATVSVGRLDRYLLDAELDDSAVEQVDGTGIDTSAVVVEVCDGVFAWDMRGNKQRKESEDGESEEEKDVEGTPVLETVLKGINVEVRKGELVAVVGMVGSGKSSLLSCIMGEMEKISGTSMWEHCICFTDCLDPKWDHSREYLIWTADVC

SEQ ID NO: 50257 - protein, 131 aa, Zea Mays
MEVPKAVALVAALALVALGALATRWLQRMEARNEEVRRLALLAAAEEETIAREEAYYYGQYGGFVRSSDLPEAPSLWAAQEVPPAPKEVMAEAAAAAAATVASPTAGKGVCAMCSKPTTLRCKRCKSVKYC

SEQ ID NO: 50258 - protein, 599 aa, Zea Mays
MDSDQTSPHVRPTAPSYTQRTWNSPPSTPRLAYRRSVMESSCLGKRRLNGAERAPPAFLPLGYEYGDADAVDHMPHRLETGEMDFFKREKRERKADAAAPDDLGIKEEDITINMGLHHVGRWKNRSEESVDEGVSSNDGDTREMKTELALTKSELGRLNEENKQLKNILTRLTSSNSNPLQMQMQALTTMQQLRNNIIHRGLRGAPSHELNVDPEKKKDQEGSRGGGHLLPQQFIGLSTPALSFDDPLRFVASDVQGGESSASTSNVEPPPTTTTMEMMPLPAFEHGHHQHLAHERGSSSSPDEPPSHHLAVNQGWLSNKVAKFLPVKGPEPATMRKARVSVRARSEVLMISDGCQWRKYGQKMAKGNPCPRSYYRCTMAAGCPVRKQVQRCAEDTTVVVTTYEGNHNHPLPPAAMPMASTTTTASSMLLSGSMPSAEGSSLMAGSNFLARAVLPCSSSVATISASAPFPTVALDLTQPLPPQAQARSTTEPSQLQAALADAAGRPTPQLFGQKLYDPSSSKAPAASQGADAAGDTVSAAAVIASDPNFPAVLAAAIKSYISGNGSGGGNSGTTVLPPPPAASSADDSSRDDKAGEQGG

SEQ ID NO: 50259 - protein, 71 aa, Zea Mays
MCPMVLLDIVRASVRTQSPKMEMIDSLFKPREAKDDGLIRECLIDFYTSSGKRKPDQVIIFRNSFCLKWRQ

SEQ ID NO: 50260 - protein, 519 aa, Zea Mays
MDAAQVPAAVVVDVGALTGPIGSEAPAAPKGPAWKRFLYHVGPGFMVCLAYLDPGNLGTDLQAGADHRYELLWVTLIGLIFALIIQSLSANLGVVTGRHLAELCKTEYPAWVRICLWLLAELAVIAADIPEVIGTAFAFNILFHVPLWVGVLITGSSTLLLLGLQKYGVRKLELLVGLLVFVMAACFFIEMSIVKPPAEEVIHGLFIPSLSGPGATGDTIALLGALVMPHNLFLHSALVLSRNTPSSVRGINDACRFFLLESGVAMFVALIINICIISVSGTVCNSSNVSPDDSAKCSDITLDSSSFLLRNVLGNSSAVVYGVALLACGISSSITGTYAGQYIMQGFLDIKMRQWLRNLMTRSIAIIPSLIVAIIGGSSGAGRLVIIASMILSFELPFALIPLLKFSSSSSTMGQHKNSIFIIGFSWILGFVIIGINIYFLSSKFVGWILHNSLQIYANILIGIVVFPLMLIYVCAVIYLTLRKETIKFVACGELQTIETDKSKLANGSNMEEKKDQLV

SEQ ID NO: 50261 - protein, 142 aa, Zea Mays
MHDLRLIHTDLKPENILLVSSEYIKVPSTKKNSQDEMHFKCLPQSSAIKLIDFGSTAFDNQDHNSIVSTRHYRAPEIILGLGWSFPCDIWSVGCILVELCSGEALFQTHENLEHLAMMERVLGPLPEHMIRKSRNISGGQHV

SEQ ID NO: 50262 - protein, 388 aa, Zea Mays
MAGSSSYSVLPDQTMDNDDAQIGVAKTQGKYWGIFICWLLGNGCLFGFNGMLTIEDYYVYLFPKYHPTRIITLTYQPFVLATTAIFTYHEAKVNTRVRNLAGYTLFFLSSFGVIILDVLSSGSGGIAPFVGICTIAAAFGIADGHVQGGMTGDLSLMCPEFVQSFFGGVAASGAITAALRFFTKAVFENSRDGLRKGAMLFSSISCFFELLCVLLYALVFPKLPIVKFYRSKAASEGSQTVTADLAAGGIKSLPNPLAEEDGVVERLNNKQLLHENMDYALDMFLVYVLTLSIFPGFLAEDTGSHSLGSWYVLVLIASFNVSDLIGRYLPLVEQMKLTSRTGLLTAAISRFLLVPAFYFTAKYGDQGWMIMLTSLLGLSNGHLTVSVL

SEQ ID NO: 50263 - protein, 749 aa, Zea Mays
MPWKKVLQMGQTCQIGGSGRNSSGCCTAPKLDQDTVLLTLRDKLRKLGQRLQEKNIEGQKLLKAHFEARDTKVKVEESSDSSNSLDRPPDVPESSMHSSEDTVDLKVNGTPNKDASVVNPVLEESVSGIPVTAKNESLPSARTKEGPVSNKDNASSLKMKTMASCLKLHPADVDKDAPFPSKSPRINRAAPVPSKLPSADKATPVLPKSSLSVNKAALVRPKSPAVDKATPVCPESPAVDKVTPVRPRSPAVDKATPVRSQSPAVDKATHVCPQSPSVDKATPSIDKATPVRPKSPAIDKVTPIPPKSPPVDKASPAPPKSLSGAKDVPVPSRSLQIDRFIPAPPRLSQVDKAALPSSEQPHISPATNSEAQGATTSRKVTASSVLEVAAASRPSSAPVLPTPRSTAPVASHIQTSTLLSRSMSEAAGRRSVNDPSFSAPSYTPQTYRNAIIGKTGLATTSANLAYQSYSLGQDTAPSQPLSAYASSTAVMMPPAGRSDQSSARHGFKSGSGKLEAHDSWQQWKGDNNVDMHLWRDHTTYQQMTRGQAYDQSRRDDTYQQTCSRGTEKFSRHAGLQARQFQTETPASHVWHQQQGQVAEEFPHLDIINDLLEEDQINGSIPESFHQDYNVFGLPFSPRGNVSDMGMASVRSPARFNSTKYEYDGGFSGAYDINAVNGLRERQFPSLDSYSNGLSDVSASKPWLNGSPSPSVMSLGVNTNGYHPQVADYPSLGNGVNGVSLWRRHANGRW

SEQ ID NO: 50264 - protein, 673 aa, Zea Mays
MPIFETRKEEIISFITKKILECNDDMVRNSSNKSEWGDSTENCLLKIYGIKTLVKSYLPCKDAHAQPGIEKLIDILKNILTYGDVSPNMVSSAADKAHLRLAAAKAVLRLSKQWDHKVPVDVFYLTLRISQDDFPQVRKLFLCKVLQYIKERALDAKYACTFMFGVNDYHAPPYEEFKYNLTEVVQICQQVKMRQLSVQADMDLLTAYPEYIISFLVHALAHDPSSPEIEEHENVNAFGPIYWRLYLILSILLGEEGLQHSVPGMKKDSFTTIISIFKSIKSSQDVVDGSKTKTVCAICDLGTLIAKRLCQDQTSLSEAQTVPLPAQLYTPLHDNQNENSVENNEQIWLGCEKVLAHFEAVRTANMDKVESPKHKMLIDVTDEFGNEVPLGKIVKLLKSRGERKIGEKQKAPSSSSVNAENDDVLGLVREINLNNQEDLEESHKDKSEKRHTNAKDSNQKPLDFSSPKRKRSISKSRPHSAKGSKSSDERLLHTPNSERTNISLETKMKEKDRDDSTDTELLVSPSTRTPVSKQNKGAKKSNINILSSVPKKSADADSTKRTVEPRSLNGSLKRQKSKPISGLLKFIPECGVDFKFFVIRFYEGAVQSYDSSKKKHRVLYDDGDVEVLNLAKEKWILIESNDSSVKRQKKDHLGTNPGRALEITSSSKSPPSL

SEQ ID NO: 50265 - protein, 563 aa, Zea Mays
MPIFETRKEEIISFITKKILECNDDMVRNSSNKSEWGDSTENCLLKIYGIKTLVKSYLPCKDAHAQPGIEKLIDILKNILTYGDVSPNMVSSAADKAHLRLAAAKAVLRLSKQWDHKVPVDVFYLTLRISQDDFPQVRKLFLCKVLQYIKERALDAKYACTFMFGVNDYHAPPYEEFKYNLTEVVQICQQVKMRQLSVQADMDLLTAYPEYIISFLVHALAHDPSSPEIEEHENVNAFGPIYWRLYLILSILLGEEGLQHSVPGMKKDSFTTIISIFKSIKSSQDVVDGSKTKTVCAICDLGTLIAKRLCQDQTSLSEAQTVPLPAQLYTPLHDNQNENSVENNEQIWLGCEKVLAHFEAVRTANMDKVESPKHKMLIDVTDEFGNEVPLGKIVKLLKSRGERKIGEKQKAPSSSSVNAENDDVLGLVREINLNNQEDLEESHKDKSEKRHTNAKDSNQKPLDFSSPKRKRSISKSRPHSAKGSKSSDERLLHTPNSERTNISLETKMKEKDRDDSTDTELLVSPSTRTPVSKQNKGAKKSNINILSSVPKVTSSISMVSMYQ

SEQ ID NO: 50266 - protein, 1503 aa, Zea Mays
MAAVEQLKELGEKLQAVAPAPADELAKLLEKAVECLHGIEQSPVSSVMEAIQPSLKAVTREELLKHEDDNVKVLLATCFCEITRITAPDAPYNDDILRDIFYLIVGTFGGLNDVNSQSFGRKVAILETVARYRACVVMLDLECDDLITNMFQTFLVVVSESHEEYIVKSMQTIMTLIIDESEDVHESLLRVLLSALGQKKTGAAMSARKLACSVIEHSATKLEPYLKKFLMSSWAGNVSSSNDQIDHQGVVFDLYQCAPKVLKVIVPYITGELLADEVDNRSKSVELLGEIFSLPGSPIVECFETLFTEFLKRLTDRVVEIRISVVEYLKRCLISNPSRAEAPEIIKALCDRLLDYEENVRKGVVAALCDVATHSPDAIPIDTIKVVAERVRDKSLAVKCYTMERLADIYKLYCQRGFDSSTNSDDFEWIPGKILRCLYDKDFRPESINSILCGSLFPPEFPMKGRVKHWVTAATYFDKVEMKALEQILLQKQRLQQEMMKYISLRQLSQEDAPDLQKRIIGCFRNISRLFSDSAKCEENLNMLHQLKDADIWKIFTSLLNCSTTFEKAWSLRADLLKIFGEKHVLYNFVGALAMGCSYLLVNKEYAKEILSEASEQKTSGNTKLISSCMNLLTAISSFFPSLLSGLEEDIVELLKEDNEVLKEGIAHVLSKAGGTIREQLASTSSLDLLLERLCLEGTRRQAKYSVHALAAITKDDGLMSLSVLYKDMVRNSSNKSEWGDSTENCLLKIYGIKTLVKSYLPCKDAHAQPGIEKLIDILKNILTYGDVSPNMVSSAADKAHLRLAAAKAVLRLSKQWDHKVPVDVFYLTLRISQDDFPQVRKLFLCKVLQYIKERALDAKYACTFMFGVNDYHAPPYEEFKYNLTEVVQICQQVKMRQLSVQADMDLLTAYPEYIISFLVHALAHDPSSPEIEEHENVNAFGPIYWISWIQCILLVSRPFDLGGLGIPNLLTMNWALQIHWLWLQKTAPSKPWSGLDLKISPQVRALFQAAVATTIGNGSTTFFWKDRWIHGCCVKDTAPLIVAAVPKKYRDERTVQQALTDLTWVQDIQGNLSLTGIEQYLQLWSKGLQKGWSVECVRCAYGGESVCKHWRLYLILSILLGEEGLQHSVPGMKKDSFTTIISIFKSIKSSQDVVDGSKTKTVCAICDLGTLIAKRLCQDQTSLSEAQTVPLPAQLYTPLHDNQNENSVENNEQIWLGCEKVLAHFEAVRTANMDKVESPKHKMLIDVTDEFGNEVPLGKIVKLLKSRGERKIGEKQKAPSSSSVNAENDDVLGLVREINLNNQEDLEESHKDKSEKRHTNAKDSNQKPLDFSSPKRKRSISKSRPHSAKGSKSSDERLLHTPNSERTNISLETKMKEKDRDDSTDTELLVSPSTRTPVSKQNKGAKKSNINILSSVPKKSADADSTKRTVEPRSLNGSLKRQKSKPISGLLKCSTQDSSSTDLVGHRIKVWWPLDKRFYEGAVQSYDSSKKKHRKASHLAFP

SEQ ID NO: 50267 - protein, 638 aa, Zea Mays
MPLYLFSSPAAAKLATGPHASLHRRRQFLFRVPHRPSRRAPLLTSAAERPAGRTMATADTGASTVTDSRLRGVKQALISLSDKTDLANLGNGLQRLGFSIISTGGTASSLEASGVNVTKVEEITQFPEMLDGRVKTLHPSIHGGILARRDQEHHLKALKEHGIGTFDVVVVNLYPFYDKVTSGAISFEDGIENIDIGGPTLIRAAAKNHKDVLVVVDHKDYPALLEYLEGKQDDPDFRRTLAWKAFQHVASYDSAISEWLWKQSNKADSFPPSFTVPLTMKSTLRYGENPHQKAAFYGDRSLSLVNAGGIATAIQHHGKEMSYNNYLDADAAWNCVSEFESPTCVVVKHTNPCGVASRHDILEAYRLAVRADPVSAFGGIVAFNTTVDEDLAREIREFRRPTDGETRMFYEIVVAPGYTAEGLEVLKGKSKTLRILEAKRRRSGKGTLLSLRQVGGGWLAQEPDDVTPEDVAFTNVSERAPDARELSDAKFACLCVKHVKSNAIVIAKLHAGHGQWPAEPAGEPEDRFQEGRGGGQGSCFGQRRLLPVRLERRGGGGVPARRGGDRRARRQHPGPGRRGVLQQVRGGPRLHRRPALQALIDGDGGSGDRDDGRWEGPLYSCVDLAGGWKEGSGVSSQR

SEQ ID NO: 50268 - protein, 1128 aa, Zea Mays
MPPSPSPRRSLKEVCHARGHSFVSILPAKSKDDELTLFKDMQKYERDNFLLEATEDFDESISKLRYFRDSKIGVNIAARGENRDLLNTDGERNDYDWLLTPPETPLFRSLDDEDQHIGMAHRGRAQVKPISISRSSTMENTQSFNRRSASPSRLSPAPRSCSSTMLTRIRSSNSSSRCSPALHLQPAAPSRRSSTPPASRTSTPPQRSPSPASRRLSTGSSDPILNRKGGTSPVKTSNRPSSPKLQGWQSSDPGFSFDAPPNLRTSLSDRLVSHSRGGSPSSFSGLDMNWRGRRQSVSPTPSRRASSSHSNDRFSSYSKASATSSAEDDLESMQSVLISYSSSPALRKNMPVIKSRTIASPKKPSKSFSPSSGPKRSFDSAVWLMDRRKAPQDKFRPLLSSVPCTTFGVGKGDNVHSSMLSHNSSLTTSSNLSSDHGVTFSPCMGNEQGPSDIAGDCEATPTYSLSATQSSPKSPSTEKNAESNMEDLNMERSRIVETSGNVASGSKAGLTKMATCTRCEKLFNAIKDDGEIDLCEECGLVDEVLFVNPKIETLEEHQKDHKTRISKPCVALEAPHITPDHGEDTKKSFLDSQLLNDEPPADCLQKCPQSQSTIYTTDRMLLMLHGENVNENLRPDDVGNSSQGSSLDISSHQCNINNYQQSELASVVECDNLRDQTANHQNEVFQRLPGSVYQSIEFASNTLTYDSCCKQGSAGHSNLKVENTEGAGISVLLQKSSSNKWPVIEGRPLAGTNIICSEPYYTRDGVTMLKRTIGWDSSSASSIDQGSTRQSGHLEHLKSSNRHDFEKSQISSTMSCKSIASMSDMSSSNCSVSVCPRDDAIADTGFLTDNSESSAPRSIICTEELNESCKYTLSSAIECWSAAQAIVNVGIGSTEDVVIQKLCTGRMVHKDYTSDNSCSSDTETCSNISLSLAPEERCIQKIEEGTSVGTPEHPDGDCGISNYQMQHETIPEADRLDDGCASVISEEANIMGLPGNVEGPREQTQRCFTLEEATDTILFCSSIAHDIAYRAATIGLEHEQHSELASARRPAVPMAGQSIPRGDGSRKPPHRLVPRHRKRSEGETVTEPDKMEVVAEDPIPVRPVPEFSRTSGSFKSPKVDSKCNCAIM

SEQ ID NO: 50269 - protein, 156 aa, Zea Mays
MFPQSLGILGGKPGTSTYIVGVQDDRALYLDPHEVQMVVPLESLNLAAEDSGEKDKDENGDEAPSKVLANIKWPETLETDFIYSALSFGTSINPQFIASFASAAGKRPHQDFDSQESDPEWGWWTANHELKKPSISLLFPTIILLSRRHQQQQQRC

SEQ ID NO: 50270 - protein, 445 aa, Zea Mays
MAESNKRQSAPNKTQLIFFSQLAERAASLQLAETQSSRFLTAIRLASIRFDSGARGERGEERYGNRLERALLPASSVASSSLFIPAPPADSPDRAVAVMPLAESPPWRRKATDFFSTSSVKLKQAGQSAGDNIVDVAGKVGSVVKSRWAVFQEARQQQQQQQRPPHETVQERIITAAASTGLLFRKGISETKEKVAVGKVKVEEAAKKTADKSKSILNNIERWQKGVASTDVFGVPIEATVQREQSDRAVPLVLVRCADYLVISDSGASLLEGVNPIDVGALVKCYLASIPEPLTTFSLYDELRAARVSIPDLRNILKKLPNVNYMTLEFVTALLLRVSRKSSLNKMDSRSLAVEFAPLIMWRQGDTGTDLRNHLKFTLKPPPKIVDTTSNAATWDLLDEDDEDASSQIPLDDASPPDYSSIEVIQCLIEHHNAIFTDANETVWR

SEQ ID NO: 50271 - protein, 465 aa, Zea Mays
MVAARGARSGGSVAAAALVSVLLVGCLVAGGQGAEIRRQKNVQAALRAKWAGTPLLLEASELLSTEWKDLFWDFIDLWKDLEKGSECLTAKCCAQKIVEDAHILLNEPLSSIFEFSLTLRSASPKLVLYRQLAKESLSSFPIDDSPENISGHGTGKTFDGAVDPGSSGGTCCWVDTGNVLLFNSADLHEWLGGLGKLAMDSTEQPELFEFDHIYRRTNITAPVAIFYGAVGTKCFKELHVQLVEASKQGKIRYALRPVLPSGCETTSTFCGSVGAVDAVTLSGYGVELALKNMEYKAMDDTAIKKGVPLEDPKTEDLSQEVRGFIFSKILERKPELNAEIMAFRDYLLSSAVSDTLEVWELKDLGHQTAQRIVQASDPLQSMQEINQNFPSIVSSLSRMKLDDSIKDEIIANQRMVPPGKSLMALNGALINIEDLDLYLLMDMVHGELSLADQFVRLKDYSTSYL

SEQ ID NO: 50272 - protein, 950 aa, Zea Mays
MYKQEAEESSHFVHKLGLYRLQCCLLMNGLVHEASEEATMNAMNDELPRIQEQVYYGHIQSHTDILEKFLSENSYKRYNPSITGKNAEKKFVSLFASYHQDSFIFNDMKYLQSPGTTDDAKPVTHLLAIDLSSKVGTKLLYEAILYLMDGSDRARVGLLLYVHTGGSSPILLLKDIFDRTISSFSYKEKVLVFLHGLLKFYDAQPLPASSVADDWTRTMMEKVYTLAAETALPVDDYKAWFKSFSADTVLKGMDKLSDFLFGQLGLVFGSNAVITNGRVFIMNEGKSFLANDLGLLESMEYDLRTKYIFEIIEEVEFASVDPDDLTNQFYSDIAMLISSSMSVRERTSERAHFEILHAEHSAIKLNNANSSIHIDAVIDPLSPTGQKLAPLLRILWKQIQPSMRIVLNPISSLADLPLKNFYRFVLPSMDDFSSTDHSVHGPKAFFANMPLSKTLTMNIDVPEPWLVESVIAIHDLDNILLENLGDVRTLQAVFELEALLLTGHCMEKDRDPPRGLQFILGTKQRPHLVDTLVMANLGYWQMKVSPGVWYLQLAPGRSADLYELPPKLIAIDSLRGKLMHIEVQKKKGKEHEDLLNAADDYHFQEKTDNKGWNKNLLKWASSLITGDASSKSKADKTTDRKDARQGETINIFSVASGHLYERFLKIMILSVLKKTQRPVKFWFIKNYLSPQFKDVIPHMAREYEFEYELVTYKWPTWLHKQKEKQRIIWAYKILFLDVIFPLSLRKVIFVDADQIVRADMGELYDMNLKGRPLAYTPFCDNNKDMDGFRFWKQGFWKDHLRGRPYHISALYVVDLAKFRQTASGDTLRVFYEQLSKDPNSLSNLDQDLPNYAQHTVPIFSLPQEWLWCESWCGNATKARAKTIDLCNNPMTKEPKLQGARRIVPEWTGLDSEARQFTARILGDDVEPADATPPPSEAPKPEDDQDVKDEL

SEQ ID NO: 50273 - protein, 400 aa, Zea Mays
MITTTTTTMTAAPDLSLHISPPSPPEPRLLLGLELDDDTAAEAAAATKKADDAAAMREYNNLQVQRRQLHQPSQTAGHGFKRGTSGSAAAGAGGRRSSRAPRMRWTTALHAHFVHAVELLGGHERATPKSVLELMNVKDLTLAHVKSHLQMYRTVKQQGADRPCVAVAGHGHARDMVVLLTTGVGEGDAGFVDDVSNSNSNSNNSVVVNNTVPAAFNNNHTDRTPQSPGGREQQQQPAPAVDRRRDDAAAAAAACAWVVGRQVQHQRSCSEGVTKLQGLKVGDERVDRHHGDDAIAAHRLVEDEARDDHAGSGGGFQQRRPSPNNTSGTVSSSEWLNQQHCSGVMSVRVLGLPPATPPSLEMSLGRQGWQMDQQCGGEFEFDFEPSPPSAAKELTLLRCL

SEQ ID NO: 50274 - protein, 164 aa, Zea Mays
MARERREIKRIESAAARQVTFSKRRRGLFKKAEELSVLCDADVALIVFSSTGKLSQFASSSMNEIIDKYSTHSKNLGKAEQPSLDLNLEHSKYANLNEQLVEASLRLRQMRGEELEGLSVEELQQLEKNLESGLHRVLQTKDQQFLEQISDLEQKGLRVQTYMF

SEQ ID NO: 50275 - protein, 135 aa, Zea Mays
MNEIIDKYSTHSKNLGKAEQPSLDLNLEHSKYANLNEQLVEASLRLRQMRGEELEGLSVEELQQLEKNLESGLHRVLQTKDQQFLEQISDLEQKLPKSWVPGRRARTKPAHRQKRRTCSSGVDSKGICFLAEGTL

SEQ ID NO: 50276 - protein, 226 aa, Zea Mays
MAGKGAKATAAKSADKDKGKKAGGPVSRSSRAAPQENSTPKKDVYQLFAEKVRDNKQLESRWAIMQETRVEYFRGKDFNAFIKNYPEVREILGPDKDLEVEDIVNTLLTKNLVIRCDRVMKTVRPGKKKLSSWPAHLEIHNEQVFTENDGFYAWMFLKRRTLWQTVLSFVWPLFALAVCLFPVYPYQCKIVVLYSCAGALLFIVSILLLRAAIFGILWVLLGKRGG

SEQ ID NO: 50277 - protein, 206 aa, Zea Mays
MVRGVTRFTSYPHRFTTSIAKPEWGAVVKTETDAFQDQYYPAVHLNGAGAGALFHDKDRKHLPFLTNHNNGCQPFTVTTTASSESSSKHSNGNCALSLLSDNPTPAQAQTATIPTAQPLVATASQYGRLPGGDDDDVSLAGMSYMRVGDSRQASNLTTSSPGPATAAATQQHLQYHHGYYYHVSGGEQGNNSPDGAAIQALPFSSW

SEQ ID NO: 50278 - protein, 217 aa, Zea Mays
MRSDKVHIVPTPLHHIHRKARMGGGRQDGDRRVPRPVLPCRPPQRRRRRRPLPRQGPEAPPIPDQPQQWMPAIHRHHDGFLREQQQAQQRQLCSLSSVRQPDTSTGTDGHDPYRAAPRRHGIAVRQAPWRRRRRRLPRRDVVHEGGRQPAGFQSDNVLTRSCHCSCNTAAPAVPPWLLLPCERWRAGQQQPRWRRHSGPPLLVVVDARLSDEDHVLG

SEQ ID NO: 50279 - protein, 270 aa, Zea Mays
MSRPFPANRYLFPENNICSWRIYPRPWPRVLGDAVLLWNGRTAIGVALVQLTVNVGLLSLAAVFIRFVPAALLHRRPSIQAGGRLGRWLENASLLEDAEEHHLVERVVGRGDERAHGLRRLREASEEGHVPAGRSELGGDRHGSAEGDSDRVRGPAGGAARGAADRQGGGVLAVAVRRRVLPVRDPVPGGQHVHGHQQVLPPRLQRPHDRILPLPRLHACPRRRRARRLPRRQCPRLRRDVMYVMRRRRRRRRQYARSTHCWYVVFTCKT

SEQ ID NO: 50280 - protein, 750 aa, Zea Mays
MQQVHELTYIPPRGRRRRSRLNPLGFFASSVAIGEHSPSHSPNSWWIDGMEGGEAGGLRFLLRFDPARPGLDRALLGFSFSALFSRLVVGWSKHGQTGGGGGGGFPAIAAEGEGGEGSGNAAVSVAALAAAAAAASLCLAAMYASDQRRPRHARARRLPALASAPRSRALHAPHDGLRILSSDDPNDESPDKVIHGASIGAGDDEPDIVARVEMDATPPAVPVPNADDDDDDDETETEAEEEEEEEERQELQRLRELWLSLEEREQRLELRLQELEGLRSQEAAARELEARVAAADAEVRILQLSVSALQEENGRLRARAEDLDAARAELARAKEKLRAVKARVQGEQEAAAAALRRKVEELESGGRERVGALVAEVAELRKANAALEADNMELALRLQDAEQQAASGASASNLAPEEGMIQEMTYLRESNERLTRQIEQLHNDHCAHVEELVYLKWVNACLRHELRDHDGQPTAEQQGPSAGSRDLSALELSKSMSFRSSERAKQLMLRYGSPGLDRFDPALFSPLHESVDGDGYGYERSPAHSYEPERSPCARPATATASSSPAAAPGKKAGPRRLKLLGNIKKLLPAVGKRSHSNHGHGHAGHDGRKAPAPAPARRDEYLDKAMQWLSAHDVLDGDHSYVSTPLSSCERTPLSSATTSTTADSRARCGDGGGGRSERGEATRPEAEPTLARSKSDAGGAYGREASRYHALRPEHPGREADEPDGFRAPEKREARRQSAEELRTPAVA

SEQ ID NO: 50281 - protein, 179 aa, Zea Mays
MAPAFPTTLLHQASTSFRFPAGAAGCIRPHCLAPLAAPTTLSLAATPAVPRRLLLPVAAGIWDLISGGAGAAAAASLAVRRGMQLFRQGDVAGSLAEFDKAIEMDPRQKQYLWQRGLSLYYLDRFEEGAEQFRIDVAANPNDTEESIWCFLCEAQLYGTEEARKRFLEAGWFGLETCNA

SEQ ID NO: 50282 - protein, 65 aa, Zea Mays
MGLTFLMCKKENYVDLNLSCVLMVDVVKKGHLDIVVHGFMYCQQTFSSDSYRRCLAVMACMYFMH

SEQ ID NO: 50283 - protein, 89 aa, Zea Mays
MDGRKRKGKFRNSLRRMAMECLCSGEQLKASDETMRSSDSTITKDFSASGYSSWNGEIEQYLDNGNIEEAELSLREGICLNYEVSCFLL

SEQ ID NO: 50284 - protein, 53 aa, Zea Mays
MLTVLNDQSVSLCFMVRLRFIPCLEMIFFSSYYYMGHFFFVHCIVGSRLAYWM

SEQ ID NO: 50285 - protein, 88 aa, Zea Mays
MADLLLLLNNGNPLWVVKLFLVSERSYSATQIVGSNIKSIKLRQQAGVDSNLTRERVVPQADYPQQWTTLQGSGQLTVQPIGGQVYGL

SEQ ID NO: 50286 - protein, 210 aa, Zea Mays
MLLVQMILDFKVPNYISHACRQPGCYFSETLKPISEEHQTRVGELGVFGCRYGLRIAPVFFNGQSLTRSHKHNKRRTLTTVPSPRATMADLLLLLNNGNPLWVVKLFLVSERYDRDLNSLKLSGIPPHELVPCKIQCPQLGAHTDARSYSATQIVGSNIKSIKLRQQAGVDSNLTRERVVPQADYPQQWTTLQGSGQLTVQPIGGQVYGL

SEQ ID NO: 50287 - protein, 763 aa, Zea Mays
MAPKAGRGKGRGGKGDKRKKEEKVVPSVVDVTVVTPDESQVTLKGISTDRVLDVRKLLGSNVETCHLTNYSLSHVARGHRLEDGAEVVALKPCALRIVEEEYATAEQAEAHVRRLLDILACTTAFARPRDGAAKHRASRHGRPATPPSSPTPASTGAHGVASGEAAPPISEAHDMAAIRPPPKLGEFYDFFSFAHLTPPVHFIRRKEANGASQEGDHFEIEVKVCNGKLLHVVASVKGFYLSGKPHNVSHSLVDLLQQLSNAFANAYEALMKAFVDHNKFGNLPYGFRANTWLIPPIYVDSATRCPALPVEDENWGGNGGGCGRDGKYDRRRWSKEFSVLARMPCKTEEERVIRDRKAFLLHNLFVDTAIFRAASTIRRLIDQSMNSVGSHSGTHGSNVFEERIGDMNITVKKDGADASLKVEDKVDGVAFCQTGAMDIAQRNLLKGLTSDENVVAKDSSTLGVVIVKHCGYTATVKVSGRAKDSNDVKQTNDISGKFDGMLTIDVHDHPDGGSNALNVNSLRIPLPRVIHPETVVGNQHHSPKSHASNPAKKLARKILKDSLVKLDSMPSINSRIIRWELGSSWLQQLQKKDTPASENGKGNAMKTDKEPAVRGLGKHFEQLRKLKKKECNNEGSSSEKEECSNNYSSMNGTQVSDMIAADEANNGADISKLMSEDAFLSLKSLGAGLHEKSLEELTKMAHNFYDDTALPKLVADFASLELSPVDGRTMTDFMHARGLNMSSLGRVVELAEKLPHIQSICIH

SEQ ID NO: 50288 - protein, 766 aa, Zea Mays
MAPKAGRGKGRGGKGDKRKKEEKVVPSVVDVTVVTPDESQVTLKGISTDRVLDVRKLLGSNVETCHLTNYSLSHVARGHRLEDGAEVVALKPCALRIVEEEYATAEQAEAHVRRLLDILACTTAFARPRDGAAKHRASRHGRPATPPSSPTPASTGAHGVASGEAAPPISEAHDMAAIRPPPKLGEFYDFFSFAHLTPPVHFIRRKEANGASQEGDHFEIEVKVCNGKLLHVVASVKGFYLSGKPHNVSHSLVDLLQQLSNAFANAYEALMKAFVDHNKFGNLPYGFRANTWLIPPIYVDSATRCPALPVEDENWGGNGGGCGRDGKYDRRRWSKEFSVLARMPCKTEEERVIRDRKAFLLHNLFVDTAIFRAASTIRRLIDQSMNSVGSHSGTHGSNVFEERIGDMNITVKKDGADASLKVEDKVDGVAFCQTGAMDIAQRNLLKGLTSDENVVAKDSSTLGVVIVKHCGYTATVKVSGRAKDSNDVKQTNDISGKFDGMLTIDVHDHPDGGSNALNVNSLRIPLPRVIHPETVVGNQHHSPKSHASNPAKKLARKILKDSLVKLDSMPSINSRIIRWELGSSWLQQLQKKDTPASENGKGNAMKTDKEPAVRGLGKHFEQLRKLKKKECNNEGSSSEKEECSNNYSSMNGTQVSDMIAADEANNGADISKLMSEDAFLSLKSLGAGLHEKSLEELTKMAHNFYDDTALPKLVADFASLELSPVDGRTMTDFMHARGLNMSSLGRVVELAEKLPHIQSICIHEML

SEQ ID NO: 50289 - protein, 692 aa, Zea Mays
MDAERDIKPFVSPIMATTIQHRRSLHGPNASQPTALASEHDGTPVLPQTQPQAACVLNKAASEVSGDVSDQSISAYETLEGTSTRRPCSAPRLSRKFWGAGDYDAAAGRSTPQPLSLQNRMCVHPEFLHSNATSHKWPFGALAELLDNAVDEIETGGATTILLDKVTDKRNGSPAILIQDGNGFKTSTMRLGADVIVFSRCTKSSGPTQSIGLLSYTFLVETGHTDVVVPVVDYKCNLMKGQTQRLERHGSEQFFSNLSALLKWSPFATEEELMQNFCDIGPHGTKIIVFNLWSNDDGNLELDFDTDPEDIMISGAPNPEEIRNSVKRANENHLANRLRYSLRLPDYFRIILRGQEVKRHRIAADLIYPECISYKPHSCGIKEATVLTTIGFLKGAPTISVHGFNIYHKNRLILPFHRVLNTSSSKGRSVSGVLEVDFIKPTHDKQDFEKSQLFQKLINRLKEMTNEYWELYSDKIGYMKKPRVSAAPLPPPVMLPIANGTAEPSDRSAPAPTQPLRSHSNYLNAVPIASAPPGFHSAPVKAESVAPGAHMGYSPSSLNAQTMQVNGIKSPSMVPATDSVDTRKRRNDDTTTMTVAFKRKATQDLAGSSCATDETKQVSGYMGMGERETKEFCFLKMENRMLREECSDFVMAEKALRLKEQNLRLEIEKAREQFKSLLNEYVSLSATPTQKR

SEQ ID NO: 50290 - protein, 791 aa, Zea Mays
MDAERDIKPFVSPIMATTIQHRRSLHGPNASQPTALASEHDGTPVLPQTQPQAACVLNKAASEVSGDVSDQSISAYETLEGTSTRRPCSAPRLSRKFWGAGDYDAAAGRSTPQPLSLQNRMCVHPEFLHSNATSHKWPFGALAELLDNAVDEIETGGATTILLDKVTDKRNGSPAILIQDDGGGMDPDSLRRCMSFGFSEKQSGSSIGQYGNGFKTSTMRLGADVIVFSRCTKSSGPTQSIGLLSYTFLVETGHTDVVVPVVDYKCNLMKGQTQRLERHGSEQFFSNLSALLKWSPFATEEELMQNFCDIGPHGTKIIVFNLWSNDDGNLELDFDTDPEDIMISGAPNPEEIRNSVKRANENHLANRLRYSLRVYASVLYLQLPDYFRIILRGQEVKRHRIAADLIYPECISYKPHSCGIKEATVLTTIGFLKGAPTISVHGFNIYHKNRLILPFHRVLNTSSSKGRSVSGVLEVDFIKPTHDKQDFEKSQLFQKLINRLKEMTNEYWELYSDKIGYMKKPRVSAAPLPPPVMLPIANGTAEPSDRSAPAPTQPLRSHSNYLNAVPIASAPPGFHSAPVKAESVAPGAHMGYSPSSLNAQTMQVNGIKSPSMVPATDSVDTRKRRNDDTTTMTVAFKRKATQDLAGSSCATDETKQVSGYMGMGERETKEFCFLKMENRMLREECSDFVMAEKALRLKEQNLRLEIEKAREQFKSLLNEYVSLSATPTQKRATLPAQDLCLRFNDDSSHDDEGYSLPVVHGGARRQGHVNTLEKVEGISGRKKRKQGKLET

SEQ ID NO: 50291 - protein, 678 aa, Zea Mays
MDAERDIKPFVSPIMATTIQHRRSLHGPNASQPTALASEHDGTPVLPQTQPQAACVLNKAASEVSGDVSDQSISAYETLEGTSTRRPCSAPRLSRKFWGAGDYDAAAGRSTPQPLSLQNRMCVHPEFLHSNATSHKWPFGALAELLDNAVDEIETGGATTILLDKVTDKRNGSPAILIQDDGGGMDPDSLRRCMSFGFSEKQSGSSIGQYGNGFKTSTMRLGADVIVFSRCTKSSGPTQSIGLLSYTFLVETGHTDVVVPVVDYKCNLMKGQTQRLERHGSEQFFSNLSALLKWSPFATEEELMQNFCDIGPHGTKIIVFNLWSNDDGNLELDFDTDPEDIMISGAPNPEEIRNSVKRANENHLANRLRYSLRVYASVLYLQLPDYFRIILRGQEVKRHRIAADLIYPECISYKPHSCGIKEATVLTTIGFLKGAPTISVHGFNIYHKNRLILPFHRVLNTSSSKGRSVSGVLEVDFIKPTHDKQDFEKSQLFQKLINRLKEMTNEYWELYSDKIGYMKKPRVSAAPLPPPVMLPIANGTAEPSDRSAPAPTQPLRSHSNYLNAVPIASAPPGFHSAPVKAESVAPGAHMGYSPSSLNAQTMQVNGIKSPSMVPATDSVDTRKRRNDDTTTMTVAFKRKATQDLAGSSCATDETKQVLGFCYGREGTTTQGTEFTARD

SEQ ID NO: 50292 - protein, 546 aa, Zea Mays
MQQHGDYFCPDCKSKCKTVPATEKMNTSHSSECASTSKGKSTPMIAVFCNGEEALYVPEKHMILCQCKACKERMMSLNEWEKHTGSRKKNWKMSIRQKSTGEPLINLLDDIPCGTSKSSKPGIKKGELLQLQANAYSPVCAKWTTERCAVCRWVEDWDYNKIIICNRCQIAVHQECYGARAVQDLTIWLCRACEFSQQKRECCLCPVKGGALKPTDVDGLWVHVTCAWFQPKVSFPVEETMEPAMGIMSIPAEYFKKTCVICKQMHGACTQCYKCSTYYHAMCASRAGYRMELQHYERSGRHITKMVSYCDFHSTPDPDNVLIVKTPEGVFSTKFFVQNGEKQTAARLARKENYQEKVLPPIVSDCLVAKCLTYEMLKYKKEPGEAIAHRIMGPRHHSQDFIDGLNAYMGHKDDQSFSTFKERLGYLQKTENLRVSCGRSGIHGWGLFAARNIQEGQMVIEYRGEQVRQRVADLREARYHREKKDCYLFKISEDVVIDATGKGNIARLINHSCMPSCYARIVTVSGDRSQIILIAKRDVSAGEELT

SEQ ID NO: 50293 - protein, 956 aa, Zea Mays
MPASRIPFKRCTAAVPGVGKPGPAASMPPAKRRRDRVVPSRSRDSMPPPAPHVEEGDNRHGEVYNVELLMAEPKVDSFGPVETALWTQARTAPTDADLYRACRNINKRGSCGGAASGSVLTSVSNAASDACAGGNGTIVRVSNAALEGGAGSNGGLEGRPAVVECKPKREGSDKKEDFYWPEDFVLGDVVWARSGKKSPMWPALVIDPLQHAPEVVLNSCVPGALCVMFFGYSANGHGRDYGWVKQGMIFPFVDYLDRFQGQPLYKLRPTKFRAAIEEAFLAERGFFDLDMDGACSPRKFVDKQSDPNGFQEEAASNNEQECQSESQVVGKSALCCDSCGNRLPSKVSKKRKQGGEQVLCRHCEKLLQSKQYCGICKKIWHHTDGGNWVCCDECQIWVHVECDLTCNNMEDLENADYFCPDCKSKCKTVPATEKMNTSHSSECASTSKGKSTPMIAVFCNGEEALYVPEKHMILCQCKACKERMMSLNEWEKHTGSRKKNWKMSIRQKSTGEPLINLLDDIPCGTSKSSKPGIKKGELLQLQANAYSPVCAKWTTERCAVCRWVEDWDYNKIIICNRCQIAVHQECYGARAVQDLTIWLCRACEFSQQKRECCLCPVKGGALKPTDVDGLWVHVTCAWFQPKVSFPVEETMEPAMGIMSIPAEYFKKTCVICKQMHGACTQCYKCSTYYHAMCASRAGYRMELQHYERSGRHITKMVSYCDFHSTPDPDNVLIVKTPEGVFSTKFFVQNGEKQTAARLARKENYQEKVLPPIVSDCLVAKCLTYEMLKYKKEPGEAIAHRIMGPRHHSQDFIDGLNAYMGHKDDQSFSTFKERLGYLQKTENLRVSCGRSGIHGWGLFAARNIQEGQMVIEYRGEQVRQRVADLREARYHREKKDCYLFKISEDVVIDATGKGNIARLINHSCMPSCYARIVTVSGDRSQIILIAKRDVSAGEELT

SEQ ID NO: 50294 - protein, 341 aa, Zea Mays
MDRPKCRTATEIMQRADPSCKIWFVCKGQLICTRGVEEEVAPSATPFVPDDLDHQALQLVVSHQKEDEAKSELGLYDELKEACIAAENLMKRALNESSRRQKADGEVASALQKAKEYQELYFEETRKREELEGALARAHREIARLMQAKQVFVVERNTAADELQEAMSERSSLEGHDVDEDAVLRTAGGQATEQQEEEEEHVQTQHDLGTGERDLELEARLNQSKLAAFSPSSVIQSPYDEDRVPACFLCPILQEPMRDPHVAADGFTYEGDAIRGWLDGGNGASPVTGQPLAHRELAPNLALGAVIQDYTVMRRRQCRFCDSHDGVAALQFFPSPVGCQR

SEQ ID NO: 50295 - protein, 424 aa, Zea Mays
MGVKFHSSKLSPEQVKLFRRIEHERVDKQLDGYVRQCSKMKVKCEKLVFEKDDVVAGLVELVVLHKVTRLVIAAAADRQYSRKMDRPKCRTATEIMQRADPSCKIWFVCKGQLICTRGVEEEVAPSATPFVPDDLDHQALQLVVSHQKEDEAKSELGLYDELKEACIAAENLMKRALNESSRRQKADGEVASALQKAKEYQELYFEETRKREELEGALARAHREIARLMQAKQVFVVERNTAADELQEAMSERSSLEGHDVDEDAVLRTAGGQATEQQEEEEEHVQTQHDLGTGERDLELEARLNQSKLAAFSPSSVIQSPYDEDRVPACFLCPILQEPMRDPHVAADGFTYEGDAIRGWLDGGNGASPVTGQPLAHRELAPNLALGAVIQDYTVMRRRQCRFCDSHDGVAALQFFPSPVGCQR

SEQ ID NO: 50296 - protein, 638 aa, Zea Mays
MWDEIKKHGAFGHAGAGNGNAARAAASKAGSSVGAAVAASTAVPAGATRVVSFSLAWACPEVKFPAGSTYYRRYTRFYGTDADAAAEHLAHDALLEHMNWESQIEEWQKPILHDQRLPEWYPVALFNELYYLNAGGTIWTDGQAPKRAGFASSLTATEPFSIDTLLPVAAGGSAVDGVVRAVASATERSHSAAAFGAALLRGGEDNVGQFLYLEGMEYNMYNTYDVHFYASFALLSLFPRLELSLQRDFARAVLLHDPRPRRTLDGRTVARKVLGAVPHDVGLNDPWVELNAYMLHDAARWKDLNPKFVLQVYRDAVATGDAAFAEAVWPAVYVAMAYMDQFDRDGDGMVENEGVPDQTYDMWSVSGVSAYTGGVWVAALQAAAGMARVVGDRPAEAYFRARRDRAARVYDAELWTGAYFRYDNSGGGGASESIMADQLAGQWYARACGLEPVVEDAKARSALATVLDYNVMRVKGGAIGAVNGMRPDGAVDASSTQSKEVWPGVTYAVAAAMVHEGMTEAAFRTAKGAHDAAWGNDGFGYAFQTPEAWTEDGGYRSLHYMRPLGIWAMQWALSPPELHRDLRTPEARSSEEPSPADAALGQAQFDKVASMLRLPEEQQPKGYLWAIYNLVRQIVLPA

SEQ ID NO: 50297 - protein, 635 aa, Zea Mays
MTAPVALPNDRAAVSHSARVDLFRDTSCNIEKEVLASMGNDQDSTAAGTNPGFRVGEIRFGNGDVYSGTLLGNTPEGSGQYRWSDGCTYDGEWTRGMRHGQGKTQWPSGATYEGEYSRGYVYGEGTYTGPDKIIYKGRWKLNRKHGLGYQTYPNGDTFEGSWIQGEIVGHGKYTWANEDTYVGNMKSGRMSGKGTLTWKNGDSYEGNWIDGMMHGYGIYTWNECGYYIGTWTRGLKDGKGKFYPEGCRVPVNDELYIKNLRNRGVLPDIRRQNHGSRILHSSSVDMGNMKVGITRQSSDVLYKRNPTEQPPLKNVSLERRWSLEVAIEKFIGHESIESSGQESLENLSDSRMPILEREYMQGVLISEVVLDRSFSDSSKKTKRRQKKMVRDTKRPGEAIIKGHRSYDLMLSLQIGIRYTVGKITPIQKREVHASDFGPTASFWMNFSKEGSRLTPSHSAEDFKWKDYCPMVFRNLREMFKIDAADYMISICGNSALRQLSSPGKSGSVFFLSQDDRFMIKTLRESEVQVLLRMLPKYYDHVRTYENTLITKFFGLHRVKPSSGQMFRFVVMGNMFCTELRIHRRFDLKGSSLGRSTDKIEIDENTTLKDLDLNYSFYLEPSWREALLKLKQIVIF

SEQ ID NO: 50298 - protein, 823 aa, Zea Mays
MTAPVALPNDRAAVSHSARVDLFRDTSCNIEKEVLASMGNDQDSTAAGTNPGFRVGEIRFGNGDVYSGTLLGNTPEGSGQYRWSDGCTYDGEWTRGMRHGQGKTQWPSGATYEGEYSRGYVYGEGTYTGPDKIIYKGRWKLNRKHGLGYQTYPNGDTFEGSWIQGEIVGHGKYTWANEDTYVGNMKSGRMSGKGTLTWKNGDSYEGNWIDGMMHGYGIYTWNECGYYIGTWTRGLKDGKGKFYPEGCRVPVNDELYIKNLRNRGVLPDIRRQNHGSRILHSSSVDMGNMKVGITRQSSDVLYKRNPTEQPPLKNVSLERRWSLEVAIEKFIGHESIESSGQESLENLSDSRMPILEREYMQGVLISEVVLDRSFSDSSKKTKRRQKKMVRDTKRPGEAIIKGHRSYDLMLSLQIGIRYTVGKITPIQKREVHASDFGPTASFWMNFSKEGSRLTPSHSAEDFKWKDYCPMVFRNLREMFKIDAADYMISICGNSALRQLSSPGKSGSVFFLSQDDRFMIKTLRESEVQVLLRMLPKYYDHVRTYENTLITKFFGLHRVKPSSGQMFRFVVMGNMFCTELRIHRRFDLKGSSLGRSTDKIEIDENTTLKDLDLNYSFYLEPSWREALLKQIETDSDFLRTQRIMDYSLLLGVHYRAPQHLRTRASYHRSMAADRLTVVSEEDAQEEDALSHPEGLVLVQSSGENSVVVGPHIRGSRLRASAAGFGEVDLLLPGTARLQIQLGVNMPARAEQISKEDGSKSFREVYDVVLYLGIIDILQEYNKSKKIEHAVKSMQYDSVSISAVNPRFYSERFLKFIQTVFPENS

SEQ ID NO: 50299 - protein, 297 aa, Zea Mays
MVRTTVVGRERSGGVRQYNRSKVPRLRWTPDLHHCFVHAIHKLGGPDRATPKRVLQLMGVGGLTISHVKSHLQMYRNMRNDLGMQGTEDQEHVYVGGGGMHTNIQQQRDHGCGDAPCCICCRHSPNKPAKEEEEATLFQRQLKRSRTETRRGRGQREEIDDGSASPKRRLLLLRGGRGRPGICESDGSGSPSSGTLASGYDNYMRMMQAAMGVAAAAGAAAAAAPHHHHHHHAETVEPGRGPRIKQHLARPGADGGEHAPPSSRQLFTFLGFVVAPGPPPPPCCSRDHPFEMVGTAL

SEQ ID NO: 50300 - protein, 1044 aa, Zea Mays
MSATQSLALKLRAAPAPGRPRGRTTVRAAGAAHAGALLQHRRCVSLAQGGRFLRGAPLPAAQRRPRALPWAERAARRHGGGSVVAAAAAGVRSMSKLPQGDTGLYDPSMDRDSCGVGFIAELSAEPSRKTIVDAVEMLERMSHRGACGCDKNTGDGAGILVALPDAFLREVTKDAGFELPPQGEYAVGMFFMPHDDDRREKTKLVFHEIAESLGHVVLGWRRVPTDNSDLGKAALETEPTIEQVFVSKSMHSKADFEQQLYILRGLSIKSIREALCLEHGGPNDFYTCSLSSRTVVYKGQLKPTQLKGYFFADLGDQRFKSYMALVHSRFSTNTFPSWDRAQPMRVLGHNGEINTLRGNKNWMTAREGLLECKGLGLSRDEMSKLLPIVDVTSSDSGAFDNVLELLIRSGRSLPEAVMMMIPEAWHNDVNMDPEKKALYEYFSALMEPWDGPALVSFTDGRYLGATLDRNGLRPGRFYVTYSGRVIMASEVGVVDVPNDDVMRKGRLNPGMMLLVDFEKHCIVDDDALKKQYSGARPYGEWLERQKIQLADIIESVSETERIAPRIGMLPQKSENKEAFCIHGILAPLKAFGYTVETLQMLLLPMAKNGVEALGSMGNDTPLAVMSNREKLPFDYFKQMFAQVTNPPIDPIREKIVTSMECMIGPEGDLSETTEHQCHRLKLQGPLLHIDEMEAIKNMNFRGWRSKVLDITYPKEYGREGLEQTLDKLCDQAREAIHEGYTILVLSDRGFSPDRVAVSSLLAVGAVHQHLVLNLERTRIGLLVDSAEPREVHHFCSLLGFGADAICPYLAIEAIWRLQIDEKIPLQDDGQLYPKELIDKYFYASNNGIMKVLAKMGISTLASYKGAQIFEALGLASEVVSKCFEGTPSRVEGSTFEMLAQDALHLHELAFPSRTLPPGSAEANSLPNPGDHHWRKNGEVHLNDPFSIAKLQEAARLDSREAYKEYSRYTQELNKSCTLRGMLKFRETPVRISLDEVEPASEIVKRFCTGAMSYGSISLEAHTTMAKAQNIMGAKSNTGIFHHGR

SEQ ID NO: 50301 - protein, 991 aa, Zea Mays
MLRIRKGPLKGYLCRVVRIFRNDVTVKLDSLLKIVTVQADLLSVPANRGDNLSGAPASKFGSQDTSFFGSEAGKTSWDNGLPSFGSDSWQPFSSSTLSVQNAGGESEADPWSKKTSAKDDSDPWGKKTDGDSDRWGKKTDGDSDPWGKEAVSAADGDSNPWGKETVPSAAGDSDPWGKKVVSSADGDSDSWGKKATSSAVDTEKEGSGGTAWDKQAGVGGSDAAGSSWDRAVVNESEKSDNWGEACRVMDMGTGAEADTDPWGSKVKAVDMEGPNNWEKATVPPNNKLEDVSQGWGQPKGNSTEDQAIDNVSKDVDNNRACDSSLPVTEDGTWGKSKDNSCGGAGGAGGWDVSVGNWNKSSVVADAQDEGWGKGNWSSAESEETNNQSGNWNKTGASDQAGYNNWDKPKSFGGNGWNKGDDQNSSWNRPENFGGGRGFGRGQGRGRGQQSGYFNGRNDQGSWKKSWGSDNAERPSWRSDNQVDNEAGESGGYRGRGRGGRGQYGGRGKDNGWRNDDRSNSGFGRENNSGDGPKWGGGGNWNATNPPSSSVGTKSYGQNQPFTWNNSEDNKPSVGEQGDPWASKVSSTEDTEQQNDSWSSKMISGGAEDTSGGWDTKVKDSSCNDGGEGLQNDPWANKIGSNEGKEQETDPWASKMSSTVCADDKKGSWNTTAKGIPSKEKADDPWNSKGGNDDSKKTDTWGAGSSGGDQELSWSKPNFSLGDQESTWNNPRFSDDDNANNRGGFGRGNRGRGRGRNFGDGGGSSWNGGNRNDESGGGRSGEPWNRRDFDGGGGRGRGRFGRGDRNQGNNFGSGDGGSWGSGRGNGGRGGYRNWNDNNERSFGEGGGWSQSQSSDWNANKGNGEGNQAFSKSKPSWEAQNTSGRDGQAGKGDANNSWSKNRSSPSSAWGAPSGGAGGRGSWGKSNEDGWNSAGGSAKEKPAWGGGSEASTKKEDKGGEGNGSQGGGGVSSWDKGADDAWNGNTGSDIGSGGW

SEQ ID NO: 50302 - protein, 378 aa, Zea Mays
MGVCSCAVPFSSGETSRFVNAPFRSKRRKRSRSLREGETARRRGSGMGKGAELWDDSALVDAFDRAMFSMKEMHCKSKRATPSEDGKTELAAATAEEEPITAGAADVCGEEDANCDSTHCDLSELQQQPYEDRQTIEHAPLQETDPGKETHVSEAKTLSTDASTNAGGNWSSSQQTGQYNELLRQYYELEEKSRNILEQLQQTNYSNYQASGYASTAQQQQVPVYSATVPDPYSSTTQSSCCNWNVPLVSVSCCSAGQPSGGSACTPPTAGCSVSLTCDQCPGATTAYPSVSNFMQVPTMVSTNDDQVDKAAMMTAEAAFNFMRSTISGQPSTQGSKSDTGKEESTNMGMNPNLDSDLAALLNSWYAAGFYTCRAPRP

SEQ ID NO: 50303 - protein, 521 aa, Zea Mays
MVVARACSRFLCCSSPPCCGSTSLRRRLPGVISRRGSSSAPAHRLTRSKAHGQRTGRSPASGTHTRTVDIRLTVILEMWLRTSITITRFSIAWSRLIPDGRGAVNPKGLEYYNSLIDELLRYGIQPHVTIYHFDLPQALQDEYNGLLSPRIIDDFTAYADVCFRSFGDRVKHWITVNEPNIEPIGGYDQGYLPPRRCSYPFGLGVTCTHGNSTTEPYAVAHHLLLAHASAVSLYRRKYQGEQGGRIGLTLLAWWYEPATQKPEDVEAAARANDFSLGWFMHPLVYGDYPPVMKRNVGARLPSLTARDSAMVRGSLDFVGINQYGAILVEADLGQLDRDLRDYYGDMATNFVTVPFESTVTRNQQVPRLGLRNHEAPWALSKLLEHLQTHYGNPPVMIHENGAGHEPDPSGGFLYDDEFRAHFLRVYVEAALASVRNGSDLRGYFVWSFMDVFEFLFSYRFRFGLYGVDFAADNRTRYARRSARWYAGFLRGGAATSRPPLFQRGHTAPPIRSENQPHVSVL

SEQ ID NO: 50304 - protein, 390 aa, Zea Mays
MSSSDMALQDEYNGLLSPRIIDDFTAYADVCFRSFGDRVKHWITVNEPNIEPIGGYDQGYLPPRRCSYPFGLGVTCTHGNSTTEPYAVAHHLLLAHASAVSLYRRKYQGEQGGRIGLTLLAWWYEPATQKPEDVEAAARANDFSLGWFMHPLVYGDYPPVMKRNVGARLPSLTARDSAMVRGSLDFVGINQYGAILVEADLGQLDRDLRDYYGDMATNFVTVPFESTVTRNQQVPRLGLRNHEAPWALSKLLEHLQTHYGNPPVMIHENGAGHEPDPSGGFLYDDEFRAHFLRVYVEAALASVRNGSDLRGYFVWSFMDVFEFLFSYRFRFGLYGVDFAADNRTRYARRSARWYAGFLRGGAATSRPPLFQRGHTAPPIRSENQPHVSVL

SEQ ID NO: 50305 - protein, 279 aa, Zea Mays
MHPLVYGDYPPVMKRNVGARLPSLTARDSAMVRGSLDFVGINQYGAILVEADLGQLDRDLRDYYGDMATNFVTVPFESTVTRNQQVPRLGLRNHEAPWALSKLLEHLQTHYGNPPVMIHENGEAGQARALSLSRFSCRAHARFLSSPELMVPPPPPPPGAGHEPDPSGGFLYDDEFRAHFLRVYVEAALASVRNGSDLRGYFVWSFMDVFEFLFSYRFRFGLYGVDFAADNRTRYARRSARWYAGFLRGGAATSRPPLFQRGHTAPPIRSENQPHVSVL

SEQ ID NO: 50306 - protein, 217 aa, Zea Mays
MQQAHAPPWSGSGRAGSRAGIFSFTTQSDSSRWRSGRARARPACLGRHVQARHPMRCHRPPGTSHGHRRRHTAVYLVRGRNRKMGKTWALITHLHALAGPSLTLIYPLYASICAMESATRVDDEQWLAYWIIYSFITLFEMAAEHVLYWIPLRYEAKLLLAAWLVLPHFRGASFIYDRFVREQLRKNGVSLRGHHHGHAADHVPHVFQAEHRHGVHS

SEQ ID NO: 50307 - protein, 636 aa, Zea Mays
MPSRRRRRGDLAVAVAVLATVALAAGADGGAEFDYRKLSGIIIPGFASTQLRAWSVLDCPYSPFDFNPLDSVWLDTAKLFSAVNCWLKCMLLEPYNQTDHPECKSRPDSGLSAITELDPGYITGPLSSVWKEWVKWCVEFGIEANAIIAVPYDWRLPPSMLEERDLYFHKLKLTFEIALKLRGGPSLVFAHSMGNNVFRYFLEWLKLEIAPKHYIQWLDEHIHAYFAVGAPLLGSTEAVRGALSGTTFGLPVSEGTARLMFNAFGSSLWLMPFSKHCKADNIYWKHFFEGKGGCPHKQQCDEDEYISDYGGWPTDLVNIEVPSARDMGAYPSITDITENITSIMECGKPTLLSFSAREVSDGTLFKTIEDYDPQSKALVYQLEKYYQGDPVLNPLTPWERPPIKNVFCIYGIDSKTEVGYYFAPSGKPYPDNWIITDIIYELEGSLLSRSGNSVSGKPNNSSGDGTVSYNSLSWCKNWLGPKVNITRAPQAEHDGSDLQTAMNIDHHHGDDILPNMTRVPHVKYITYYEDAESLPGWRTAVWELDKANHRNIVRTPVLMRELWLEMWHDLHPDSKSKFVTKAFRGPLRNEDCRWDYGKARCGFPEHCEYRYTFGDVHLGMSCRLRNTSANLLQQYL

SEQ ID NO: 50308 - protein, 500 aa, Zea Mays
MPSRRRRRGDLAVAVAVLATVALAAGADGGAEFDYRKLSGIIIPGFASTQLRAWSVLDCPYSPFDFNPLDSVWLDTAKLFSAVNCWLKCMLLEPYNQTDHPECKSRPDSGLSAITELDPGYITGPLSSVWKEWVKWCVEFGIEANAIIAVPYDWRLPPSMLEERDLYFHKLKLTFEIALKLRGGPSLVFAHSMGNNVFRYFLEWLKLEIAPKHYIQWLDEHIHAYFAVGAPLLGSTEAVRGALSGTTFGLPVSEGTARLMFNAFGSSLWLMPFSKHCKADNIYWKHFFEGKGGCPHKQQCDEDEYISDYGGWPTDLVNIEVPSARDMGAYPSITDITENITSIMECGKPTLLSFSAREVSDGTLFKTIEDYDPQSKALVYQLEKYYQGDPVLNPLTPWERPPIKNVFCIYGIDSKTEVGYYFAPSGKPYPDNWIITDIIYELEGSLLSRSGNSVSGKPNNSSGDGTVSYNSLSWCKNWLGPKVNITRAPQNMMDLICKQP

SEQ ID NO: 50309 - protein, 318 aa, Zea Mays
MARKKATVEQLRTLNKVREFKRRRNMHKAAGAGPGNKGENVCAICDDGGNLTCCEGCCQRSFHLDNEHNCIKTLGLTIQEAKNIIEKEDFICKNCQYKQHQCFICGSLGSSDDTDTSSQQVFQCEHDDCARFYHPKCVAQMLYPDSQELFELHVAAGESFTCPMHECIVCKEVDNKKDKSMQFAVCRRCPTVYHRKCLPRDIIFKPKKGRRGPMRRAWKNMLPDRILIFCMKHEIVRELQTPARNHIVFPESNVLKTFQALYAQREAPDHSSSKQTHSSPPPAARDQNQCYCSSPLCSFAPSSVFMRPHPGSSGWLDD

SEQ ID NO: 50310 - protein, 515 aa, Zea Mays
MEHCTAFICTSAQWPHSITTTRRVAYHRSANSSFSAPQRRRRSTLYVMNAASTSAPISPQNITQLPRTNSTVIKSISSDKPSSAMEQLDIERGVCIPFRKYTPEMVRKKVLDSRGSILSLASRGVEIIWKLGFYWSSLVYDFLVGQDEEIVPYRARQLRNLLCDLGPSFIKAGQVLANRPDIIREDYMNELCILQDDVPPFPNQVAFSIIEEELGQPIERLFSKISSETIAAASLGQVYRATLRETGEDVAIKVQRPGIEPIIYRDLFLFRTLASFLNGISLQKLGCNAELIVDEFGEKLLEELDYTLEATNIEDFLENFKDDPTVKIPQVYKQLSGSRVLVMEWIDGIRCTDPQAIKEAGIDMEGFLTVGVSAALRQLLEFGLFHGDPHPGNIFAMRDGRIAYVDFGNVAVLSQQNKQILIDAVVHAVNEDYAEMANDFTRLGFLASGTDVAPIIPALESIWQNSAGKGLADFNFRSVTVQSACLQLSNPYSRKVFFGYSFIVDTRRNLLYTKA

SEQ ID NO: 50311 - protein, 356 aa, Zea Mays
MVIRFGGRILMSRHDNLKVGPYLRKVSSQLLELYEQNRTTQAQSSQGSEAEGSSAGVCNQRSTVKSEANSKEPSAHGHLQASRPPNLQHSSSTGASGHHDDGQSNSDKHISGHKMLQNDNFNHGGSREKNKSGTKTGTVMDKLHNDKKFSPGHHYSKASHESHNPVEEHQPHGSDDNSNETRDGVGGNEAPVVSTSRMDAMNKIDKDKVKAALEKRRKSKGGFATKVNVIDDDDLLERELEQGVELAVEFEKINQDKKQNSSDGSMHPPDLENADELMENGHHVKQSLPTTAEDMGCPMDSKERHPPALHKQNDVSEHKSQQLDDTLKHQKSCDHPQPVGSPEQDGKDYKRPKLDG

SEQ ID NO: 50312 - protein, 709 aa, Zea Mays
MKNDKAAGTRSGLGGGRLVAKTVSKDKRAVEGLPDGWRKEYRPRKNGSFLDVYYIDPVSGYEFRSFKDVHRYLETGDIRQCAVRPKKSTICEVHIIESQTHASASPQHTRPGTADKGIQCEILTSDGIMVPLGELIAPYNGNDTEHTVLPEPENLKAIQGSDNKLETSEHVSVQPVSARNGSRQTKSVKRKERNAEVKSKKRKTSSAVTAVRASPRLAALKVQLEVSIKHEDAMVSINHVDQVQTIEESAIDQAHKSQSGSVDEIHGNLESTFSQLQLSQADTANGMQAMQENTTIHSQPSQLDTLNPTHRSQENSGNQLQSVLTDSSIPKRTTQECTIDEPSQPGINHIHTDQEFTGNQFRSNLPDDTVISLRDIEECTAHSKPSNTDSTGQIQANEENTANQVQSSLTDTVIPVPVIQEYATGYSQLSKANTSNKKQANQEYIADQVQSSLTDTVIPVQVIKEYTTGYPHINKADISNQMQANQENTDDHLYLSQVGCVTQMQIIEENLPKQPQLSQSGTGGRIQIDLESTTNHLLPNYDENSMLQCGLSWAPEQNSGALSTDFWKNVETQASSVSMPINGAPVASFPANVRFHNAAAAAEPALPPQVAPAEAGSDQSGLAFQSVFGNIWSDPCIEFAFKTLTGDIPVLDDTTAVTDYFPEQQDLNKGPAPNRAGSVDNSRNHTQVDVNLPPPALDDFYNGNWFPPQ

SEQ ID NO: 50313 - protein, 131 aa, Zea Mays
MASTVHHNSHQALLLRPLPTPSRHPRLSFSPRPAGLRSFFPASGCRLGTHGVALAEPEFVPLQEEEEEEEDARFVVVTFYKFVPLFDPHAEVARHLNFLQGRDIHGRIYLNEKGINAQWPSQRCSGICRLG

SEQ ID NO: 50314 - protein, 196 aa, Zea Mays
MASTVHHNSHQALLLRPLPTPSRHPRLSFSPRPAGLRSFFPASGCRLGTHGVALAEPEFVPLQEEEEEEEDARFVVVTFYKFVPLFDPHAEVARHLNFLQGRDIHGRIYLNEKGINAQYSGPHKDAVAYADWVKKHHQFSDMLVQTSPAVTGHAFPRLKLRYKPSLVQSGRKDLKLGHALMCPQAKHLEGGFCCLM

SEQ ID NO: 50315 - protein, 285 aa, Zea Mays
MASTVHHNSHQALLLRPLPTPSRHPRLSFSPRPAGLRSFFPASGCRLGTHGVALAEPEFVPLQEEEEEEEDARFVVVTFYKFVPLFDPHAEVARHLNFLQGRDIHGRIYLNEKGINAQYSGPHKDAVAYADWVKKHHQFSDMLVQTSPAVTGHAFPRLKLRYKPSLVQLEGGSLHLPLLDPNMRATPLTPSEWKERLEARTCLDVSSGETSGRGLLLLDVRNDYEWDVGHFEGAQRPNVDCFRSTSFGLSGEEEGLSESVYTGGRSVELSQGGGASRVGGKSLCL

SEQ ID NO: 50316 - protein, 423 aa, Zea Mays
MASTVHHNSHQALLLRPLPTPSRHPRLSFSPRPAGLRSFFPASGCRLGTHGVALAEPEFVPLQEEEEEEEDARFVVVTFYKFVPLFDPHAEVARHLNFLQGRDIHGRIYLNEKGINAQYSGPHKDAVAYADWVKKHHQFSDMLVQTSPAVTGHAFPRLKLRYKPSLVQLEGGSLHLPLLDPNMRATPLTPSEWKERLEARTCLDVSSGETSGRGLLLLDVRNGAQRPNVDCFRSTSFGLSGETDPLNGVDKERTDILMYCTGGIRCDVYSTILRKKGFRNLYTLEGGVSNYLKVEGPAGWVGNLFVFDGRLSLPPATFNEEEDEEEQQENKRWVGCCYVCGSEVVELRHRNCANIDCNRLYLCCGWCAEELCGCCCSDCKVAPRLRPLLPGHQRYLKWHVYRDGRTDDENKLYGFVDDDSSGL

SEQ ID NO: 50317 - protein, 343 aa, Zea Mays
MDSSAADDPMADEARVEDAFTQEITDYSYVPRYHVLSWMETVEGMVAGVAALPPVYLILNRALLRCPCQDLLETGWGWKRLVPYRPGYVEWHVFKKYLGDYFDHNREAFLCAEQKPDPFGWIIAKKSALIAAAKLCLKMEKALLRYCASFLTPDDKRLILRIKDQAKQMIQSEGDQSLVVTICLEVLQAMVQMGVLVPTGDMTVVRRTAQFFLNSFQECLTAQRKEREMATAELGFKKQLTKEEKFEKRKQRLAAIGEDLLAIAADQPFRFPATFTFVVRAFSVLDGTGKGLDPRFHITEIAKPNAKELLRFNDAGVEIVVKASFNIWSKLLTYLYDSTSPKG

SEQ ID NO: 50318 - protein, 409 aa, Zea Mays
MANAADDPMADEARVEDAFTQEITDYSYVPRYHVLSWMETVEGMVAGVAALPPVYLILNRDLLETGWGWKRLVPYRPGYVEWHVFKKYLGDYFDHNREAFLCAEQKPDPFGWIIAKKSALIAAAKLCLKMEKALLRYCASFLTPDDKRLILRIKDQAKQMIQSEGDQSLVVTICLEVVGAERAVVVQLVGPVRRAAARGGRSPRAEEVRREERAEAEDAAGQQVLQRGEVLVLVLEQGLGLGALHEEHIGMVLQAMVQMGVLVPTGDMTVVRRTAQFFLNSFQECLTAQRKEREMATAELGFKKQLTKEEKFEKRKQRLAAIGEDLLAIAADQPFRFPATFTFVVRAFSVLDGTGKGLDPRFHITEIAKPNAKELLRFNDAGVEIVVKASFNIWSKLLTYLYDSTSPKG

SEQ ID NO: 50319 - protein, 280 aa, Zea Mays
MEKALLRYCASFLTPDDKRLILRIKDQAKQMIQSEGDQSLVVTICLEVVGAERAVVVQLVGPVRRAAARGGRSPRAEEVRREERAEAEDAAGQQVLQRGEVLVLVLEQGLGLGALHEEHIGMVLQAMVQMGVLVPTGDMTVVRRTAQFFLNSFQECLTAQRKEREMATAELGFKKQLTKEEKFEKRKQRLAAIGEDLLAIAADQPFRFPATFTFVVRAFSVLDGTGKGLDPRFHITEIAKPNAKELLRFNDAGVEIVVKASFNIWSKLLTYLYDSTSPKG

SEQ ID NO: 50320 - protein, 658 aa, Zea Mays
MLAAPAALHLLLPAPPLPPPHYHHHHVAFPAPPLHASLPCSRRPRRRPPRHGVARASAAMAEEASSSGPTKFSVRIPVGDREILVETGHIGRQASASVMVTDGETILYCSVCLSDTPNDPSDFFPLSVHYQERLSAAGRTSGGFFKREGKTKDHEVLVCRLIDRPLRPTMPKGFYFETQILSWVFSYDGIHSPDCLAITAAGIAVALSEIPNKQTIAGVRIGLINNQFIVNPTTEQMENSELDLMMAGTDSAILMIEGYCDFLTEEKLLEAVEAGQVAIREICKAIDVLVQSCGKKKMVDAISLPPPELYRHVEDISGDELMKALQIKGKIPRRKALSALEEKVISILSEQGYVSKDGLSGGTESLADIVEDEDEDEIVDDGEVDEGDVHIKPVSRKPLQLFAEVDVKLVFKEISSKYLRKRIVERGKRSDGRSPWELRPINSQCGLLPRAHGSALFTRGETQSLAVVTLGGYQMAQRIDNLVDTEDSKSFYLQYSFPPSCVGEVGRIGAPSRREIGHGMLAERALEPILPLEEDFPYTIRVESTITESNGSSSMASVCGGCLALQDAGVPIKFPVAGIAMGLVLDTQEFGGDGSPLILSDITGAEDASGDMDLKIAGNESGISAFQMDIKVVGITLPVMEKALLQAREGRQHILSQT

SEQ ID NO: 50321 - protein, 644 aa, Zea Mays
MENSELDLMMAGTDSAILMIEGYCDFLTEEKLLEAVEAGQVAIREICKAIDVLVQSCGKKKMVDAISLPPPELYRHVEDISGDELMKALQIKGKIPRRKALSALEEKVISILSEQGYVSKDGLSGGTESLADIVEDEDEDEIVDDGEVDEGDVHIKPVSRKPLQLFAEVDVKLVFKEISSKYLRKRIVERGKRSDGRSPWELRPINSQCGLLPRAHGSALFTRGETQSLAVVTLGGYQMAQRIDNLVDTEDSKSFYLQYSFPPSCVGEVGRIGAPSRREIGHGMLAERALEPILPLEEDFPYTIRVESTITESNGSSSMASVCGGCLALQDAGVPIKFPVAGIAMGLVLDTQEFGGDGSPLILSDITGAEDASGDMDLKIAGNESGISAFQMDIKVVGITLPVMEKALLQAREGRQHILNEMLKSSPPPSKALSPHAPLIHVMKVKPNKVNLIIGSGGKTIKSIIEETGVDAIDTGDDGTVKITARDLTSLEKSKIIIANLTMVPKVGEIYRDCEIKSIAPYGAFVEIAPGREGLCHISELSSGWLAKAEDAFKVGDRIDVKLIEINDKGQLRLSSRALLPDVDSESNIGSTKEKVPQKDDVIKMTTKRPRRKKQPEPSGAENATTKALAKSAAAPAGSKGSEA

SEQ ID NO: 50322 - protein, 471 aa, Zea Mays
MLAAPAALHLLLPAPPLPPPHYHHHHVAFPAPPLHASLPCSRRPRRRPPRHGVARASAAMAEEASSSGPTKFSVRIPVGDREILVETGHIGRQASASVMVTDGETILYCSVCLSDTPNDPSDFFPLSVHYQERLSAAGRTSGGFFKREGKTKDHEVLVCRLIDRPLRPTMPKGFYFETQILSWVFSYDGIHSPDCLAITAAGIAVALSEIPNKQTIAGVRIGLINNQFIVNPTTEQMENSELDLMMAGTDSAILMIEGYCDFLTEEKLLEAVEAGQVAIREICKAIDVLVQSCGKKKMVDAISLPPPELYRHVEDISGDELMKALQIKGKIPRRKALSALEEKVISILSEQGYVSKDGLSGGTESLADIVEDEDEDEIVDDGEVDEGDVHIKPVSRKPLQLFAEVDVKLVFKEISSKYLRKRIVERGKRSDGRSPWELRPINSQCGLLPRAHGSALFTRGETQVSHWLWSL

SEQ ID NO: 50323 - protein, 293 aa, Zea Mays
MLRALAARCCGHWPPGAAAADGMLWQAELRPHAAGEFSMAAAQANLAMEDQAQVLASPAATLVGVYDGHGGADASRFLRSRLFLHVQRVVQEQGGMSAEAIRSAFGAAEEEFHRQVRQEWRSRPRLAAVGSCCLLGAISGDTLYVANAGDSRAVLGRRVPGGGAAVAERLSAEHNAACEEVRRELAALNPDDAQIVVHARGAWRVKGIIQVSRSIGDFYLKKPEYSLDPLFRQVGAPIALKRPALSAEPSVQVRKLKPNDLFLIFASDGLWEHLSDDAAVQIVFKNPRTPADW

SEQ ID NO: 50324 - protein, 767 aa, Zea Mays
MQFYDLPWKILCEVMNVELKAEPDNDEVYAQLTLLPESKQPEENGSSEEMPASPPAALARPRVHSFCKTLTASDTSTHGGFSVLRRHADECLPPLDMTRQPPTQELVAKDLHGVEWRFRHIFRGQPRRHLLQSGWSVFVSAKRLVAGDAFIFLRGDSGELRVGVRRAMRQQANVPSSVISSHSMHLGVLATAWHAVNTGTMFTVYYKPRTSPAEFVVPCDRYMESLKRNYPIGMRFKMRFEGEEAPEQRFTGTIVGNVDPDQAGWAESKWRYLKVRWDEASSIPRPERVSPWQIEPAVSPPPINPLPVHRPKRPRSNAVASLPESSAPTKEAAPKVTLETQQHALQRPLQTQDNVAPKSVFGDNSELDSAHKSSLRPSGFDLDKSTIGMQRKLGSDIWMRMNRPDGYSEMLSGYQPPNEGARNSQGFCSLPDQIAAGRPNFWHTVNAHYQDQQGNHNLFPGSWSMMPSSTGFGMNRQSYPMIQEVGGMSQSCTNTKFGNGVYAALPGRGIDRYPSGWFGHTTPGGRVDDAQPRVIKPQPLVLAHGEALKMKGNSCKLFGIHLDSPAKSEPLKSPPSVATPAAEKWMADGIDADKSPEPHKTPKQLGATQVDPVPERCPQASRGTQCKSQGGSTRSCKKVHKQGMALGRSVDLTKFNGYTELVAELDEMFDFNGELKGCSKEWMVVYTDYEGDMMLVGDDPWNEFCSMVHKIFVYTREEVQRMNPGALNSRPEDSGLANSTERGSASTAAAREAPGYQSASSLNSDNC

SEQ ID NO: 50325 - protein, 357 aa, Zea Mays
MAPLSPTPASASAPVSSSPRSLVPDASAAPMRPASPPQELPAAGGEIQAALAPANASTAGARGGGGSFTALLGLPTSQAMELLLPRTTPPALATAPAPTFPSDPHLVDRAARLSTFAPPSPSPSSTSPARPLPAAANAGKRKADPVDRASKAAKKGKTAEEKLAGGDGDDEKPAYVHVRARRGQATDSHSLAERARREKINARMELLKELVPGCSKVSGTALVLDEIINHVQSLQRQVEYLSMRLAAVNPRVDFGGLDSFLTTECGRIAGFNCKNGIDLEQVTWPEMGVHGARQLMQLQQQFWHGDLTHPHQVASQWEKRGDGHPPVFSNSSPSLFGYDLTSSGAQQTPASKLKTEL

SEQ ID NO: 50326 - protein, 260 aa, Zea Mays
MLMVSGFEKYYQIARCFRDEDLRADRQPEFTQLDMEVAFTSMEDMLKLNEDLMRHVFQAVGDIKLPNPFPRLTYAEAMDRYGTDRPDLRFDWELKDVSDVFLGSSFKVFADTLESGGVIKALCVPGGATVFSNTDLKKGTVYTEASKAGAKGLPFLKVMENGELEGIGPLLSSLKPEKKDQLMELLDTKTGDLILFALGEQSSANQILGRLRLFIAHKLEVIDTSAHSVLWVTDFPMFQWNSDEQRYEVQENTIRRAIKR

SEQ ID NO: 50327 - protein, 384 aa, Zea Mays
MVQVVAHHVLVLNSVTRSLPFPVTTSDTVKEKFPEEIRLRFRVLDLRRPQMQSNLRLRHNVVKLIRRYLEDEHEFVEIETPVLSKSTPEGARDYLVPSRVQPGTFYALPQSPQLFKQMLMVSGFEKYYQIARCFRDEDLRADRQPEFTQLDMEVAFTSMEDMLKLNEDLMRHVFQAVGDIKLPNPFPRLTYAEAMDRYGTDRPDLRFDWELKDVSDVFLGSSFKVFADTLESGGVIKALCVPGGATVFSNTDLKKGTVYTEASKAGAKGLPFLKVMENGELEGIGPLLSSLKPEKKDQLMELLDTKTGDLILFALGEQSSANQILGRLRLFIAHKLEVIDTSAHSVLWVTDFPMFQWNSDEQRYELFHHPSARSARSAFLNLGL

SEQ ID NO: 50328 - protein, 304 aa, Zea Mays
MVQVTVLPEYPEVYNIVNKLRVESVVAVEGVIRPRPVDAINADMRTGTIEVVAHHVLVLNSVTRSLPFPVTTSDTVKEKFPEEIRLRFRVLDLRRPQMQSNLRLRHNVVKLIRRYLEDEHEFVEIETPVLSKSTPEGARDYLVPSRVQPGTFYALPQSPQLFKQMLMVSGFEKYYQIARCFRDEDLRADRQPEFTQLDMEIGGGSLRIYKSDVQQRIFEIIGISPEQAEEKFGYLLECFDMGAPPHGGIAYGLDRLVMLLAGESSIRDVIAFPKTTTAQCALTKAPSAVEPQQLKDLAFPKPTS

SEQ ID NO: 50329 - protein, 123 aa, Zea Mays
MGPGKQPLHIKPAHPSLGFAPPKPPPPSSLTPSPPRTHARREPAKRDGRLHLRVPQRRRRRVDRQAALRRDRGVRRHPLRAAAPPRRLRLRGRLRVRRPVVLLHGHPQLRRLPGDRRWWRDDG

SEQ ID NO: 50330 - protein, 1015 aa, Zea Mays
MDAGGLGFLVAGSRREFVVLNVDDFSKQGSSQGCPDYICQICGDDIDILQEENEYFVACNDCAFPVCRTCYEYERQEGTQVCPRCKTRYKRHKGSPRVHGDEEEEGSDDIESEFASSIAGRSNIVHPYRVSVAESSINSWDIDSVSITNSGASVHFYEEHVGTPTNHHALVVHPNTGEIMRYNPLQTRPINPNRDLALYGYGSVAWKNRVEWKTKQQNKMQKVSSDGEGSDLNDFDSDCDIPRCAEIICEIWFAFSWILDQFPKWHPIQRETYLDRLSLRYEKEGKPPELARIDVFVSTVDPMKEPPLIIANTVLSILAVDYPVDKVCCYVSDDGAAMLTFEALTETCLFARKWVPFCKKHKIEPRAPEWYFAQKIDYLREKVHPEFVRERRAMKREYEEFKVRINTVVANSCKVPEGGWSLPEGAPWHGNNVRDHAGMVQVITGNDCVMDDAGNKLPWLVYVSREKRPGHDHHKKAGALNALLRTSAILSNAPFVLNVDCDHYMNNSKALREAMCFLMDPVLGEKICYVQFPQRFDGIDQHDRYSNHNVVFFDINMKGLDGIQGPIYVGTGCVFRRHALYGYDAPTATKPPSKTCNCWPKSCCLCCGSKRKCSKAKKKQEHQKKVKCRNASKQVHALEVAGRETAPPVPREKFEKRFGQSDAFLASTLQDNGEGCHFDMLKSLDDCIHVLSCGYENKTQWGKEVGWIYGSVTEDILTGFKMHCHGWRSVYCMPKRPAFKGSAPINLTDRLHQVLRWALGSVEIFLSKHCPIWYGYRCGLKPLERLSYINCVIYPWTSIPLLIYCALPAFCLLSGKFMVPEMNVYSSILFIALFVSIAATSILEMQWGGVGIDDWWRNEQFWVIGGVSSHLFALCQGLLKVLGGVSTKFRVTLKGGGTDEFSELYEFKWTWLLVPPMTLLLLNVVAVLAGVSKAVTDGYEAWGPLLGKLFFSFWVVLHLHPFLKGVIGRQDRVPTVVVVLSMLLASILSLLWVRVSPFATKFDGPVLEVCGLDCE

SEQ ID NO: 50331 - protein, 983 aa, Zea Mays
MEKPCSLLVHFDKGSASMANEIKADLEGSDGPAKADAMRRAISLLLNGETLPQLFITIVRYVLPSEDHTVQKLLLLYLEIIDRRDPAGRALPEMILICQNLRNNLQSPNEYIRGVTLRFLCRLSEPEVLEPLVPSVLANLEHRHQFIRRHAVSAVSAIYRLPHGDQLIPDAPELVERFLASEQDASARRNAFLMLCACAQDRAVAYLLSNADRVAEWPDLLQMAVVDLIRKVCRSQNRANKGRYITIITSLLSATSTAVVYECAGALVSLSSAPTAVRAAANTYCQLLSSQSDNNVKLILLDRLNELRTLHRDVMVGVVMDVLRALASPNLDVKRKVLDLVLDLLTPRNVEEVVLYLKKEVVKTQAGDLEKGGEYRQMLVQAIHACAVEYPEVAGSVVHLLMDFLGDTNVAAAVDVVLFVREIIETNPKLRVSMIQRLIDTFYQIRASRVCSCALWILGEYSLSLSEVESTIATIKQCLGDLPFYTVSDEGEVTDSTNSAQAVVNTVTVSSRRPVVLADGTYATQSAATETISAPSVAHGSLASTLNLRSLILSGDFFLAAVVACTLTKLVLRLEEVQPSKVESNKACTGALLIMTSILQLGQSSYLPHPIDNDSYDRIVLCLRLLCNTGDDVRKIWLHSCRQSFAKMLAEKQFRETEEMKAKAQISHAQPDDLIDFYHLKSRKGMSQLELEDEVHDDLKAATGGFTKDADDANKLNRILQLTGFSDPVYAEAFVTVHHYDIVLDVTVINRTKETLQNLCLELATMGDLKLVDRPQNYTLAPESSKQIRANIKVSSTETGVIFGNIVYETSNVMERSVVVLNDIHIDIMDYISPATCADVTFRNMWAEFEWENKVAVNTVIQDEKEFLNHIIKSTNMKCLTPPSALDGECGFLAANLYAKSVFGEDALVNISIEKQHDGKLSGYIRIRSKTQGIALSLGDKITLKQKGSIKERDKRTVMRKSRSCRSKIYVAVVTKLFQTSLK

SEQ ID NO: 50332 - protein, 519 aa, Zea Mays
MAELAASLVVAPLLSMLKEKVSSSLLNQYNVMEGMEKHHKTLMRWLPAIQEVIADAERQTSRRGVEKWLEQLKTTAYEANEVFDDFEYEALRRRAKKNGHIAKLAIMARVKLFPTHNRVAFHIRMSYRLRRIVDTFKDLVEEMNTFGFNKLEPEATTTWKEWRETDSIIVDPENIVARSRHDERKKIVNLLVNGHVTDGDLMVVPIVGMGGLGKTTLAQLIYNDPQVKEHFHLLKWDYQIDMDKLIQLWMANGFISDQKKVPAETVGKRIVNELVSRSFFQYEERSWMGYNSTTFLKIHDLMHDLALSVSEKECVCITRELIKNSELLPSAARHILIQNWIGKEIHGYLYGSMRKMSRPIQTFMFDGSSEAAGVQHLSRYSSLRVLSVPGIGFHLTIKPKHQCHLRFLDIKDSVIKELPDDISVLYNLQTLFVICTQMGAQGRRSAGAANLKNKKELRQLSLEWTSGKEEGLQCHEVLEGLEAHDGLLALGIHYYQGTSFPSWMGMLKNILDRPSVVRL

SEQ ID NO: 50333 - protein, 578 aa, Zea Mays
MAELAASLVVAPLLSMLKEKVSSSLLNQYNVMEGMEKHHKTLMRWLPAIQEVIADAERQTSRRGVEKWLEQLKTTAYEANEVFDDFEYEALRRRAKKNGHIAKLAIMARVKLFPTHNRVAFHIRMSYRLRRIVDTFKDLVEEMNTFGFNKLEPEATTTWKEWRETDSIIVDPENIVARSRHDERKKIVNLLVNGHVTDGDLMVVPIVGMGGLGKTTLAQLIYNDPQVKEHFHLLKWDYQIDMDKLIQLWMANGFISDQKKVPAETVGKRIVNELVSRSFFQYEERSWMGYNSTTFLKIHDLMHDLALSVSEKECVCITRELIKNSELLPSAARHILIQNWIGKEIHGYLYGSMRKMSRPIQTFMFDGSSEAAGVQHLSRYSSLRVLSVPGIGFHLTIKPKHQCHLRFLDIKDSVIKELPDDISVLYNLQTLFVICTQMGAQGRRSAGAANLKNKKELRQLSLEWTSGKEEGLQCHEVLEGLEAHDGLLALGIHYYQGTSFPSWMGFCEAVHGCAVAFPQLELLEIDSCKNLAALPEASMLGEAYCGGDHTVARSAFPELNILVLQGLRSFERWEAAAL

SEQ ID NO: 50334 - protein, 315 aa, Zea Mays
MTSFMADTQCDDIDMDMDMAQLEWLSGLFDDASIPHEPAFPGAAPIIKSSALAAGALLPPDKMEDALLFRSSSPISVLEHGSFNNANGGGGGCSASSESSSASSSSESFSGSGSGSGEGHAWSAPVSPPPVLVIPARARSKRSRPSAFTRAGAEAPTILVPTPMYSSGPSHSDPESIAESSPHPAPPMKKKKKAKKPPAPPAPASSDDNDGDADYEEGGERAEPQGGAVRRCTHCQIEKTPQWRAGPLGPKTLCNACGVRYKSGRLFPEYRPAASPTFVPSIHSNSHKKVVEMRQKAVRSGDPSCDLLQFIRRRD

SEQ ID NO: 50335 - protein, 154 aa, Zea Mays
MRCQLDLITDQCVLQDIDPEELHAKLQDPSFLEEAQLIDVREPDEVEKASLPGFKVTAILEDGRIFEVDLLVGADGIWSKVRKTLFGHSDATYSGYTCYTGIADFVLPDIDTKTTVDFKPYIGPIYNAILGRLANHDQDQCTLIYHANLCSPKR

SEQ ID NO: 50336 - protein, 267 aa, Zea Mays
MVVQPEERNMYDQYCLVNHLKESYGVATIRKTLAQVEAQGQVLTDGTLVVDGRTVAVVYFRAGYAPTDYPSEAEWRARLLMEQSSAVKCPSIAYHLVGTKKIQQELAKPNVLERFLDNKDDIAKLRKSFAGLWSLDNEEIVRSAIQKPNLFVLKPQREGGGNNIYGQDLQDTLIKLQKEQGEALAAYILMQRIFPKASLTPLVRGGDCFEDLTISELGIYGAYLRNRDKVILNNQSGYLMRTKVSSSNEGGVAAGFAVLDSVLLTDE

SEQ ID NO: 50337 - protein, 567 aa, Zea Mays
MPVSCQKLRESLTHLRLLPLALGLVPSTVNFNLGILCSLINLMKCKNMEIPILKGSARISSHLNFVCPQLFPSSGFWSEQPSNDVMENDKSVSSEACGSVSAQNLLKFHLRPYAQLGLDRTSIPNLFTYKDFVEELVSEIPAIREVPEQVCKFWQNNVNDNNILTPTGNHMGEEQWINKKSDKVDDGTLFQEIVLRKHPRDNQEIPCCVEDATREDMEITFLGTGSSQPSKYRNVSSIYINLFERGGILLDCGEGTLGQLKRRFGVNDADEAVKGLRCIWISHIHADHHTGLARILALRSKLLKGVPHKPLLVIGPRPLERFLNAYSTLEHLDMQFLDCRHTLKSSVEAFLSENDTDPATPQLETTMFAPGTRMENYNRKPASPRDTTALANFKEVLQESGLEILYSVPVLHCPQAFGVVLKAMEKANSTGKVIPGWKVVYSGDTRPCPGLIDASRDATVLIHEATFEDSMKDEAIARNHSTTKEAIEVGTSAGAYRIILTHFSQRYPKIPVIDEVDMEKTCIAFDLMSVNLADLPVVPKVLPHLKVLFKDELVVDEAEEVQEAAVY

SEQ ID NO: 50338 - protein, 495 aa, Zea Mays
MPQVAAPLRLLLPLSQTLAAPAPLLHHSRRLLSSCPASLSRAAGLRALAYRRRRHTEPRRGTSTLGKAPAKEEMDKEVAFNRKRAEGKDGGKRGSMELKTRRLNPVNTTCYVQILGTGMDTQDTSPSILLFFDKQRFIFNAGEGLQRFCTEHKIKLSKIDHIFLTRVCSETAGGLPGLVLTLAGIGDEGMSVNIWGPSDLDFLAGAMRSFIPNRAMLHTHSFGADRNASSPQSTDSVIVLDDEVVRVSAMFVKPKYNNGTGSSNDSDMKPGDTAIVYACELPEIKGKFDPSKAAALGLRPGPKYRELQLGNSVQSDQFDEMVHPSDVLGPSIPGPTVLLVDCPTQYHMPELFSLHPLSCFYEDSPEQSGKKVNCIIHLGPSPVTRSVDYQNWMKKFGATQHIMAGHEIKNMEIPILKGSARISSHLNFVCPQLFPSSGFWSEQPSNDVMENDKSVSSEACGSVSAQNLLKFICVLMLNWVWIELLFQTCSPTRIL

SEQ ID NO: 50339 - protein, 152 aa, Zea Mays
MQVLNSPWDVCYDPAEEAVYIAMAGQHQIWKHNLHDGVTKVISGDGYERNLNGSSATSTSFAQPSGISLAFEMHELLVADSESSSIRVVNLKTGGSRLLAGGDPVFPEYLFRFGDYDGTGSDVLLQHPLGVVYANDNQVYIADSYNRKVVTL

SEQ ID NO: 50340 - protein, 606 aa, Zea Mays
MKNLKSFLPKEVFDAITARQQESDTLSLDFFRNHASPSWKTNDLVTEKSMDVDDKAKAEISLPEHDLPTNRSPKDPDEHQADNAAKVARRKLRETRREKRAMDLVHKDDEAHVKQENAAIERSKAVDSAVLGKYSIWRKENENSDSTVRLMRDQIIMARVYSALAKSKNKSDLYQKLQTRIKESQRAVGDASADAGLHHSAPEKIIAMGQVLSKAREEVYNCMAITQKLRAMLQSADEQVRCLKKQSTFLSQLAAKTIPNSIHCLSMRLTIDYYLLLLEERKFPRSENLENPNLYHYALFSDNVLAASVVVNSTIMNAKKPEKHVFHLVTDKLNFGAMNMWFLLNPPGKATIHVENVDEFKWLNSSYCPVLRQLESAAMKEYYFKADRPTSLSAGSSNLKYRNPKYLSMLNHLRFYLPEVYPKVDKILFLDDDIVVQKDLTGLWDVNLNGKVNGAVETCGESFHRFDKYLNFSNPHIARNFDPNACGWAYGMNIFDLKEWKKKDITGIYHKWQNMNEGRVLWKLGTLPPGLLTFYKLTHPLDKSWHVLGLGYNPSVDRSEIDSAAVVHYNGNMKPWLELAMTKYRPYWTRYIKYDHPYIRGCNLRE

SEQ ID NO: 50341 - protein, 149 aa, Zea Mays
MCFGVTAGAYILTLFASKYRERVLGLILVSPLCKGPTWTEWLYSKVISNLLYYYGMCGLVKECLLQRYFSKEVQGFSELPESDIVQACRSLLDQRQSMNVWRFVQTMNQYVNISHLYTNDDCAVEKLGGEVTAYLICFELIFRRYDLTE

SEQ ID NO: 50342 - protein, 406 aa, Zea Mays
MHPPLASAALRLLSFTSRTRLLSHCPFFLSRRDDDGGREGPSSPLPPLSPSGSTFWPRSLLLSASDAAGLFSLRGGWRRRALPPAASRPPGAVTDAAPVRLTVSRKYSLRVAKGKKKAHFDDEHSHRAVNMALWCNFLVFSLKFGVWISTSSHVMLAELVHSIADFANQALLAYGLSSSRRAPDALHPYGYSKERFVWSLISAVGIFCLGSGATIVHGVQNLWNCQPPENIHWAALVIGGSFLIEGASLLVAINAVRKGAEAEGMGIWDYIWRGHDPTSVAVMTEDGAAVTGLAIAATSLVAVQMTGNAMYDPIGSIIVGNLLGLVAIFLIQRNRHALIGRAIDDHDMQRVLEFLKSDQVVDALYDCKSEISMELFWYKIIWKGLDVGLGQNSSGKLQCPRMIRNY

SEQ ID NO: 50343 - protein, 469 aa, Zea Mays
MSAAFVHLHCKNYFKFTKDISSLSQRVLLSGPTGTDMYQEYLVKALAKYFGARLLTIDSSMLFGGQTSKESESYKKGDRVRYIGSGIILDGQSPPDFGSQGEIFLPFEENRSSKVGVRFDKKILGGNNLGGNCEVDHVDSLCPDIPGWEVTFKHPFDVIVEFISEEIRHGPLILFLKDTEKICGNNDSYHGLKSKLKHFPAGAFIIGSQIQPDNRKEKANVSSPFLSKFRYSQAILGLTLQDIDGGNDNNKETSKAIMKHLIKLFPNKVTLEAPQAEMELSRWNQMLNRDIEVLKGNANISKIRSFLTRLGLECTDPEAILVTDRILTNECIDKIIGFALSHQLKNCTNPDPPLGSVQFALSSGSLKHGVDMLKSIQSGSKSSTKRKSLKDIATENEFEKSLLADVTPPHEIGVTFEDIGALESVKDTLKELVMLPLQRPELFNRGQLMKPCKGILLFGPPGTGKTNAG

SEQ ID NO: 50344 - protein, 70 aa, Zea Mays
MDQPPTDYLTRIRLLEQYASAIAGLVRDENVDKYADQLTKNELSSPPKKMKHTQVSKGMPDSTCSKNDNI

SEQ ID NO: 50345 - protein, 179 aa, Zea Mays
MPPRPRLSRRDACGAPRDALSPMPLLASSPPHPPVSSALPAPPNVVLSVPSSHRATTDPRLEAQAVPRRWGSETHLQDADLLPNSKATIRHRGNLPCCLWGGDNEAARLKVQDDEQQQRRRRRRPWFRHGSGSAGCAIGIKTKGVTMTALLAKATATALLQHPMVNLQLQGWKELHIQK

SEQ ID NO: 50346 - protein, 669 aa, Zea Mays
MATGRRGSPLLRRCKREGYTHGLRPPQMEALRAMCGALIPSLPVEGLHVQPQPGRGKDDLDRFFRASAADGAIPDEVNENSDNPSWKAIGYSVPVPAAAADVDRLRPRELGPAEAEAPSPRPLDSGVVETRSLNDATLLKSLTERGVAVKAGVSGAHHTVQCDVVIVGSGCGGGVAAAVLAAAGRKVVVVEKGDYFTAESYTSVEGPSMERLYEKGGIFCTSNVTTIMFAGTTVGGGSAINWSASVRTPEWVTQEWAREHGLPMFGRPEYAHAMDAVCARLAVTGGCREEGFQNKVLRRGCEALGLRGDAVPRNSSEGHFCGSCHLGCPTGDKRGTDTTWLVDAVARGAVVLTGCKAERFVLESNPGGRDGRSNRCVGLVATCMSDGITKKLRIEAKVSVSACGALMTPPLLRNSGLQNSHVGRNLHLHPVSMAWGYFPDSTPEAELSGKCYEGGIITTMRRVTARTIIQTPALGPGCWASLVPWESGRDMKERMLRYARTAHAFALVRDRGAGHVDGEGRVRYTPSREDVDELRNGLRQTLRILVAAGAAEVGTHRSDGLRLRCDGLRDEDLEAFLKQVTVEKGPMVPGHDKWALHCSAHQMGSCRMGSSPKHGAVDGRGESWEAEGLYVCDGSLLPTAVGVNPMITIQSTAYCVSKGIAESLARDNK

SEQ ID NO: 50347 - protein, 466 aa, Zea Mays
MKDPAHRTKVVLRRLPPAIAQQAVVDQVDARFAGRYDWACFRPGNASQKNHRYSRLYLNFKHPEDVVEFAEVFNGHIFVNEKGAQFKAFVEYAPSQQVPKSNVKKDGREGTVTKAAGKEAPVVTPLMMYVRQQRAAKSMAQRPGSRLSRKVAGVVTSSSSPKRSFEKRRSSTYVVRDSIKEKPTYIMVPKREEHTQREKIVSGNSDATSGGASGSGQSSDKIVILKGRGRVDSNTPDGAAQQSSTPVKNIPPSSSRLDKRSEANGRIIKTVLSNKEVRSSNPSQHEQEGQMFNTEKDKRPPRALNPRTIVKDQVVENAERSHFDEKNNYLHSSAPIGEKVERHARNRDRPDRSVWAPRRYDKSPPGGVSHALSSDFSQMQSHSGDNVSQLTDGHGDRKTDTRGHGGSRGVPVENGHRHANRRGTPCDPKETKISASVPDGKNSKRGSASYGAHERQVWVQKSSSGS

SEQ ID NO: 50348 - protein, 216 aa, Zea Mays
MHGGTLELHPFLAPAFRRTTSLTTGAAAHTAAHCTPSVPRPRSALSARPPVARDARRTAPSLLAAGDGTGGPLLGCAQAARARSTPASVHLRQALLRTSTHRMCSEVHVEGDASVGQKGCKDIRRYKCEFCTVVRSKKCLIQAHMVAHHKDELDKSEIYNSDGEKIVHEQEHRCQECGRCFQKPAHLKQHMQSHSHEDSLFAHWKTAPSAIKEKIT

SEQ ID NO: 50349 - protein, 175 aa, Zea Mays
MKMFRNVEYLRAHNQSCHQYVQCEICGEKHLKKNIKRHLQSHDKVPSDGRMKCTFDGCEHFFSNKSNLTKHVKACHDQLKPFKCGIVGCGKAFTYKHVRDNHETSGAHVYMEGDFEELDEQLRARPRGGRKRKALTVETLTRKRVTISGEASSLDDGVEYLRWLLSGGDDSIDCQ

SEQ ID NO: 50350 - protein, 312 aa, Zea Mays
MIANNLPAPEQVVSMYKAKNISYVRLFHPDTTVLNALRGSGIGVILGTLNEDLPRLASDPSFAASWVATNVQPFAGAVQFRYINAGNEVIPGDPAAQVLPAMKNLESALRSAGVAGVPVTTAVATSVLGASYPPSQGAFSEAATTVMAPLVSYLSSRGAPLLVNVYPYFAYSGSGGQVALGYALLSGAGAGAASTVTDGGAVYTNMFDAIVDATHAAVEKAGVQGLELVVSETGWPSAGGEGASVENAAAYNNNVVRHVDGGTPRRPGKALETYLFAMFNENGKAEGVEQHFGLFQPDMSEVYHVDFTAGSP

SEQ ID NO: 50351 - protein, 358 aa, Zea Mays
MHSSSCAPAARPPSATSSTPPTTPLAATFAFPACAATPSPSSSSNSLASPCLASNLSSSHCSAIYSRKSHPPNNPFLTTCTSSCLKISPPGYLHFFPKLSPASTPTVSSNFEAQPRRSRSPSVQPASYLLAFRSETTMLLLRKAHKDKTLGVVCVRASKVLQKLLEPEPFLDKSMYTDVMLPNQVSDEIPKSDALSLVHSTDYSSMFGEEFSLSENQFDGSLLNILDIAAVEEGILHVLYAAASQPMLCRKLAETTSDIWSVLPLVQALLPALRPPISSGPIEHIDDSFSQWNHPNIQNALSQIVTMSVSSSVFHPLLRACAGYLSSYLPSHVKTACVLLDLCRGALLSWIPMITAKV

SEQ ID NO: 50352 - protein, 227 aa, Zea Mays
MEAAAALPPERDTSADWGDGVVPLGFRVKASSRESPSQKAGNVLEADLRSHWATATNTKEWILLELQEPCLLSHIRIYNKSVLEWELTAGLRYKPDAFVKLRPRCEAPKRDVVYPANHTPCRYLRISCLRGNPIAIFFIQLFGIPVPGLEPELQPLLSYLLPQITSSKQPLSHNMHLQLLKDISTRLPPFLPQIEFRLTLIVSWTPQKAACGSWLYLLVHFILSFTL

SEQ ID NO: 50353 - protein, 512 aa, Zea Mays
MEAAAALPPERDTSADWGDGVVPLGFRVKASSRESPSQKAGNVLEADLRSHWATATNTKEWILLELQEPCLLSHIRIYNKSVLEWELTAGLRYKPDAFVKLRPRCEAPKRDVVYPANHTPCRYLRISCLRGNPIAIFFIQLFGIPVPGLEPELQPLLSYLLPQITSSKQPLSHNMHLQLLKDISTRLPPFLPQIEAAVCLVQADLNSVVDTPESSVRFLALLAGPFYPILHLINERDPTKSLFGSADSDALRTSPASTPTVSSNFEAQPRRSRSPSVQPASYLLAFRSETTMLLLRKAHKDKTLGVVCVRASKVLQKLLEPEPFLDKSMYTDVMLPNQVSDEIPKSDALSLVHSTDYSSMFGEEFSLSENQFDGSLLNILDIAAVEEGILHVLYAAASQPMLCRKLAETTSDIWSVLPLVQALLPALRPPISSGPIEHIDDSFSQWNHPNIQNALSQIVTMSVSSSVFHPLLRACAGYLSSYLPSHVKTACVLLDLCRGALLSWIPMITAKV

SEQ ID NO: 50354 - protein, 401 aa, Zea Mays
MPMLSSLRYFPPDASSAAKYCYAVPAAMHARYLVRTTYYYGGFDGGGAPPVFDQIIDGTRWSAVDTAGGYARGLATYYEAVVEAAGKELSVCLARSAATAPGRSPFISALEVVPLEESVYSAVNFTAYALSTVARHSFGHNGSIIGYPDDRFNRYWEPYSDGGIPVVESQASVATEAFWNKPPEAVFRRGLTASRDKSLELQWPPAPLPAASYYLALYFQDNRGPSALSWRVFDVAVNGQPFFAGLNVSTAGCMVYGVDWPLSGQTRITLTPALESPVGPLINAAELMMVVPLGGRTHPRDVIGMQELARGFTNPPSDWRGDPCLPQGNSWTGVTCNQDPLARVTGLNLTNFRVGGSISNNIANLTAISSIWLVGNNLTGPIPDLNHLPISGASDHFPSLF

SEQ ID NO: 50355 - protein, 494 aa, Zea Mays
MPCPISCGATSDKVAGNVTWVADGAFIHAGKVAELDSPGVMPMLSSLRYFPPDASSAAKYCYAVPAAMHARYLVRTTYYYGGFDGGGAPPVFDQIIDGTRWSAVDTAGGYARGLATYYEAVVEAAGKELSVCLARSAATAPGRSPFISALEVVPLEESVYSAVNFTAYALSTVARHSFGHNGSIIGYPDDRFNRYWEPYSDGGIPVVESQASVATEAFWNKPPEAVFRRGLTASRDKSLELQWPPAPLPAASYYLALYFQDNRGPSALSWRVFDVAVNGQPFFAGLNVSTAGCMVYGVDWPLSGQTRITLTPALESPVGPLINAAELMMVVPLGGRTHPRDVIGMQELARGFTNPPSDWRGDPCLPQGNSWTGVTCNQDPLARVTGLNLTNFRVGGSISNNIANLTAISSIWLVGNNLTGPIPDLNHLLHVVSLHLEDNGLTGPLPESLGNLTRLEELSVQNNSLQGTIPSSIRNRAAVDPRFRFQYTPGNNLS

SEQ ID NO: 50356 - protein, 405 aa, Zea Mays
MEGGRRGFLFTAIMTSGAGFFSAFAPNYLSLISLRFLVGIGLGGGPVLGSWFLEFVPAPTRGTWMVVFSAFWTVGTILEASLAWTIMPKFGWRWLLALSAVPSFLLLLFYAITPESPRFLCMKGRTTEAVDILEKMARLNNVQLPSGRLVSDKNIELDEVSGSSESTTLLAGAEESDNLNEDQGSDFGGIKSVGKLLAPKLIRATLLLWMAFFGNAFAYYGIVLLTSELSNGNRICAKEDVESVHSTNASLYKNVFISSFAEIPGSFLSAMIVDRFGRKRSMASMLFTSCVFLLPLVFSRTDILTRISLFGARLCISASFTIVYIYAPEIYPTAVRTTGIGIASSVGRIGGILCPLVAVALVHSCQQTTAILLFELVIFLSGLAVSFFPFETKGCRLNDTDVDMN

SEQ ID NO: 50357 - protein, 392 aa, Zea Mays
MTSGAGFFSAFAPNYLSLISLRFLVGIGLGGGPVLGSWFLEFVPAPTRGTWMVVFSAFWTVGTILEASLAWTIMPKFGWRWLLALSAVPSFLLLLFYAITPESPRFLCMKGRTTEAVDILEKMARLNNVQLPSGRLVSDKNIELDEVSGSSESTTLLAGAEESDNLNEDQGSDFGGIKSVGKLLAPKLIRATLLLWMAFFGNAFAYYGIVLLTSELSNGNRICAKEDVESVHSTNASLYKNVFISSFAEIPGSFLSAMIVDRFGRKRSMASMLFTSCVFLLPLVFSRTDILTRISLFGARLCISASFTIVYIYAPEIYPTAVRTTGIGIASSVGRIGGILCPLVAVALVHSCQQTTAILLFELVIFLSGLAVSFFPFETKGCRLNDTDVDMN

SEQ ID NO: 50358 - protein, 236 aa, Zea Mays
MLMVLKISSKFELRRFCRTTGAVAILKLSQPNADELGYADSVSVEEIGGTRVTVVKNEDGGNSVATVVLRGSTDSILDDLERAVDDGVNTYRSMCRDSRIIPGAAATEVELAKRLKEFSLKETGLDQYAIAKFAESFEMVPRTLAENAGLSAMEIISSLYAEHASGNAKVGIDLEEGACKDISTLKIWDLYVTKFFALKYSADAACTVLRVDQIIMAKPAGGPRRDAQPGGGMDED

SEQ ID NO: 50359 - protein, 263 aa, Zea Mays
MEDLASSRGGGGCGGLDAQIEQLMECRPLPETEVKTLCEKAKEILMEESNVQLLVALKVRYPQRITILRGNHESRQITQVYGFYDECLRKYGSANVWKIFTDLFDYFPLTALVESEIFCLHGGLSPSIENLDNVRSLDRVQEVPHEGPMCDLLWSDPDDRCGWGISPRGAGYTFGQDISEQFNHTNNLKLVARAHQLVMEGYNWAHEQKVVTIFSAPNYCYRCGNMASILEVDDCRNHTFIQFEPAPRRGEPDVTRRTPDYFL

SEQ ID NO: 50360 - protein, 227 aa, Zea Mays
MGDYVDRGYYSVETVTLLVALKVRYPQRITILRGNHESRQITQVYGFYDECLRKYGSANVWKIFTDLFDYFPLTALVESEIFCLHGGLSPSIENLDNVRSLDRVQEVPHEGPMCDLLWSDPDDRCGWGISPRGAGYTFGQDISEQFNHTNNLKLVARAHQLVMEGYNWAHEQKVVTIFSAPNYCYRCGNMASILEVDDCRNHTFIQFEPAPRRGEPDVTRRTPDYFL

SEQ ID NO: 50361 - protein, 463 aa, Zea Mays
MGACVSKAACCCRQPHNGVTNERTDTVTEDEEAYDLPAFQEFTFEQLRLATSGFAVENIVSEQGEKAPNVVYKGKLDAQRRIAVKRFNRSAWPDPRQFLEEARSVGLLRSKRLANLLGCCCEGDERLLVAEYMPNDTLAKHLFHWESQSMKWTMRLRVVLCLAEALEYCTNRGRALYHDLNAYRALFDDDCNPRLSCFGLMKNSRDGKSYSTNLAFTPPEYMRTGRITPESVIYSFGTLLIDVLSGKHIPPSHALDLIRDRNFNMLLDSCLEGQFSNEEGTEMVRLASRCLHYEPRERPNVRSLVQVLTPLQRDVETPSYVLMGIPRGGASSTEPLNLSPLAEACSRKDLTAIHEILEKTGYKDDEGTANELSFQMWTNQMQDTLNSKKKGDNAFRQKDFTAAIDCYSQEALNDAMNALVISPTWSTAFYLQAAALLSQGMENEAQEALKDGCNLEQSSSGGH

SEQ ID NO: 50362 - protein, 128 aa, Zea Mays
MFIFALKVVCFFAKRACMRLVSCGSRQAGGQCVLQEIHLLLICMQTETVLCLRRNSSRILARKSAQRSRVRKLQYISELERSVTTLQKWYDTTGVHLHHRQATIIHADDLPYSSKSFERAMFSQPVSD

SEQ ID NO: 50363 - protein, 429 aa, Zea Mays
MLLRWMNHHLKKAGYKKTVNNFSSDVKDGEAYAYLLKALAPEHSPETTLDTKDPNERAKLVLEQAEKLDCKRYLTPKDITEGSANLNLAFVAQIFQHRNGLTSDTKQVTLTQTATHDDVLLSREERAFRMWINSLGVESYVNNVFEDVRNGWVLLEVLDKVSHGSVNWKLASKPPIKLPFRKLENCNQVVKIGKQLKFSLVNLAGNDIVQGNKKLIVALLWQLMRFNILQLLNKLRFHSQGSEGKEISDADILNWANCKVKASGRTSRIESFKDKSLSNGMFFLDLLSTVQPRVVNWKVVTKGETDEDKKLNATYIISVARKIGCSVFLLPEDIIEVNQKMILTLTASIMYWSLQKQPQSQSELTEQSEPSSMTSDAASEVASEDGASTTAPSESEEVNSLSDSISNLTTDDATSNAPSAENGNGVAGS

SEQ ID NO: 50364 - protein, 285 aa, Zea Mays
MMKWGLSSGTPADSYYEVRSDCTDGVPKSKFKIKAGKTLSARKWQAAFSPDGCLDIASVLSRIQRGGVHPTVRGEVWEFLLGCFDPRSTFDEREEIRQIRRIQYDRWKEDCRQMDSHVGSGKVITAPLITEDGRPIKDPLVLLEATADKDTSEVAPSTSINGNEIDESAERITDKQIIEWKLTLHQIGLDVLRTDRTMVFYENKENLSKLWDILAVYAWIDKDVGYCQGMSDLCSPMIVLLKDEADAFWCFEKLMRRLINLWEYPTNFNILHLLFRFLTQSYMTT

SEQ ID NO: 50365 - protein, 116 aa, Zea Mays
MANIQASLRTITSSQQQIGKNKKITRRQWPHGRKAVEAVAAAPPKSEPVSLTSATFASASQGIFTREVRVCSLVTREAIKDGADAVIAVGGDGTLHEVPMVSFGKEHCFFYTLGFV

SEQ ID NO: 50366 - protein, 77 aa, Zea Mays
MAGCAAPATPRSSLILPRASSHSQPSAVGLTSDCVAASRRRRRDFVFVVNPSCANGRTGGKQWKQLLPLLRSPNPSR

SEQ ID NO: 50367 - protein, 160 aa, Zea Mays
MDKSPGAASHLRLSSLVNRGIYEALELRDGGSDYLGKGVLKEMAVTITWVKTRQIFISRGNPTVEVDVGLRDGSYARGAVPSGVSTVETKSCLSQGRISSPSLSNAWAHHQGIEEKTLSVQPPPTIILLSVPISCGLHHCNACHRYRYCSVLLVPVEHVL

SEQ ID NO: 50368 - protein, 222 aa, Zea Mays
MREQDLQELYGGLNSRSELKLSPAPTECRDESVDEGLKTSYSREGNCVNRDNYNGLDINALPPDDDGDIAKDKESSPGSEWQSELGQSSDHNNGVNTTDEMYNGAHYISHNQKSTGRKVGIKPQEEKSEKADCSGTCAYLKGSSEDNPEMPIVESSEEQSTGGALWDIFRRQDSDKLQDYLRKHCSEFRHIYCNPVKKVLNPGRLNRSLVKLFSFLLDVLTK

SEQ ID NO: 50369 - protein, 237 aa, Zea Mays
MVGLVGGSTARAEHVVANAGGEAEYVRRMHRHAPTEHQCTSTLVKHIKAPVHLVWELVRRFDQPQRYKPFVRNCVVRGDQLEVGSLRDVNVNPGLDMPATVACEIKAQLVRTAEAARQLAPMLEVGRPSYQGRSSVYQSSSKMMSAISVAHLGCKDMDVVDVGVVGMVDSQSLSSALEKLYFWERKLYAEVKIVGCGVRSSQNLGDEQPQGNPLIVSCQQPHPRPVLSRTLSPTCGC

SEQ ID NO: 50370 - protein, 163 aa, Zea Mays
MEESTSSAWRATQRLRRRDSRLCLRTADDSTSPYSRRGRPGWWIRCIPWPALWRQGDMLRRGGGRVERRVPARDAEGLYLASDLDKRLLIYFPFMQVVKLHFVLFKGPKDDAKMHIYVINVSNGNDYLPMDIVELSSDHLIENKPLLLKDVKFQNVHGLTSAY

SEQ ID NO: 50371 - protein, 65 aa, Zea Mays
MTRGLRRLKNLNIDGDGAEVAQEEHENVADNENNESLQSPPDVDGLLVRLPHLPRSPIKIIWPNG

SEQ ID NO: 50372 - protein, 283 aa, Zea Mays
MRPGSTSRPSPRRCLYVYGSASALPKLLLLLLAASSSAQAQQAARMKTDPVEAAAVNAVFAKLRQTASSEWNISGDPCTGIATDGTVIEDNGNFNPGIKCECSDQNNITVCHVTKLKIYALNAVGPIPQELQNLTRLINLDLSKNYLTGSLPSFLGNLTAMQYMTLGTNALSGSVPKELGNLVNLVSLGFGSNYLNGPLPWELGNLAKLEQLYIDSAGLSGLLPSSLSRLTRMNILWASDNDFTGQIPDYIGSWTNLTDLRFQGNSFQGPLPASFSNLVQLTN

SEQ ID NO: 50373 - protein, 413 aa, Zea Mays
MSQIRKGFRKVDPDRWEFANEGFLRGQKHLLKTINRRKPSLQGNSQPQQPQLQNAPVPSCVEVGKFGLEEEIERLKRDKNVLMQELVRLRQQQQTTDHQLQTLGKRLQGMESRQQQMMSFLAKAMQSPGFLAQFVQRNENSRRRIVAANKKRRLPKQDGGLESESSAASLDGQIIKYQPSINEAAKAMLRKILNVDSSHRFESMGNSDNSNNNNILLEDYMPAAQAFESSSSTRNSGVTLAEVPANSGLAYVGTSSAICSPPAAPEMQCPVVLDNKAYKQVASMSAVPPVSSDMGIIPEFSDLADLVSVDILGGAFEMMPGPEFPLPEEGDDGTTMYNNNDEEAQSLPGIINSIWEQFLVGSPLSTDNEEVDSAGGLYAQEDGWSKVGNIANLTEQMGLVSSTNHRDSGNGLY

SEQ ID NO: 50374 - protein, 63 aa, Zea Mays
MSMGVWLLPVCPPAVQSLKPCPGGREEPAQCARRPPRERRAINRADRRLIVISRLIALLAIRG

SEQ ID NO: 50375 - protein, 833 aa, Zea Mays
MVLTLLLLLLLPAASRARDTITPGQPLRGNDTLVSSGAGSFVLGFFSPPGSNSTYVGIWYAKVPVRTVVWVANRAAPVRGAASESAGATLSVSSECALAVADANATVVWRSLSSSSPRPCAARIQDDGNLVVSDQRGRVVWQGFDHPTDTLLPGMRLGVDFAAGANMTLTAWASPSDPSPSPVVAAMDTSGDPEVFIWNGPAKVWRSGPWDGVQFTGVPDTVTYKGMGFSFRFVNDGREATYSFQVRDAGIVSRLVLNSTGVGGGLMQRWTWLDVAGAWALYWYAPKDQCDALSPCGPNGVCDTNKVPACSCLPGFTPRSPASWAMRDGRDGCVRATPLDCANRTDGFLVLPHAKVPDATRAVVDFNSSLEQCRQRCLRNCSCTAYASANLTAAPGRRGCVMWTGGLEDLRVYPSFGQELYFRLAAADLASKGKSKKVSIVVAIAVSITAALAVLLAITGFYIWRANKTKARKSGSSIWAAGSHNKDGSEGKDNGDDLELPVYDFETIAAATEGFSAENKLGEGGFGPVYKGKLEDGQEVAVKTLSRTSRQGLEEFKNEVLLIAKLQHRNLVRLIGCSISGPEKILIYEYMENKSLDFFMFDTTRSKLLDWQTRYRIIEGIARGLLYLHQDSRYRIIHRDLKTSNILLDKDMTPKISDFGMARMFGSDDAEINTLRVVGTYGYMAPEYAMDGVFSVKSDVFSFGVIVLEIIAGKRNRGVYRYSGHLNLLAHAWSLLNEGNGLDLVDENLNGSFNSDEVLKCLKVGLLCVQENPDDRPLMSQVLMMLASTDTASLPTPKQPGFAARTAAAEDTSWSKPDCSIVDSMTITMVEGR

SEQ ID NO: 50376 - protein, 1255 aa, Zea Mays
MRLEPRMRASLMGVFFGKGAMALANEMVEGSDSASRDNLGEPGSFVANESCECTRQSLFRKNCASSVDGANILSCSKKSVFYKELKRLKLVEEIVCLKSNITCCSGDAIFFTSLVSAATAAGDVLMKLQGLLMVVSTESINLELIGDEAPKKKDVEKTSGGSRKGKKKSNTLKKLTTSAKPSKDNGCSSSDNRNCSPLPNHCAPSVEGTAAGPPSEKTPYKEIVPTTKVEQTVSLDGCKNQCNKKKNKRKGKTKLSNPMRPESPRSTKLKTVVPHSAAEALHEAAKEADVSPHHPSYVHPSKNEISEAVSCSDPSILSNGTKVISTSKGTKLEDTLYSPRVHSSLATERFQSAHDDAFKVAVQASSYLSQSESLVQSSSCLPSRSNEVSSTNLYGSSVDSLVRSAQEKTECDGKHVDHKSEVTKDRILPSAIPTDMLQSAISKNGGVMKNGGGECYVYNRNLLGGTSYEWPSVTPSHFVSPQMQQRPAAADRLHLDVGYRWPTQFNQPFLPANHQVRNPPIDAGHNQMLPSLAVPLSFDWPPVFRGYGKNASVSYDPLYTPQMQSSAWSGFPAQLVQRGGICSDSDVADDTESYWFSEEESDSRAHSGRDINQYFGGGVMYWSPAEHAGTGFSRPPSLSSDDSAWAWHEADVIRVVDDVANGIPSTYTNGVSSPPSTPSCSQNESLDPAAHLITGNEINNEALTSPSSVQDSPEDKIMQVAKAVSCGSEVVKADTLPYAMLRPIVVPSISRRSSRSEIKGAHDHRRSPCVPSTRRDIPILRRPPSPVVLSVPRVPRPPPPSPAGESRKRGFPIVRSGSSSPRHWGMRGLFSEDKIFHRAQFCLDGPEVVWPSWGNKGTSGTLVQTIEDTVLQDHLVKISQLSCDQHPDVALPVQPLDMLNGSSHKASLSLMHNALHEEIDQFCKQVAAGNLVRRPYINWAVKRVTRCLQVLWPRSRTNLFGSNATGLALPTSDVDLVVSLPPVRNLEPIKEAGILEGRNGIKETCLQHAARCLTNQDWVRSDSLKTVENTAIPVIMLVADVPCDTNMSNEYSSVLDGSQDYSVNMLGEQGSPPRSDTSSSEGSNMLMCSKLNKDDCDIVQSIRLDISFKSPSHTGLQTTELVRELSQQFPAVIPLALILKKFLADRSLDHPYSGGLSSYCLVRSHPSPCCCSNHKHLHPLATMVGTSSYVEECAHVKEVVVFRKKIDDMLAATQAGKGGCQRMRSHQGSHFLLEQEKIVVALEQMVVVARQGMGL

SEQ ID NO: 50377 - protein, 1452 aa, Zea Mays
MASTAAAPRTTKELMDALTAHLSLYHAAANPSPATAAASTSSSSPRAAILRWLASLSPAARAAAATSLLSPAAAAALLSMVRRLRLRGHSSFFVLHSSSPSTSARGAEEPTVLSRLSRGLLARAAASSRAQALLFANTLLFPSSPASSRRPDVITVAEAFVADLDGFVAAMDEISGGRFLCCGEGEVDLAALACQDFPELPWLNAKGYYVIEEFLANRLDIALRMSWAAAGGGSAGGRKAVRIGKSAKEKAGLAANAFWREKGILSCSKKSVFYKELKRLKLVEEIVCLKSNITCCSGDAIFFTSLVSAATAAGDVLMKLQGLLMVVSTESINLELIGDEAPKKKDVEKTSGGSRKGKKKSNTLKKLTTSAKPSKLTFFQDNGCSSSDNRNCSPLPNHCAPSVEGTAAGPPSEKTPYKEIVPTTKVEQTVSLDGCKNQCNKKKNKRKGKTKLSNPMRPESPRSTKLKTVVPHSAAEALHEAAKEADVSPHHPSYVHPSKNEISEAVSCSDPSILSNGTKVISTSKGTKLEDTLYSPRVHSSLATERFQSAHDDAFKVAVQASSYLSQSESLVQSSSCLPSRSNEVSSTNLYGSSVDSLVRSAQEKTECDGKHVDHKSEVTKDRILPSAIPTDMLQSAISKNGGVMKNGGGECYVYNRNLLGGTSYEWPSVTPSHFVSPQMQQRPAAADRLHLDVGYRWPTQFNQPFLPANHQVRNPPIDAGHNQMLPSLAVPLSFDWPPVFRGYGKNASVSYDPLYTPQMQSSAWSGFPAQLVQRGGICSDSDVADDTESYWFSEEESDSRAHSGRDINQYFGGGVMYWSPAEHAGTGFSRPPSLSSDDSAWAWHEADVIRVVDDVANGIPSTYTNGVSSPPSTPSCSQNESLDPAAHLITGNEINNEALTSPSSVQDSPEDKIMQVAKAVSCGSEVVKADTLPYAMLRPIVVPSISRRSSRSEIKGAHDHRRSPCVPSTRRDIPILRRPPSPVVLSVPRVPRPPPPSPAGESRKRGFPIVRSGSSSPRHWGMRGLFSEDKIFHRAQFCLDGPEVVWPSWGNKGTSGTLVQTIEDTVLQDHLVKISQLSCDQHPDVALPVQPLDMLNGSSHKASLSLMHNALHEEIDQFCKQVAAGNLVRRPYINWAVKRVTRCLQVLWPRSRTNLFGSNATGLALPTSDVDLVVSLPPVRNLEPIKEAGILEGRNGIKETCLQHAARCLTNQDWVRSDSLKTVENTAIPVIMLVADVPCDTNMSNEYSSVLDGSQDYSVNMLGEQGSPPRSDTSSSEGSNMLMCSKLNKDDCDIVQSIRLDISFKSPSHTGLQTTELVRELSQQFPAVIPLALILKKFLADRSLDHPYSGGLSSYCLVRSHPSPCCCSNHKHLHPLATMVGTSSYVEECAHVKEVVVFRKKIDDMLAATQAGKGGCQRMRSHQGSHFLLEQEKIVVALEQMVVVARQGMGL

SEQ ID NO: 50378 - protein, 868 aa, Zea Mays
MVEGSDSASRDNLGEPGSFVANESCECTRQSLFRKNCASSVDGANILSCSKKSVFYKELKRLKLVEEIVCLKSNITCCSGDAIFFTSLVSAATAAGDVLMKLQGLLMVVSTESINLELIGDEAPKKKDVEKTSGGSRKGKKKSNTLKKLTTSAKPSKDNGCSSSDNRNCSPLPNHCAPSVEGTAAGPPSEKTPYKEIVPTTKVEQTVSLDGCKNQCNKKKNKRKGKTKLSNPMRPESPRSTKLKTVVPHSAAEALHEAAKEADVSPHHPSYVHPSKNEISEAVSCSDPSILSNGTKVISTSKGTKLEDTLYSPRVHSSLATERFQSAHDDAFKVAVQASSYLSQSESLVQSSSCLPSRSNEVSSTNLYGSSVDSLVRSAQEKTECDGKHVDHKSEVTKDRILPSAIPTDMLQSAISKNGGVMKNGGGECYVYNRNLLGGTSYEWPSVTPSHFVSPQMQQRPAAADRLHLDVGYRWPTQFNQPFLPANHQVRNPPIDAGHNQMLPSLAVPLSFDWPPVFRGYGKNASVSYDPLYTPQMQSSAWSGFPAQLVQRGGICSDSDVADDTESYWFSEEESDSRAHSGRDINQYFGGGVMYWSPAEHAGTGFSRPPSLSSDDSAWAWHEADVIRVVDDVANGIPSTYTNGVSSPPSTPSCSQNESLDPAAHLITGNEINNEALTSPSSVQDSPEDKIMQVAKAVSCGSEVVKADTLPYAMLRPIVVPSISRRSSRSEIKGAHDHRRSPCVPSTRRDIPILRRPPSPVVLSVPRVPRPPPPSPAGESRKRGFPIVRSGSSSPRHWGMRGLFSEDKIFHRAQFCLDGPEVVWPSWGNKGTSGTLVQTIEDTVLQDHLVKISQLSCDQHMWHCLYSH

SEQ ID NO: 50379 - protein, 1257 aa, Zea Mays
MVEGSDSASRDNLGEPGSFVANESCECTRQSLFRKNCASSVDGANILSCSKKSVFYKELKRLKLVEEIVCLKSNITCCSGDAIFFTSLVSAATAAGDVLMKLQGLLMVVSTESINLELIGDEAPKKKDVEKTSGGSRKGKKKSNTLKKLTTSAKPSKDNGCSSSDNRNCSPLPNHCAPSVEGTAAGPPSEKTPYKEIVPTTKVEQTVSLDGCKNQCNKKKNKRKGKTKLSNPMRPESPRSTKLKTVVPHSAAEALHEAAKEADVSPHHPSYVHPSKNEISEAVSCSDPSILSNGTKVISTSKGTKLEDTLYSPRVHSSLATERFQSAHDDAFKVAVQASSYLSQSESLVQSSSCLPSRSNEVSSTNLYGSSVDSLVRSAQEKTECDGKHVDHKSEVTKDRILPSAIPTDMLQSAISKNGGVMKNGGGECYVYNRNLLGGTSYEWPSVTPSHFVSPQMQQRPAAADRLHLDVGYRWPTQFNQPFLPANHQVRNPPIDAGHNQMLPSLAVPLSFDWPPVFRGYGKNASVSYDPLYTPQMQSSAWSGFPAQLVQRGGICSDSDVADDTESYWFSEEESDSRAHSGRDINQYFGGGVMYWSPAEHAGTGFSRPPSLSSDDSAWAWHEADVIRVVDDVANGIPSTYTNGVSSPPSTPSCSQNESLDPAAHLITGNEINNEALTSPSSVQDSPEDKIMQVAKAVSCGSEVVKADTLPYAMLRPIVVPSISRRSSRSEIKGAHDHRRSPCVPSTRRDIPILRRPPSPVVLSVPRVPRPPPPSPAGESRKRGFPIVRSGSSSPRHWGMRGLFSEDKIFHRAQFCLDGPEVVWPSWGNKGTSGTLVQTIEDTVLQDHLVKISQLSCDQHPDVALPVQPLDMLNGSSHKASLSLMHNALHEEIDQFCKQVAAGNLVRRPYINWAVKRVTRCLQVLWPRSRTNLFGSNATGLALPTSDVDLVVSLPPVRNLEPIKEAGILEGRNGIKETCLQHAARCLTNQDWVRSDSLKTVENTAIPVIMLVADVPCDTNMSNEYSSVLDGSQDYSVNMLGEQGSPPRSDTSSSEGSNMLMCSKLNKDDCDIVQSIRLDISFKSPSHTGLQTTELVRELSQQFPAVIPLALILKKFLADRSLDHPYSGGLSSYCLVLLIVRFLQHEHHLGRPINKNLGSLLMDFLYFFGNIFDPRHMRISIQGSGIYLNRERGQSIDPIHIDDPHCPANNVGRNCFRIHQCIKVSYNSPVVLRQIYGQQSAVLRTHTLYHMYMTGIC

SEQ ID NO: 50380 - protein, 1133 aa, Zea Mays
MEYSDAKLSPLLRKPSKTGRAPRPTTAATPPPFPSPDQPPAPTRPLPSMASTAAAPRTTKELMDALTAHLSLYHAAANPSPATAAASTSSSSPRAAILRWLASLSPAARAAAATSLLSPAAAAALLSMVRRLRLRGHSSFFVLHSSSPSTSARGAEEPTVLSRLSRGLLARAAASSRAQALLFANTLLFPSSPASSRRPDVITVAEAFVADLDGFVAAMDEISGGRFLCCGEGEVDLAALACQDFPELPWLNAKGYYVIEEFLANRLDIALRMSWAAAGGGSAGGRKAVRIGKSAKEKAGLAANAFWREKGILSCSKKSVFYKELKRLKLVEEIVCLKSNITCCSGDAIFFTSLVSAATAAGDVLMKLQGLLMVVSTESINLELIGDEAPKKKDVEKTSGGSRKGKKKSNTLKKLTTSAKPSKDNGCSSSDNRNCSPLPNHCAPSVEGTAAGPPSEKTPYKEIVPTTKEQTVSLDGCKNQCNKKKNKRKGKTKLSNPMRPESPRSTKLKTVVPHSAAEALHEAAKEADVSPHHPSYVHPSKNEISEAVSCSDPSILSNGTKVISTSKGTKLEDTLYSPRVHSSLATERFQSAHDDAFKVAVQASSYLSQSESLVQSSSCLPSRSNEVSSTNLYGSSVDSLVRSAQEKTECDGKHVDHKSEVTKDRILPSAIPTDMLQSAISKNGGVMKNGGGECYVYNRNLLGGTSYEWPSVTPSHFVSPQMQQRPAAADRLHLDVGYRWPTQFNQPFLPANHQVRNPPIDAGHNQMLPSLAVPLSFDWPPVFRGYGKNASVSYDPLYTPQMQSSAWSGFPAQLVQRGGICSDSDVADDTESYWFSEEESDSRAHSGRDINQYFGGGVMYWSPAEHAGTGFSRPPSLSSDDSAWAWHEADVIRVVDDVANGIPSTYTNGVSSPPSTPSCSQNESLDPAAHLITGNEINNEALTSPSSVQDSPEDKIMQVAKAVSCGSEVVKADTLPYAMLRPIVVPSISRRSSRSEIKGAHDHRRSPCVPSTRRDIPILRRPPSPVVLSVPRVPRPPPPSPAGESRKRGFPIVRSGSSSPRHWGMRGLFSEDKIFHRAQFCLDGPEVVWPSWGNKGTSGTLVQTIEDTVLQDHLVKISQLSCDQHMWHCLYSH

SEQ ID NO: 50381 - protein, 176 aa, Zea Mays
MKTILASETMDIPEGVTVTVAAKLVTVEGPRGKLTRNFKHLNLDFQLQEGGRKLKVDAWFGTRRTMAAIRTAISHVQNLIKGVTKGYRYKMRFVYAHFPINASITNSNTAIEIRNFLGEKKVRKVDMLDGVTILRSEKVKDELILDGNDVELVSRSAALINQAYHIFKVTWHYLVR

SEQ ID NO: 50382 - protein, 2074 aa, Zea Mays
MDRPPHLVIDLNEAPPPPSSDTPPAQAPSPPQELAPPVQAPPPPPPPPPPPQFPPLLPPQLPLGAPNQQVRLQQEALDVVLRVHRPLELRNTPFGPIGNVPAGLLPGLGLPLLPLQPPAPHPGEAGWGNPPAPCSSCGRQEILGGTLVCDACDRGFHPNCVRVWPPLFPPPPPPGPPGARRPRAAANEDWICPACERRGARSTRWKLGAVELDINAAPPEDPVTVIANDIRRQNITDGPQLTVANLPHFEGGHLQNTTLYDGMQFMPAFDLAQCFGMRQNFTSMDQDLIADGNVPQRSAHLRRRRDLPQTSTLPKVAVNHELGSAGTSMDPSFFNNTIKQSPSENRSSLKPPIFLMENSNHQPHHHTVALPVQYSDFFITSLGEIDNRTSYHNSYQIWPVGFTSYWHDRVTGSLFECEVHDGGNFGPLFKMRRLPCSAFQLPDASTTVCLNVVRNADTIETKEDFSETNQDFLSCLGNDLEGKESLGCSNVETKDMTVPDVLSDPGSFSWAPTNDANMYDKIGDFSYEGTSPSSVWRMISCAMMEACEKMYKEHGHLVLFCTHSSEKSPFDYESGPQRTDGPFNLLAKFCSSNGPKVPQFIEKENDVQSTCALLKEWLYPDRIGFDLEFVQEFVESLPKSGACSHYQFLCNRTGINSSLTIASGTLVAVNKNSPMHARHGSVVSGPQDHAQPSSSSIRELPPGNPISRKLAPELAGDVFQILEFLGRFAEIIGLKELPSIEQVEDELIDPWPMHPNKNDIHNYMDHNPPMNSPANVSSSYSNGESAREAAQNKLAAQTLGRCSGLVLPEIHIALLKVLFTELVSRVAIFVDPSIDLKESKSRRGRKRDTDTLTRELKIDMLTANNLTWPELARRYILAVSSMSGCMDLSDISSREGVKLFRCLQGDGGILCGALPGVVGMEKDASLLAEAETLICNSSANEGNTVFMMDYKDTDIVDSPEEPASDTTLPDWVKSLEPVRKLPTNVGTRIRKCVYEALERKPPEWARKILEHSISKEVYKGNASGPTKKAVLSVLTEACRTKVPQNTEKPRKERNIISISEAVLKKCRIALRRAISSDESKQFANLLGTTLTNSNENEDEGILGFPGMVSRPLDFRTIDIRLAKGAYRGSWEAFLDDVQEVICNLQTAFADRPEVLIMVVALSESFESLYKTEVQDLVEKFDRYLSNENDSSEIHQELQDALTAANNKLPKAPWEDGVCKVCGIDRDDESVLLCDNCDSEYHTYCLNPPLARIPLGNWYCPSCTAQTHVAVQEQKKCLGEEAHVFIEKLNKLAVAMDEKEYWELTVAERIYLLKFLCDELHNTALIREHLDQCSDKSNDLQQKLRHLNYELKELRYRVEIKNPYATQSRWMKNDQVSNSSGLVENQQRAMPTASEHLEEAEQVNVGVNLNNPAEGVPAALLDVGKPCSTDNGISSTSVIEGNKSLGLSEQPSKIITDQTDRDSIAEGSNSCEKSLVGKSGTCDPNVGETHAATVINAPNGDLPDENAMTLSQDNIETSTSKLVDHDADMNESNNLLERISQLHGSISTVESQLSMASLRGECLGRDSVGRLYWVTGRPCKRPRLVADGSMMIPKDRDISMVTSHSQSTFDRGWNSASLVIYESDEEMKCLVDWLRDIDPREKDLKDSILHWQKSIYRQASFPITDPPVSKFSKSEPLMELPNTNAFIVLEQKYGLQTDQDTSELSKRRGTKSRSGSEERVYRCDCLEPIWPSRHHCLNCHETYLTLMEYEGHNGGKCTSSNDCPNESKEIDEPKLKGSKSDIKEKDPVVHNCSVEPSNSGKLESCPYDFEEICRKFTTNDSIKETVKEIGLLGSNGIPSCVPSPAYFLDPPVLLNESKRNDDKPNDWTSSLQECQAVSAKMSGQEGSQVGQDFSGNAGDEELPKSKKPVRDSTSAKEAPSTDISTRLLTVNGGLVPESSLMPVIGRNFHILKQLKINLLDIEAALPEEAFRASKSQQIRRRSWRAFVKDAELISYVVLAINFLQSMIKAEFLKKDWWYWSSFTAAIKTTTVSSLALRIYTLDDCIMYTKDPAPNLQPADNARSGNKGKRKKDIDS

SEQ ID NO: 50383 - protein, 1057 aa, Zea Mays
MLVEKNSNSPGHLNVANCVIFMKNVRVERMEMGCFWSVALLGARSIVLDPANPSVKSQAKSMAAAAVEGNPRRMHWKQKNEFFKKNKAAVITPTKSVSKVKLSNNIPKGNISSSPAPSPEQPGASNPSFPVGSDANNEVTTPFDLNKGENSKHEKSTASKMSNKGINRRASSHAANVDNNTKEVRSYLISVLSKNPKGMGLKALEKVAADAFPNASKKIESIVKNIANYQGPERYVLKPGLEVESSKRHASEGVRSISENIEESAPSLKIDDPDICERIDIVGSPLAVTDGKLSNDSEGKAGTSSDSGSDSDSDSDSSDSGSDSESQSRSAAETGSGSSSDSDSDASSSSKEGSDAIVDITSDDDKANTAHTKVVDDLNLSSSPRDLTRLNVDDEQIDIGTNLDYRSASPHIDLNNFNTGNDDAAAEGFSSGNLNKPSEMPGSKNMTNTRMDSIGVDNKHNEMSFVDNLFDDSMRAASENSPKGEAGQLTVQHGNKRKSTSKDESKLVPVNIAKPKLKRSSGSENSTAKPESAKKAKPDVTSPIGSLSEHKRSLPPEKHTNDRLNKETGNVSRDASRDSSPAMKGRPSAPGNLQRIDQSPNLPIPTMHSEGTKGNAVKSSSKKKSDKMQKPWHGIDGDFGSCYSHGVDHHANFDGSDDSSTRKRSRHENPLIDDKMLKHSKDTNANINSMNLTKSSREIVVPDEVTAFPESNESNGEPSNSQRDNVEKSPYGKKKLQRELSDLELGELRETSLENDDGRIRKQFERNSSSKSLDAKLTGVNNFYPSINDRKTPVTVFHDKRKPSPQEYGNRGHVNQEGFQRKAAVYAFDDNRPQQRENFPESLHLPKIDNSDSENIMYPDRSGEKTSKRETRMAHSGMLEYADMQKKKATSRLPQNGTNNVIVSRMQKSISTSDNEERSRNNSLIETKTGRKRRDSSSDDDNLFFSKYDKDAPELKGPIKDFSQFEDYVQEYNEKYGVYSYLSSQIDKTKSDFLRVQDDLNVAKERDKEQYYNTVERLRDMYHESGARHKLMKKVFLLLHEELQIIKQRIKDFSEAY

SEQ ID NO: 50384 - protein, 567 aa, Zea Mays
MGIITGTPLKDTEEDNIILWKQKLEDGNVKLQSRLEQEEEAKAALLARIQRLTKLILVSTKATPASRFSPHPGPRRRHSFGEEELAYLPYRRRDIMIDNESNELLLPVEGFGVSLEDSSKEEKKNRKGLLNWFKLRKRDGASILTSSEGDKSSLTKSTAPSTPIGESVNFPAEPRISNSLAGENVSSDLFSIGHGEFPSGSIHGEETLSASGKTMDHVDLLREQLKILSGEVAFNTSALKRLTEEAGRSPKNEKIQMEMKKKTDEIKGKQQQIASLEREIAHATLGTQGKVDTLEHSPSYHELLEQLNEKSLELEVKAADNRVIQDQLNEKITECMELHAEVTHLKEQLSQALEAKDLVSNSMIHNNRVNHEVEHLVDQDVPREISSEPQQKQQSVEINELKQKVSELMEIKAQLEDRNQKLLEESTYAKGLASAAGVELKALSEEVTKLMNQNEKLATELSSLRSPTPAPRRFNNGPRGTRRESMSRREPASRRDTNASHEREKALEALLMEKEQKEAELQRKVEESKQKEAFLESELANMWVLVAKLKKSQGYDHEDLEAKHDGS

SEQ ID NO: 50385 - protein, 217 aa, Zea Mays
MRQSSCSMQLTNKTDHYVAFKVKTTNPKQYCVRPNIGVVLPGSTCNVTVTMQAQKASPPDMQCKDKFLVQSVVAENGVTAQDINAAMFNKEPGKVVDEFKLRVVYVPTTMPNPIPEESELGSSTPSFSQENGIDHSMTPLSVSRSSAETAKEKPSEATSVISKLTEEKMSAVQQNQKLRQELLLRKESSKTGGGFSITFLFVVGLLGIVVGYILKRT

SEQ ID NO: 50386 - protein, 873 aa, Zea Mays
MATAARKGSSSRSAAAAAATVAVLFLTVVSAAGGAAATPRRLLVDTDMDTDDLLGLLYLLKQNRSEIDVKAITISANAWSDAGHAVNHLYDMLYMMGRDDIPVGVGGDGGISYAGDVQRDVGGYLPLIDQGMSTDGGCRYRQAIPLSGRLDVDTNSGVRKGFLPRGSRAYRPLRQPTAQRVMADALSAGPTSVLLLGTHTNLALLLMSRPRLRRNVERVYVSGGAVRAAGNLFTAAAANPVAEFNVFGDPFAAYLVLHSGVPITMIPLDATNTIPVTEAFYSEFQRRQRTYEAQYCLLSLDGALARQRRRSDSHDNTGFYLWDPFAVGVAISSMRHGDGETSNEFAELEYMNVTVVTSNKPYGARDDGSNPFFDGRTTPKFGLREGGVHSGHVETGIRDPFCLVPGSNRGRCQDGYTKEVAGPEAVQMLVATRARPNTNKSSPLDKKFMETFLEVLNLPQNTGRFNISTQFPYYREVLYKPDSIMNVTRRGGKPKPVVFDMDMSPGDFVSLICLLKEPRHEIDLKAVLVNGNGWANSASIDIVYDVLHMMGRDDIPVGLGNATALGSPTLGCNNSYAIPQGSGGFVDSDTLYGLARSLPRSPRRFISDDLDHPERRHPSAFDVWRSVRKQLGPGQKITALTSGPLTNLASIISLSDMDAGSVIERVYVVGGVVRDGGDDRGNVFTVPSNRYAEFNMFLDPLAAKTVLESGLNITLIPLNVQRKVSSFEGVLGALKQHTQHTPESKLVRRLLLLLQQLQREQRKFYHHMDIFLGEVLGAVYMVQGSNLEPSVEVKSICIVANTTESINGLILVKKSAKPVDVLYSLNTGAYYDHLANSLVNHKQSAPIGSFGEQKAIWSRPQKHLGTDIAKDRK

SEQ ID NO: 50387 - protein, 397 aa, Zea Mays
MATARLPSRSFLSPAQQSYPRLPASVRLCLSHHEQPPTGPKRHRRAATSHPAFSAAARGRAKKIPIADTDEPAAGVRVTDRGISYRLDGAPFEFQYSYTEAPRARPVALREAPFMPFGPEATPRPWTGRKPLPKSRKELPEFDSFVLPAPGKKGVKPVQSPGPFLAGMEPRYQSVSREDILGEPLTKEEVSELVKGSLKSKRQLNMGRDGLTHNMLENIHSHWKRKRVCKIKCKGVCTIDMDNICHQLEMHTKRRNRLLHKRLNDLVFVSYNRKMQNRFQKRRETGGTSYDPLVLDDFDWDNEWVHSSVVHAGRDDDEHNLTWEQVDEAIGASESLRGRNFPRQARMYSNSYQRRSTMRAHEDEQGEEDDGNDSNNEVVDPQDDYWYGDSYVLRGGR

SEQ ID NO: 50388 - protein, 888 aa, Zea Mays
MGSLFNYFSVGFSETTSCTSSAPPDLNGSKHEKACHGLHYCKPNTASSPPIQELQKQEARDDLVIGGEADLIGKYEVCTDSRKVLLRTMSSPTQQKCENQEETKNTISVNQTDTAYKYPTTKPKISVQIPASYTPNMAPPQFMLPVPGRSMPVAFQQKQPQVPIEFRGPGFQMHSIGSVSSSLPVKMAVPLGNAPHIQPMFVHGAQPHAFHQQSFIHHGQGFGCAPPSNCYLPQFGNMRNVQELSQQYPRSGDEHKRTIKITHPETHEELMLDRHGHSFINVPASGQMPLNNINQLPHSVQTFSPLQKVYYPRPGTYNSAHVYLPNSTDVPLASRQFSSKIQPSMHGFDSTNSNQPFTSIRPPMPISRLDATSGPLTNLHTASEISNFKGMFPSSLPAPVHVELKPPITLPAEMNSESTISNQQNYCKIGLEMSLEPVNLVYEGNNKDSVATCDISCNLIPQPVSTPQTQTRPTSVDHATPVVDPQTILTSSLPLESTTCCKSSVKAKPIEVEQSLVVPTTLSSHTKLESSHATTSVILTATSLVSKIDGTPPTNRNYRYYGNSILGKPPLIYAQEILPSKFVGSNTSPEGLGKAKVNPVLFQEKFPSELNGSVPLRKHDFMIEEHVPNEKGMCSESKTEQVDVTMPSTAFGLEDDTSVAKSGRFHAYHQPVDLHPSIYIGDIQTSDDSQQPSPDLEIITSQSENKQNNSRVDSARDVKNAAPISTSAISQGKTEQERIGLEISNPCSITAALVAQPKKVVLESTKAKSTNGRRKKRKETLPKGSGHKYYDLDSAHSSLNENVESFVTSEDVQCSLATDLKLNFTCEAAKDNSTGGNDCQNRSDLFSWENTTENSADKLKLFGGTHSKSGAEVNKDKSEFDHKRQYST

SEQ ID NO: 50389 - protein, 176 aa, Zea Mays
MKNIASNPDAFNQSLRWKYDGPSDSFKALIDMAAVHSSCRLCIHIATKIHLKEERTPKFTNRPCSCSSKKGTVYHLFIRERGRFKSESIYMRSGQLTLGALESAVLGKFRSLNHVPVWKDERPPSIRGGDDLKLYRIYPVGLTQRQALYGFRFRDDSKLEQYIKDHPCAKLEVIFV

SEQ ID NO: 50390 - protein, 345 aa, Zea Mays
MESSQYYSENNIDVARGRGYKIVMTTSLSSDVPVGYFSWAEYDIMAPVPPKTEEALAVAFISNCGARNFRLQALEMLENLDVKIDSYGSCHRNRDGKVDKVDTLKRYRFSLAFENSNEEDYVTEKFFQSLVAGSIPVVVGAPNIQELSPGEGAILHIKELDDVVSVAKTMKNIASNPDAFNQSLRWKYDGPSDSFKALIDMAAVHSSCRLCIHIATKIHLKEERTPKFTNRPCSCSSKKGTVYHLFIRERGRFKSESIYMRSGQLTLGALESAVLGKFRSLNHVPVWKDERPPSIRGGDDLKLYRIYPVGLTQRQALYGFRFRDDSKLEQYIKDHPCAKLEVIFV

SEQ ID NO: 50391 - protein, 1356 aa, Zea Mays
MASDDGDKDILLLVHQVPLDMEDVPAPRLAHLLAPLHRAPPPPPPPPFRSPPPPQAAASAEHRLSFRGWLGIPRHWDDWVAKLRPLHARLWRRLGIHDAVLASTLRFKRDASAILHLASFWSPATATFAFPWGEATVTLQDVALLAGFPALGAPATAPLPPQWRPDEAALNGVRLGFNRSACKKAHHSAWVKHFLTDDNADTVFEHAAFLALWLTRFVLPGHPESTMRQAVFPIAVRLARGDRVALAPAVLASIYRDLREIKAFLIATGAAATTGNADMISSLSVYSPLYILQLWMWERFPALRPAKVNPLVDGDPLAARWHDLSRKLNPAQIREALSTGCNFVWQPYVSSMEHTGWVHSSDLAEDDELASLAQFLHPCELVGMDCIEQYLPHRVARQFGLDQDVPADVHRANQDWAIAWQTYQLEGKNVAFFIPHSEPGITTRYAQWWRQQLLPSGIDAATASAPVEWKTSKRKVKKTPAAMEAEAEKERKMKKARVSPTYTDKKRKLEELYDAKLSDWLPTARNEISDTTSDMESEEALLPNVGTTNDDIVLLMPRKQTTTAPVRALMDNDMILALGERGNFMVDEPPDIQSEPEAVVPATLDEEIVKIPEVISLDIPDKPEEGATAVMEEQKEATSVSDRSEEASALVIGEVEEKVAIEGAICVTGMNPSGNNSATVMEADERNAVPKEFGRAAKEVIEAVPQSQHEVNAGVINNSHDVVALPEEAHPVQPTNNSGGCPVVSCIMEDSKVAGDSGKIDYEYFCDFVEEQREIPCVQEISGENSRMGEKEREETSHESPQLEIVECVQDIVLRETDYDVNQKIVYPAVEDVATSDSMSTSLLGVPEPENAELNKHPYLAIKDEEDIPMEAARGEVAEMEQISTSAKGGAEEHGDFSELDHMGRADAKLHLHLNSEVPEKIDEIECKEVAGTMRLTGRYSDQKLGDVPEVGYTEDENIRGLVVNTSDRKPSEVSQVEPAKLEHSKDLVKEETDKSENIPGLECIGLEETRGDLMEECANTKSDNVPELENTGLGGTHGPIEDTDGRLKEIHDVNAELDKHNVHESDIDRSEDIMQIDPLTQDKATWLAKEETEDKTTKVQEVKYEQLRNEPPIQEDSKEKPCADSKDLSENVVVQSKEVDKLKQAGEGCQALMEKDMENASGAFVLEQTEDGHRKSLIETSINNDSEITLVEQLDGQSESLTRTGTVEIHGETIKAQDNEFYKDVVEDSNDSTNEKDVVEDSNESINAKMPCSSATVQLKEDKMEVFHEGKMEEPCAQDAELSNQREPSSDATAMEIEAVALEQDSRIICKNMEATTVEGSHTLDSGLSSDLAKVNETHAAREIKNQEVLDVDMK

SEQ ID NO: 50392 - protein, 1817 aa, Zea Mays
MASDDGDKDILLLVHQVPLDMEDVPAPRLAHLLAPLHRAPPPPPPPPFRSPPPPQAAASAEHRLSFRGWLGIPRHWDDWVAKLRPLHARLWRRLGIHDAVLASTLRFKRDASAILHLASFWSPATATFAFPWGEATVTLQDVALLAGFPALGAPATAPLPPQWRPDEAALNGVRLGFNRSACKKAHHSAWVKHFLTDDNADTVFEHAAFLALWLTRFVLPGHPESTMRQAVFPIAVRLARGDRVALAPAVLASIYRDLREIKAFLIATGAAATTGNADMISSLSVYSPLYILQLWMWERFPALRPAKVNPLVDGDPLAARWHDLSRKLNPAQIREALSTGCNFVWQPYVSSMEHTGWVHSSDLAEDDELASLAQFLHPCELVGMDCIEQYLPHRVARQFGLDQDVPADVHRANQDWAIAWQTYQLEGKNVAFFIPHSEPGITTRYAQWWRQQLLPSGIDAATASAPVEWKTSKRKVKKTPAAMEAEAEKERKMKKARVSPTYTDKKRKLEELYDAKLSDWLPTARNEISDTTSDMESEEALLPNVGTTNDDIVLLMPRKQTTTAPVRALMDNDMILALGERGNFMVDEPPDIQSEPEAVVPATLDEEIVKIPEVISLDIPDKPEEGATAVMEEQKEATSVSDRSEEASALVIGEVEEKVAIEGAICVTGMNPSGNNSATVMEADERNAVPKEFGRAAKEVIEAVPQSQHEVNAGVINNSHDVVALPEEAHPVQPTNNSGGCPVVSCIMEDSKVAGDSGKIDYEYFCDFVEEQREIPCVQEISGENSRMGEKEREETSHESPQLEIVECVQDIVLRETDYDVNQKIVYPAVEDVATSDSMSTSLLGVPEPENAELNKHPYLAIKDEEDIPMEAARGEVAEMEQISTSAKGGAEEHGDFSELDHMGRADAKLHLHLNSEVPEKIDEIECKEVAGTMRLTGRYSDQKLGDVPEVGYTEDENIRGLVVNTSDRKPSEVSQVEPAKLEHSKDLVKEETDKSENIPGLECIGLEETRGDLMEECANTKSDNVPELENTGLGGTHGPIEDTDGRLKEIHDVNAELDKHNVHESDIDRSEDIMQIDPLTQDKATWLAKEETEDKTTKVQEVKYEQLRNEPPIQEDSKEKPCADSKDLSENVVVQSKEVDKLKQAGEGCQALMEKDMENASGAFVLEQTEDGHRKSLIETSINNDSEITLVEQLDGQSESLTRTEDSNDSTNEKDVVEDSNESINAKMPCSSATVQLKEDKMEVFHEGKMEEPCAQDAELSNQREPSSDATAMEIEAVALEQDSRIICKNMEATTVEGSHTLDSGLSSDLAKVNETHAAREIKNQEVLDVDMKVAMSVCGEYQINSIGMEDVKSTKGSQNQECLDQKEDHIMEERVECEVREGSGVSYEEACELGGGRVKASGVAVDVSGPVLNKEACNTEEAREDKKRHGVGHVNEKRVLEETSMIDTGELKSDSTVMEISMAGLRQGTLNQCASSSEKEEAVQEKHDQGLVDENTNRGSADNDALECGGVNPDVAITMFHETILTTEAVNIAGSKISSENQQKEAPFEVHSITEVEGSESNESSRKEPEGALALPQEPGNLVKVKQESLENETEMSIFRENDKVSGKDQASAEFIIDPSNTDERRENDIGRPDESAKGCERLTSDSINTVHSKFGKSSNEEDKRTQNTRSTDPKDIKESLGRIRAEPSNRVHTTSVGYYSQHAAHDPISSCKEIKVPLRDGARDSGRDRALELVVTSPREETPRWRQEQYALQILEDVQNSRIAERSRMEMEIRVLKAQVSSMERQVMNLDHFSEVKSRSSLNQQMVHLHKPYF

SEQ ID NO: 50393 - protein, 254 aa, Zea Mays
MRSAEDIAYAVLRFFAKGGSLVNYYMYHGGTNFGRTGASYVLTGYYDEAPMDEYGMYKEPKFGHLRDLHNVIRSYQKAFLLGKHSSEILGHGYEAHIFELPEENLCLSFLSNNNTGEDGTVIFRGEKHYVPSRSVSILAGCKNVVYNTKRVFVQHNERSYHTSEVTSKNNQWEMYSEKIPKYRDTKVRMKEPLEQFNQTKDASDYLWYTTSFRLESDDLPFRNDIRPVLQVKSSAHSMMGFANDAFDAHAEASR

SEQ ID NO: 50394 - protein, 98 aa, Zea Mays
MTTTMRRFNLGTSAEPSTPRMPASSTSSRPTPFPPGLELQTAKTGDASQIHAHHRSLTYLPVPPPSVITWRAAWCSSAPPPPTPTAGALTTATVAVQV

SEQ ID NO: 50395 - protein, 322 aa, Zea Mays
MRGTLLEIGMSYSRASSVQLLGKEESNGKRCRSTKRGGTKDNPRMVERSRGRTTQRSPPSCPRTTSMSGQGVASKAWRGDGLSQPRGEDLAMANQGIVTHRGFSKCYSSGSLLAKQLKNVNEHKCQIYGDTVGFLATGDIFVACNECAFPVCRSRYEYERKEGNQCCPQCKTRYKRHKALVALYLYPFLNTVYKTREYEFLRLTSLGVIDALVKPVVRKCTEMLSRAICISGGDFYVRRFHKDGPIVWRLLALSPFRRLSKMDEKAIILPYRDTSLNSEEPMAEISSQKIQIAVLDMIAAISSNKRNVVALESVLKKMCTTH

SEQ ID NO: 50396 - protein, 468 aa, Zea Mays
MPGKMVQCLKSVGTANPLVLIDEIDKLGKGHSGDPASALLELLDPEQNVNFLDHYLDVPIDLSKVLFVCTANVIETIPNPLLDRMEIIAIAGYITDEKMHIARDYLEKNTRQACGIKPEQVEVTDAALLALIENYCREAGVRNLQKHIEKIYRKIALQLVRQGVSNEPDQESLGVTVNEESNSGDSITAKDEIVKDPAVEDASVANNVTNPASEEANEVNLTTEAPKEDSTSKGNKKTDGVAEDAADKATEKVVVDSSNLGDFVGKPVFQAERIYEQTPVGVVMGLAWTAMGGSTLYIETTKVEEREGKGDLVLTGQLGDVMKESAQIAHTVGRTVLLEKEPDNHFFANSKVHLHVPAGSTPKDGPSAGCTMITSMLSLAMGKPVKKDLAMTGEVTLTGRILPIGGVKEKTIAARRSAIKTLIFPAANKRDFDELASNVKEGLEVHFVDTYSEIYDLAFQSDAGTEMI

SEQ ID NO: 50397 - protein, 486 aa, Zea Mays
MAVAPPLSTHVSRTLTSNLHLWPRTHGGVAHARTRALIPTPAAACAFRFSFRVRATASGSKLPPYPLPDVFPYITAEWEAVAKGWACAAVAVYCLSRAVPAAGRLPRALAGGGGGGGAAVVVAARGGVALAAFASARAAATYAQQAFLWEAALQAAGRLRERAFERLLERDLEFFEGRGGVAAGDIAHRITDEADDVADALFSVLNVIPCMCFAIVNLGKRLRQISKEAHLSLAMLASYLNDVLPSMLTVKANNGELKEIMRFQKLARADLKNNLSKKKMKALIPQAVRATYIGGLLVLCAGSIVVSGSSFDAEEFLSFLTALALVVEPIQDAGKAYNEYKQGQPALERIFDLMRFNPKVTDKPRAIHLQSINGDIKFHDVTFRYVDDMPPVADGYILLDNHDIQDIQSQCLRTHIAFVSQDTMLFSGTIAENIAYRDPVGDIDMNRVEYAAKIANAEEFIKMLPEGYNSNVGQRGSSLSGGQKQR

SEQ ID NO: 50398 - protein, 860 aa, Zea Mays
MFSAIMAKKNYKQHSKSEKIQGGCMSGLIRMLDFRRSPKLLSDGRVKRDKKGLDDIHGNISANNGKDHRVELIYVGRSSIRTLMEEEMASSTQPLKQAQSNVAGICSEDIDLNLAGSLMEIYRSHTEGQETRRSIESGRSSISTDEEKNTDPPAHHYQIPSSIQRALEDVAEAVIRHQSANKKYINSGDETRSREFVDALQLLSSNKELFVMLMQDPSSRLLECLQNLYMSLGSTRLDSEEYDEGTELQGTTDSLEQSATSPSKVKRRHNSFLKEDGLVTRKPPKLNDGSRGLSRIVILKPSPARGHSSLISGSATSSPLSNHIDWQVQEGSDKHDCHFSLRELKRRLRIAISNNQKDHQLNSTSSDIHEAEADSGKLLPVTSMSETESLASTDSSDRAKEPSIVDEKIVPEDSESGMRNDVAHGVGVSSFSYEKAKMYIIERLNDQGEESCQIVQKSESFERLISLPENGTFSPIDFPQEEKISIAHEATKPLNLHTVEQEDGSASPYSTMQYEETESADTSNLGTETLIEPTIDHGSYSQNEGAISQELVREGVKIMLDIMENSSLCAETGTSQEGVGVKNPDECSLEEPQSMNLLPEPALYSPDDFVNEQENHSPSEIVELVKPSVLTFPYSPENTNDKEEKLSPQSVLDPIAEVTSPRHKTPKQDEFSMPTSRVLFKEVDAPSASPTLWNGPQVAILDDRATRVSFIKAVLEASGLLSEENSQIWYTEEPLLDVSVLAEVGNSYCLTDDAVLLFDYVEEVLLEIRDKFFGSDPWVNSLKHNVRPAPVGRRLVREVAKGIDSLVGKEFPHTLEQVMMKDLDSGSWLDLGGDTGSVVVELWDGLLDDLLEELVFDLWL

SEQ ID NO: 50399 - protein, 351 aa, Zea Mays
MAAAAVASSSTPRPLRLAQRGAVSAHASHHVSAPPHRSRRPRLSVSASAGVEGTSGSERFYFNFTGFPFPLGPFLNRRTIRTEAVKGSIWLFEQEQALGFSSVSTNIRMTVIKLKSGGLWVHAPIAPTKECIQMLKELDAPVEHIVLPTFAYEHKIFVGPFSRKFPKAQIWVAPRQWSWPINLPLEFFGIFRAKPLKDEDDATPWVAEIEQKVLSSPEVGIGPYVEVAFYHKPSRTLLVTDAVIFVPQQPPECISKESLLASAKNGLAVKLLSKGKEVPDEPVVDNKLNRQKGWERMVLQILFLGPSNLLEPNASFAQMSQKLIVSPIVKTLVFSKVPEKVQCVWLTGSLS

SEQ ID NO: 50400 - protein, 428 aa, Zea Mays
MAAAAVASSSTPRPLRLAQRGAVSAHASHHVSAPPHRSRRPRLSVSASAGVEGTSGSERFYFNFTGFPFPLGPFLNRRTIRTEEQALGFSSVSTNIRMTVIKLKSGGLWVHAPIAPTKECIQMLKELDAPVEHIVLPTFAYEHKIFVGPFSRKFPKAQIWVAPRQWSWPINLPLEFFGIFRAKPLKDEDDATPWVAEIEQKVLSSPEVGIGPYVEVAFYHKPSRTLLVTDAVIFVPQQPPECISKESLLASAKNGLAVKLLSKGKEVPDEPVVDNKLNRQKGWERMVLQILFLGPSNLLEPNASFAQMSQKLIVSPIVKTLVFSKVPEKVRDWVDRIAADWRFRRIIPCHFAAPINASRSDFLAAFAFLDEFLPERAAAAPGLSLLLASFMGKAASYFPPDDMKTLSSLDEFLVSVGAVKKTVSGRKR

SEQ ID NO: 50401 - protein, 346 aa, Zea Mays
MAAAAVASSSTPRPLRLAQRGAVSAHASHHVSAPPHRSRRPRLSVSASAGVEGTSGSERFYFNFTGFPFPLGPFLNRRTIRTEAVKGSIWLFEQEQALGFSSVSTNIRMTVIKLKSGGLWVHAPIAPTKECIQMLKELDAPVEHIVLPTFAYEHKIFVGPFSRKFPKAQIWVAPRQWSWPINLPLEFFGIFRAKPLKDEDDATPWVAEIEQKVLSSPEVGIGPYVEVAFYHKPSRTLLVTDAVIFVPQQPPECISKESLLASAKNGLAVKLLSKGKEVPDEPVVDNKLNRQKGWERMVLQILFLGPSNLLEPNASFAQMSQKLIVSPIVKTLVFSKVPEKVGWILQ

SEQ ID NO: 50402 - protein, 1072 aa, Zea Mays
MRGARPGVLPIYPQEQCRQARISYHGEFKVEVCFQYNEGAQIRHTFNFGHLPIMLMSKLCHLRGADPHKLVFHGEEATEMGGYFICGGMERLVRILVLQKRNYPMGLVRNSFLKRGAGYTDKAVVIRCVQRDQSSVTIKLYYILNGSARLGFWLGGREFLLPVGIVLKALIDASDREIFTSLTCCYSDKHGRGKGVVSTQLIGERAQIVLDEVAEAVLKDYIFVHLENNHDKFNLLIFMLQKLYALVDQTASPDNPDALQYQEALLPGHLFTVFLKDRLQEWLRKSKRLILEEAAKNKGFDLGNALEIRKFLTKYTTSVGRAVESMIKVGNVNSRSGLDLPQREGMTIHAERLNFHRYISHFRSVHRGSAFAKMRTTSVRKLLPESWGFLCPVHTPDGEPCGLLNHMTSTCRVSSFYNSEGVIKNFGEMKKLLSAELVRVGMNPVLPKIEQTGPPEVLHVHLDGCILGTIASAMIEKAVNYLRTLKLLAHSGIPEDLEVGYVPPSFNGAFPGLYLFTNPARFVRPVRNLFILSDGKQSIELIGPFEQAFMEIRCPDGGDGGRQEPFPATHEEIHPTAILSVVANLTPWSDHNQSPRNMYQCQMAKQTMGFCGQALKFRTDVKAFHLQTPQTPIVRTGTYTKYCMDEFPSGTNAIVAVLSYTGYDMEDAMILNKSAVERGMFRGHIYQTECIDLSTKSRDNVPETFAKSILTRDTSNVIDSDGLPRLGQAVHPNEQYYSVHNSLTNVIRPVKLKGTEPAFIDYVAVNGTGSKCGLQKANIRLRRVRNPIIGDKFSSRHGQKGVCSQLWPDIDMPFSANTGMRPDLIINPHAFPSRMTIAMLLESMAAKAGSLHGKFIDATPFANSLKKDKDSDKPNSIVDELGPMLASYGFNYHGNEVLYSGVFGTEMDCEIFIGPVYYQRLRHMVSDKFQVRTTGRIDQITRQPIGGRKHGGGIRFGEMERDALLAHGSSYLLHDRLHSCSDYHIADVCSFCGSLLTATMIKSDTQKKVKHEMLGLPTVRPAKNFACQACKTSKGMETVAMPYVFRYLAAELAAMNIKLELRLSNKSGLPLS

SEQ ID NO: 50403 - protein, 589 aa, Zea Mays
MSIWMGAFLIPEDLEVGYVPPSFNGAFPGLYLFTNPARFVRPVRNLFILSDGKQSIELIGPFEQAFMEIRCPDGGDGGRQEPFPATHEEIHPTAILSVVANLTPWSDHNQSPRNMYQCQMAKQTMGFCGQALKFRTDVKAFHLQTPQTPIVRTGTYTKYCMDEFPSGTNAIVAVLSYTGYDMEDAMILNKSAVERGMFRGHIYQTECIDLSTKSRDNVPETFAKSILTRDTSNVIDSDGLPRLGQAVHPNEQYYSVHNSLTNVIRPVKLKGTEPAFIDYVAVNGTGSKCGLQKANIRLRRVRNPIIGDKFSSRHGQKGVCSQLWPDIDMPFSANTGMRPDLIINPHAFPSRMTIAMLLESMAAKAGSLHGKFIDATPFANSLKKDKDSDKPNSIVDELGPMLASYGFNYHGNEVLYSGVFGTEMDCEIFIGPVYYQRLRHMVSDKFQVRTTGRIDQITRQPIGGRKHGGGIRFGEMERDALLAHGSSYLLHDRLHSCSDYHIADVCSFCGSLLTATMIKSDTQKKVKHEMLGLPTVRPAKNFACQACKTSKGMETVAMPYVFRYLAAELAAMNIKLELRLSNKSGLPLS

SEQ ID NO: 50404 - protein, 1142 aa, Zea Mays
MGVHGLWELLAPVGRRVSVETLAGKRVAVDASIWMVQFMRAMRDDSGEMVRDAHLLGFLRRICKLLFLRVRPVFVFDGATPALKRRTLAARRRHRDAAQAKVRKTAEKLLLSHLKARKLEELAEQIRSDRAKHDAKGKQVESSNGGETEKTSQNQIGDTNNSEGNVASINQEKVDGMLAASLAAEEDTDFTDEGTHHLTSAPLPEGDEIDEDEDDDEGMIFPMTTGDIDPAVLASLPPSMQLDLLVQMRERVMAENRQKYQKIKKEPAKFSELQIQSYLKTVAFRREIDQVQKSSSGKGSGGVQTSKIASEANREFIFSSSFTGDKQMLAQRGEKEHNVENTRSKKEIHSSVFASNPTSSLGTMKPPNSKTLSDFGPDVETYRDERGRIRVSRVRAMGIRMTRDIQRNLDFIKENEQVKSKGQTQTNFHNGSTGNEEPPDFPEHLFESNKLQSSCSPDVDLSETDRDNHQTSSQIGTDIISESSCYGNKEAIEISFSVDQTEVKDGDEDIFLQLVSGMAPNNIFSGNNCLVKKMEESVDSECIWEDGVIEAGTSPVKIDMKDHKSSLPENCSDDEMEWEEGDSFVPGVASSSEHNPCNAPKGDLEEAALVQEAIRRSLEDFEKKASENVSTGDIQASVEDRSLQFSNNVPKISESLGENDSHSGVPVVDEINNETRTEINYDKDDMVQGTGLLGTERQESESQPPLVNNDWHADMHRAHPLGSVPPCTTFTSDLAEKPSVSAETNGEDVMIFTTKIPGTALGDCDKTSNLNIMNSDQSKCSKDIASTGESLSHQKNLLIDELLAVTAEQKENATQVDLKFATSEVDYTQICGNDDNHTISASYVDAELSRLRQEQIYLGHERRKLESHAESVSSEMFAECQELLQMFGLPYIIAPMEAEAQCAYMEINNLVDGVVTDDSDVFLFGARNVYKNIFDDRKYVETYFMKDIESELGLSREQLIRMALLLGSDYTEGVSGIGIVNAIEVVHAFPEEDGLQKFKEWIESPDPSIFGKLHMEISGRSKKRKLDENDSDGKGKGLEPECIQGSDDKQSSNEDEHVKEIFMSKHRNVSKNWHVPATFPSEKVVNAYISPQVDSSTEPFSWGRPDLGLLRRIRTKEKIPSGYVGKGLGGAKRKLMNCCFQF

SEQ ID NO: 50405 - protein, 985 aa, Zea Mays
MARRLISPAAACRGCGLVRTGFLPAISSFHYRALPSCSPKRTSSVKNCFSNTYNIRKEGSRWIQSGPPLLLNRVKFVGKRTSCSVATEPPPAATEEPGMDVPKEIFLKDYKAPDYYFDTVDLQFQLGEEKTIVTSKIVVSPGVEGISAPLVLHGHDLKLISIKVNGTELKGEEYKVNSRHLMLSTPPAVVFNLEIVTEIYPQLNTSLEGLYKSTGNFCTQCEAEGFRKITYFQDRPDVMAKYTCRIEADKTLYPVLLSNGNLIEQGDLEGGKHYALWEDPFKKPSYLFALVAGQLGCREDSFVTCSGRNVTLRIWTPAQDLPKTAHAMYSLKAAMKWDEEVFGLEYDLDLFNIVVVPDFNMGAMENKSLNIFQSRLVLASPETATDGDYAAILGVVGHEYFHNWTGNRVTCRDWFQLTLKEGLTVFRDQEFSSDLGCRTVKRIADVSKLRIYQFPQDAGPMAHPIRPHSYIKMDNFYTDQVYEKGAEVVRMYKTMFGASGFRKGMDLYFKRHDGQAVTCEDFYAAMCDANNAQLPNFLQWYSQAGTPIVKVASSYDPSSQTFSLKLSQEVPPTPGQPVKEPMFIPVAVGLVDSTGKDMPLTSVYSDGSLQTVSTDGQPVFTTVLQFKKKEEEFMFKNIPERPVPSLLRGYSAPVRLDSDLSEGDLFFLLASDSDEFNRWEAGQVLARKLMLSLVADFQQQKTLVLNPKFVDGIRSILRNTSLDKEFIAKAITLPGQGEIMDMMEVADPDAVHAVRNFIKKELAVQLKDDLLAAVKSNRSSEAYTFNHDSMARRALKNTCLAYLASLNEPDFVELALHEYKSATNMTEQFAALAALSQNPGQVRDDALLDFYNKWQHEYLVVSKWFALQATSEIPGNVANVQKLLSHPAFDLRNPNKVYSLIGGFCGSPVNFHAKDGSGYKFLGEIVLQLDKINPQVASRMVSAFSRWRRYDKTRQALAKAQLEMIVSANGLSENVFEIASKSLAD

SEQ ID NO: 50406 - protein, 274 aa, Zea Mays
MIYIRNLIWNLSTYSTETPAQAQAQGTTHVAGTTTTRTLRNPLLVVNFVLMVVGSAGGPLFLRAYFLHGGARKWLSALLQTAGFPLLLVPLCVSFSRRRRRRDDGAPAKAPFFLMTPRLLAASAAIGLMTGLDDLLYAYGLAYLPVSTSSILISTQLAFTAAFALLLVRQRFTAFSVNAVALLSAGAAMLGMNAGGDRPAGVSPAQYGAGFAMTLGAAALYGLLLPAMELSQAQARAGTAAAVTYTLVIEMQLVIGLTATVFSAVGMLANHDLH

SEQ ID NO: 50407 - protein, 448 aa, Zea Mays
MDNPEESGNTDYLENITIPSALITKSFGDKLKKVIDNGDMVSVNLDWREALPHPDERVEYEFWTNSNDECGLKCDSQIDFVKSFKGAAQVLEKKGYTEFTPHYITWYCPEAFILSKQCKSQCINHGRYCAPDPEQDFSKGYDGKDVVVQNLRQVCVFKVAKEHKKPWLWWDYVTDFAIRCPMKEKKYTKECADGVIKSLGLDHKAIDKCIGDPDADEENPVLKAEQDAQIGKGSRGDVTILPTLVINNRQYRGKLDKGAVLKALCAGFKETTEPAVCLSEDIQTNECLENNGGCWQDKAANITACKDTFRGRVCECPIVKGVKFVGDGYSHCEASGSGRCEINNGGCWKDTKNGRTYSACNDDGCKCPDGFKGDGRHKCEGKSGASEAGWGFLWVIFFGLVAAGVAGYAVYKYRIRRYMDSEIRAIMAQYMPLDNQGDVQSHSHHIEM

SEQ ID NO: 50408 - protein, 175 aa, Zea Mays
MVTRRLPNPKQRWCPYASASTQYSPFPASTSLVPRPLIPLQATPPVPPLLVGQAAAAAAGGTYRLALRIQRRLIPPNHPRIRDFVYRYCLRRAPLSCVRAQDAVGHCQPNRISASSQCRHISYSYAPFPSVTARRKGVFREDIAQLMSSGSTLFKILLMTSDMWTVAIQVLLYHQ

SEQ ID NO: 50409 - protein, 1259 aa, Zea Mays
MSMAWRLLRTIHFRHLSPGVRRASKIVDQGFTNNAPELSTNKGSLLRCSSIRFGEKRNSIFACAPDNLEQKSGQTFEADAHSALKLCSGIGSVVIAKCSHIFERNGDTFDGNCSLQDILKPGLWLSPETLRRFWRVSELKPKDFLDILNGFGLSAVKVRNARFLWNLYRWTSRQSKEFQHLPRSNETMVSILADAHMLSQAESLLLSLIDHMTPAVSSELFSQIIQVYSEAGNLGKSVALYDYARGKHLIPSASCYQVLLHFLTRNRKDELILRVYLDMLEVGFGSCTEGNILDSVVMALIRKGKLLEALGILRQLKSLGLKLSKGALSNIVEEFNKKKDIGDLMNFLEDWRCIPELRLCNRILASLCTNLGTCQAWLVFQSLEALGFAPDATTFGIFIFHSCREMKLKSALVYLSECFARHVKPGVCAYNAILGGVFREGLYRHAKYIFEDMIEREVTPNLSTYKIILAGYCRYRRFDDIEQVLRHMKTNGVNVLLSGNCVLSKALSFLGLDHLGVKIKRDNVTGFPKAEFFDSVGNGLYLDTDSKMFEVSLSQVLDSALLPDINSELIRASQQGDVASALLVKDKAFQWGYDISPDSCSELFKALCVSPAYVIDVIDLMEEMPDILYKLDAQNLDLVAQTLSRNGMSAHAKLVLEKMLREDLSISHNTYTYLMIGLCEERNIAGFWECWNLATKCRWSPDSKDMMGLISYLCKWGVIEEALKLMNSLFDCYHDLFFSAYCALLKELCRTGHTSIGCAMLEALKEKGVAVDRSLFFYVMEGFLKEQRTAESIGMHDMWLSKSKELDVFTYRSVLPSLPWLDTDRAKNLVESMLTVKLTEFSYRGCIVNELMQTRNIKWAIPVLQESAPGKLSATLLNSLLQAYGWLKNWRKLDAVLCKMLKMHATLSISSYRFLVCRMCEQSRFSSASSLRALFQHTDKSRELIACNILIFYLFQRRNSSQIHDLLKDIEGNGISLDKTTYDFLVYGFHKSGDINDSVNALDACIAQGIKPSNRSLRIVLSHYCRLGNHEKSLALFHLIERNGWKHGLIIKTTLASCLLSFGRQLEAKSCLNNLSKGEFIGCSSNFDDLIKEFCILGDLKMTLYLLNTMLKKGTLPNEASYSSVIYKLCTLKEFDQALDFLAEMQLASLKSSEISCDALVHGLCAMGRPSDARKVLEMLTTLGSAPSYGMFRVVFDNYCRSSNLQKAAALLHDMQQAGQVPNFEMHWSVISNLSSTNEKTEGHGECILPNLFLSANSP

SEQ ID NO: 50410 - protein, 154 aa, Zea Mays
MSKRQGPPKHQNRYAWKPNLGQKINETEPGGRFRPLSEITGVCQRCRDQIDWKRRYGKYKPIVEPAKCQKCNKRNVRQAYHNVCRDCSKDLGICAKCCTCVNELVGRDANEEESERKSLEEAVRGARERERRTLLRISYTGIRARVLFWQGSIQ

SEQ ID NO: 50411 - protein, 592 aa, Zea Mays
MDQYEVLEQIGKGAFGSALLVRHKVEKKKYVLKKIRLARQTDRTRRSAHQEMQLIATVRNPFIVEYKDSWVEKGCYVCIVIGYCEGGDMAEVIKRANGNHFSEEKLCKWLVQLLMALDYLHANHILHRDVKCSNIFIARDQSIRLGDFGLAKILTSDDLASSVVGTPSYMCPELLADIPYGTKSDIWSLGCCIYEMTALRPAFKAFDMQALISKITKSIVSPLPTRYSGSLLFYSNKNISHNWHMQAAELLKHVHLQPYVLQVQLKSSPSRNMSPIYQALTDKVKKMTFPSDITDSARRVARRNSLGNERTVTFCKPSPERNSISSTRSIKEYTTTQSVKELSVDSSQIDDEVTSKAIRTKTTGILRTPKSTPAKTLTTRNRLDPPKTSYSRTNHSELTSRTPLNKSAVTARRASLPLPTYRAPNSRAASVLDQLDSPDVSVNAPRIDRIAEFPLASSEDPLAPMKKNLSSAPGHDGSCSTPPFINRSITKDKYTVQVLHRGDGDNASDSSGRNATAASSGGSNDSRQQRFDTSSYQQRAEALEGLLEFSAQLLQQERYEELGILLKPFGPEKASPRETAIWLTKSFKETAS

SEQ ID NO: 50412 - protein, 145 aa, Zea Mays
MHNLRSVSKPNAKLYLGLPFTPNRQCEALFGPTEGPTRSADVSLTLSTTRPHCSCSLDAVTSRMDGADIPSHSAADGDRPPENADDGGVEDERAAAPPPERCGALASAIAGVLAGALREHEERAAATARSQDEVAAAIDRLNGGY

SEQ ID NO: 50413 - protein, 59 aa, Zea Mays
MAKLLASLLKSRTPPKRIDSPTACLFPSSPQHAAGRRSGCSDGLSHTAAEDYRCHSPES

SEQ ID NO: 50414 - protein, 682 aa, Zea Mays
MITFVDSAAMELERESGRCLVDPQLWHACAGGMVQMPPVHSRVYYFPQGHAEHAQGHAHADLPAGRVPALVLCRVDAVRFLADPDTDEVLARVRLAPVRPNEPDHADAAAPGAREDKPASFAKTLTQSDANNGGGFSVPRYCAETIFPRLDYSADPPVQTVLAKDVHGVVWKFRHIYRGTPRRHLLTTGWSAFVNQKRLVAGDSIVFMRTGNGDLCVGIRRAKKGGIGGGPEFPHHQPPDGGGYGYGYAGFSTFLRGEEDDAAARGKVRVLVRPEEVVEAANLAASGQPFEVVYYPRASTPEFCVKAGAVRAAMRTQWCAGMRFKMAFETEDSSRISWFMGTVAAVQVADPIRWPNSPWRLLQNVKRVSPWLVELVSSTPAIHHLTPFSPPSRKKLCIPLYPEGHQLPAPMFHGSPLVGRGVGPMRYFPDGGTPPAGIQGARHAQFGISLPDLHHLTRLQSSLSPHAHGLRHQLDHGARPRIAGGLIVGHPAARDDISCLLTIGTAPHKKPSDVKSAAAAPAPQLMLFGKPILTEQQISLGFRPLPAPKKSPSDDAAETERTVSNNSDASSPAGTASGSTPSISGGAPSSCQDNKAAATATATDDDDLLGHCKVFMQSEDVGRTLDLSAVASYEELYQRLADMFGVDRAELTSHVFYRDGASGALKHAGDEPFRSVRWFSSV

SEQ ID NO: 50415 - protein, 737 aa, Zea Mays
MASISEDSGEETPLQVRLNGVATFIGMVGLSVALAVLVVLLARYFTGHTYNPDGSVQYVKGNMGVGQTIRGIVKIFTVAVTIVVVAVPEGLPLAVTLTLAFSMRKMMKDKALVRRLSACETMGSATTICSDKTGTLTLNQMTVVEAYFGGKKMDSPDNAQMLSADVTSLIVEGIAQNTSGSIFEPEQGGQEPEVTGSPTEKAILSWGLKLGMKFSETRSKSSILHVFPFNSEKKRGGVAVYLAGSEVHIHWKGAAEIILDSCTSWVDTGGSKHSMTPEKVAEFKKFIEDMAAASLRCVAFAYRTHEMDDVPDEDRREEWQLPEDNLIMLGIVGIKDPCRPGVRDSVRLCQAAGIKVRMVTGDNLQTARAIALECGILDDPNVSEPVIIEGKTFRALSDLEREDAAEKISVMGRSSPNDKLLLVKALRARGHVVAVTGDGTNDAPALHEADIGLSMGIQGTEVAKESSDIIILDDNFASVVRVVRWGRSVYANIQKFIQFQLTVNVAALIINVVAAVSSGNVPLNAVQLLWVNLIMDTLGALALATEPPTNHLMERPPVGRREPLVTNIMWRNLIIMATFQVSVLLSLNFKGISLLQLKNDDPAHADKVKNTFIFNTFVLCQVFNEFNSRKPDELNIFKGISGNHLFIGIIVITVILQALIVEFLGKFASTVRLSWQLWLVSIGLAFFSWPLAFVGKLIPIPKRPLGEFFACCCNCKGSKQGPDDATSNGKEDNKLEP

SEQ ID NO: 50416 - protein, 1026 aa, Zea Mays
MFPWEMDIDGESSKTLGQMEDLTQSSATYTSQMLLSNLASSGIKEKIPLENESCGICRDIVIDRGVLDCCSHWFCYTCIDNWAAITNRCPLCKSEFQHITCTPVYGTIGATDEDEYSLTSCDDDWYGQEESSTLSFPSYYIDAEAVVCLDDGDCKIRNGLVAAEDDSTLDTSIACDSCDKWYHAICVAFNATMASDSSWLCPRCKFNEVEYEANVILKQNLGEDCVIGSDRTCTNASFSGRVSVSVADEGETALVVSMVGAHSETRGGLSEASLGLETAHETFNCSPYPSHSKDVLVADASSLRNTDIVSRSQNKPSEINVVHTLCSEPTETSLQFSPIREPATTIFSSEQDNMSTERLEVPKLVSSCPVVDNSKEAKSTGEENAAQQSNNELSSVIKSPQPASSDAVHQMKTAQNLQLPLRHDEHSSDDRKEEHIESGNEMIHPAKKAKLEVQEDINVIGNFDFSSIHSHTTSPAKAITDDIMSESVAQQKSIPDIMSIVDGEVYRRDPGRELAKPVGRRAGDKPGPRVKKIFRKEEGKESSALVQKLQKEIKEVVRDTGTNILEKDESFDEKLLTAFRAAIGKSVDGPAKSTNTNQLIRTRRSLLQKGKKRENLTKKLYGTSTGRRRSDWHRDWEVEFWKYRCSPGINPEKIETLQSVLQLLKKSSEMDKESAKGKREENNNSSILSRLYLADASVVPRKDDIRPLSALAGCAPLEKSSQIKASCNKSSSIPAGGNETMKISSPSSTGKASSYSILNKEAPSRRENRNSQPSQDKRNQSSGDIKQDKRKWALEILARKNASSITNKDQTGGNDALKGNFPLLAQLPVDMRPQLAAGSNKKVPVSVRQAQFHRIAEHYLQKANLDVIRRCADTELAIADAVNVEKGIYERSNSKSIYVNLCSQATRQHAKAKSDNDTSTLTKRTESGSDQISQEATSEGTNVSGSDMEEDLNRAAISNQKNELEDDTAPEHIVHKDTVSFNSAEDALRKAGLFDSPPNSPERGNTAVEGNSESTAVSNCPKFSQK

SEQ ID NO: 50417 - protein, 1300 aa, Zea Mays
MAHRGTTPIMGHVVPAHGTSQRPTTRHTITYSCSKSFHTSEVVFLPRLLPVPELLPTTVGLALGVGVNEELPQAPPPFPCAIADTEEARGLATEQEVDCPSAPWLTSREGNGTWPTNRKCVVAARTGKSRRRTGNGRGKPTREGTGRGELECENGRGGEEITGRLGGRRTDGRWRGLSIKRPDARRINSSASENRTLATLSDQTKQRRGHFSAQAVARPHPGEGQWGRRGAKSRRGRRQGGWTAPARRLPVARRPAASVAAPDISALLQQHTAAWRTAAQVQPHRHTKPHLPHQSSTRMFPWEMDIDGESSKTLGQMEDLEKIPLENESCGICRDIVIDRGVLDCCSHWFCYTCIDNWAAITNRCPLCKSEFQHITCTPVYGTIGATDEDEYSLTSCDDDWYGQEESSTLSFPSYYIDAEAVVCLDDGDCKIRNGLVAAEDDSTLDTSIACDSCDKWYHAICVAFNATMASDSSWLCPRCKFNEVEYEANVILKQNLGEDCVIGSDRTCTNASFSGRVSVSVADEGETALVVSMVGAHSETRGGLSEASLGLETAHETFNCSPYPSHSKDVLVADASSLRNTDIVSRSQNKPSEINVVHTLCSEPTETSLQFSPIREPATTIFSSEQDNMSTERLEVPKLVSSCPVVDNSKEAKSTGEENAAQQSNNELSSVIKSPQPASSVHQMKTAQNLQLPLRHDEHSSDDRKEEHIESGNEMIHPAKKAKLEVQEDINVIGNFDFSSIHSHTTSPAKAITDDIMSESVAQQKSIPDIMSIVDGEVYRRDPGRELAKPVGRRAGDKPGPRVKKIFRKEEGKESSALVQKLQKEIKEVVRDTGTNILEKDESFDEKLLTAFRAAIGKSVDGPAKSTNTNQLIRTRRSLLQKGKKRENLTKKLYGTSTGRRRSDWHRDWEVEFWKYRCSPGINPEKIETLQSVLQLLKKSSEMDKESAKGKREENNNSSILSRLYLADASVVPRKDDIRPLSALAGCAPLEKSSQIKASCNKSSSIPAGGNETMKISSPSSTGKASSYSILNKEAPSRRENRNSQPSQDKRNQSSGDIKQDKRKWALEILARKNASSITNKDQTGGNDALKGNFPLLAQLPVDMRPQLAAGSNKKVPVSVRQAQFHRIAEHYLQKANLDVIRRCADTELAIADAVNVEKGIYERSNSKSIYVNLCSQATRQHAKAKSDNDTSTLTKRTESGSDQISQEATSEGTNVSGSDMEEDLNRAAISNQKNELEDDTAPEHIVHKDTVSFNSAEDALRKAGLFDSPPNSPERGNTAVEGNSESTAVSNCPKFSQK

SEQ ID NO: 50418 - protein, 1302 aa, Zea Mays
MAHRGTTPIMGHVVPAHGTSQRPTTRHTITYSCSKSFHTSEVVFLPRLLPVPELLPTTVGLALGVGVNEELPQAPPPFPCAIADTEEARGLATEQEVDCPSAPWLTSREGNGTWPTNRKCVVAARTGKSRRRTGNGRGKPTREGTGRGELECENGRGGEEITGRLGGRRTDGRWRGLSIKRPDARRINSSASENRTLATLSDQTKQRRGHFSAQAVARPHPGEGQWGRRGAKSRRGRRQGGWTAPARRLPVARRPAASVAAPDISALLQQHTAAWRTAAQVQPHRHTKPHLPHQSSTRMFPWEMDIDGESSKTLGQMEDLEKIPLENESCGICRDIVIDRGVLDCCSHWFCYTCIDNWAAITNRCPLCKSEFQHITCTPVYGTIGATDEDEYSLTSCDDDWYGQEESSTLSFPSYYIDAEAVVCLDDGDCKIRNGLVAAEDDSTLDTSIACDSCDKWYHAICVAFNATMASDSSWLCPRCKFNEVEYEANVILKQNLGEDCVIGSDRTCTNASFSGRVSVSVADEGETALVVSMVGAHSETRGGLSEASLGLETAHETFNCSPYPSHSKDVLVADASSLRNTDIVSRSQNKPSEINVVHTLCSEPTETSLQFSPIREPATTIFSSEQDNMSTERLEVPKLVSSCPVVDNSKEAKSTGEENAAQQSNNELSSVIKSPQPASSDAVHQMKTAQNLQLPLRHDEHSSDDRKEEHIESGNEMIHPAKKAKLEVQEDINVIGNFDFSSIHSHTTSPAKAITDDIMSESVAQQKSIPDIMSIVDGEVYRRDPGRELAKPVGRRAGDKPGPRVKKIFRKEEGKESSALVQKLQKEIKEVVRDTGTNILEKDESFDEKLLTAFRAAIGKSVDGPAKSTNTNQLIRTRRSLLQKGKKRENLTKKLYGTSTGRRRSDWHRDWEVEFWKYRCSPGINPEKIETLQSVLQLLKKSSEMDKESAKGKREENNNSSILSRLYLADASVVPRKDDIRPLSALAGCAPLEKSSQIKASCNKSSSIPAGGNETMKISSPSSTGKASSYSILNKEAPSRRENRNSQPSQDKRNQSSGDIKQDKRKWALEILARKNASSITNKDQTGGNDALKGNFPLLAQLPVDMRPQLAAGSNKKVPVSVRQAQFHRIAEHYLQKANLDVIRRCADTELAIADAVNVEKGIYERSNSKSIYVNLCSQATRQHAKAKSDNDTSTLTKRTESGSDQISQEATSEGTNVSGSDMEEDLNRAAISNQKNELEDDTAPEHIVHKDTVSFNSAEDALRKAGLFDSPPNSPERGNTAVEGNSESTAVSNCPKFSQK

SEQ ID NO: 50419 - protein, 197 aa, Zea Mays
MVITASNDLNEETIDALNKQGHEVDAFGIGTYLVTCYSQAALGCVFKLVEINNRPRIKLSEDVAKVSIPCKKRCFRLYGKEGYPLVDIMIRESEPSPKAGERILCRHPFIESKRAYVVPQHVEELLQYYWPGTSDKPRAELPSLEKIRSRCMQQLEKLRPDHIRRLNPTPYKVSVSAKLYDFIHCLWLNEAPVGELQ

SEQ ID NO: 50420 - protein, 525 aa, Zea Mays
MDPPLISNISSSRHLQLMFDLYFRKNPFGGEFTVFAGLEECIKFMANFKFTEHDISFLQSVMPTCAGAFFDYLGEVDCSDVEVYSIPEGSVVFPKVPLMRVEGPVAVVQLLETPFVNLINYASLVTTNAARHRHVAGKSKVLLEFGLRRAQGPDGAISASKYCFMGGFDATSNVLAGNLFGIPLRGTHSHAFVSSYMSLDEIPNKALRNKDGSRVCEDFVSLVQEWLQKFQAADSLGGVFGDTNKSELAAFASYALAFPSNFLALVDTYDVIRSGIPNFCAVALALHDLGYKASGIRLDSGDLAYLSIEARKVFRAVEKEFNLPGFAKMVITASNDLNEETIDALNKQGHEVDAFGIGTYLVTCYSQAALGCVFKLVEINNRPRIKLSEDVAKVSIPCKKRCFRLYGKEGYPLVDIMIRESEPSPKAGERILCRHPFIESKRAYVVPQHVEELLQYYWPGTSDKPRAELPSLEKIRSRCMQQLEKLRPDHIRRLNPTPYKVSVSAKLYDFIHCLWLNEAPVGELQ

SEQ ID NO: 50421 - protein, 286 aa, Zea Mays
MRFEKAKEEVNSDLAVFAGDLVSVMEKYADSHPEWKETLEDMLILARTCCVMTPGEFWLQCEVIVQDLDDHRQELSMGVLKKLYTRMLFILTRCTRLLQFHKESGFAEDEVVIHQRDKIIQSADRQVLTQPGADGTISRASKSEARKSYSQEQHNLKWKRSQEIKPVKLLPPLDTDVKKDAVSPSKERISSWKPFPSPNTKVPKESIPTKSESPNKKTDAHSTVSSHVELSSQVESLPQQQLPDKHQHKTSWGHWSDQPNISEEGSIMCRICEEYVPTHYVEDHSK

SEQ ID NO: 50422 - protein, 174 aa, Zea Mays
MITGKILELLSPSLRQTLLLLNSLQGSVSTMLTNQCIHHGETYHHLWSTIITDSIISHGCFLDNCRIEHSVVGVRSRIGSNVHLKDTVMLGADYYETAVERGELLAEGKVPIGIGENTTIQKCIIDKNARIGKKVVISNSEGVDEADRTSEGFYIRSGITVVLKNAIIADGLVI

SEQ ID NO: 50423 - protein, 1065 aa, Zea Mays
MDLLPPPTDAPDAGGPSAGGSGRGLRRGIGFRSLKLVSVAMDETLPVDPVGATYGRLANGLTYYVRSNPKPRMRAALSLAVKVGSVVEEEDERGVAHIVEHLAFSATARYTNHDIVKFLESIGAEFGACQNALTSSDETIYELLVPVDKPGLLSQAISVLAEFSSEVRVSAEDLEKERGAVLEEYRGGRNAAGRMQDSHWALLFDGSKYAERLPIGTEKVIRTVTHETVKRFYQKWYHLSNMAVFAVGDFPDTQAVVELINEHFGHKAPAPHPPPVIPEFSVPSHEEPRFSCFVESEAAGSAVVISCKMPAGGIKTVKDYKDSLAESMFHCALNQRLFKISRRKDPPYFSCSSAADALVCPVKAYIMTSSCRERGTVEALESMLLEVARVRLHGFSDREISIVRALMMSEMESAYLERDQMQSTSLRDEFLQHFLREEPVVGIEYEAQLQKTLLPHISSAEVAKFAENFSTASSCVIKIVEPRAHASLEDLKAVVLKVNSMEEDKSIFPWDEEQIPEEIVAQAPEPGTIIAKVEHPGIGATEMILSNGMRICYKYTDFLDDQVVFTGFAYGGLSELSEAEYTSCSMGSTIAGEIGTFGYRPSVLMDMLAGKRAEVGTKVGAYMRTFSGDCSPSDLETALQLVYQLFTTNVEPREEEVKIVMQMAEEAIYAQERDPYTAFANRVREINYGNSYFFKPIRISDLKKVDPIRACEYFNNCFKDPSAFTVVIVGKIDPAISLPLVLQYLGGIPRVQDATQPLSRDDLRGLPFKFPATIIREVVRSPMVEAQCFVQLAFPVVLKNTMMTEDIHYVGFLSKLLETKIMQVLRFKYGQIYSVNVAVFLGGNKPSRTGDVRGDISVNFSCDPDISSKLVDFVLEEISCLQTEGPSEEDVLSILEIEQRAHENGLQENYFWLDRILRSYQSRLFSGDIGSTFAFQEEGRIKVRDALTPQSMQSALQRVIPFPCRKQYTVVILMPKSSCWASVKSMLSWSSNGVSRDAKILAGMAGALVLANEEKSIMSRKCDIPLCCSVGFHILARTASKGSVGNRDVQERIVLKLVTFKEVFV

SEQ ID NO: 50424 - protein, 263 aa, Zea Mays
MQVDATPNHTLNLPHSTPNFSTGDFPALPTAEDQNGFNQAVRKLASQNSGQWKFKKGPEYGNGISALSVPKQYSSSTKQSSGNKFQSISSGRVAPWLETGDAVASMYSESRGEARDFARVRNTCFEQARQAYLVGNKALAKELSMKGQAYNVQMKAAHEKAREAIYRQRNPVSSQRGGGDHLIDLHGLHVNEAIHILKGELTALKSAARAAGERMQVMVCVGTGHHTKGSRTARLPIAVEQFLLDEGLQYTQPQAGLLRVMVY

SEQ ID NO: 50425 - protein, 703 aa, Zea Mays
METLMVDRVHSSLRLFMYRNAIFLCERLCAQFPSETNVQLLATCYLHNNQPYAAYHVLKGKKLPESRYLFATSCFRMNLLREAEEILCPVNEPNMEVPSGATGHYLLGVIYRCTGRISAAAEQFTQALTLDPLLWAAYEELCILGIAEDTDECFSESTALRLQQEHTSTSTLVKSNFANENRVLSSSVSASFGDIIPKQIKQLHANNITEVSGYPHVRPTALHVQNSSTSNVSQFDTPSPAAAQTSIMPPPLFRNVHAYQNTISGDAPTKQKANGVSQPLRRKYMDEARLKKVSGRLFNSDAMPRRSQRLKDTTTNSNTSQIGGNGTDHLSDNMSGTSSSVSTADGRSFEQDRAERILLQDSKVALGIRELLGLFRTLGEGFRLSCLFKCQEALEVYRKLPESQFNTGWVLCQVGKAYFELVDYLEADHYFELAHRLSPCTLDGMDIYSTVLYHLNEEMRLSYLAQELISIDRLSPQAWCAVGNCFALRKDHETALKNFQRSVQLDSRFAYAHTLCGHEYSALEDYENSIKFYRCALQVDERHYNAWYGLGVVYLRQEKFEFAEHHFRRAFQINPRSSVLMCYLGMALHSLKRNEEALEMMEKAIAADKKNPLPKYQKSLILLGLMKYEEALDELERLKEIAPHESSMYALMGKIYKQLNILDKAVFCFGIALDLKPPAADLAIIKSAMEKVHLPDELMEDDL

SEQ ID NO: 50426 - protein, 699 aa, Zea Mays
METLMVDRVHSSLRLFMYRNAIFLCERLCAQFPSETNVQLLATCYLHNNQPYAAYHVLKGKKLPESRYLFATSCFRMNLLREAEEILCPVNEPNMEVPSGATGHYLLGVIYRCTGRISAAAEQFTQALTLDPLLWAAYEELCILGIAEDTDECFSESTALRLQQEHTSTSTLVKSNFANENRVLSSSVSASFGDIIPKQIKQLHANNITEVSGYPHTSIMPPPLFRNVHAYQNTISGDAPTKQKANGVSQPLRRKYMDEARLKKVSGRLFNSDAMPRRSQRLKDTTTNSNTSQIGGNGTDHLSGKLRVNSSTQSKLCSTAIRSVQVRKGKPRATENFDEADGRSFEQDRAERILLQDSKVALGIRELLGLFRTLGEGFRLSCLFKCQEALEVYRKLPESQFNTGWVLCQVGKAYFELVDYLEADHYFELAHRLSPCTLDGMDIYSTVLYHLNEEMRLSYLAQELISIDRLSPQAWCAVGNCFALRKDHETALKNFQRSVQLDSRFAYAHTLCGHEYSALEDYENSIKFYRCALQVDERHYNAWYGLGVVYLRQEKFEFAEHHFRRAFQINPRSSVLMCYLGMALHSLKRNEEALEMMEKAIAADKKNPLPKYQKSLILLGLMKYEEALDELERLKEIAPHESSMYALMGKIYKQLNILDKAVFCFGIALDLKPPAADLAIIKSAMEKVHLPDELMEDDL

SEQ ID NO: 50427 - protein, 237 aa, Zea Mays
MDAGEVRHWNADVNGVSIHVAERGPEDGPAVLLIHGFPELWLSWRHQMAALAARGFRALAPDLRGYGDSSVPSDPAAYTIFHIVGDIVALLDHLQVPTHKGVRGWARLGRDGGVAPLPVPAGPGARRCCPGDPLLPPRPSPDDGLICQARRWILHQSVPGARKSREGICSLRCCDGPKEVLRLENRRDDCSSWSGDHRLSPGTFFADSLDDRRRTGTVRREVREDWLHRTPQLLPHA

SEQ ID NO: 50428 - protein, 480 aa, Zea Mays
MAAPRKGTATPLGAVFSPEETKRAVARVAESIAGRRAELGHLLGFVADNAALVSLVNRLPVELSHEIMVPFGGAAFFPGRLIHTNELLVLLGEGYYAERSAKQTTDILHRRGQELEAQVEAMKATITDLEAEANFFESTATEASEGLVEIREEYDEDTETKTTRSGKINQRKRLSLASLLFSTPLLRLNPRSGVTTAISHTSSSNPLTISHSYNLRSRSNSNNLVSDMPGSAEAETAASAQPSELAAITTALAEVQRQLGLFATQMASMSSRIAAVESTSGTSAMAPPPDCPYDMPGYDGLWLAYSSNQGFQATVANGDKIHCRQIANSIEASIATGVMFDNDREHAQIMARLVELEREEKEAGNTCEDDDDDGDDDGDAGTSEDGEENKEPGNALSDGNEDHSSGSGALFFGNGGNDRSNGNIKLKSALKKPGGDEMLKDISHTPSADTSHPVFGGQTSITNPDVRVHTKESCTILLIY

SEQ ID NO: 50429 - protein, 403 aa, Zea Mays
MAAPRKGTATPLGAVFSPEETKRAVARVAESIAGRRAELGHLLGFVADNAALVSLVNRLPVELSHEIMVLLGEGYYAERSAKQTTDILHRRGQELEAQVEAMKATITDLEAEANFFESTATEASEGLVEIREEYDEDTETKTTRSEASIATGVMFDNDREHAQIMARLVELEREEKEAGNTCEDDDDDGDDDGDAGTSEDGEENKEPGNALSDGNEDHSSGSGALFFGNGGNDRSNGNIKLKSALKKPGGDEMLKDISHTPSADTSHPVFGGQTSITNPDVRVHTKAVSFEDDKFVVSSSKSPTLLVGSIQSDPGLKSSSDPTPSCDRKIISSGRKAFTGSIVEHDDDDLSTIQPSAGNSLAKPGTSASSRPMSKFKMQKGGRAPSPVRLFGGDTWDVQLDSV

SEQ ID NO: 50430 - protein, 950 aa, Zea Mays
MAADRAWMYNGWSRNGRHSDDWVAKTKEFVDHVFALSLTGTVRCPCRHHENSIFLNKERVSLDLCQFGFMPGYEVWEHHGEVVPNRNVEEEENNDWAGDDAMHEMLDSLRPEFNLSSEDPATPEEEEDDEEEVQHHEEEDEQAHEEDDEEEVQHHEEEDEQAHEGIDAEADDDTTEAPVVRRRGTRKGHFVLPPSAPAQSEARVLIIPVGDSQWEDTSFDGRGHHRQVNQVLGKRRYRVEPEAQEHADRVLEKNAKKVCRDAFSNARLQVGNAYMKRRGHSINNFRQYSDVYLTVDEYMEVTLPWMEHRPQAYKALCEIWASPEWIEKSNRNRHRQRHQQDEDDDEVVVNHTYGADGHIRLAKRMEAQTGVVPSPIDVYRRGHRAKNNEISDELCSQAVVERMETYGQEMVKKYGEDYDWRGAPTIDAEVVHSLGGKAHGRYSMFTGVIDSTELRSRGGSSSQAGCGSSRHSRRSVSSMEEAMREQQEKFREELRQQQMAFLQQQSEYMVAYNAQAQQAMNSWFPQQAQQQPFVFPQFQLSMPQWGLHAPTPPPPHQGSRVIGHNTPSLVISAPGGAYAGEGAYAGEDPNPSHGFVNQFLASEASKCLGGASGLNSTQMVTLKVDASPKLARKIPDTFLGVFFEEMGHGGAGGIWAELVSNRGFEAGGPNTPSNIDPWLIVGDDSSVYVETDRSSCFSRNIVALRMEVLCNDCPAGGVGIYNPGFWGMNIEDGKTYHLVMYVKSPKTTCLTVSLTSSDGLQNLASVTIIVAGDSKWIKVEKKLVAKGTNRTSRLQITSKKKGTVWLDQVSLMPADTYKGHGFRKGLVSMLMDLKPRFLRFPGGCFVEGGWLRNAFRWRQSIGPWEERPGHFGDCWQYWTDDGLGYYEFLLLSEDIGAAPIWVFNNGISYNDEVNTATIAPFVKDILDSLEFARGSANSTWGSVRAKMGHP

SEQ ID NO: 50431 - protein, 2226 aa, Zea Mays
MEAAAPDGAGKASPAPEEPDWPPELRLLAPPPAAGTDDPQFLSSIIGDAAAPPPPMPPLAQKRKRGRPPKRKDGAGAVVPARPARRREDEEEVVCFICFDGGNLVVCDRRGCPKVYHPACIKRDEAFFQSRSKWNCGWHICSSCEKAVHYMCYTCTYSLCKVCIKQGKFFSVRGTKGFCDTCYGTILLIESKDESAIKVDFDDILSWEYLFKLYWLDLKGKLSLTLEELTIAKTRWNVPSTSARKEKDESSDDLYDANNDDDAGTDCSSGKRRRTNSRKKGQKCRKVNKDCSVPAKKVELPITNTESVPTEVTNERVPLPVDTKVPNGWVPLPVDTKVPNESVPLPANTKWASPELLEFVGHMRDGDQSFISQFDVQTLLLDYIKKNNLRDPQRKSQIICDLRLHRLFRKARVAHFEMLKLLEMHFLMNETSTVTDSRQVTIDLNSAYVDTNGYNDMAAKFSPDKRRKIHRKMERDTQVNLEDYAAIDMHNINLIFMRRSLMEDLVDDAKFSDKIHGGFVRIKISDVYQKQDIYRLVKVTGTHKVPEKYSIGKKMTNFALEILNLNKKEIITMDTISNHDFTEEECKRLRQSMKCGVISRLKVGDILEKAKILQSVKVNDRLGHLRDRASETGRRKEYPIRPYYDVLLNDSEERTRRINEVLEVHVDSHMDPNYESAEETDEKRTVGKSVDRTRPDTTISRRISRYLSTMQNHPQKVSDCSHHPKNLSTESTICGSGARSLENSTANRTMYEAGSFSSSGVTMSNDTEPEKVWHYKDPSGNVQGPFTLLQLSKWTSYFPRDLRVWLTFESEERSLLLTEVLSKQQKDFTQAASHTSSKATLVGTGHTRNNPSVDQTNAFSPAGHSVVSSSGITVQYNKYSVPERESVYSPDDSLSLSTSSVPPKDACTVNSQTHCQNKHSVFIQSPGSAYGHTDLNHDGIQGGCSGESNHHHSSGALWSPTVVQVSCGHGNVESHQSQHVSWSQSQHESKNSSQRPVKDLNSRRDLSKNLPTQRIGKDVSSPLFACAWSPAESRTASSQHDGSCLSSTTNPNFLDELHYSIASAKPKSCAPATPIEDRGSSSPSGMLSHAERVPICSPQSTPLASAFDMCKMEEIMNQQRTLEPDTSNASINQSPESKIFPVSSPDNHDIDREFPSPVPRSENKDIAVDSSGLTPASPENITTNLPGSDTCKMEVMSQQQVTEAVVSNSSDNHSPQSKVSPVSSPNNEDMKHQYPSSTRRSENKIPAVDNLLSTSAARENLTTTSAHDSDTCKMVELVNQPKTPEVDASNAPLCQSPHSHTSQVPSDNQDIERECPGPTPRSDSKEPLVNNSATTSASASDTIKMEEFVNQQKTVEADASNAPLNQSHSHIFPVPSDSQDIEHECPGPTPRSDTKEPLLNNSVLTLAASEILTTTSAASDTCKMEDSVNQQKTLEADALNAPLNHHPHSHVLPVSFDNQDIQHEYPSPTPKSDSKEPLVDNSVLTSVGPEMLATTSVSDTCKTEEFVNQQKAVEADASNASLNQPHISAVPSDKQDIECECSSPTPRSDCKEPLMDNSVLTSAVPEILATSSASDKCKMEEFVNQQRPIEVDASNASLNQYSRCHIFNVSSDNQYVERECSSTTPRSDCEEPLMDNSILTSAVPEILATSSASASDKCKMEEFVNQQRPIEADASNASLNQPHRCHIFTVSSDNQDIECECPSPTSRSDSKESLVDNLVLTSAVPENLPTSFAVASDSCKMEILNKKRTLEADASNASLDQPSHSSVFTSSSNDNQGNACERPSPNPRPEGEQPLMDNSGLTSPVPQNLTSASDICKMGEILNENRTLEANPSNGSITQSHQSKVFLVPSIDILERECSSETPRPQFKEPVVDSSGLTSAAPESLTAKQHVHSPDAFIPPKHGAPTGELGDAKSDFKGEEIIQKEQYCEREPIVATRENLLIDLSCGAESIDVSDVLESLMEERSVTSYVPVSIEDFLAASAVEEPQYSSPIALSPWGEPSYYQGDAGDSALWGIQDSINDMWSLLSPRPMLQASSGIGTEGKETFDINEVAVTHVNSDFFQRGSMLGEENMNQANLSVAADRMLLPEQVPSIPNGMSTSSVDEGTRVIGSQASINQSLDWGTTWRTSQNLSVYSNEIAGPSSKSYWEESRKQEATNSGVSISGEAIRNKRLNPPDNAIRGSHHHRGRYSQISESWLLSSNHSRSSSAKFGSGGSSRSTSKGQTRG

SEQ ID NO: 50432 - protein, 2102 aa, Zea Mays
MEAAAPDGAGKASPAPEEPDWPPELRLLAPPPAAGTDDPQFLSSIIGDAAAPPPPMPPLAQKRKRGRPPKRKDGAGAVVPARPARRREDEEEVVCFICFDGGNLVVCDRRGCPKVYHPACIKRDEAFFQSRSKWNCGWHICSSCEKAVHYMCYTCTYSLCKVCIKQGKFFSVRGTKGFCDTCYGTILLIESKDESAIKVDFDDILSWEYLFKLYWLDLKGKLSLTLEELTIAKTRWNVPSTSARKEKDESSDDLYDANNDDDAGTDCSSGKRRRTNSRKKGQKCRKVNKDCSVPAKKVELPITNTESVPTEVTNERVPLPVDTKVPNGWVPLPVDTKVPNESVPLPANTKWASPELLEFVGHMRDGDQSFISQFDVQTLLLDYIKKNNLRDPQRKSQIICDLRLHRLFRKARVAHFEMLKLLEMHFLMNETSTVTDSRQVTIDLNSAYVDTNGYNDMAAKFSPDKRRKIHRKMERDTQVNLEDYAAIDMHNINLIFMRRSLMEDLVDDAKFSDKIHGGFVRIKISDVYQKQDIYRLVKVTGTHKVPEKYSIGKKMTNFALEILNLNKKEIITMDTISNHDFTEEECKRLRQSMKCGVISRLKVGDILEKAKILQSVKVNDWFENEKQRLGHLRDRASETGRRKEYPIRPYYDVLLNDSEERTRRINEVLEVHVDSHMDPNYESAEETDEKRTVGKSVDRTRPDTTISRRISRYLSTMQNHPQKVSDCSHHPKNLSTESTICGSGARSLENSTANRTMYEAGSFSSSGVTMSNDTEPEKVWHYKDPSGNVQGPFTLLQLSKWTSYFPRDLRVWLTFESEERSLLLTEVLSKQQKDFTQAASHTSSKATLVGTGHTRNNPSVDQTNAFSPAGHSVVSSSGITVQYNKYSVPERESVYSPDDSLSLSTSSVPPKDACTVNSQTHCQNKHSVFIQSPGSAYGHTDLNHDGIQGGCSGESNHHHSSGALWSPTVVQVSCGHGNVESHQSQHVSWSQSQHESKNSSQRPVKDLNSRRDLSKNLPTQRIGKDVSSPLFACAWSPAESRTASSQHDGSCLSSTTNPNFLDELHYSIASAKPKSCAPATPIEDRGSSSPSGMLSHAERVPICSPQSTPLASAFDMCKMEEIMNQQRTLEPDTSNASINQSPESKIFPVSSPDNHDIDREFPSPVPRSENKDIAVDSSGLTPASPENITTNLPGSDTCKMEVMSQQQVTEAVVSNSSDNHSPQSKVSPVSSPNNEDMKHQYPSSTRRSENKIPAVDNLLSTSAARENLTTTSAHDSDTCKMVELVNQPKTPEVDASNAPLCQSPHSHTSQVPSDNQDIERECPGPTPRSDSKEPLVNNSATTSASASDTIKMEEFVNQQKTVEADASNAPLNQSHSHIFPVPSDSQDIEHECPGPTPRSDTKEPLLNNSVLTLAASEILTTTSAASDTCKMEDSVNQQKTLEADALNAPLNHHPHSHVLPVSFDNQDIQHEYPSPTPKSDSKEPLVDNSVLTSVGPEMLATTSVSDTCKTEEFVNQQKAVEADASNASLNQPHISAVPSDKQDIECECSSPTPRSDCKEPLMDNSVLTSAVPEILATSSASDKCKMEEFVNQQRPIEVDASNASLNQYSRCHIFNVSSDNQYVERECSSTTPRSDCEEPLMDNSILTSAVPEILATSSASASDKCKMEEFVNQQRPIEADASNASLNQPHRCHIFTVSSDNQDIECECPSPTSRSDSKESLVDNLVLTSAVPENLPTSFAVASDSCKMEILNKKRTLEADASNASLDQPSHSSVFTSSSNDNQGNACERPSPNPRPEGEQPLMDNSGLTSPVPQNLTSASDICKMGEILNENRTLEANPSNGSITQSHQSKVFLVPSIDILERECSSETPRPQFKEPVVDSSGLTSAAPESLTAKQHVHSPDAFIPPKHGAPTGELGDAKSDFKGEEIIQKEQYCEREPIVATRENLLIDLSCGAESIDVSDVLESLMEERSVTSYVPVSIEDFLAASAVEEPQYSSPIALSPWGEPSYYQGDAGDSALWGIQDSINDMWSLLSPRPMLQASSGIGTEGKETFDINEVAVTHVNSDFFQRGSMLGEENMNQANLSVAADRMLLPEQTRAPEL

SEQ ID NO: 50433 - protein, 282 aa, Zea Mays
MQDVFHVQLIKCAAVLDAQDRQRRAEGEGQQVEQPDALGGDEEALKQLLGPRPGPGKRRHDDAHLPVAETAEVLAVVLGALPQNLVPAKVAQRHEGCEALPAVFRRVEAPRRAVPLERGVLEVLEHDLVHDRLKMVQHGLRAVFADAAAAERELVRAKEQVQLVGQAVTGLFVHLLDQRLAELLHREPRLRRDLQEAFHHHLVAHRHRELSAGFDRFRRSPGDGRRVGGLPQCLLELRAVRFHAHQLGGQLPQRRPHLGSFVQGGVPVRVGLRELFLEGLHR

SEQ ID NO: 50434 - protein, 621 aa, Zea Mays
MEIFRKLDGLARDIERSQPPVDLWRKFVYCTSLSGSVLGSVDHMKQEDFDKVISPVSVAHFSQYKLVDLLLKKLEGIGFQTCFPSEIGNSTQDLVLESKILMGHKCTSLDQTDEGILVGASVNNGGMIIERKLHCGLLIGTDGARSTVRELAGISMEGERDLQKLVSVHFLSRDLGRYLSSQRPGMLFFIFNPGAIGVLVAHDLENGEFVLQVPFYPPQQMFEDFSAKVCEQIIFKLVGWEPADVHVLDIKPWAMHAEVAEKYICCNNRVILSGDAAHRFPPAGGFGMNTGVQDVHNLAWKLGLLLNGVASPSILQTYESERRPVAIFNTELSVENFKAAMSIPTTLGLDPTVANSVHQVINRSLGSIIPRNVQKAVLEGLFSLGRAQVSDYILNEKNPIGSLRLARLRSILDEGKSLQLQFPAEDLGFHYAEGALVVEASCEKTHEGEKLQHSKRASREYIPSAKVGSRLPHMLVREVPASSEGAFSTLDLVSGDKLEFVLIIAPVKESYEIARATLKIADELTLSARVCVMWPRGSTDAEVEESRSELTPWTNYIDVEEVPRVSGGSWWEMCRISRKSVLLVRPDEHIAWLTELDRVRDAESEIRRVFSHVLCLNSHRV

SEQ ID NO: 50435 - protein, 690 aa, Zea Mays
MMEEEERKKRMFRQLNSEHSSLSGTFTCFSVDGSKSLCKGNPSSASANSLLKIRNVQRGPQKRIAWDNELLYVPKEGITEMLRSFMDQFLSGAYNILMQSVCGDIMDEHHSIEKSDITTFFKVARFVLAFQHEKASNDQLPQLYLGLFVMNIITMSIQKSAKGIQPSGVSPSNEPDDNLPFHGDICGPVAATLNEDMFNIVISRWRETYEALKETNDYKTLSAAGSLMKNMGSHFNLDSLSSYLKVYKKTRSVGHLALQIDMIYLVLKVLPEDSRESQTARVLLYKLFYDQTEHGLTQFLLNLFRSFDSHKQPKSDLVDLLETIHIMLQLMEKLQARGALRVAKKTKKVRRKKSTNDKKENSEPKVDNAEPNDANPTDGTKCSPETLPDLRSEGPALESSPSEPGKVDTSGAHVLDTLVDTVVNIESTAHAEGDPSCTDSGVMKRNLIEEEGETSDSSVDHQPATSEVDFNVSRLISSLANNSVVQNICWLLKHYKSNSYRTNHYIICMLRRFCEDLELSPMLYQLSLLTTFYDILAEQKLSSSKEYTNIVNFLSKVVRKMLRTIKKQPLLFVDILFWKTRKECHCIDADALLNELKNDVGSKDSEIGSSKGWRDRINIADSLGDDEVDVVIPQAPYDADKDGDLSAGEHTDDFRKSSTKYKRSRLSLSDSEADEIERFLYALLYLNTAN

SEQ ID NO: 50436 - protein, 836 aa, Zea Mays
MTNDKCDKLQTLFSEDDWKLVQLVLTLFRNVLAIQEITLTQKASGEATHLLFLSDNFLELMFQENVMDIILVLTQHIDEPSGYLKEENLLLMEIYHYLFLGRDPGLIARASNKGLKDRVNGDIVSSVDSLRLMMEEEERKKRMFRQLNSEHSSLSGTFTCFSVDGSKSLCKGNPSSASANSLLKIRNVQRGPQKRIAWDNELLYVPKEGITEMLRSFMDQFLSGAYNILMQSVCGDIMDEHHSIEKSDITTFFKVARFVLAFQHEKASNDQKSAKGIQPSGVSPSNEPDDNLPFHGDICGPVAATLNEDMFNIVISRWRETYEALKETNDYKTLSAAGSLMKNMIDMIYLVLKVLPEDSRESQTARVLLYKLFYDQTEHGLTQFLLNLFRSFDSHKQPKSDLVDLLETIHIMLQLMEKLQARGALRVAKKTKKVRRKKSTNDKKENSEPKVDNAEPNDANPTDGTKCSPETLPDLRSEGPALESSPSEPGKVDTSGAHVLDTLVDTVVNIESTAHAEGDPSCTDSGVMKRNLIEEEGETSDSSVDHQPATSEVDFNVSRLISSLANNSVVQNICWLLKHYKSNSYRTNHYIICMLRRFCEDLELSPMLYQTRKECHCIDADALLNELKNDVGSKDSEIGSSKGWRDRINIADSLGDDEVDVVIPQAPYDADKDGDLSAGEHTDDFRKSSTKYKRSRLSLSDSEADEIERFLNHVSRDSVPKVPKRRGRSLFTEEQERLIRDLYEKYKDGPKCSHIIAESLDPSGKISSAQVSRKLTQLGLRNVTRRKKVAGPEGKNYTRQVMTMMTQVRENHLMKTHYKYLKADQKVRKFHWWIVH

SEQ ID NO: 50437 - protein, 624 aa, Zea Mays
MTNDKCDKLQTLFSEDDWKLVQLVLTLFRNVLAIQEITLTQKASGEATHLLFLSDNFLELMFQENVMDIILVLTQHIDEPSGYLKEENLLLMEIYHYLFLGRDPGLIARASNKGLKDRVNGDIVSSVDSLRLMMEEEERKKRMFRQLNSEHSSLSGTFTCFSVDGSKSLCKGNPSSASANSLLKIRNVQRGPQKRIAWDNELLYVPKEGITEMLRSFMDQFLSGAYNILMQSVCGDIMDEHHSIEKSDITTFFKVARFVLAFQHEKASNDQKSAKGIQPSGVSPSNEPDDNLPFHGDICGPVAATLNEDMFNIVISRWRETYEALKETNDYKTLSAAGSLMKNMIDMIYLVLKVLPEDSRESQTARVLLYKLFYDQTEHGLTQFLLNLFRSFDSHKQPKSDLVDLLETIHIMLQLMEKLQARGALRVAKKTKKVRRKKSTNDKKENSEPKVDNAEPNDANPTDGTKCSPETLPDLRSEGPALESSPSEPGKVDTSGAHVLDTLVDTVVNIESTAHAEGDPSCTDSGVMKRNLIEEEGETSDSSVDHQPATSEVDFNVSRLISSLANNSVVQNICWLLKHYKSNSYRTNHYIICMLRRFCEDLELSPMLYQRNKSCLVQRSTQTL

SEQ ID NO: 50438 - protein, 191 aa, Zea Mays
MFDDVVIFIQPTVRDISTVLDILHIFGEASELRTNIQKSNVYPIRCGEQDLTLLQNSSPCEISQFPCKYLGLPLAIKELTKDQVQPIIDKIANQLTGWKADLMTKARLKVHVQFVLTWMVIYLAMAVDLPPWAIKVLTRSDEAFFAEGAKKRGKDTVLLLGEKFVGRLSLVGWGFPISMILLGHFVCVGSG

SEQ ID NO: 50439 - protein, 912 aa, Zea Mays
MARVERQPRNPSRLAPTSHPAPALPTTPAARRPGTPRNAAQGTVCATCVCGSGNNARCHCKQDARHNQTHHGNDGTATAGGIAKPDSQDKLKMARFSGGTYSKPDARVKLIPAEDITYLQRRKPCGRTVGSVGSQKRHCRRSVTPPPSSRRVSLLGSRSLAENPIPSVSSHDSCLPHKRLETAENRDPCAGGHISSSVTPCTSLKNLASPSCKSSQPLSTNLNTDATPRNLDRMVGIQTQALARSSSSSILHSQGQNSEKVSASLPKEAVTNPASPSPKQIGAQHPSDNPLVTKAGPSKSVCTHESEKLCSRDINLTATSTTVPVLQAPVVEPALLSSTSVFTERPFEVYPDTRTAAPGMQELSVKHVLLTPIPVRHEPSTECLKVPPKHSLHSIASAQHGALSQERNSGASISHGRSSASEFHRNMDIVDTGALSILHMKLAKKHYQSQACWKGNFHVTGGLIHTCDGLEAHFPLEISVRVYEASNQMPEILNLEAVPISQLWPKKFKMVPPDIEDIGLWFLSSRQRPHWSFDHLLEKVCSHTGLFTKIGDIELAVFSSKLLTPQDQRKDGKLYFWGVFGKHMRKKSCQPNSHIKNVEISNPSQPNGKSEEVGMKLDMRKGKEKESAKSDEVLDSTGGNDTDRVNGCVAVLEAPDSDPASSCSVPAASSLGGYCHHDSAKNSSSILDSSCQPADGSSVSPDLMLDIPPGISAHIPPGFTKAHCQLQMGTAALSFADRHRSLISDIPPGFTEVHRGLPPAIPPAGPACVSTPGTEKKPFVRFSLNVPRPVGMGAPPGFTPLHAVKKEPGLPDVHETADKHTLHSLAAAAAAVVKPGKGGEMKIADNEVKTEQDENSEERDFPKIRRLSDLYCRPSEDSTEFSQRMPARLPDKFQEQRPEKRLVHPREEVGRR

SEQ ID NO: 50440 - protein, 715 aa, Zea Mays
MAQKWGNIYIVNPKWVDQSVARRACQDENSYLVCQTSSAFSGSKSSHKEQQNPEISSASASFQPVPATSVDDSVSMSQHLPASFGDASRISSTDIVGAPSVQETDDMQVDSHIAEDSEPENDDLYLSNCRISLVGFEEKELLRLVMLIRNGGGSRHILLSEKLTHIVIGTPSDEEKKEVRRLAAWGVINIVKVTWLEDCNKAKKEVKVSSMHIATELLLKGFSQVSMENSADTRETKVAKSSGGIFHVPTVNDLHEKHHEKGVSSERKPKRGKHENSISKTRSAARTEKSSQQNGLANVSEYQLQYKVTSIMNSGSSRSNIFKGRTFSFSNSFSHDKRPEVVDWVRDGGGVMVDDIHSTAADFIIECHGQNSLPCDFSHSLVSTQWIRSCLEENCLQDVGSHPIFSPLRCRIPFPGFESFRFCISLSQYGEKERHLLKNLCFLLGAKFTDKAYKGVTHLICKFASGLKYEVYSKRGTPTITSEWLYECVKQDKLLPVDHFQPKPLTSQDKDAYPCTASQYSTQATRFDSSELLSGCQVTKNNATHNSGNSGIFAVNEETTMPAVSRKRRISVPGKVNGICGNIEKTEKQLDNSSVPDVADAIEVLSSKIQDVQSPRSIFQPDNSVVQEQKDTHSFDISRSWLNMQQKQDSTSVTKVQNLNSVPVPSPAPTTYYPFSETQTESQVVGYEEDLTGRQKIIDRVRSQSINVTPSSEIL

SEQ ID NO: 50441 - protein, 855 aa, Zea Mays
MMIHLVQAKLNRKGGNSQTLIPNGARMNLQIFMKPTVNMGWTGESIAIGTKSSDMVQSLFTLHRTFLSLPEHQATAMGFIALVTGHHNASEKTTTHRGYDHVVRASGKARKHGEKPKSIDGPDLPNCQEAKISGFSDLFQSRYYGELVRYIRNHAVRRRTPRIPAIVSADRSTIDEATPGIENVISSTKRKYEAANNDSAIVPTNKYSPDRVSGFAEAHKAGQDHCLLETIGTGHVATCQQHSKKTRIQQTMEEGQTGVVDHETTMASKEGNKPVDLLNNNQLFIDNISEDDMLVLDVLCSLMNAPSKMPKLEINIPSGSVGKTDSTLSQRREEGHPTIDLSKQGKPVGKSSASKTRKKKYKILDAEVPAVAQNVCGNSLALPETLRVVITDDSSLCTDSGRVGIPEASEDIPAEVPSAQTETKPEVRMSGRTRRKSQMHCKTKHMSCNEGSDNLQAKKLLHCLSSEPLRRWCTYEWFYSAVDYPWFSSNEFVHYLDHAKLSHLSRLTIPEWGTIRSSLGIPRRFSNYFLAVEKENLEDYREKVRKIYAQLSDGSRDFLPADLARPFSIGQQVIVRHPNSRELCDGKVVMMGPDCYKVHFDDPDIGVDIVKDTDCMPVNWLYNRPDNMRSCLSNDAYSILEMDHIPDLTASENEDHAVNGSTVLEGLKSLRLTSDRQPKAESIVNSERPPYRSTSDSPAKSRDCPDNNSAGHYDELESYIAAFAERSLSQARQMVDKAMQANPGGNEDEKVCTSNQVAGCAGPGFEPARGAQLPSDLISNGIATVLSIKSLSDSRHPFANVAGVLDHACSMLRPSCPQNLALYDQIKRDIGIIKTQIFALMPTALGNCSPPVPPM

SEQ ID NO: 50442 - protein, 883 aa, Zea Mays
MGPSKGSRTINKIIVKGSEYQQQHDDPSSSSKAKQKRRKLSDFDPKWSKDELTNFYEAYRQYGMDWRKISIAIGTKSSDMVQSLFTLHRTFLSLPEHQATAMGFIALVTGHHNASEKTTTHRGYDHVVRASGKARKHGEKPKSIDGPDLPNCQEAKISGFSDLFQSRYYGVSSELVRYIRNHAVRRRTPRIPAIVSADRSTIDEATPGIENVISSTKRKYEAANNDSAIVPTNKYSPDRVSGFAEAHKAGQDHCLLETIGTGHVATCQQHSKKTRIQQTMEEGQTGVVDHETTMASKEGNKPVDLLNNNQLFIDNISEDDMLVLDVLCSLMNAPSKMPKLEINIPSGSVGKTDSTLSQRREEGHPTIDLSKQGKPVGKSSASKTRKKKYKILDAEVPAVAQNVCGNSLALPETLRVVITDDSSLCTDSGRVGIPEASEDIPAEVPSAQTETKPEVRMSGRTRRKSQMHCKTKHMSCNEGSDNLQAKKLLHCLSSEPLRRWCTYEWFYSAVDYPWFSSNEFVHYLDHAKLSHLSRLTIPEWGTIRSSLGIPRRFSNYFLAVEKENLEDYREKVRKIYAQLSDGSRDFLPADLARPFSIGQQVIVRHPNSRELCDGKVVMMGPDCYKVHFDDPDIGVDIVKDTDCMPVNWLYNRPDNMRSCLSNDAYSILEMDHIPDLTASENEDHAVNGSTVLEGLKSLRLTSDRQPKAESIVNSERPPYRSTSDSPAKSRDCPDNNSAGHYDELESYIAAFAERSLSQARQMVDKAMQANPGGNEDEKVCTSNQVAGCAGPGFEPARGAQLPSDLISNGIATVLSIKSLSDSRHPFANVAGVLDHACSMLRPSCPQNLALYDQIKRDIGIIKTQIFALMPTALGNCSPPVPPM

SEQ ID NO: 50443 - protein, 856 aa, Zea Mays
MATMSAASHRCCASSLRALTVLFVLAALVSDVGGRHHHHVCRPYFSCGGFSNISYPFRRQGDPSGCGVQSYELVCTDTDATIRIGSGTYTVLSINSTYSYFWVVDANLDIQSSCPLPWWDYHGETSTANSYRRRTEFRPYFLYPNSMSIIFVNCSKPIENNDIYEPVPCLSNSSFIYLLTHYSYGYALAEILEPSCGYLAMIYLGGPGIPVPKNTSYPDVVKLMRNGFGLRFPSSIGDRGIRECFAESVRNFLKEPRKYQIVDILMVEELWSCFLDQHGSTNNVVTSVIIDIIKTIPICMWLLKSTHVFCRLVLMPLAVFVFLAHKYWKARITIDAVEKFLRMQQMLVPMRYAYTNIIAITGHFREKLGQGGYGSVYKGVLQPGEVHVAVKMLGNSNCNGEEFISEVATIGKIHHFNVVRLIGFCSEENSRALIYEFMPHGSLDKYIFSSEKSFSWDKLNEIALGIARGLNYLHHGCDMQIVHFDIKPHNILLDSNFVPKVADFGLAKLFPRDDSFVPLSAMRGTIGYIAPEMVSRSFGVISSKSDVYSFGMLLLEMTGGRRNADPHAGSSSQAYYPSLVYNQLSQGDVGEISEGVDMHELKKKLCIIGLWCIQMKPQDRPTMSEVIEMLEAGVDGIQMPSRPFFCDDEVICRFVLMPLIVFIFLAYKYWKTRITIDAIEKFLRMQQMLVPMRYAYTNNIAITAHFKDKLGQGGYDTIYKGVLQSGEVQVSIKMLGNSNYNSEEFISEVATIGKLHDVNGVRLIGFCSEENRRALIYEFMPRGSLDRYIFSSEKSFSWDKLNEIALGIARGLNYLRHGCDMQIVHFDIKPHNILLDNNFVPKVADFGLANQTIPKI

SEQ ID NO: 50444 - protein, 316 aa, Zea Mays
MSTKKVLCKFFMHGACLKGEYCEFSHDWSDQANNVCTFYQKGACSYGSRCRYDHVKVSRNPTVPPPRPTSSTSRRASTSLQLSSYNHPPHMVHQTDSSNQRHQISVDVLAHSASKPAWRNDFQHDIVSDDGIDWSSNQNLINQTSLKPVDLPICSFAAAGNCPYGEGCPQMHGDLCATCGKLCLHPYRPDEREEHIKLCEKNHKRLVALKRSQEIECSVCLDRVLSKPTAAERKFGLLSECDHPFCIECIRNWRSNSPASGMDVNSALRACPICRKLSYYVIPSVLWYFSKEEKEEITESYKSKLNMPTEMAAWKR

SEQ ID NO: 50445 - protein, 1257 aa, Zea Mays
MAPINSGNMEQHSQRLLEPDLPVQVRLQLAMEVRDSLEMTHTPDYLNFLRCYFRAFSAILTAYTKPQATENAEHKLRNVVIEILNRLPHSEVLRPFVQDLLKLSLRVLTQDNEDNALLAIRIVFDLLRNFRPTVEAEVQPFLDFVVNIYHKFPTTVSYFFDNPNTSASMAASMPMQHLDPTADASVMMQVPGGGQLNPSARSFKIVTESPLVVMFLFQLYAKLVQTNIPHLLPLMVAAISIKGPDKVPPHLKTPFNDLKGAQVKTLSFLTYLLKSNADYIKSYEESICKSIVNLLVTCPPDSVSIRKELLVGLKQVLNTEYKRGLFPLIDTLLDERVLIGTGRVCIETLRPLAYTLLAELVHYVREDISLPQVEPIYQKGVDQQSMDEARVLLGRILDAFVGKFRTLKRTIPQLLEEGEEGKEQPNLRMKLEVPLQTVLNLQQPLEYTKEINDYKSLIKTLAVGMKTIIWSITHAHWPRPQQQNQQSSNLSLQHFRGLREDEVRKTSGVLKSGVHCLALFKEKDDDREILQSFSQMLAIMEARDIMDMFSFCMSDLFDSMITNNQLLHIFSTLLQAPKVLRPFTDVLINFLVSSKLEALKQPDSPAAKLVLQLFRFLFIAAAKAPESCERTLQPHVPVIMEVCMRSATEVEKPLGYMHLLRNMFRALNSAKFDSLMRDLIPSLQPCLNMLLSMLDGPISEDMRDLILELCLILPARLSSLLPHIPRLMKPLVLALKGSDDLVSLALRTLEFWIDSLNPDFLEPSMANLMSEVILALWSHLRPPPYTWGTKSLELLGKLGGRNRRFLREPLALESKENPEHGLRLVLTFEPATPFLVPLDRCIHQAVGAVMQGNGLEAFYRKKALQFIRVCLDSLLNLRENVPGEGVSPGVLGTLLISNLDPSRRRNDASDMKGDLGVKTKTQLLAEKSVFKTLLVAIIAANADTSLHDEKDDYVVDICRHFAMLFHVDSPSSSQSGFMHPIGSSLPSIIMGSRSRCNTSSNLRELDPLIFLDALVEVLSSENRQHAKAALSALNIFAETLIFLARMKHTGMLRGGPSTPMLVSSPSLNPVYSPPPSVRVAVFEELLPRLLHCCYSSTWQAQMGGVMGLGALVGKVSVDTLCIFQVRVVRGLLFVLKRLPVHANKEQEETNHVLTQVLRVVNNADEANSEPRRQSFQGVVEFLAQELFNPNASMVVRKNVQACLSLLASRTGSEVSELLEPLYLPLLQPLISRPLRSKNIEQQHYKLPRLMKLYGSLG

SEQ ID NO: 50446 - protein, 2673 aa, Zea Mays
MAPINSGNMEQHSQRLLEPDLPVQVRLQLAMEVRDSLEMTHTPDYLNFLRCYFRAFSAILTAYTKPQATENAEHKLRNVVIEILNRLPHSEVLRPFVQDLLKLSLRVLTQDNEDNALLAIRIVFDLLRNFRPTVEAEVQPFLDFVVNIYHKFPTTVSYFFDNPNTSASMAASMPMQHLDPTADASVMMQVPGGGQLNPSARSFKIVTESPLVVMFLFQLYAKLVQTNIPHLLPLMVAAISIKGPDKVPPHLKTPFNDLKGAQVKSNADYIKSYEESICKSIVNLLVTCPPDSVSIRKELLVGLKQVLNTEYKRGLFPLIDTLLDERVLIGTGRVCIETLRPLAYTLLAELVHYVREDISLPQLSRIIYLFSRNMHDSSLTLIIHTTSARLMLNLVEPIYQKGVDQQSMDEARVLLGRILDAFVGKFRTLKRTIPQLLEEGEEGKEQPNLRMKLEVPLQTVLNLQQPLEYTKEINDYKSLIKTLAVGMKTIIWSITHAHWPRPQQQNQQSSNLSLQHFRGLREDEVRKTSGVLKSGVHCLALFKEKDDDREILQSFSQMLAIMEARDIMDMFSFCMSDLFDSMITNNQLLHIFSTLLQAPKVLRPFTDVLINFLVSSKLEALKQPDSPAAKLVLQLFRFLFIAAAKAPESCERTLQPHVPVIMEVCMRSATEVEKPLGYMHLLRNMFRALNSAKFDSLMRDLIPSLQPCLNMLLSMLDGPISEDMRDLILELCLILPARLSSLLPHIPRLMKPLVLALKGSDDLVSLALRTLEFWIDSLNPDFLEPSMANLMSEVILALWSHLRPPPYTWGTKSLELLGKLGGRNRRFLREPLALESKENPEHGLRLVLTFEPATPFLVPLDRCIHQAVGAVMQGNGLEAFYRKKALQFIRVCLDSLLNLRENVPGEGVSPGVLGTLLISNLDPSRRRNDASDMKGDLGVKTKTQLLAEKSVFKTLLVAIIAANADTSLHDEKDDYVVDICRHFAMLFHVDSPSSSQSGFMHPIGSSLPSIIMGSRSRCNTSSNLRELDPLIFLDALVEVLSSENRQHAKAALSALNIFAETLIFLARMKHTGMLRGGPSTPMLVSSPSLNPVYSPPPSVRVAVFEELLPRLLHCCYSSTWQAQMGGVMGLGALVGKVSVDTLCIFQVRVVRGLLFVLKRLPVHANKEQEETNHVLTQVLRVVNNADEANSEPRRQSFQGVVEFLAQELFNPNASMVVRKNVQACLSLLASRTGSEVSELLEPLYLPLLQPLISRPLRSKNIEQQVGTVTALNFCLALRPPLLKLSPELVNFLQEALQIAEADETIWVTRMMNAKVVLTWNKLRTACIELLCTAMAWGDLKAQNHTELRAKIISMFFKSLTCRTTEIVNVAKEGLRQVVQQQRMPKDLLQSSLRPILVNLANTKSLSMPLLQGLARLLELLSNWFNVTLGAKLLDHLKKWLEPEKLVQTQKSWKAGDEPKIAAAMIELFHLLPPAASKFLDDLVTLVIDLERALPEDQFYSEINSPYRAPLAKFLNRYVLEAVDYFLARLSHPKYFRRFMYIICSDTGDLRDALARSPQKILASAFSQFYSQSEASAAQLSSVKDEALTGAVSESITVQSSSNMVTTSESYFNGLELVSALVKLMPEWLRNNRVVFDTLLLAWKSPARLARLQNEQDLSLPQVMESKRLIKCFLNYLRHDRTEVGALFDMLSVFLYRSRIDYSFLKEFYVIEVAEGYSPNLKKTILNHFLNIFQSKQYGQDHLVVTMQILILPMLAHSFQNGQSWEVVDPTIIKTIVEKLLDPPEEVSAEYDEPLRIELLQLATLLLKYLQTDLVHHRKELIKFGWNHLKREDNSSKQWAFVNVCHFLEAYQAPEKIILQLKLIVRHADLFYSCRAHFVPQMVNSLSRLGLPYNTTAENRRLAIELAGLVVAWERQRQSEMKVAQESESQNQLGDMLNPSVIGGDPKRSSDVPSFADDLSLPDEEYKPNAAMEEMIITFLIRVSLVIEPKDKESSSMYKQALDLLTQALEVWPNANVKFNYLEKLLGNLSPTPQSKDPASALAQGLDVMNKVLEKQPRLFIRNNINHISQILEPCFGNKMLDAGKSLCSLLKMVFSAFPLEAATTPQDIKLLHQRVQELIHKNLAAVTTQQIALELNNAHSIISFSLFVLNALAEVQKNFIDPFIGLLFRVLQRLARDMGSSAGSHIRQGQRPELDSSVNSRSTIDSTVISNMKTVLKLISERVMSSSDHRKSMGQILQALLSEKGTDSSILLCMLDMIKTWIEEDCRLASSTGSVSSLNPKEIITYLHKLSLVDRKSFPPAAQEEWDAKYLQLLYSLCADSTKYPLSFRQEFFHKIERQYMLGLRAKDPEMRKRFFKLYHDTVGKTLFSRLQFIIQLQDWEAVSDVFWLKQGLDLVLAILVENEPITLAANSARVPTLMIAGPVPDRITMPQQVPDAQESMDGTTLSFDSLAARHAQFLNDANKLVVADIMAPLKELAFADPNVAYHLWVLVFPIVWVTLHKEEQVALAKPIIALLSKDYHKRQQGCRPNVAQALLEGLHLSHPQPRMPSELIKYIGKTCNVWYIAIALLESHIVHMNEAKCSESLAELYRLLNEDDMRCGLWKRKSITAETRAGLSLAQHGYWQQAQNLFYQAMIKATQGTYNNTVPKAEMCLWEEQWLSCASHLGQWEVLA

SEQ ID NO: 50447 - protein, 2716 aa, Zea Mays
MAPINSGNMEQHSQRLLEPDLPVQVRLQLAMEVRDSLEMTHTPDYLNFLRCYFRAFSAILTAYTKPQATENAEHKLRNVVIEILNRLPHSEVLRPFVQDLLKLSLRVLTQDNEDNALLAIRIVFDLLRNFRPTVEAEVQPFLDFVVNIYHKFPTTVSYFFDNPNTSASMAASMPMQHLDPTADASVMMQVPGGGQLNPSARSFKIVTESPLVVMFLFQLYAKLVQTNIPHLLPLMVAAISIKGPDKVPPHLKTPFNDLKGAQVKTLSFLTYLLKSNADYIKSYEESICKSIVNLLVTCPPDSVSIRKELLVGLKQVLNTEYKRGLFPLIDTLLDERVLIGTGRVCIETLRPLAYTLLAELVHYVREDISLPQVEPIYQKGVDQQSMDEARVLLGRILDAFVGKFRTLKRTIPQLLEEGEEGKEQPNLRMKLEVPLQTVLNLQQPLEYTKEINDYKSLIKTLAVGMKTIIWSITHAHWPRPQQQNQQSSNLSLQHFRGLREDEVRKTSGVLKSGVHCLALFKEKDDDREILQSFSQMLAIMEARDIMDMFSFCMSDLFDSMITNNQLLHIFSTLLQAPKVLRPFTDVLINFLVSSKLEALKQPDSPAAKLVLQLFRFLFIAAAKAPESCERTLQPHVPVIMEVCMRSATEVEKPLGYMHLLRNMFRALNSAKFDSLMRDLIPSLQPCLNMLLSMLDGPISEDMRDLILELCLILPARLSSLLPHIPRLMKPLVLALKGSDDLVSLALRTLEFWIDSLNPDFLEPSMANLMSEVILALWSHLRPPPYTWGTKSLELLGKLGGRNRRFLREPLALESKENPEHGLRLVLTFEPATPFLVPLDRCIHQAVGAVMQGNGLEAFYRKKALQFIRVCLDSLLNLRENVPGEGVSPGVLGTLLISNLDPSRRRNDASDMKGDLGVKTKTQLLAEKSVFKTLLVAIIAANADTSLHDEKDDYVVDICRHFAMLFHVDSPSSSQSGFMHPIGSSLPSIIMGSRSRCNTSSNLRELDPLIFLDALVEVLSSENRQHAKAALSALNIFAETLIFLARMKHTGMLRGGPSTPMLVSSPSLNPVYSPPPSVRVAVFEELLPRLLHCCYSSTWQAQMGGVMGLGALVGKVSVDTLCIFQVRVVRGLLFVLKRLPVHANKEQEETNHVLTQVLRVVNNADEANSEPRRQSFQGVVEFLAQELFNPNASMVVRKNVQACLSLLASRTGSEVSELLEPLYLPLLQPLISRPLRSKNIEQQVGTVTALNFCLALRPPLLKLSPELVNFLQEALQIAEADETIWVTRMMNAKVVLTWNKLRTACIELLCTAMAWGDLKAQNHTELRAKIISMFFKSLTCRTTEIVNVAKEGLRQVVQQQRMPKDLLQSSLRPILVNLANTKSLSMPLLQGLARLLELLSNWFNVTLGAKLLDHLKKWLEPEKLVQTQKSWKAGDEPKIAAAMIELFHLLPPAASKFLDDLVTLVIDLERALPEDQFYSEINSPYRAPLAKFLNRYVLEAVDYFLARLSHPKYFRRFMYIICSDTGDLRDALARSPQKILASAFSQFYSQSEASAAQLSSVKDEALTGAVSESITVQSSSNMVTTSESYFNGLELVSALVKLMPEWLRNNRVVFDTLLLAWKSPARLARLQNEQDLSLPQVMESKRLIKCFLNYLRHDRTEVGALFDMLSVFLYRSRIDYSFLKEFYVIEVAEGYSPNLKKTILNHFLNIFQSKQYGQDHLVVTMQILILPMLAHSFQNGQSWEVVDPTIIKTIVEKLLDPPEEVSAEYDEPLRIELLQLATLLLKYLQTDLVHHRKELIKFGWNHLKREDNSSKQWAFVNVCHFLEAYQAPEKIILQVFIALLRTCQPENKLLVKQALDILMPALPRRLPPEKNDSRMPIWIRYTKKVLVEEGHSIPNMIHIFQLIVRHADLFYSCRAHFVPQMVNSLSRLGLPYNTTAENRRLAIELAGLVVAWERQRQSEMKVAQESESQNQLGDMLNPSVIGGDPKRSSDVPSFADDLSLPDEEYKPNAAMEEMIITFLIRVSLVIEPKDKESSSMYKQALDLLTQALEVWPNANVKFNYLEKLLGNLSPTPQSKDPASALAQGLDVMNKVLEKQPRLFIRNNINHISQILEPCFGNKMLDAGKSLCSLLKMVFSAFPLEAATTPQDIKLLHQRVQELIHKNLAAVTTQQIALELNNAHSIISFSLFVLNALAEVQKNFIDPFIGLLFRVLQRLARDMGSSAGSHIRQGQRPELDSSVNSRSTIDSTVISNMKTVLKLISERVMSSSDHRKSMGQILQALLSEKGTDSSILLCMLDMIKTWIEEDCRLASSTGSVSSLNPKEIITYLHKLSLVDRKSFPPAAQEEWDAKYLQLLYSLCADSTKYPLSFRQEFFHKIERQYMLGLRAKDPEMRKRFFKLYHDTVGKTLFSRLQFIIQLQDWEAVSDVFWLKQGLDLVLAILVENEPITLAANSARVPTLMIAGPVPDRITMPQQVPDAQESMDGTTLSFDSLAARHAQFLNDANKLVVADIMAPLKELAFADPNVAYHLWVLVFPIVWVTLHKEEQVALAKPIIALLSKDYHKRQQGCRPNVAQALLEGLHLSHPQPRMPSELIKYIGKTCNVWYIAIALLESHIVHMNEAKCSESLAELYRLLNEDDMRCGLWKRKSITAETRAGLSLAQHGYWQQAQNLFYQAMIKATQGTYNNTVPKAEMCLWEEQWLSCASHLGQWEVLA

SEQ ID NO: 50448 - protein, 2678 aa, Zea Mays
MAPINSGNMEQHSQRLLEPDLPVQVRLQLAMEVRDSLEMTHTPDYLNFLRCYFRAFSAILTAYTKPQATENAEHKLRNVVIEILNRLPHSEVLRPFVQDLLKLSLRVLTQDNEDNALLAIRIVFDLLRNFRPTVEAEVQPFLDFVVNIYHKFPTTVSYFFDNPNTSASMAASMPMQHLDPTADASVMMQVPGGGQLNPSARSFKIVTESPLVVMFLFQLYAKLVQTNIPHLLPLMVAAISIKGPDKVPPHLKTPFNDLKGAQVKTLSFLTYLLKSNADYIKSYEESICKSIVNLLVTCPPDSVSIRKARYDLELLVGLKQVLNTEYKRGLFPLIDTLLDERVLIGTGRVCIETLRPLAYTLLAELVHYVREDISLPQVEPIYQKGVDQQSMDEARVLLGRILDAFVGKFRTLKRTIPQLLEEGEEGKEQPNLRMKLEVPLQTVLNLQQPLEYTKEINDYKSLIKTLAVGMKTIIWSITHAHWPRPQQQNQQSSNLSLQHFRGLREDEVRKTSGVLKSGVHCLALFKEKDDDREILQSFSQMLAIMEARDIMDMFSFCMSDLFDSMITNNQLLHIFSTLLQAPKVLRPFTDVLINFLVSSKLEALKQPDSPAAKLVLQLFRFLFIAAAKAPESCERTLQPHVPVIMEVCMRSATEVEKPLGYMHLLRNMFRALNSAKFDSLMRDLIPSLQPCLNMLLSMLDEVILALWSHLRPPPYTWGTKSLELLGKLGGRNRRFLREPLALESKENPEHGLRLVLTFEPATPFLVPLDRCIHQAVGAVMQGNGLEAFYRKKALQFIRVCLDSLLNLRENVPGEGVSPGVLGTLLISNLDPSRRRNDASDMKGDLGVKTKTQLLAEKSVFKTLLVAIIAANADTSLHDEKDDYVVDICRHFAMLFHVDSPSSSQSGFMHPIGSSLPSIIMGSRSRCNTSSNLRELDPLIFLDALVEVLSSENRQHAKAALSALNIFAETLIFLARMKHTGMLRGGPSTPMLVSSPSLNPVYSPPPSVRVAVFEELLPRLLHCCYSSTWQAQMGGVMGLGALVGKVSVDTLCIFQVRVVRGLLFVLKRLPVHANKEQEETNHVLTQVLRVVNNADEANSEPRRQSFQGVVEFLAQELFNPNASMVVRKNVQACLSLLASRTGSEVSELLEPLYLPLLQPLISRPLRSKNIEQQVGTVTALNFCLALRPPLLKLSPELVNFLQEALQIAEADETIWVTRMMNAKVVLTWNKLRTACIELLCTAMAWGDLKAQNHTELRAKIISMFFKSLTCRTTEIVNVAKEGLRQVVQQQRMPKDLLQSSLRPILVNLANTKSLSMPLLQGLARLLELLSNWFNVTLGAKLLDHLKKWLEPEKLVQTQKSWKAGDEPKIAAAMIELFHLLPPAASKFLDDLVTLVIDLERALPEDQFYSEINSPYRAPLAKFLNRYVLEAVDYFLARLSHPKYFRRFMYIICSDTGDLRDALARSPQKILASAFSQFYSQSEASAAQLSSVKDEALTGAVSESITVQSSSNMVTTSESYFNGLELVSALVKLMPEWLRNNRVVFDTLLLAWKSPARLARLQNEQDLSLPQVMESKRLIKCFLNYLRHDRTEVGALFDMLSVFLYRSRIDYSFLKEFYVIEVAEGYSPNLKKTILNHFLNIFQSKQYGQDHLVVTMQILILPMLAHSFQNGQSWEVVDPTIIKTIVEKLLDPPEEVSAEYDEPLRIELLQLATLLLKYLQTDLVHHRKELIKFGWNHLKREDNSSKQWAFVNVCHFLEAYQAPEKIILQVFIALLRTCQPENKLLVKQALDILMPALPRRLPPEKNDSRMPIWIRYTKKVLVEEGHSIPNMIHIFQLIVRHADLFYSCRAHFVPQMVNSLSRLGLPYNTTAENRRLAIELAGLVVAWERQRQSEMKVAQESESQNQLGDMLNPSVIGGDPKRSSDVPSFADDLSKRVKVEPGLQPLCVMSPGGASIPNIETPGSSGLPDEEYKPNAAMEEMIITFLIRVSLVIEPKDKESSSMYKQALDLLTQALEVWPNANVKFNYLEKLLGNLSPTPQSKDPASALAQGLDVMNKVLEKQPRLFIRNNINHISQILEPCFGNKMLDAGKSLCSLLKMVFSAFPLEAATTPQDIKLLHQRVQELIHKNLAAVTTQQIALELNNAHSIISFSLFVLNALAEVQKNFIDPFIGLLFRVLQRLARDMGSSAGSHIRQGQRPELDSSVNSRSTIDSTVISNMKTVLKLISERVMSSSDHRKSMGQILQALLSEKGTDSSILLCMLDMIKTWIEEDCRLASSTGSVSSLNPKEIITYLHKLSLVDRKSFPPAAQEEWDAKYLQLLYSLCADSTKYPLSFRQEFFHKIERQYMLGLRAKDPEMRKRFFKLYHDTVGKTLFSRLQFIIQLQDWEAVSDVFWLKQGLDLVLAILVENEPITLAANSARVPTLMIAGPVPDRITMPQQVPDAQESMDGTTLSFDSLAARHAQFLNDANKLVVADIMAPLKELAFADPNVAYHLWVLVFPIVWVTLHKEEQVALAKPIIALLSKDYHKRQQGCRPNVAQALLEGLHLSHPQPRMPSELIKYIGKTCNVWYIAIALLESHIVHMNEAKCSESLAELYRLLNEDDMRCGLWKRKSITAETRAGLSLAQHGYWQQAQNLFYQAMIKATQGTYNNTVPKAEMCLWEEQWLSCASHLGQWEVLA

SEQ ID NO: 50449 - protein, 659 aa, Zea Mays
MGVAAPPYETTTYVSQRTKINIAAISAAAATRAATAASMSHSQGFHQGSAGVYGYSSDGFDRPDDSGHQDHHQQQQHVAQQSRRDKLRVQGFDPAAGGGHGLLPIEGDEHGGPGSMYEHAAAAAGASNMLSEMFNFPAPPSGPSATELLASQMGANYRFGGLRQQQQQGPGGVVAGLSGDGGWFVGAGAAGRAAGLVLGGGANMGSLGETSSPKQQGSMAGLATDPAAAMQLFLMNPQQQQQSRSSPPSPSDVQVQHHEAAFQAFGNAGAPFGGGAGTGVVEGQGLSLSLSPSLQQLEMAKQAEELRVRDGVLYFNRQQQQQQQQLPMALHGQQRKKAKLISMLDEVDRRYNHYCDQMQMVVNFFDSVMGFGAATPYTALAQKAMSRHFRCLKDAIAAQLRATCELLGEKDAGTSSGLTKGETPRLRAIDQSLRQQRAFHHMGMMEQEAWRPQRGLPERSVNILRSWLFEHFLHPYPSDADKHLLARQTGLSRNQVSNWFINARVRLWKPMIEEMYQQECRELDGSSAGGGGPESVNDPSGADDSHSPTTTGAAQLPQQQHHLGTVPGVMPHKPDPGAAGPSAADAAFVGIDPVELLGGGADDLYGRFEPGVRVRYGPAAAGAAAGDVSLTLGLQHAGAGNAAGPDSTGRFSLRDYSGC

SEQ ID NO: 50450 - protein, 214 aa, Zea Mays
MKQSSSSVDPRIDVLELVSRRVDSEEKERQKSSKQVGLKEKLKSWPVPEVCIVYTRRNRKQHKKELGDEVTGATPGTEYHMPARYGCLNQVCPDAGSDKIPDPDVDFYSVPDADFSSFGDHSESSFQNDQVWAMYDEEDGMPPYYALIRKVISTRPFKGRLVHLKANDSNGFGVSSWLSCGYSKTCGEFKFDVFKFDASLNGELSEELRNRLMN

SEQ ID NO: 50451 - protein, 364 aa, Zea Mays
MASGTGSGQPQPAAADADPGAGDNKLVFETPLQPQPVREDYVENAVKFLSHPKVRGSPVVYRRSFLEKKGLTTQEIDEALRRVPDPEPITTATASPQQQVGSQNQSAGAQTYAPARSMHPATAGPVVRPRFSWYQAFLAAGLLLGFGASTAVFIKKLFLPRLKSWIRNVVAQGDGAEGNQLKHRIDEETAEAVKASASAVSAIAKTNQQLLASKDEEKKILVTLTQALDSQAKELKSLTESINRTREPINITRDDRFSQHRPLEDHVPPVTRNGAINSSWRSSQQTNMYGVSHGDFGSAARSASFVPAPAEPTAGSFSRSCAECGHWKNRNSYSVLRLLVTSISYPGGFPVLALGRVASVLHSV

SEQ ID NO: 50452 - protein, 275 aa, Zea Mays
MASGTGSGQPQPAAADADPGAGDNKLVFETPLQPQPVREDYVENAVKFLSHPKVRGSPVVYRRSFLEKKGLTTQEIDEALRRVPDPEPITTATASPQQQVGSQNQSAGAQTYAPARSMHPATAGPVVRPRFSWLKSWIRNVVAQGDGAEGNQLKHRIDEETAEAVKASASAVSAIAKTNQQLLASKDEEKKILVTLTQALDSQAKELKSLTESINRTREPINITRDDRFSQHRPLEDHVPPVTRNGAINSSWRSSQQTNMYGVSHGDFGSGSYLL

SEQ ID NO: 50453 - protein, 140 aa, Zea Mays
MAAPLRRSLPSLGRALLTPAPARMLSAEASDALVEIKPGEIGMVSGIPEEHLRRKVLIYSPARTASQQGSGKVGRWKINFLSTQKWENPLMGWTSTGDPYANVGEAGLTFDSAESAKAFAEKHGWNYVVRKRHAPLLRVS

SEQ ID NO: 50454 - protein, 80 aa, Zea Mays
MRAHPLILFVPAPPPHPLPRRADTHRALSLPRRRPSPTRTARRRLPRALSHAGPRCSRWRRHTFFLHVPSPPYSSSRCSR

SEQ ID NO: 50455 - protein, 120 aa, Zea Mays
MCRRRPILLRDAAASAALLPAPLHGRVQGLCASVSFWYQSTGLSFLHSKSSVLCTLPENFTWYRNRDQRRRCSGEEAEECLRPRRKKAADGEEDQLGAWRGVAVVHEEEEPALAGGRRSM

SEQ ID NO: 50456 - protein, 88 aa, Zea Mays
MYNYDYKREYKLGVETTILMKSYTVEDNIKDDHRLPTFFFRLNVKFSNLICFSNTRLDHPCTSAYLPGKILSSLPRLRIWLRLESLRF

SEQ ID NO: 50457 - protein, 232 aa, Zea Mays
MVQLECSTHPLRTRPCPPGVGVRDSVTVLELIQWRRNRLRSLKVWLKADGQVDRLLHAQGKRKELEQTVNSFSDFSLSGPVAKSHKLEPGGVRAGAVHAGHAAGPLPGLLDGAMAESGDGRSAATRWTWRSSGRGAPCGMRWTCSSSMSLATARCCPYIFTDIFNNDLSGPYAFLEPPFVQRSLLYKIQARRKNRLIGLEASDTLSSHMSHEMDLTRNQTPLNRSHPRRQQE

SEQ ID NO: 50458 - protein, 198 aa, Zea Mays
MVQLECSTHPLRTRPCPPGVGVRDSVTVLELIQWRRNRLRSLKVWLKADGQVDRLLHAQGKRKELEQTVNSFSDFSLSGPVAKSHKLEPGGVRAGAVHAGHAAGPLPGLLDGAMAESGDGRSAATRWTWRSSGRGAPCGMRWTCSSSMSLATARCCPYIFTDIFNNDLSGPYAFLEPPFVQRSLLYKIQARRKNRFGP

SEQ ID NO: 50459 - protein, 72 aa, Zea Mays
MVSSLDWKIGSHRVVHLSSPVSTRKKVDPLSHQVKVCEFGSARILIFHKRMSPEAMDRLLEKDKVPNPCYRV

SEQ ID NO: 50460 - protein, 116 aa, Zea Mays
MEFGVHRSVAMAFPIAQQHFGGDPHGAISLPKGGPYPYVLTTCTFPITPTLTELEGKHCASRANDGEHGAGGAKQTTARDYLRADGVARCDGSPSGQARRRQALCPLVSIWRRRSI

SEQ ID NO: 50461 - protein, 439 aa, Zea Mays
MASSLLAGRGGGHHHNWGETRAPLEPIPPNPSPSQPHPRADGSKSKPRAAAGYVKFRPASLGHREARALRDRLAVELGQVRALLSRIDTWQQQGPPPRAVLRGAMRKRCGQILSRLRKDKRSVWFNAPVEVERLGLHDYHAVIKRPMDLGTVKEGLAAGRYASHDDFAADVRLTFTNALRYNPVGHEVHTFAGALLAYFERMYKEALVCLEEERKRLEPPRPVAAELPPPPAVEPVEAKAKTRAGNVRMRKPKAREPNKREMSLEEKNMLRLGLVSLPEEKMHNVLQIVRKRNNNPEMLGDEIELDIDEMDVETQWELDRFVTNFNKALKKSQRAAMLNGGVADVTSTAVAEDDTAPVGDVPTLVGNDDAESEEPVKSTTVAEQVDEYVDIGDEMPAATYQSMEIEKDAEGCGLFTFTGSESRSSGDSASGAGNAHSLT

SEQ ID NO: 50462 - protein, 333 aa, Zea Mays
MSIAKAIAIVMDRNPQLRQEGIAHEVLQWYLCRMEGWFATDADSISLQGWDQEVLLPGGHGLMVRGYRPVINTLAKGLDIRLNHKVLEIVRHRNRVEVTVSSGQTFVADAAVVTVPLGVLKVKTIRFEPRLPEWKEEAIRELTVGVENKIVLHFGQVFWPNVEFLGVVSSSTYGCSYFLNLHKATGHPVLVYMPAGRLARDIEKMSDEAAAQFAFSQLKKILPNAAEPMNYLVSHWGSDENTLGSYTFDGVNKPRDLYEKLRIPVDNLFFAGEATSVKYTGTVHGAFSTGVMAAEECKMRVLERFRELDMLEMCHPAMGDESPVSVPLLISRL

SEQ ID NO: 50463 - protein, 148 aa, Zea Mays
MCEVFCDQVPRTAENFLALCGTGYYDGTVFHRNIKGFMVQGGDPTGTGKGGSSIWGAKFADELRESLKHNARGIMSMANSGPNTNGSQFFITYAKQPHLNGHYTVFAKVIHGFEVLDLMEKAQTGPGDRPLAEIRLNRVTIHANPLAV

SEQ ID NO: 50464 - protein, 326 aa, Zea Mays
MKDLPDNIPRIFGHEAFGVVESVGEQVDEFAAGDAVVPTFLGQCSECVDCRSARSNMCSKYRFAVRPGMPRDGTTRFTDGQGRPLHHFFGVSSFAEYTVVDVNQVVKLNPAVPPALACLLSCGASTGVGAAWKQAKVEPGSSVAIFGLGAVGLAVAEGARICGASKIIGVDINPEKCELGKKFGVTHFINPKELGEEKPVHQAIAEMTDGGADYCFECIGLAALMNDAFRSSRDGWGKTIILGVEMHGAPLCISPHEILHGKSVIGSMFGGVKPKQDIPILADKYMNKELELDKFITHEVGLKDINQAFDLLLQGKSLRCTIWMDK

SEQ ID NO: 50465 - protein, 215 aa, Zea Mays
MEGASRPPLLALACLWLCALLPHGASAAGECGNVSCGMGTCSESSDYAFGFACECKPGWSRYHLAGLQFPFLPCVIPNCTIHSSCQDGSSSSPAPAPSSSPPAGLPPLTVFDPCLMQYCGDGGACEKASDFAHRCSCRDGYSNLLNDTSYPCYRQCSLGPDCKGLGIDVINGSTPSSSPPAPFSFTVKKSGAGAAAAPAGTLLALLAFFGLQAIW

SEQ ID NO: 50466 - protein, 63 aa, Zea Mays
MSLAKVYNLFRQLGLRHIFVVPRPSRVVGLITRKDLLLEEDNNNVMPELQSTSGLAERQNARG

SEQ ID NO: 50467 - protein, 603 aa, Zea Mays
MWSPQASFEEVDVAWRHYEQAGTGLAAIFINLAVENFSGWKYTATFAIIKHSYFVGFFVYTVFNLALVFSSVYIVTNFAPAAAGSGIPEIKGYLNGVDTHGILLFRTLVGKIFGSIGSVGGGLALGKEGPLVHTGACIASLLGQGGSAKYHLSSRWVRIFESDRDRRDLVTCGCAAGVAAAFRAPVGGVLFALEEVTSWWRSHLMWRVFFTSAVVAVVVRSAMNWCNSGKCGHFGAGGFIIWDISGGQEDYSYQELFPMAIIGVIGGLLGALFNQLTLYITKWRRTCLHKKGKRVQIFEACLISLVTSTISFVLPLLRKCSPCPKLETNSGIECPHPPGTDGNFVNFYCSQDREYNDLATIFFNTQDDAIRNLFSAKTFHEYSAQSLITFLVMFYFLAVVTFGTAVPAGQFVPGIMIGSTYGRLVGMFVVKFYKKLNIEEGTYALLGAASFLGGSMRMTVSLCVIMVEITNNLKLLPLIMLVLLVSKAVGDFFNEGLYEEQARLRGIPLLDSRPKQVMRNMNARDACKNQKVVCLPRVSRVVDIISVLRTNKHNGFPVVDRGQNGESLVIGLILRSHLLVLLQAKVDFQNSAFPCGPGVLNRG

SEQ ID NO: 50468 - protein, 402 aa, Zea Mays
MLSGVDHDVPDGIGMARLAWTRLPTADGEGAGPSTSEAADDELLSGAAIESLDYEVIENYAYREEQAQRSKFWVPYYVMLKWLFALLIGVGTGLAAIFINLAVENFSGWKYTATFAIIKHSYFVGFFVYTVFNLALVFSSVYIVTNFAPAAAGSGIPEIKGYLNGVDTHGILLFRTLVGKIFGSIGSVGGGLALGKEGPLVHTGACIASLLGQGGSAKYHLSSRWVRIFESDRDRRDLLIFVFEVSQLEILWPSHEAIVKVTCGCAAGVAAAFRAPVGGVLFALEEVTSWWRSHLMWRVFFTSAVVAVVVRSAMNWCNSGKCGHFGAGGFIIWDISGGQEDYSYQELFPMAIIGVIGGLLGHVLFLGCCDIWNCSSGWPVRSRNNDWIYIWKACWNVCCQVL

SEQ ID NO: 50469 - protein, 798 aa, Zea Mays
MLSGVDHDVPDGIGMARLAWTRLPTADGEGAGPSTSEAADDELLSGAAIESLDYEVIENYAYREEQAQRSKFWVPYYVMLKWLFALLIGVGTGLAAIFINLAVENFSGWKYTATFAIIKHSYFVGFFVYTVFNLALVFSSVYIVTNFAPAAAGSGIPEIKGYLNGVDTHGILLFRTLVGKIFGSIGSVGGGLALGKEGPLVHTGACIASLLGQGGSAKYHLSSRWVRIFESDRDRRDLVTCGCAAGVAAAFRAPVGGVLFALEEVTSWWRSHLMWRVFFTSAVVAVVVRSAMNWCNSGKCGHFGAGGFIIWDISGGQEDYSYQELFPMAIIGVIGGLLGALFNQLTLYITKWRRTCLHKKGKRVQIFEACLISLVTSTISFVLPLLRKCSPCPKLETNSGIECPHPPGTDGNFVNFYCSQDREYNDLATIFFNTQDDAIRNLFSAKTFHEYSAQSLITFLVMFYFLAVVTFGTAVPAGQFVPGIMIGSTYGRLVGMFVVKFYKKLNIEEGTYALLGAASFLGGSMRMTVSLCVIMVEITNNLKLLPLIMLVLLVSKAVGDFFNEGLYEEQARLRGIPLLDSRPKQVMRNMNARDACKNQKVVCLPRVSRVVDIISVLRTNKHNGFPVVDRGQNGESLVIGLILRSHLLVLLQAKVDFQNSAFPCGPGVLNRHNFSDFVKPASSKGKSIDDIHLTEDELGLYLDLAPFLNPSPYIVPEDMSLAKVYNLFRQLGLRHIFVVPRPSRVVGLITRKDLLLEEDNNNVMPELQSTSVRGLLNGKMLGGNIHLERPLLDNLVIE

SEQ ID NO: 50470 - protein, 380 aa, Zea Mays
MKACEQSNPNSVDGHLFILSKQVKICLLPLGFAAGTMRHWFDFGNKIICTILDLLKDSLKTLLDAVDDGNLDRYCIRITEYSKNIVLSGCPQVTTAFLYISVLPNDLSVSLKRRIVSSYTQVDHQTFVLYEELEKATKTLSFKNVHMVDISKCPNVHFGAAIDWLKLGFPELRVFRVSHCLSFQFDDLLYLLMRCPWIDEIDMTIDTSTVTPRHSVISSSSEVLSKAKPNQKRYGIHCSAYDRQPNSVFLNISRLTLEGRNDIDDMDLLEISVLKNSLCYINIRNCFLLTDDGISNLLMKCTKIHSMVLSYTSFGNRSIQMLCAANPSGHNSGHAHVMASYMQELHLDGCKASEHYKYHKVFELKGNITYRWCTLQVCWL

SEQ ID NO: 50471 - protein, 300 aa, Zea Mays
MVSLAPVIQRNCKLNCLKTAGCCSLLLQCANVEHINGNKYGDFLQELGTTYCLEDVEMGWGFCPIRIEDLVPSFSKVRKMKIGLGTSLAENVLCALPMICPFLESLILRFQVISDRVVRRLLESATNLQVLCLHYCLGSLTSFSFQTKAPALRVLRLHWVTSWLTNDDLTILTENCNLAELSLSGCKLLDSSSQDIISSGWPNLALLHLEECGKVTVEGVSSFFNCKALEDVLLRHTVSMKNIVAGSWYIVLVNLKTQRRTILNDVTWLQLKQNFTMLLQNCSPSVHVISRTSTGVTFLR

SEQ ID NO: 50472 - protein, 590 aa, Zea Mays
MKHQVLKGQQMLSQSGDAIATYKYDENASVRLLYYAIIMHEYPFSIAQHRYFVKFIKSLRPSFPSKSRVTVCKEIMELYKEEKNLLYAQFNKLSCRVSFTMDTWTSIQNKSYLCVTAHWIDDHWKMQKRIINFMHVEGSHGGIKLSDTFFANVLNWNLDKKMFALSLDNAAANKVAVEIVIENAKELLVCDGKFFHVRCANHILNLVARDGLSCLGNVIGNIRQFVTIIKRSPLQLEAFEKCAKECGLDPKKTLSLDVATRWNSTYIMIRDAIYYKNAFDRLAKKDKDKYGHINPSSTDWLNATNISKCLKKFYDVTLLFSGTSYPTANHFFRKFSEIKMAIARWCDSSDLVICTMAFSMRHKFDKYWEMNNLALAVGAFLDPRYKHRMIELYMSKMYGSDKAELEKLVFMNVINELFAYYSAVINAKSTTKGSSSRESEFVPHKNTCLVDEEEDEVDLDELYATTSNDKKVSELDLYMSEDLVKVNDNEATFDILSWWKGQVTNFPILSTLARDVLSMQVSTVASESAFSSGGRIVDAFRSRLKPEFIEALVCCKDWKIASEKDLEIEIKTLSEPMNDVDLEDAAAIGT

SEQ ID NO: 50473 - protein, 126 aa, Zea Mays
MRSPRGLLTASGYLAGRHAPSPSVSTTGHNSLLARTFQILAQPESVRLQKHPAPNSGILELRLERPEVKNAINWDMMRMLRSAIEKIQADTTAKVVLVASSVPGAFSAGADLKIQLLKGKGMVGVL

SEQ ID NO: 50474 - protein, 280 aa, Zea Mays
MRSPRGLLTASGYLAGRHAPSPSVSTTGHNSLLARTFQILAQPESVRLQKHPAPNSGILELRLERPEVKNAINWDMMRMLRSAIEKIQADTTAKVVLVASSVPGAFSAGADLKALPIPTIAVIEGAALGGGLELALACDLRICGENAELGLPETSLAIIPGAGGTQRLPRIIGRSRAKELIFTGRRCGAAEAVTMGLANYCVPAGEAYQKALDIACEITQKGPMGIRMAKKAINEGAEVADMSSALAIEGECYEQLLYTQDRVEALAAFAEKRKPVYTGK

SEQ ID NO: 50475 - protein, 302 aa, Zea Mays
MRSPRGLLTASGYLAGRHAPSPSVSTTGHNSLLARTFQILAQPESVRLQKHPAPNSELRLERPEVKNAINWDMMRMLRSAIEKIQADTTAKVVLVASSVPGAFSAGADLKERRLMSSSDVGGYARSLRSTFSSFEALPIPTIAVIEGAALGGGLELALACDLRICGENAELGLPETSLAIIPGAGGTQRLPRIIGRSRAKELIFTGRRCGAAEAVTMGLANYCVPAGEAYQKALDIACEITQKGPMGIRMAKKAINEGAEVADMSSALAIEGECYEQLLYTQDRVEALAAFAEKRKPVYTGK

SEQ ID NO: 50476 - protein, 1922 aa, Zea Mays
MAPPRVTRKKGKGAGGKTDLRPDRKQFKRHHKEDAAAEQGDGNGERQQSAAPGSAALLAAASDEADFPRGGHSLLSKDEMAEARAEAEQDFEREAKKGKGKRKRSGGESSGFGVDDDLGILFGGATTGKLPRFANRITVKVGDSEIKITAAEASRARSKIEWSSSGIEGLFWTVSVARIWYKLCTSMHIKIKNISPNMKLWGVVIEVNQKDIVLSLPGGIRGFVRSEDVCDIALQENRKDSGNNLCAEVVHVGQLVPCIVLRVDDDSREGKVNKRVWLSLRLSLLYKGLALDGLQEGMVLTAQVKSIEDHGYILHFGVSSFSGFMQKDDKEDVKTERRQLMQCVVKAIDKTRAIVHLSSDEDLLSKSTIKDLKGLSIDHLIPGMMVNARVHSFLENGLMLSFLTYFSGTVDIFNLLNSFPSGNWKDDYSKNKKVNARILFVDPSTRAVGLTLNKHLLHLEVPPINLKAGDIYDKSKVLRVDKKAGLFLEIPSPTPSPGFISIRDVSDKDAKNLEKFKEGSSLRVRILGVRNLEGVAIGTIKDSAFEGSVFTHDDVKPGMLVRAKVATVEPFGAIVQFSSGVKALCPLPHMSELEHVVKPPKKFKVGAELLFRVLGCKSKRVTVTYKKSLVKSKLDVLSSYADAKIGLVTHGWITHIEKHGCFVKFYNGVQGFVSRSDLGLEAGTEAENVYHVGQVVKCRIINVIPASRKLNVSFVISHNRIAPIDTPKLGSIVSGVVERLTPAAVVVSVNGFSKGTILNEHLADHHGQAAQLKNVLKPGHEFNQLLVLDTEGQNLVLSAKHSLINCANDIPSEISQMHPGVVVHGYICNIIEAGCFVRFLGHLTGFSPKDKAVDRWIEKLSDAFYVGQSVRSHILSVNAETARVKLALQQSMCSSMDSSFIQGYFLLDQKIAALKYSSNDWARHFGIGSLVEAEVGAIEEYGIILNFKDHLDTVGLIEHHQLGGSSVEVGSSVKGLVLDLSDGVVNLSVKPELIDSVRIVGKKKKRQRAVVADLELHEEVNAVVEIIKDSYMVLSIPEYNYAIGFSPLMDYNSQLLPHHHYDNGQRITVVVGNIPSSDSSGRLILLPKASAQYSSLSDSKRAKKKSGYKIGSLVEAEIIDIKPLELLLKFGGNLHGRIHITEILEEDSAEHPFSELRIGQKLTARIVSEAEPSGKSGKKFKWELSIRPCIVNGEFAQKEQNHTTNGIVRAYVVKVDKEWVWLTVSRNVMAHLFLLDSSSEPSELKEFQQRFSVGQAVKGRVISVNQEKRLLRLKALDNQCTQPNIDETQEPKSSVFGQTKQGDIIGGRVQKILPGVGGLVVQIGPHLHGRVHYTEIVDSWVSEPLSGFHEGQFVKCKVLSVSRSSEGSLRVDLSLRSSNLIRDSNNSRLDDLETCTSRIEKIKDLLPGTEIKGYVKNVNSKGCFIMLSRMVDARITLSNLSDEYVENPQKDFPVGMLVHGRILSTDPSSGRVEASLRKTTGSKLEKLDDISYSDLHVGDIVDGQVKRVESFGLFVTIRRSELVGLCHVSELSDEPVVDINSCYKAGDMVKAKILKIDETRHRVSLGMKKSYFDSDLTADTNDDESALMDISVAPQMVEYHNRNLVHRKAEPRASVLPLQVSLDESEGSDLEDNISNTCLEIANGTEANAKKSDKQLKKEARKQRELEISAMEERALQEDIPQTPDDFEKLVRSSPNSSFIWIKYMATLLDLADVEKARAVAERALKTIIPREEEEKLNVWVAYFNLENEYGSPREDAVKKVFQRALQYCDPKKLHLALLAMYERTEQYELADELLDRMTKRFKTSCKIWLCRIQFALKQEFKCGVPEEGRSRFELILREYPKRTDLWSVYLDQEIRLGDVEVIRALFERVTCLTLPPKKMQFLFKKYLNFEKSLGKDNERIQLVQQKAIEYVQSSLPSQDNS

SEQ ID NO: 50477 - protein, 231 aa, Zea Mays
MDTLTFGARRFLRHLTDLGYKKSPVTEFDVSKVLEELGLTMDQFIDLCILSGCDYCENIRGIGGQRALKLIRQHGCIEEVLQNLNQTRFSVPEDWPYQEVRTLFKEPNVCAGIPDFTWTSPDPEGLMDFLSTENSFSPDRVTKAVEKIKVARDRYSPGRMKHLTPVASLRGSHTEKEPQCILGSPGQTLKVMSSPQVCKSPSSGFRYGSSKPFMLGRQSGFHGMPYALSFI

SEQ ID NO: 50478 - protein, 2114 aa, Zea Mays
MALFRRLFYRKPPDRLLEIADRVYVFDCCFSTETMDQYRYKNYLDNIILQLREQFADSSLMVLNFRDEGKSLISGIFSKYNITAKDYPCKYLGCPLLPLDIILHFLRLSERWLMLEGQQNILLMHCEKDGWPVLAFMLAGLLLYRKQYNGEQRTLDMVYKQAPKELLQMLTTLNPQPSHLRYLGYICRMDDGIGWPTQPIPFTLDCVILREIPNFDGVGGCRPIVRVYGQDIPTTDRSHSVISPPSKAKKHIRRYRQADNAPVKLNVGSCVQGDVVLECLHVDDGQGNERLMFRVMFNTFFIQSHILPLNFEDIDVPWDADHQFTKNFKAEVLFSEFDAESDASTEVAPDYDYDYDYDNDMDVASADEFFEAEEIFSNAESQDGNKDADTLSMVSTDYIRTPSAECWKNSPFSNFDLNIDIDGSQDNKADNLGLLLETVNDGKTCTSTEANILLNNETAVVKSTFTATIACTSTEANILLNDETAVVKSTFTATIDGDTDSGISSSTYKEDGCMFEKGSSKQDIRMGSNQDLSQIDNVLVKEVIILETNSTDDIQMIKEVIISEVTTPKQVVEGNMMETELDEAVHSSESTALGEDEDTKRPNTFFKKDEGQSARDEYAAYDNGIVIEREESRNKEKFTITGTDSLVAEPKDLPHLDSSNTSLELSSANENIDQLRACSSNVTAERRAGIDTSFSSSRSQSSNISCANILPEESNLIINHASTSVNANTDTTDSSRLVLKKKPFLPLATSSLFSPSSPRRNLLRAASTDLSFFSPSQTESKQNSVTSTSGRGDSDTSSVLPPFQLYTSLGSSSKMSLVHPTLRPIRTISSLPSLSFGTFIEMSMASSRSPKHQEHVRSPSIPQDQHLHPPMTEENDLHSGSLTLPASNQYGPQTPHPPPLPPPHDSCTQSYSSTIIYEPEQIRADGSCSYSPDYRQSVLNLGDSSLTSLSNSSIAATECPLGASDFVDEEVTSRPNIVTAMDVPFTNEDTNSLLHMTCSSPPKTLQRAEPPTLPPPPLPLVPPPSQLPLPTICSDSGSVPLVYSNPSSDCPYKEPTMLPEHKSDVPATSLEGHEASEVQFLQSDTAVELSPSEHSEYKVQHVVGSAEDTISSMSSYIPAAPPYPMFHIVTDNSSCSISAEQVNCEQPLDQTTLSIHLRPFEVEISQGETINGVLASIIDDKEHGGIPILQLPQKLPHSGEHMKSPPPPPPPPQPPPCHATVIPSLCLSSKPPSPTEHYENPPSSPPPFSRESCVVLPPLPAPLLNHPSLPGKHINLYPPPPPPPPTLHHIAPASPCSYQPSFYADIATQPTFSEDIVIVPPPHSKGVNIIPLPPPPPRTSETLSQPLDGGQSTGPASLLEVTKENPPPPLLPPEGQMGSPLSTLCGEIVNIPIPPPSLPGGHGEVPLSTPPRGCGAIPPPPPFTKGIGGITLPIGFHSGDLSFLQSTRESKGPSCLPPPPPPPPPPPPPPLSSNGHIGDLPPPPTSVFVEASIPLPPQTGCGGDPPPPPPTGGHVGPPPPPPPLGECAWDLQPPKACVRAPPPPPPPGGYAEVLMPPPPPRGYVGAPAPPPPPGGYAGAPPPPPPPGGYAGAPPPPPPPGGYAGAPPPPPPPGGYAGAPPPPPPPGGYAGAPPPPPSYGGIGGVPPPPPPFGGLGGTPPPPPPAGFRGGAPSPPPPPGGHGGPPPPPPRGHGSGPPPPPGAPSPPMPPGMSGGPPPPPGGRGMPTPPGGRGHGLARTLGPTLQSAMRKSSLKPLHWVKVTRAMQGSLWAELQKQVEANSHAEFDVNELESLFTIAPKAKAGSKSEGRGKSLGTKSDKVQLIDLRRANNTEIMLTKIKMPLPDMMSAALALDDSVLDADQIENLIKFCPTKEEMELLKNYSGDKEALGKCEHFFLELMKVPRVESKLKIFAFKIQFQSQIRDVRKNLQTVSSACEELRSSEKLKVIMKNILLIGNTLNQGTPRGQAVGFRLDSLLKLIETRATSGRMTLMHFLCKSLAEKSPEVMDFHEDLVHLEASSKLQLKALAEEQLAVVKGLEKVEQELTASESDGPVSDVFRKTLKEFIDCSSADVCSLSAFYSEVGKSADALALYFGEDPAKFPFEQGNIHAYRPMEMV

SEQ ID NO: 50479 - protein, 1907 aa, Zea Mays
MALFRRLFYRKPPDRLLEIADRVYVFDCCFSTETMDQYRYKNYLDNIILQLREQFADSSLMVLNFRDEGKSLISGIFSKYNITAKDYPCKYLGCPLLPLDIILHFLRLSERWLMLEGQQNILLMHCEKDGWPVLAFMLAGLLLYRKQYNGEQRTLDMVYKQAPKELLQMLTTLNPQPSHLRYLGYICRMDDGIGWPTQPIPFTLDCVILREIPNFDGVGGCRPIVRVYGQDIPTTDRSHSVISPPSKAKKHIRRYRQADNAPVKLNVGSCVQGDVVLECLHVDDGQGNERLMFRVMFNTFFIQSHILPLNFEDIDVPWDADHQFTKNFKAEVLFSEFDAESDASTEVAPDYDYDYDYDNDMDVASADEFFEAEEIFSNAESQDGNKDADTLSMVSTDYIRTPSAECWKNSPFSNFDLNIDIDGSQDNKADNLGLLLETVNDGKTCTSTEANILLNNETAVVKSTFTATIACTSTEANILLNDETAVVKSTFTATIDGDTDSGISSSTYKEDGCMFEKGSSKQDIRMGSNQDLSQIDNVLVKEVIILETNSTDDIQMIKEVIISEVTTPKQVVEGNMMETELDEAVHSSESTALGEDEDTKRPNTFFKKDEGQSARDEYAAYDNGIVIEREESRNKEKFTITGTDSLVAEPKDLPHLDSSNTSLELSSANENIDQLRACSSNVTAERRAGIDTSFSSSRSQSSNISCANILPEESNLIINHASTSVNANTDTTDSSRLVLKKKPFLPLATSSLFSPSSPRRNLLRAASTDLSFFSPSQTESKQNSVTSTSGRGDSDTSSVLPPFQLYTSLGSSSKMSLVHPTLRPIRTISSLPSLSFGTFIEMSMASSRSPKHQEHVRSPSIPQDQHLHPPMTEENDLHSGSLTLPASNQYGPQTPHPPPLPPPHDSCTQSYSSTIIYEPEQIRADGSCSYSPDYRQSVLNLGDSSLTSLSNSSIAATECPLGASDFVDEEVTSRPNIVTAMDVPFTNEDTNSLLHMTCSSPPKTLQRAEPPTLPPPPLPLVPPPSQLPLPTICSDSGSVPLVYSNPSSDCPYKEPTMLPEHKSDVPATSLEGHEASEVQFLQSDTAVELSPSEHSEYKVQHVVGSAEDTISSMSSYIPAAPPYPMFHIVTDNSSCSISAEQVNCEQPLDQTTLSIHLRPFEVEISQGETINGVLASIIDDKEHGGIPILQLPQKLPHSGEHMKSPPPPPPPPQPPPCHATVIPSLCLSSKPPSPTEHYENPPSSPPPFSRESCVVLPPLPAPLLNHPSLPGKHINLYPPPPPPPPTLHHIAPASPCSYQPSFYADIATQPTFSEDIVIVPPPHSKGVNIIPLPPPPPRTSETLSQPLDGGQSTGPASLLEVTKENPPPPLLPPEGQMGSPLSTLCGEIVNIPIPPPSLPGGHGEVPLSTPPRGCGAIPPPPPFTKGIGGITLPIGFHSGDLSFLQSTRESKGPSCLPPPPPPPPPPPPPPLSSNGHIGDLPPPPTSVFVEASIPLPPQTGCGGDPPPPPPTGGHVGPPPPPPPLGECAWDLQPPKACVRAPPPPPPPGGYAEVLMPPPPPRGYVGAPAPPPPPGGYAGAPPPPPPPGGYAGAPPPPPPPGGYAGAPPPPPPPGGYAGAPPPPPPPGGYAGAPPPPPSYGGIGGVPPPPPPFGGLGGTPPPPPPAGFRGGAPSPPPPPGGHGGPPPPPPRGHGSGPPPPPGAPSPPMPPGMSGGPPPPPGGRGMPTPPGGRGHGLARTLGPTLQSAMRKSSLKPLHWVKVTRAMQGSLWAELQKQVEANSHAEFDVNELESLFTIAPKAKAGSKSEGRGKSLGTKSDKVQLSAALALDDSVLDADQIENLIKFCPTKEEMELLKNYSGDKEALGKCEHFFLELMKVPRVESKLKIFAFKIQFQSQGCQKEFADCIICL

SEQ ID NO: 50480 - protein, 474 aa, Zea Mays
MARQIGKLLNGKDPKIVNGPEVLSKFVGETEKNVRDLFADAENEQRTRGDQSDLHVIIFDEIDAICKSRGSTRDGTGVHDSIVNQLLTKIDGVEALNNVLLIGMTNRKDLLDEALLRPGRLEVHIEINLPDENGRLQILQIHTNKMKENSFLSPDINLQELAARTKNYSGAELEGVVKSAVSFALNRQITMDDLTKPLDEESIKVTMDDFVNALHEITPAFGASTDDLERCRLRGIVDCGKAHKHIYQRAMLLVEQVKVSKGSPLVTCLLEGPAGSGKTAMAASVGIDSDFAYVKIISAETMIGFSESSKCAQICKVFEDAYKSQFSMIILDDIERLLEYVAIGPRFSNLISQTLLVLLKRVPPKGKNLLVVGTTSEVGFLESVGMCDVFSVTYHVPKLKKEDAKKVLHHLDVFDDGDLDAAAEALDDMPIKKLYTLVEMAAQGPTGGSAEAIYAGEKIDINHFFSILSDIIRY

SEQ ID NO: 50481 - protein, 54 aa, Zea Mays
MSGFPVWASTTNGNKKLDSAHREDMKEEHCPIILFFDHVSSMNMPAWCHQQLPC

SEQ ID NO: 50482 - protein, 1017 aa, Zea Mays
MKRAIVSAGEGGDTRGPGGNAPGASDGGERSPSGSRGEEKLYQTWWMKAHGEWGKESKKERNLWANMYDEKIWDVEIGPEIIDEALHPATVGRGIIELDVWPAPSHEQIVRLETPVSERADKDEGRARNGGRESSSCSRHYLLSSFASTPLKTLNALRTLVVMSYRGGRGGGGPNSHRGRGRGGGGGAGRRGGGGGRGEQRWWDPEWRAERLRQMHGEVEKVDENEWWNKIGQLREGSQQELVVKRNFGRDGQNILANMAQRQGIYFNAYNKGKTLVFSKVPLPDYRADLDDRHGSTQKEIKMSNQTEARVEDLLSRSKWNNNSASTSTVSTRQIFPGASSSVVEPAAPIDKEKLSSQLRELQNSRKTTASARSMQSFREKLPAFSMREGFLKAVAANQVLVISGETGCGKTTQLPQFILEEEINSLRGADCNIICTQPRRISAISVAARVSAERGEELGEAVGYQIRLESKRSAQTRLLFCTTGVLLRRLVQEPDLIGVSHLLVDEIHERGMNEDFLIIILRDLLPRRPDLRLVLMSATINAELFSMYFGDAPVMHIPGFTFPVAELFLEDVLEKTRYRINSERDNFAGSSRRKRFSSVKSDPLSDVFEDIDITKEYGNYSSSTRQSLEAWSAAELDLSLVENTIEYICRYEAEGAILVFLTGWDEISKLLDKIKGNNFLGSPNRFLVLPLHGSMPTVNQREIFDRPPANMRKIVLATNIAESSITIDDVVYVIDCGKAKETSYDALNKLACLLPSWISKASAHQRRGRAGRVQPGFCYRLYPKIIHDAMPQFQLPEILRTPLQELCLTIKSLQLGAVSSFLAKSLQPPDPLSVKNAIELLKTIGALDDMEELTSLGRHLCTLPLDPNIGKMLLMGSVFQCLDPVLTIAAALAYRNPFVLPIDRKEEADAVKRSFAGDSCSDHIALVKAFVAWKDAKRSGRERTFCWESFLSPMTLKMMDDMRNQFFDLLSDIGFVSKTAGVKAYNRYGNDLEMVCAVLCAGLYPNVVQCKRRVRR

SEQ ID NO: 50483 - protein, 957 aa, Zea Mays
MSSTTMHPGAPPAAELASAGEAGGDYICDVGDISAGDREHSEAAPEAEHGQPAIDDDTKRRWWEDTEEPNTSADTMIDLLGDMGSLMNKVDAEAILNPVGRKSYEIGLASSSTPNVGTVSTIASSNVSIYSRKESIENQNKMKKRKGRCYGCKIRPWRGPLPRISKRLITLEAFMPSLINGLDSLKRPLSDEKFKSSWVTKTHNIQTKETSLENVQLLNASGEEQRHLLPLSRAQLVQKAKTYGASRESLRRPALNQKKGQISPIPVQHLIRPSYAEIAARQPANLKPQRQHMPTMEEKAHHGERTFVPRHHQRREQFPRGGRAGRGPGRGSPASGHGRGTGQNWARGRGYAPQQYAPVASSQQLAPVGIQRMGNQQEIVGGNLPAEGVHDATQKWENRDFKAKKPRPPHCYRCKCNEHLVEACKADLDCYVCNKKNIHIAAKCPLLKMEKPSAAMSGFAKNELCFFRIPVFDYRLETPDAAPTGLIKMTGGKLDAVSIQAELAKLSRVEWAWEALQHGEDSFLVAFPSEEELARMSEMEYKMRSSGVTLTISEWKHGGDATPAYFLDEVWVHVTGVPHAWRHYLGFWALGSMIGTTIDVDMYTYRKKGVIRILVGTLDKELLPLTTDVVFDKVGYEITFSMEDQYFEPAIPPPNSLVPREKDDDSEGNEDAAKDKERVQTAKKAKNTKDASGSKSMQGDNESAPMQTDGENLKHSIGHIVVAPSDPMTIFSPGKPLNLEQGVICSDEQRPNYTQLYETNEVEGKEHASLDLGMRKQPCIDVILGRHFSMPTQRMENSSDCDSNTHQTSALETPASNVLSPLSMRAEKPATPLSQDIGQNSQGEQVAEIETSEELKMEMSPNSAQDKNMDSLEKAMNRAAARNLDVKGGSSIAAGFKQYNTSPCPGPHAAGYFHYYPLATVLGCTAETRSTVYCDGSFTTFGAGGYEVLISGTWVAF

SEQ ID NO: 50484 - protein, 256 aa, Zea Mays
MLHKQEGFAFSHCTTCKAPYYLRVHSHTDRKWRTLKFRFFVTRDILFIFALVQIIISALAYLVHFIDGCQQYWLRTAWAFDNEVSFYYICGALMFFALLGLSGCFITCYDRRVRNDLAQPCRELCLCCCQPGMCADCHLPGTLCMWTDCTTCFEGCATTAGECGGCLGGAGEAGLPLLLIMGVIVLGLFTVIGIFYSVLVATMVGQRIWQRHYHILAKRLLTKEYVVEDVDGERTDWCPPPLPAEHISQLKSLGLL

SEQ ID NO: 50485 - protein, 542 aa, Zea Mays
MLRDFSELIPTTWRDGLMTLASCVASCTRQSETNDVPCAISGKAVTKCDGCVPTEVRPTDLLDVLWILSERSKQHFNPKYRLKVCEQVIQVATSLINATEIPLNQLLHFIATIPREFTDYIGPLRVVVQKWFFQKEECSPGDTLLSKLIDFSATFVSQKRNEGSNVFDDEDVDAWEAEARRWARTLLLVTEEEEHLKRIFRFLEAYGYKLSEQCPSGDFIPIKFFIIVLSFIEELELRQRKLVCRSNTILRGSDTLNGLVLDDLNKMFTESLLLILENMVAFSKLSCSIFWLDVDNKDLPPSIKGKLGGPSQRRLATSITSSVLQGIWSMRCVSSVASWCNPYNSDDSVSSAFSVLWDFYLNVTHHSTIANEIGAELHLAAYEALAYVLAVLSTASSTQFLDFVEAKQTDQAHKFSLDILVTTFLDNINHLLTEGTLTRSRRAVLMTWKWLCMDSLLSISSCYSDNESQMKRLEPLFSDSTLRCIFLDIIESLENTGENSVLSILRCVRSVLRLLHLNEGNTIFSSLGISYELPFSIFLSLF

SEQ ID NO: 50486 - protein, 688 aa, Zea Mays
MTKNPMMLRSLALPFTVLEWTLPAAPRPGQNASSKQSSTSKERSAEASGAESSDETCESFAFALVNGALGVFEVHGRRIRDFRPKWPSSSFASSDGLVTAMAYRLPHVVMGDRSGNIRWWDVTSGLSSSFSTHREGIRRIKFSPVVHGDRSRGRIAVLFYDNTFSIFDLDSPDPLANALLQPQSPGTLVLELDWLSTRTRKDEPLMLCIAGADSSFRLIEVNIDAKGSSISKPVATKERFRPMPFCLPVLFPTAHALALRMILQLGVKPSWFECNSSDKLTGDSFKVAPTFGDLRSYMIETTLPPIGDAVVAELLLKVLEPYRKEGCILDDGRASLYSAIVNKGACARFAFAAAIFGDFQEALFWLQLPQALRHFLGKSTSRSREKISQSSLHPDSEQSSRFNRIASRERSASEKFTKNAANYGQLSSMAFNQEQLWFNASERIPWHDKLDGEDALQKHVHELVSLGNLEAAVSLLLSTPPEGSNFYPNALRAVVLSSAVSQSLHELAVKVVAANMVRTDKSLSGTHLLCAVGRYQEACSQLQDAGCWNDAATLAASHLHGSDYARVLQRWADYVLRGEHNMWRALILYVAAGALPEALDTLRKSQRPDTAAMFLLACHETYSQALSESEPEDDTSVLALTPTPEQTEKLRFPSKNVADEDLIAVSEVFGQYQQKLVHLCMDAEPTSD

SEQ ID NO: 50487 - protein, 286 aa, Zea Mays
MTASTSSTLTSSRGYSGRASSRKRGIEAVSDSNIFVENLVEKEEFLHTFSKECEYIRTAVTNGSAIKHDGSYESDPAVEIVRVELQGAAAFLLFSSGSTPIYIGEHGWEMLLVVKKATQEAGSKFELLGFASVHNFYHYPESIRLRISQILVLPPYQGEGHGLGLLEAINYIAQSENIYDVTIESPSDYLQYVRSSIDCLCLLMFDPIKPALGAIVSSLKETNLSKRAQSLRMVPPVDLMETQPEDLRTQEQQLNELVDIQIEEIDGVAKNVTSRGKDKMAELAVQ

SEQ ID NO: 50488 - protein, 182 aa, Zea Mays
MESANEERKEERVNGGSIAGWCRCCWFENSGGKISWREAMRTPRKGEIIVRLWRLSMGGSTSARAQYVASGFSRLCDHQNIMGSKVGLLRNARRWCMHDEAVVHYIDMIDQTTLGHRMIKKQFNKTPRAGWQIDPFGHSAVQAYLLGAEVTTINIIFGMKPFFYQNQYDKLLHFSKQKIQFS

SEQ ID NO: 50489 - protein, 132 aa, Zea Mays
MFDYNVEERVNDFVVVAIEQDGQVHALYSTPSIYTDAKHLSNVSWPVKYDEYFPYADSKNSYWTGYYTSRPTFKRYVRVLSGYYLAARQIEFLVGRRSSLGLFTTSLEDPMAIAQHHDAVSGTTNNTRQMTT

SEQ ID NO: 50490 - protein, 260 aa, Zea Mays
MHQGRRSVVEDHLIVSHGRLACSSLAQYVASGFSRLCDHQNIMGSKVGLLRNARRWCMHDEAVVHYIDMIDQTTLGHRMIKKQFNKTPRAGWQIDPFGHSAVQAYLLGAEANFTRTNHIMWTMGDDFSYQYAESWFRNMDKLIYHVNKDGQVHALYSTPSIYTDAKHLSNVSWPVKYDEYFPYADSKNSYWTGYYTSRPTFKRYVRVLSGYYLAARQIEFLVGRRSSLGLFTTSLEDPMAIAQHHDAVSGTTNNTRQMTT

SEQ ID NO: 50491 - protein, 267 aa, Zea Mays
MACIRHCLHKGRRSVVEDHLIVSHGRLACSSLAQYVASGFSRLCDHQNIMGSKVGLLRNARRWCMHDEAVVHYIDMIDQTTLGHRMIKKQFNKTPRAGWQIDPFGHSAVQAYLLGAEANFTRTNHIMWTMGDDFSYQYAESWFRNMDKLIYHVNKDGQVHALYSTPSIYTDAKHLSNVSWPVKYDEYFPYADSKNSYWTGYYTSRPTFKRYVRVLSGYYLAARQIEFLVGRRSSLGLFTTSLEDPMAIAQHHDAVSGTTNNTRQMTT

SEQ ID NO: 50492 - protein, 279 aa, Zea Mays
MACIRHCLHKGRRSVVEDHLIVSHGRLACSSLAQYVASGFSRLCDHQNIMGSKVGLLRNARRWCMHDEAVVHYIDMIDQTTLGHRMIKKQFNKTPRAGWQIDPFGHSAVQAYLLGAELGFDSLHFARIDYQDKKKCKAGKGLEDDILMFDYNVEERVNDFVVVAIEQDGQVHALYSTPSIYTDAKHLSNVSWPVKYDEYFPYADSKNSYWTGYYTSRPTFKRYVRVLSGYYLAARQIEFLVGRRSSLGLFTTSLEDPMAIAQHHDAVSGTTNNTRQMTT

SEQ ID NO: 50493 - protein, 141 aa, Zea Mays
MWTMGDDFSYQYAESWFRNMDKLIYHVNKDGQVHALYSTPSIYTDAKHLSNVSWPVKYDEYFPYADSKNSYWTGYYTSRPTFKRYVRVLSGYYLAARQIEFLVGRRSSLGLFTTSLEDPMAIAQHHDAVSGTTNNTRQMTT

SEQ ID NO: 50494 - protein, 664 aa, Zea Mays
MRSSQHIQGLESLRWHLVFRKDAQALCCLLQEMISLTVRWFQPSIHLRMEHFQPRLSPPNSSSGRSTLPSAASWGQRDLNARTTATGATSSQSHTKPKSESQSNPFSSSSVFSCTKTPSSWNDDTSTAAKISEGQQLSEKESRTLQPYKPGISKETQALSSLESSLDIDFSTIPSAWNDDDIVVPDVMPKGSDENQVANKNGELTHPASKSLVLSKKDIKMNITSKTPSDFVSSPAISKSDVSTSDGDHSLTNITPKCLASNAVECQSSHTAVEKMLEDIGSKDTDMEKLSAQISSVTLGGNDEIQSMAGNQQPDVMPCTSVDVLMDQNFGRDLAHPNPDELLLPSENKDSIVSCQYSSDKRLDWSLEMQNCSVTPLNDRMDSALLTDKIHSRQLDGSEQSSYSSFVEFPSTVDTSLWNDTENNAALTIDNITSSQMQPGFSSTDNTYALLNGGQDGLGTVYTHDNVSVYTHGNVSGHPGMGSHHHRAMGSLRNNSIGSFDKTISVNKYERRIISDTLSEFNPWDDSYSTANNFARMLRESKNNDVHCIAPSWKSGTGIKESRFSFARQDNQGNLFDSSLRNCGTGTEQNFSLLPQNSRGNIYQNGLAFQSLENEFSNNNSPGVLDMATTGECYYTFLLLCLTEQNDKYCNLNEFTLCATLIFH

SEQ ID NO: 50495 - protein, 204 aa, Zea Mays
MTRRMTSAAPAPRRPQGLQQTSASRPWRPLRPALRASQTSSPSQSHLCYSHRSSVSFFGGTRWTTHTRLADDARHTRATRCAKSKLRRVLLCQSPTACSAEFTMEVGDELVRLDKQRRVRRWRIHFRRGRAGSRQLGVKHRGMEEPFCSMVTVDACLELLKLERIAKEQRASCYNTTILITSLGILFLRSPEIGTPRFQKTRWK

SEQ ID NO: 50496 - protein, 300 aa, Zea Mays
MPPRLSHRSTAAVPTLLLLLTLLMLSPPTTTAAAQHHCHRHHSTGDGVVISQADYQGLQAIKHDLSDPYIFLRSWNDSGVTACSGAWAGIKCVLCSVVAITLPWRGLGARSPRAGSASSSAFAGAIAGAVPSSLGFLTDPCGVYLFNNRFSAVANSTRLIQLNLSRNTLSDAVPVEVVASASLVFLDLSYNNLSGPIPDAFAGSDKSPSKLLNNNNNNKEAITGSYQLVFLSLAHNFLDGPIPASVTKLQQLDLYSNSLNGTIPTQLATLADLKVLDLSGNALSGDIPPGLDNLTATCWN

SEQ ID NO: 50497 - protein, 354 aa, Zea Mays
MCGMLGNTKIILLMEARHSDLWSKYKFICSCRRCIASPEPYTDLILNCDVRDLDKAEAEGTVTPPAIENLGDVLQQAISEYTSNDDPEACCDMIETMLSNRLVSGLKQEDISGRKHILQPLHHICLTAYMTLASAYRFRALSLEEAVRSDGENTDEFFRMAKAAAAYSLVLAGSTHHLFLSECSLMIPLSHFLLNTGQSLLYLVESIKGKTRQNISEARLSFSSCPASSTDNDSPPYHVFRSTCEAFGKQMLSLSLRCWSFLVRGLPCLEKIKSPMEFSMPGTTIFQSVLSEEDHANLSAHEPVGFTERQAGCILSLALCCITYCKYLATICYGPHHYLADHAKYLLEGIDPAQ

SEQ ID NO: 50498 - protein, 2667 aa, Zea Mays
MKACASETDLPNHIRILANTMQHYMLCTFRKVLISAPALLKSFREEGLWDLIFSEKFFYFGSSLDYIQQNDQLIDAPKSIDSKSFSETDVNVLQAEAISFLEFAATLNENSNNLPECLALVGALEHCTYDPGLAGGIVKSFHVILQLATEQTLASFKSIDVLTRVLKVACLQAQEIRKLSQDDLNQNGSQSRNAQTTYSDERIKNTCAFVKLAFNLFKEYATISDIGRITVLCNANCIECLFDLFQEEYLRKHILEQVLALFRLPSSSAQHHAAKMLLCSKYLETFTRAKEKEKAFAELSIDLLVNMREVIMIDRVYYQNLFRNGECFLHIVSLLNGTFDEAVGEQLVLNVLRTLTALLAENDESKAAFRLLVGAGYQTLQSLLLDFCKWIPSPKLLDALLDMLVDGTFDINEKATIKNEDVIMLLINVLQKSSTSLQHYGLMVLQQLLKGSITNRTSCFRAGLLSFLLDWFKVEKGNDIVMKIAEIIQIIGGHSICGKDIRKFFALLRDEEIIAKQQHSSLLLTSVSHMLKEKGPEAFFEFSGHDSGIEIKSSVQWPYNKGLSFCCWLRVESFPEKGLMGLYSFFTENGKGCLAMIGNNTLIYESVNPKHQCVLLSLSLPIKQWKFLCVTHTIGRTFSGGSQLRCYVDGDLVSSEKCRYTKVNELMTRCSVGTELMPIGEEPSSLGFENTLAFTGQMGPVYAFSDALSPEQIRGIYNLGPSYMYSFLGDQNLLTNDDSRYKGILDAKDGISSKMIFGLNAQASNNRTLFNVSSALDGLDKSKFEATTMGGTKLCSRRLLQEIIYCVGGVSVFFPLLIHFDDAVVQNGEFATRDQLAGQVIELVASVLDGNIANQQQMHLLSGFSILGFLFQSVSPQLLNIKTLSASKYMFTILKTSSMSDILLRDALSQFYLNPHIWAYATYQVQRELFLFLIQYFEADGKFLPVLCALPRIIDVIKQFYSEKLDPRFSKPLLVSKKVTGERPSMEEIRKIRLLLLSLAEMSLKLKVSQHDIRALVSFLERSQDVACVEDILHMIIRALSQNSLVPSFLEQVNSLGGCYIFINLLKREFEPIRLLGLQLLGKLLVGVPSEKRGPKIFGLPVGRPRSIAEDIRKGATAAPQLFFYSISDRLFKFPLSDHLCASLFDVLLGGASPKQVLQKRSQSDALKDRSMAPFFVPQILVCIFKYIQSCRDASVRTKILSDLLDLLDSNPVNVESLMLDVLRNYKSNSVAKADGLETNELILVRNMYSLVLSYCIFSVKGGWHQLEDTTNFLLLKIEQGQLPNSSMLRDIFEDLIGSLLETSSEESVFNSQPCRDNILYLLNLSHELFVDQIGIKLLFPSPDMSAHLSSDDINSAVLEIMNTEGNGLLTSLPWSNILFNDGEKLTDDWWSFFDKIWTLLCYLNGKGQTRLTPKGLNTAGPSIGQRARGLVESLNIPAAEMAAVVVTGGISSALGGKTNKVADKAMMLRGERFPRIIFHLIIMYLCKAGLENASKCVQQFISLLPNIISEDDQCKNRLHFLIWSLLRVRSQYGQLDDGARFHVMSHLILETVIYGKSMLTTNIVGRDDSTEANNSKEAGFILNLVQKDRVLTAATDEAKYMKDAIADRMKLVQELHSKLDERSIQDVEQLQSFEDDVQFAKTAAIAADDSRKAAFQLAFDEDQQIVADKWIHILRALSDERGPWSAAPFPNNIVTYWKLDKTEDKWRRRLKLKRNYKFDECLCHPSSIKSSNDNAAPTVDPSANAKITEKMKHLLLKGVRGITGDISSESCEDSNDMIDPPQNVPPENHTVSDTSDSADSSDYPAIVQNRKESSSTSSDNDYIEVLSSVHCVLVTPKRKLAGQLTITRNALHFSFEFLVEGTGGSSVFDRFHDKKDSDSKNEMGGVEKLKGNLDGGRGNAAESSDTQIKNQSGKIKHHRRWKITRIKAVHWTRYLLQYTATEIFFDDANAPVFLNFSSQNDAKSVGSLLVSLRNDALFPKGTTRDKNSLISFVDRKVALEMSESARESWRRREISNFEYLMILNTLAGRSYNDLTQYPIFPWILADYSSEKLDFNKSSTFRDLSKPVGALDAKRFKAFEDRYLNFVDPDIPSFYYGSHYSSMGIVLYYLLRLEPFTALHRNLQGGKFDHADRLFQSIESTYSNCLSNTSDVKELIPEFFYMPEFLENSNSYHLGIKQDGEPLGDVGLPPWAKGSPEEFIHISREALESEYVSSNLHHWIDLIFGYKQRGKPAVEAANIFYYLTYEGAVDLENMDDMLQKSAIEDQIANFGQTPIQIFRKKHPRRGPPIPIVHPLYFAPQSITVTSVVPTIVTPLSVLFIGLLDSNVVMMNEGLILSVKLWLTTQLQSGGNFTFSGSLEPFFGIGSDVISPRKIGTSLAENVEFGRQCLATVQIRGDNYLILCGNWENSFQIISLSDGKIVQSIRQHKDVVSCVAVSSDGSVIATGSYDTTVMIWYAFQGRSNDKRYRNANYDLSTKDHVIIESPCHILCGHDDIITCLFVSTELDIVISGSKDGTCMFHTLREGTYVRSIRHPSGAGLSKMVTSQHGRLVIYSDSDLSLHMYSINGKHIASSESNCRLNCMELSCCGEFMVCAGDHGQIVLRSMHSLDVVWRYEGAGKTITSLVVTPEECFLAGTKDGSLIVFSIENPLLRKNAMQRHKAKPSIGG

SEQ ID NO: 50499 - protein, 533 aa, Zea Mays
MAVDSRVDKTLSILRPQALTDYRALLASLGWPPSLSSPDTEKDKYPQIPNPLVLMNEGNKARYSQSFQALCALQHVQGNRESRLCQTAKVTPALADLKYFTRTACFDNGLWAIDELVHPIASRMEYHFVKWSEQPEFIFTLVYKITKDFMDGVDDVLQPLIDQARLVGLSAKESWVTGMVKILVGYLERQIFPALVCSYQDHATVGKPEVDSSWLHLNDVMISFDKRMQLLADSGIQKMTSLSEGLSRSLSVFSIYAEHPDWLQIWADVELCSAQDKLKSEMEDETSWSCSGQHDQRGHMENSTKFLLSTREDYKAPPVCEFVTKTALSMVERGRVLPNRGMQIQYNRSSSVRFLNGFFLVLRERCEALQLSNTALEDHSLSKTSCAINAARYCENVLREWDEDTTFLDMGPQGSLYTDEIGFLVKLGTDHLEQILSWVLLEFEDLSWEYVQSIGSWSGQTILDDEILDEENTGVSPGFVPSLDVLMDRTAKLKRYLNSKDFLDLWRSIAEGLDYYIYSSIRWAEMHSACWKH

SEQ ID NO: 50500 - protein, 450 aa, Zea Mays
MLFPVELERSAGRQRPQDTPTSSFFSAASPPTLFPLLCWVLRFALLAALRLSPISTRLVLAWLPLPTDSTGFKRPTSAETWPRACVRILRTRSPEPPGPIEFRLPMPALLLLLLLAAAPAPARAGDPYSYYDWEVSYISAQPLGVKQKVIGINGQFPGPPLNVTTNWNVVVNVRNALDEPLLLTWNGVQQRKTAWQDGVLGTNCAIPAGWNWTYTFQVKDQVGSFFYFPSTPLHRAAGGYGAITINNRDVIPIPFAFPDGDITLFIGDWYNRGHRELRSALDGGTLLGAPDGVLINGLGPYQYNESVVPPGIVYERINVEPGKTYRFRVHNVGVSTSLNFRIQNHNLLLVETEGSYTSQQNYTNLDIHVGQSYSFLVTMDQNASTDYYVVASARFVDAAVVDKLTGVAILHYSNSQGPASGPLPDPPNDQYDTAFSINQARSIRVEHLSS

SEQ ID NO: 50501 - protein, 192 aa, Zea Mays
MHIKGNRQYSCKLKFKEPSLLDRNPHLVQGFVEDNNGNKASFLIGMWDESIYCSNSDTSKVKSADQLKGASLLWEKNKPAPNPTRYNLSSFAITLNELTPGLQEKLPPTDSRLRPDQRHLENGEYEKANAEKLRLERRQRMSTKLQDNGWKSRWFEQDTEDGTYCYKGGYWETRERGFWDGCLDIFGEFVET

SEQ ID NO: 50502 - protein, 476 aa, Zea Mays
MARWPGAGEGAEGGRRRGCGGQASKGASTAGKGAADGSRRGRAGRARSRRRASQFLYPFCPSQFLQYRIEASPGSLSVGALPAACTSPWQWRLPPPSAPPRSLVLTCSLSRTLICPCSRINPELSCMDPADVPEGIDPKSACRVEVTVNSYFTMQDGRKEYNRGKTVSYVVDSEEYSVIDLEKDIASEFKWGSDQQPNFWVLTRGNMTSKLASDAQLLDLLRASRVVKLLMIVGNCEHNVGHGHIPATWNIQEEIPVAVNIEEEMLDAMDNNLEEADGGFAWAEIPEYGETTAGPPMAKEEEKEHFITVGCDPNGDKPAGINEEWRYFKSVDHVAIDPLQNLKVEGQKRKRARPVLEIRDFDTEAVPEDETTLLDVFIVPHTSHDSENPVIKEGDTFVDKIAFVHTIKQYAIKNEFETRIEHSDKERYRARCVDENCDWRVYAKKLHGGNTFMSNYQNWMCTLVPVKHLRMLQQLD

SEQ ID NO: 50503 - protein, 1234 aa, Zea Mays
MDTAAGPGPRDGPDRTPQGPGASPEEAAADGVKTDIAGGAEALAAAGAAGEADPGGGAAAAGRGGDAEASASEPTAEEVNEGCGGAAAAAGGDRPAAPEADADGGAGKGRSAVHAVSEVEQGQGIAGAAQDVDPAVFEVKKMDVSEGGDASKQNQHSPSCTASEVDVGIVPVAVRDLDPVGSEVMMEVDDGHVREQERAGVAVAGSEFKMEEADGRVVHQGSAATSAGGLQARAEEVGECLVGRYIGRNAPMQAGILIGKVASYDSTAGIYSVVFEDGHNEDLELPELHEFLMPDKNGTLGMSVNCRKRKLGLLVLSGSVSEVKEPASTRQRVDGCEMPANTDALRYSGSGSDMSEDIESSSNSSDFTKEEPSEPCPPVQAVELPPSSGDIHVPEDSISYLFSVYNFLRSFSVQLFLSPFGLDDFVAAINCTVQNNLLDAVHVSLLRALRRYLESKSAQGSQMASNCLKYLDWTLLDALTWPTFLLEYLYVMGCIKNLGGQSFARSLLAAEYYKLSVATKLRVLQILCDHVLESQEYKTILEDRVGYNEEMEYEIDSSTFLEAGSRAVLTRASKASAYKMLNDLQNFESGPNVTNSDVAVADVSQDGNSDDCRICGMDGTLVCCDGCPWAYHSRCIGQNKAFLPQGDWFCPECVVNKLGPTSSRIERGARGAQMFGIDMHGRLFLGTCNYLLVIEISSDVESYARYYNHYDVVKVLQRLALSDAYVDICRQIMEYWKHLLGRVQSERSTILKEVGTRHTPQSSMLSFTPTMSGDGSGWTTLKDGGDSKTVALPQTNVQQKIFANQYTVCSAEQTEKNVDVCKQALSAQNNIHNAPRNGASGPFVASPVSHQNGSIGTGMSNIAQAQPAHSIYRPDLSTVSAKSESFRSSLQGKLHLQMCTERPGNMSCGKAAKLSSFKPQAYMNLYNHGNIAASAAANLAIIASSEGKVSTSQLSAKPKKKVAADNALQLKAFSSAVAQFVWPSTEKKLMEVPRDRCGWCLACRSSASGNKKACFLNMTTSNAAKSSARVLSTMRVIKISDSHFPSIAAYLANMEESLRGLLVGSLQDMQQRERWREQLEEASNCRTVIPLLLELESNIRGVAFSASWFKPIDDWPAESPCPSTGASRPAQHQKRGAGGRRGRRRLLVSEPGTVTDDDNSWTWWTGGNIIKRTLQRGALLHSTIRKAARQGGKKRLAGLSYHEGSNFPRRSRQLFWRACVGLSQTSSQLALQIS

SEQ ID NO: 50504 - protein, 851 aa, Zea Mays
MSASEFRIPYQQVSPSQPAENVNQFKTCRCGEGDPNSTSETGDSPPASCPNCQVLKSGHLLLSSKGIGWTSWKKRWFVLTRASLVFFRSDPSLTTAYKFGILIIPRVEISVLLYNPSHYQNVPPPRGAEPIVTLGGIDLNNSGSVVIKEERKLLTVFFPDGHGERTFTLKAETTGDLNEWRNALESAIAQAPSIANTMGQNPIFSTDVEAESAESPAEHSEDRSVIGRPAKFALVDADGSPSFLEKALKFIEDHGIKVEGILRQSADVEEVKRRIRDYEKGKNEFSPEEDAHVIGDCIKYVLREMPSSPVPASCCTALVKAYRSDKARRLDEINRVINEVFPEPNRQLLQRTLKMMQVVESHKAVNRMSQSALAACMAPLLLRPLLLGECDIDNEFSMGGDSSFQLLQAAAAANHAQAIVIIMMEEFDQIFDDSEEGSCSSDAYTESEDDVDKEYSTDNDTHDDDGSYDSGEDDIEEDLDYSDDSEHDSKINANIKDGKVKNNISETAEVAQAEDTSPMDINSQSNQKQESCGPNGSKDRILRSTSRSSSSREKTMEKSCSSAHKGKRTLWGRTSARKDLSTEEIECCSDDEALVEKLESNKIDLQSKIAKEAKENAILWSSLEKRKEELHERRLALEKEVENLRDQLKRVMNLRRGQVSSPSTIDSKVRGQQLCCESCNQRLLNTDRLSGPESSSVEASPTVGSDPAFDMGDIEQSRKQAAQHSPSSRDKPSHEAVGGITQRAPQRGHSIAREGQDGSSSLSSSNSKWNLAQKQYSNSPLIRGLHVSSRLEDFGGSISPAASSALAKLTNRLNFLKERRALLASEMQSLDLGRPPTVKSPTPKGHESKNS

SEQ ID NO: 50505 - protein, 473 aa, Zea Mays
MASSRTSWADVADAEPAPPPPVAAPAAASNGPARSSYVPPHLRNRPPAAAAAAPASAAPPPRSTAGLLTRTGGGSSFGAGGGGGFGGGRARGGARWDREPDPFADSAADAEVPFDEHQNTGINFDAYEDIPVEMSGRDIPPPVSTFADIDLGDALNENIRRCKYVRPTPVQRHAIPISLAGRDLMACAQTGSGKTAAFCFPIISGIMKAPSAGRPQRGGGMGMRTAYPSALILSPTRELSMQIHEEARKFSYQTGVRVVVAYGGAPITQQLRELERGVDILVATPGRLVDLLERARVSLQSIRYLALDEADRMLDMGFEPQVRRIVEQMDMPLPGARQTMLFSATFPKEIQKMASDFLDNYIFLAVGRVGSSTDLIAQRVEFVQEADKRSHLMDLLHAQRDTGKQTLTLVFVETKRGADSLESWLCMNGFPATSIHGDRNQQVCFYSVQTAHSAQERRHLAIVVRCSMFIPVQ

SEQ ID NO: 50506 - protein, 376 aa, Zea Mays
MEEGLVSVDKFSGGSQAYFLTHLHQDHTRGLGAVGGWRHGPLYCSPTTARLLPIRFPGIDASLLRPLAPGASASIYLFSPSSGQSLSLHVTAIPALHCPGSLMYLFRGDLGCMLYTGDFRWELGCDEARRAKQDLLDALDGDTIDVLYLDNTYCHPSLNFPPRPVVAEQVIDIIRSHPDHEVIIGVDTLGKEDLLLHISRALQTKIWVWPQRLQTIHLLGIDENRDIFTTQTSLTRIRAVPRYSVTIDNLEALNTVCPTIGILPSAIPCLWKSSEGKAKSKGRSSVKSIRSSGRELEDFMHTVRPWTVSGIVSSSFCYGRDNDKLTPKRWRNGSVTPKERKVRISSSSLYRSKVTMKRKECCGARINDTEEHIGVT

SEQ ID NO: 50507 - protein, 161 aa, Zea Mays
MEIFRPQKEHGLAQTGLKGKFKITTRCLWLDNGRLLDALYKAAHAALLSCPMNCPLSHMERMVAEILRKMVRKYSEKRPDVIAVAMENTTASFSEHLDAKSSGNFEPSSATSHLSRSPAMSLEGSYKTHPDNPEVDAEEALPEATRTALDDATTLLCIYHA

SEQ ID NO: 50508 - protein, 167 aa, Zea Mays
MLLLCSMEIFRPQKEHGLAQTGLKGKFKITTRCLWLDNGRLLDALYKAAHAALLSCPMNCPLSHMERMVAEILRKMVRKYSEKRPDVIAVAMENTTASFSEHLDAKSSGNFEPSSATSHLSRSPAMSLEGSYKTHPDNPEVDAEEALPEATRTALDDATTLLCIYHA

SEQ ID NO: 50509 - protein, 453 aa, Zea Mays
MYRKAAALWVELRVELLSAIEYYAEDKVNSAQIWRLYWRFFRHMCMSAKVPAVVRLAKEALAEEKCVVIGLQSTGEARTEEAVAKYGIELEDFVSGPRELLLKLVEDNYPLPPKPDCFEQGEEKVQEFQHKRHYGSDMSLKGRVSKLGKKEDVSEDGGDEYPPHSDHESTESDEDFYMCQICNTEEEKNSLFCCCICASRVHPGCLTPPSTDIVNDDWSCYGCKEKVKSYLKERDAYLTELSKRYDAALDRKSKILDIIRSLDLPSNPLDDIIDQLGGPDNVAEITGRRGMLIRASDGKGVIYQARNTKEVALDMINMHEKQQFMDGEKNVAIISEAGSAGVSLHADRRAKNQRRRVHITLELPWSADRAIQQFGRTHRSNQTSAPEYRLLFTNLGGEKRFASIVAKRLESLGALTQGDRRAGPSLSAFNYDSNYGKKALTMMYRGIMEQVNS

SEQ ID NO: 50510 - protein, 915 aa, Zea Mays
MLIFAGRHSPVSELLPLANHFTCCGSRPSIEIAMPHGHAAAVVDRLLRRLGSAACRLEVPPNIDGDLAHVWTTLARLQDMLVSLEIRPELQEWMGDIKQVAYDVEDLVDELEDHNSMESQMSGCVAVGEETRWCCSCSFLMHSTRADRMKTIKRRLDFLVKDSVIFSLMQYPFPDVERFDNEAFDRAAVVGRDNDKAKIKDMILQSNAQKFSIIPILGLVGLGKTTLARLIFLDQGEGWDFDLRIWISLNRKLNIKMIASDIISQCNHREEKLLDVRTDMEIQENFQLLKRCLQEALHEKHCLIVLDDLSSTDKNQLDELKEMLKGTNESIKVLVTTSSEITAELLHTIPPYKLCPLSEDDSWKIFSQKAFGNCDGDNTDLKKIGKEIVKRCEGIPLLTHSLGLVVQNEVTNVWLAARDEEIWKLERRVATKIELFSPLYQIYNDFSSTIKLCFLYLSIFPKGSTIDKEKLIQQWIALEIIGSKHDSLPPYVNGEMCIQDFLSIYFLQVRDTHSDGALKAIGIDNSTIKHIPRFNTTSELSVDTISSSKVSTPSKEIPSTLRRPDKSKMPALIPGDGSLNLSLKQVQKVTHNFSPLFELGEGGTWAVYRAVLSDNQVVIIRRAKKGHVQEAKHLMEVKLLTKINHWSLVRFLGFIDEKDECIRITEYVPNGTLREHLHGDALICYNLRTSNILLTESYRAKVCCSELSKSGNIVLLKGTGGYIDPEYLETSELTAKSDVYSFGIILLEIISSHGPQDWDVLMNHRQSSVVQWALEKFYDDLMNEILDYRMEDRVDGDVVRDLLSLALSCVVSRGADRPSIVVVGERLWKIWQDHRRNVGEQHEYQGSWAEFIEQEGILRHHKCVLKRSWEPSTTQQDWSVYVRQIELVQEAYDTPWGEEIFSGSVSLDDITVYSR

SEQ ID NO: 50511 - protein, 1079 aa, Zea Mays
MLIFAGRHSPVSELLPLANHFTCCGSRPSIEIAMPHGHAAAVVDRLLRRLGSAACRLEVPPNIDGDLAHVWTTLARLQDMLVSLEIRPELQEWMGDIKQVAYDVEDLVDELEDHNSMESQMSGCVAVGEETRWCCSCSFLMHSTRADRMKTIKRRLDFLVKDSVIFSLMQYPFPDVERFDNEAFDRAAVVGRDNDKAKIKDMILQSNAQKFSIIPILGLVGLGKTTLARLIFLDQGEGWDFDLRIWISLNRKLNIKMIASDIISQCNHREEKLLDVRTDMEIQENFQLLKRCLQEALHEKHCLIVLDDLSSTDKNQLDELKEMLKGTNESIKVLVTTSSEITAELLHTIPPYKLCPLSEDDSWKIFSQKAFGNCDGDNTDLKKIGKEIVKRCEGIPLLTHSLGLVVQNEVTNVWLAARDEEIWKLERRVATKIELFSPLYQIYNDFSSTIKLCFLYLSIFPKGSTIDKEKLIQQWIALEIIGSKHDSLPPYVNGEMCIQDFLSIYFLQVRDTHSVYGMDNRVVPTTFYIHNFVHEFARHVACDDIIIFDGTKMQKGCAKRQTFQYALLTCYRVQSTFSHSTLTRTRALHIMNSEAITFPREAFELLKHLRVLNLSGCCIEELPASIGCLKRLKYLDVSGVQIQTLPFPDGALKAIGIDNSTIKHIPRFNTTSELSVDTISSSKVSTPSKEIPSTLRRPDKSKMPALIPGDGSLNLSLKQVQKVTHNFSPLFELGEGGTWAVYRAVLSDNQVVIIRRAKKGHVQEAKHLMEVKLLTKINHWSLVRFLGFIDEKDECIRITEYVPNGTLREHLHDQRKRILNFNQRIVIALDVAIALTYLHLCSGDALICYNLRTSNILLTESYRAKVCCSELSKSGNIVLLKGTGGYIDPEYLETSELTAKSDVYSFGIILLEIISSHGPQDWDVLMNHRQSSVVQWALEKFYDDLMNEILDYRMEDRVDGDVVRDLLSLALSCVVSRGADRPSIVVVGERLWKIWQDHRRNVGEQHEYQGSWAEFIEQEGILRHHKCVLKRSWEPSTTQQDWSVYVRQIELVQEAYDTPWGEEIFSGSVSLDDITVYSR

SEQ ID NO: 50512 - protein, 713 aa, Zea Mays
MDPVLAASLQGHTECSADYDYHSLTTTDELVIKEITGGSRGLRIAEQLNLQNRLEVCFLKLEWVPRSQSAQDQLLEYTDEEVLEKFQPNETLEHFMLVKYTGNVFPTWMMNKLTSLPYLVNLCLFHLHNCSALPPIGHLQNLRYLHIKDMPNLTNLEMGLSGGPVSLGKLTHLKLEALNLEELSILLSANNESPCFMFPNLEELSVLSCSKLVFKPSVPKCAKYVIKESNMVLSCWQPLGPFSSPPIEKVEISGCVMPSGWLQWLRSIQTLEKVVIDGEALSSFELQKIYAFQEASGSKISKETVSSSRTNMSRELTTEDGALKAIGIDNSTIKHIPRFNTTSELSVDTISSSKVSTPSKEIPSTLRRPDKSKMPALIPGDGSLNLSLKQVQKVTHNFSPLFELGEGGTWAVYRAVLSDNQVVIIRRAKKGHVQEAKHLMEVKLLTKINHWSLVRFLGFIDEKDECIRITEYVPNGTLREHLHDQRKRILNFNQRIVIALDVAIALTYLHLCSGDALICYNLRTSNILLTESYRAKVCCSELSKSEIISSHGPQDWDVLMNHRQSSVVQWALEKFYDDLMNEILDYRMEDRVDGDVVRDLLSLALSCVVSRGADRPSIVVVGERLWKIWQDHRRNVGEQHEYQGSWAEFIEQEGILRHHKCVLKRSWEPSTTQQDWSVYVRQIELVQEAYDTPWGEEIFSGSVSLDDITVYSR

SEQ ID NO: 50513 - protein, 1423 aa, Zea Mays
MLIFAGRHSPVSELLPLANHFTCCGSRPSIEIAMPHGHAAAVVDRLLRRLGSAACRLEVPPNIDGDLAHVWTTLARLQDMLVSLEIRPELQEWMGDIKQVAYDVEDLVDELEDHNSMESQMSGCVAVGEETRWCCSCSFLMHSTRADRMKTIKRRLDFLVKDSVIFSLMQYPFPDVERFDNEAFDRAAVVGRDNDKAKIKDMILQSNAQKFSIIPILGLVGLGKTTLARLIFLDQGEGWDFDLRIWISLNRKLNIKMIASDIISQCNHREEKLLDVRTDMEIQENFQLLKRCLQEALHEKHCLIVLDDLSSTDKNQLDELKEMLKGTNESIKVLVTTSSEITAELLHTIPPYKLCPLSEDDSWKIFSQKAFGNCDGDNTDLKKIGKEIVKRCEGIPLLTHSLGLVVQNEVTNVWLAARDEEIWKLERRVATKIELFSPLYQIYNDFSSTIKLCFLYLSIFPKGSTIDKEKLIQQWIALEIIGSKHDSLPPYVNGEMCIQDFLSIYFLQVRDTHSVYGMDNRVVPTTFYIHNFVHEFARHVACDDIIIFDGTKMQKGCAKRQTFQYALLTCYRVQSTFSHSTLTRTRALHIMNSEAITFPREAFELLKHLRVLNLSGCCIEELPASIGCLKRLKYLDVSGVQIQTLPFPVSRLTNLEVLDLSKTCMKELPSFIGNLQNLKYLNMQGCDKLQNLPLSLGHLQRLEQLRLSCCRCIAMLPDSLCNLINLRILDLSRCTMLRHLPALFGNLVNLEDLSLSSCFNLKQLPESFGNLYFLRFLNLSSCYELQQFPESVTNLEKLEVLILRRCCRLRILPPSFAMIKYLRILDLAGCEALHVSTEMLTTNLEYLNLQRCLNLQTQPYYFENFNKLKFLNLSHCLPTVDCLESISYLFNLEYLDLSETSLDIPMSFARLQKLHTLNLTGCAPMHPSSNVHQTWPGILAKITSLKSVLTMDPVLAASLQGHTECSADYDYHSLTTTDELVIKEITGGSRGLRIAEQLNLQNRLEVCFLKLEWVPRSQSAQDQLLEYTDEEVLEKFQPNETLEHFMLVKYTGNVFPTWMMNKLTSLPYLVNLCLFHLHNCSALPPIGHLQNLRYLHIKDMPNLTNLEMGLSGGPVSLGKLTHLKLEALNLEELSILLSANNESPCFMFPNLEELSVLSCSKLVFKPSVPKCAKYVIKESNMVLSCWQPLGPFSSPPIEKVEISGCVMPSGWLQWLRSIQTLEKVVIDGEALSSFELQKIYAFQEASGSKISKETVSSSRTNMSRELTTEDGALKAIGIDNSTIKHIPRFNTTSELSVDTISSSKVSTPSKEIPSTLRRPDKSKMPALIPGDGSLNLSLKQVQKVTHNFSPLFELGEGGTWAVYRAVLSDNQVVIIRRAKKGHVQEAKHLMEVKLLTKINHWSLVRFLGFIDEKDECIRITEPT

SEQ ID NO: 50514 - protein, 654 aa, Zea Mays
MAHLQLSAVAGARPAAAGGRGDEMEDVALLDSYDEEMGLPLPGASGAEAAEAHVRVTGMTCSACTSAVEAAVSARRGVRRVAVSLLQNRAHVMFDPALAKVLTGAPLLALVWRISTGDAILAYSQPLSGREARAVPWEVGSSPVEDIIEAIEDAGFEAEIIPESAVSQPKSQKTLSAQFRIGGMTCANCVNSVEGILKKLPGVKGAVVALATSLGEVEYIPSAISKDEIVQAIEDAGFEAAFLQSTEQDKVLLGLIGLHTERDVELLSDILKKIDGLRQFGVNSVLSEVEIVFDPEAVGLRSIVDTIEMTSNGSLKAHVQNPYTRGASNDAQEASKMLNLLRSSLFLSIPVFFIRMVCPSIPFLSTLLSMHCGPFLMGDLLKWILVSIVQFVVGKRFYVAAYRAVRHGSTNMDVLVVLGTTASYAYSVCALLYGAFTGYHPPIYFETSAMIITFVLLGKYLEVLAKGKTSDAIKKLVELVPSTAVLVLKDKEGKHVGEREIDARLVQPGDVLKVLPGSKIPADGVVVWGTSHVNESMITGESAPIPKEVSSVVIGGTINLHGILHIQATKVGSGTVLSQIISLVETAQMSKAPIQKFADYVASIFVPIVITLSIVTFSAWDTNTRKGCCNSCKGFLGNGPRRFPHTGCISRGKQ

SEQ ID NO: 50515 - protein, 572 aa, Zea Mays
MDIKERIRRSPPSSPQAVGEAAASAPGHPRGRKARVAVLPLSVACGVTLLLLAGVSAARRGAQFSGADPTTLSGNDDRGGFEQAGPRDGEHATTVSSKVQRDKLIGGLLAPGFDEQSCLSRYQSALYRKESPHLVSTYLLERLREHEVLQKKCGPYTDSYKKAIEQLNSGQDIMVGDCNYLVWVSYSGLGNRILTIASAFLYAILTNRVLLVDGDKGTADLFCEPFPETSWVLPPDFPITKFKNFSIGSPESYGNMAKTEAIHSDGSFKGPKPAFLYLHLAHDYDDHDKLFFCEHSQQHLQKIPWLILRSDNYFVPSLFLISSYQEELTRLFPQKDVVFHHLGRYLFHPTNAVWGLITRYYDSYLARADEKLGIQIRVFDTETGPFQHVLDQVLHCTLKEKLLPEINAQQPIISTGNIKSKVVLITSLNSGYYERIRNMYWEHPTENGEMISFHQPSHEEHQDSDKTMHNMKAWAEIYLLSLSDAMVTSAWSTFGYVAQGLSGSKTWLLFKPENRTAPNPPCRQVMSIEPCFHAPPFYDCKTRKGTDTGKLVPHVRHCEDMSWGLKLVDTGT

SEQ ID NO: 50516 - protein, 211 aa, Zea Mays
MRTPRTCARHATRGCMPPIAWPRAMSACASARPASAPPRCSRAAPTRRRSALPATRRSTPPTRLRGGTSACPSCRSRPPPSRLPLCSPRQLPPPRPLLVTRTRRSTPGCCSPRTQTTTTRTTTAVATTTTSAATPARSTQTLTSTSIWSGTVPTVTTTSIATRNSTGCKSSSSCCTRSLETRREASTWCLHRSGSSRVAITELLGRSRLPP

SEQ ID NO: 50517 - protein, 512 aa, Zea Mays
MGAAAGGHALRAVGDVVSFPATVAAFVEALLQGWAEARAGLLVPLLRAAVLLCTAMSLIVLAEKVFLGAVSSVAKLRRRRPGRVCRCDPDEEAAAASQAYPMVLVQIPMYNEREVYQLSIEAACRLTWPVDRLIVQVLDDSTDSVIKELVKGECERWATEEGINVKYETRKDRAGYKAGNLKEGMRHAYVRACEFVAMFDADFQPPPDFLVRTVPFLVHNPSLALVQTRWKFVNANDCLLTRMQEMSMDYHFKVEQEAGSSLCNFFGYNGTAGVWRTQAIVESGGWEDRTTAEDMDLALRAGLLGWEFVYVGSIKVKSELPSTLKAYRSQQHRWSCGPALLFKKMFWQILAAERVSVWKKWYMVYDFFIARRIIPVWELIYIPIAITLLNSVGTPRSIHLVILWVLFENVMALHRFKAILIGFLEADRANEWIVTQKLGNLQKLKSIARLTGSYRFKDRFHFLEVFIGLFLLASACFDYLYRDDYVYLFVLPQSIMYFAIGFQFVGLNVSED

SEQ ID NO: 50518 - protein, 204 aa, Zea Mays
MLNKNVSYSTYSTPHEPLRHTHIPDKYSGCAFSLGFDSFTTMSLGPNICANMTPMERSISAKEPENSEDLPTVVRSSDEMDTRNSGDVRRDTVDTLPESKQSHESCASVSNKFDSGEYQVILRKELTKSDVANSGRIVLPKKDAEAGLPPLVQGDPLILQMDDMVLPIIWKFKYRFWPNNKSRMYILEAAGEFVKTHGLQAGDT

SEQ ID NO: 50519 - protein, 620 aa, Zea Mays
MAPVSLPPGFRFHPTDEELIIYYLKRKINGRQIELEIIPEVDLYKCEPWDLPEKSFLPSKDLEWYFFSPRDRKYPNGSRTNRATKSGYWKATGKDRKVNSHRRAVGMKKTLVYYRGRAPHGSRTDWVMHEYRLDERECETDTGLQDAYALCRVFKKTAPGPKIIEHYGAVHHPIEHPQWMAEAGSVDRHSPTLDLSSDARGDDFESSSFSFPTEAPSMDSMHGMQMSAPHEDGKWMQFLSEDAFNATNNPFFMNPPSSSSFPCLPSKVDVALECARIQHRLSLPPLEVEDFPQDVSLDTKASVLRSNPNEVDILQEFLSVASASQELINGATSSCYAAELWPSGAGTSSTSTHYVNELSSLVELGVKAKEEADNFYYMDCIVGTSVGFSSKSSVQVDEQAVRLVEIADIEGLKQEEKRQVENLRGVRLHNNDLGEIVVQGDESNPTDCITQYPISDYSADNLGEAGHLADPTDVGGGLATAPIFSQSQPDDFAIGFGDVDVNPNASFDLYERVDVKHGLFVSTAGAPKTFFHHVEPSKKGQIPGGEDASIMPPEVLRQQRNSGSPTTMNTEQELVKKAKKVMKPGHGGGDGNQACLLLPLSKRSKGISSMFFSVRNGHNF

SEQ ID NO: 50520 - protein, 416 aa, Zea Mays
MSMGLMERIRKRRQEDDDDMMMFFLPALHLLRSSSLKGRRVKKRRHTSKLSGEEHVLELLEGHVKNCRVAFRMEPEIFRALASYLRKERLVRDTRIKVEEKLGFFLYMISHNASFEDLQEEFGHSSDTFHHHIKHFFDIVVPSLAKRFLKPPSPMQVHSKIERNPRFYPYFKNCIGAIDGTHVPITISPDKAAPFRNRKGTLSQNVMVACDFDLNITFMSTGWEGSATDARVLRSAMNNGFHVPPGKFYLVDGGYANTTSFLAPYRGVRYHLKEYGQGHRRPQNYKELFNHRHAILRNHVERTLGVVKKRFPILKAATFHKIRNQVKIPVAAVVLHNIIRSLKGDEEWLDNQPDNISPQNFVDLPDGDQGNDQVNVQGNRPYVALFYILFTVTLLPLLIFGLIHFSLFSILKHNII

SEQ ID NO: 50521 - protein, 1218 aa, Zea Mays
MRVTVTPKDEERLVDLMAREQPRSAVVAAGGDLVTAAGGGGEGSDRDSSGSIEEITADDFKKDSSSALGGAAAAAGPRSRSWVAPPAVGYMARNFRYAFNSFAWSQAVRNKPLGLQPPAPDDDEVEHAVDVSDGEKEEGEIEEGEAVEALASPAPAQPETIDLDSDAPEKSESVAIDGSASVVPVPAAEEEEVNLDQRVGSILEELEMVSIEEAEKYMGICFMFFLEQRLCFRSFEGACARLHTCFENLKPLFQELENGSPMAILEPLMQQAFIGIDTLTTVANLYNLPRREQNKTTLLKLLFHIKNRYSDMLTPEQREEMDSRVRKLVFGEKDNVSDPSTSCGTSAINVSAPSGQVSNTGGLPFESGAANLFSSLPRLEVPAKRNSPLLNLHADYDENSLPSPTRDNAPPFPALKPIGFGAFPMKYGQKSVYPSDDLPSPTPSGDEGKPADKGGDIFSDVSSFPVPKSIVLPSTSQMPASQPSTVSSSSISYASSTSQMAASQPITVSSSGISYASGPPGFAKQIEQSTAGPNHAIKAASKSRDPRLRFLNRDSAGATDVNWRANFSELKDGNLGGVSVGNRKQKAVDDPQVDDNALKRFRGGIANQRDMQPTGNPNQLMNIRAPTHSSSINMKTLQPPQTTAPHVSAAPAVPLPPMLLKDIAVNPALLMHLIQMEHQKKSASESQGGMSSGMTNNGIAGMVFTPGNAPKITEAAQVPSVRPQVPVQTPPLNSQNDGGIVRMKPRDPRRILHNNIAQKSDAMSLEQVKNNGTTQPDSQGTKDQTTPVPSQPALPSSIARPFSSAKHVDPVSNSQLAATAIMAPTQALSSVNKVDPRLAVEQNGQNADATTNGASATTLEATQPVSPWGDVDHLLDGYDDQQKALIQKERARRITEQHKMFSARKLCLVLDLDHTLLNSAKFIEVEPIHEEMLRKKEEQDRTLPERHLYRFHHMNMWTKLRPGIWNFLQKASNLFELHLYTMGNKLYATEMAKVLDPTGTLFAGRVISRGDDGDPFDSDERVPKSKDLDGVLGMESAVVIIDDSVRVWPHNRHNLIVVERYTYFPCSRRQFGLPGPSLLEIDRDERPEDGTLASSLAVIERIHHNFFSHPNLNEADVRSILASEQRRILTGCRIVFSRVFPVGDASPHLHPLWQTAEQFGAVCTNLVDDRVTHIVANSPGTDKVNWALSKGKFVVHPGWVEASALLYRRANEHDFAVK

SEQ ID NO: 50522 - protein, 98 aa, Zea Mays
MKSRRWATEEEIFNPQLGRTQDLHWMRDFGGGCNWRSASLRCCESQAATAAGGRGRGRRVAAPGGWSEFGALNSRGVSNPPMPSMTMLGARCGHKKTR

SEQ ID NO: 50523 - protein, 689 aa, Zea Mays
MAASPSPSTATATASPSASAAAVLAVNGERVELREGDVNPGTTLLEFLRTRTRFTGPKLGCGEGTSPRPPPPSPRALPFRGCGACVVLLSAYDAASGAVSHAAASSCLTLVHGLHHRAVTTTEGLGGGGRLHAVHERLAGFHASQCGFCTPGVCMSLAAALAGAEAEAKAKAGRRPAPPEGFARLTAAEAEWAVAGNLCRCTGYRPIADACKSFAADVDLEDLGLNSFWRKGDAHASKLPRYDEGSIGVFPEFLKAEIRASSGVDQYTPPALLGSATTWHRPRSVEEYYKLVDSELFDQSKTKVVVGNTASGVYRETEVYDRYIDLRCIPELNSVSKEANGVQIGAAVTISQAIEILRVEAGGCNDVIFCKIADHMEKVASPFVRNTASLGGNLVMAQRDQFASDIATILLAAGSSICIQASSKRLTVMMEDFLQMPPCDHKTLLLSICIPRWTPIGGLFSGDKTMAGTESKTGTSVLFETYRAAPRPLGNAVAYLNSAFLAQVSSDGTSSRLILREICLAFGAYGSQHAIRARNVEKLLVGKPITTSVLLEACRRLKETIVPKEGTRHAAYRSSLAVAFLFTFLYPVTEGTLKTVKEVHLNGYATFGTNGNPNCGPDAHVDVSLKKVIDVNSGSCTNERILEYSNQIIEINKDYFPVGIPTKKVGAELQASDCRNTKICQYSCKKSCC

SEQ ID NO: 50524 - protein, 1210 aa, Zea Mays
MAASPSPSTATATASPSASAAAVLAVNGERVELREGDVNPGTTLLEFLRTRTRFTGPKLGCGEGTSPRPPPPSPRALPFRGCGACVVLLSAYDAASGAVSHAAASSCLTLVHGLHHRAVTTTEGLGGGGRLHAVHERLAGFHASQCGFCTPGVCMSLAAALAGAEAEAKAKAGRRPAPPEGFARLTAAEAEWAVAGNLCRCTGYRPIADACKSFAADVDLEDLGLNSFWRKGDAHASKLPRYDEGSIGVFPEFLKAEIRASSGVDQYTPPALLGSATTWHRPRSVEEYYKLVDSELFDQSKTKVVVGNTASGVYRETEVYDRYIDLRCIPELNSVSKEANGVQIGAAVTISQAIEILRVEAGGCNDVIFCKIADHMEKVASPFVRNTASLGGNLVMAQRDQFASDIATILLAAGSSICIQASSKRLTVMMEDFLQMPPCDHKTLLLSICIPRWTPIGGLFSGDKTMAGTESKTGTSVLFETYRAAPRPLGNAVAYLNSAFLAQVSSDGTSSRLILREICLAFGAYGSQHAIRARNVEKLLVGKPITTSVLLEACRRLKETIVPKEGTRHAAYRSSLAVAFLFTFLYPVTEGTLKTVKEVHLNGYATFGTNGNPNCGPDAHVDVSLKKVIDVNSGSCTNERILEYSNQIIEINKDYFPVGIPTKKVGAELQASGEAVFVDDIPAPKDCVYGAFIYSTKPLAHVKSIELDLSLKQLKTLGVVTVKDIPECGSNVGANTIFGPEPLFGDPVTQCAGEPLGVVIAETQRFANIAAKKAVVNYSTENLDAPILSIEEAVKRCSYFETPPFLLPLKIGDFSKGMAEADQKIYSEVKLNSQYYFYMETQAALAIPDEDNCMVVYSSSQCPETAQNVIAKCLGLPCHNVRVITRRVGGGFGGKAVRSLPVATACALAAFKLHRPVRMYLDRKTDMIVTGGRHPMKICYSVGFKPDGKITALHIAKVCRTNLATKSAMRGPGEVQGSYVAEAIIEHVASTLSADANLVRRKNLHTVESLALFHSECTEDAMGYTLHSICDQVTASENYQHRLEIIQSFNKNNKWKKRGLSFVPIVHKVLSRPTPGKVSILNDGSVAVEVGGIELGQGLWTKVKQMTAFGLGQLCPNRSQELLERIRVIQADTLSNVQGGWTTGSTTSESSCEAVRLACNVLVNRLKPVKEQSQEKQDNVSWDELISKGRGGISECWFACQPFPLLLYAM

SEQ ID NO: 50525 - protein, 484 aa, Zea Mays
MAASPSPSTATATASPSASAAAVLAVNGERVELREGDVNPGTTLLEFLRTRTRFTGPKLGCGEGGCGACVVLLSAYDAASGAVSHAAASSCLTLVHGLHHRAVTTTEGLGGGGRLHAVHERLAGFHASQCGFCTPGVCMSLAAALAGAEAEAKAKAGRRPAPPEGFARLTAAEAEWAVAGNLCRCTGYRPIADACKSFAADVDLEDLGLNSFWRKGDAHASKLPRYDEGSIGVFPEFLKAEIRASSGVDQYTPPALLGSATTWHRPRSVEEYYKLVDSELFDQSKTKVVVGNTASGVYRETEVYDRYIDLRCIPELNSVSKEANGVQIGAAVTISQAIEILRVEAGGCNDVIFCKIADHMEKVASPFVRNTASLGGNLVMAQRDQFASDIATILLAAGSSICIQASSKRLTVMMEDFLQMPPCDHKTLLLSICIPRWTPIGGLFSGDKTMAGTESLFRWNFKQINIERDMSGFWCIWEPTCHQG

SEQ ID NO: 50526 - protein, 685 aa, Zea Mays
MLLKSKSEQERRLLTALVNKLGDPERRAASSAAYLLTCLLAAHPNMKMVVIDEVDSFLFRPHVGLRAKYQAVNFLSQILLTNKGDGPKIAKRLVDVYIALFKVLMSSGDTKGDTYSKDSKKKVGKIEGGNNKMDSRSKGNNEVGSTAGSDLELDSRILSALLTGVNRALPYVASSEVDDIVEVQTPILFRLVHAENFNVGVQALMLLFQISIKNNIASDRLYRALYSKLLSPSAVTSSKPELFLGLLVKAMKNDVMLKRVAAFSKRLLQVALQRPPQYACGCLFILSEVLKAKPPLWGIVLQNESVDDGDEHFEDILEIPEDSSVASAVLHKHNEKVAAHEKHNLDAADGIDSVKQVNLVDENNASTDSSRQHAFYDPRHREPSYCNADRVSWWELTVLASHVHPSVSTMARTLLSGNNIVYSGDPLTDLSLPAFLDKFMEKKPKGNRIAEGRWHGGSQIAPAKKLNLNHHLIGEELLELAENEVPPEDIVFHRFYLNKTGTVKRKTKQKDSVLDEDAGELLADNDADEASDESGDEILDLGDGLADDGEYDYDDLDSNAFEEEKDLLRDDSDVEFDDVSDDTASGDEGSENDDDIPILAGDSDGNLSDDEMVDAGKGGVSYTKKRRAGKKSGLSPFASLDDYEHLMVGDADATTAKRKHMATGRAGGEKKPKLRPRKKRSRSSE

SEQ ID NO: 50527 - protein, 433 aa, Zea Mays
MAEPTPKSKRTKKAKKPSAREGDGEDMDTLKSDVATFASSLGLLPGAGDSNGGFDDSDFRKSGPMYKSSKFPSKQPHQKPDNTANPHLNPRPTKKPHPLELRDSYAATKPGAVNTNYPLMKAAALSGQWYTDADELEARVLGGRKQVPPAVGLQEMQGIVERKRELAEKLMLQYAREYDAVRRGHGDLKLLDISAKSGTSADKVSAFTCLVEDNPIANMKALDSLLGMITSKVGKRYAFTGFDAIKELFLMRLLPDRKLKSLIQRPLDILPETKDGYSLLLFWHWEDCLKQRYERFVMALEDAVKDMLPNLKDKAMKVALQRPPQYACGCLFILSEVLKAKPPLWGIVLQNESVDDGDEHFEDILEIPEDSSVASAVLHKHNEKVAAHEKHNLDAADGIDSVKQVNLVDENNASTDSSRQHAFYDPRHREPSY

SEQ ID NO: 50528 - protein, 114 aa, Zea Mays
MGAGARLRTMARARVMLSVMAGASCARERIGGAGEDARARTRLRPTQERAVDSARGLSSGRCAGVVQRAVHSGCATTIAKSGWGTRALAVPYFYLILRSLYAPEPGGSCCRGSH

SEQ ID NO: 50529 - protein, 488 aa, Zea Mays
MQSTAAMRSGGGGNKRSLLLLLSAWWLLLGSLVAQLPAARGGSGHVVTRMPGFDGPLPFHLETGYVEVDEQLGVQLFYYFVRSEKDDPGEDPLLLWLSGGPGCSGLSGLAYEIGPFHFDARGYRGGFPTLLYRPETWTKVSNIIFMDSPVGTGFSYATSDEGLKSSDTQAVRQLAIFLRKWLEEHPEFLPNPLYIGGDSYGGMIVPALALQIHTSTELGENPSFNLKGYVTGNPVTDSQFDTDGVVPFLHGMGLIPYEFYENAREMCGGKYSDAASVACAEVTRAIANITSAVNREHVLEPACPDDDDDELFGPKTTMAETDGGTSRRLMLQSADYFLPAGFKCRRASYVLSRVWANDETVQESLGVRKGTIGAWKRCNQDILYNQNVQSVVPYHSRLAAKGYRALIYSGDHDRIVPFVGTQAWIRYLNLTVVDDWRPWYVGGQVAGFTRNSGNLIYATVKGAGHTAPEYKPTECQTMFRKWVSRDPL

SEQ ID NO: 50530 - protein, 862 aa, Zea Mays
MGKGARRRSRASGAGGGGHGSKRPRRAEEEEQEEEEMEPLVGEEEEVAALEGEDYCFVCKDGGDLRVCDFRGCQKAYHPACVGKDSGFLNSDEEFICEWHTCFICKGRSRYYCFCCPWQAFCQNCVKQAEFVPVLRKTKGFCTNCLRMAIMIEKNVDVDSDGERVDFNDRATYEFLFKEYWEEIVKGKESMTLDKLEKAYAFLKEKLNCKQDLDLEKVHDEEHSSDDDFVGNSDDDDDNKPSSTTKFNGTSNTMKFFLREDRPMKNGYVGWGSKELMEFLSSIGKDTLNSLDQHGATEVVKVYIQQKGLLARDKKKLVICDDKLKILFRRSKVRYNRIYSLLGKHIAVNMTSEDETFANSDDNNETFVRKKARIGNYSSSTPKCTPEINKRCFAALVRHNIDLIYLKKSLVVDLLREPDTFGSKVIGCFVRIKIDLNDYSFYMHKKVHQHRKLYQLGLVTGTSKSPEEYKINDVSTDILLCISSIPDIKISSLSDEEYEEEECQDLRLLAKNESFKRPTVGDLEEKARSLRREIVNHWISKELQRLERLIDRASEKGWRKEKFEYLDKKQLLRKPSEQQRLLEEVPQVIPETEDNKDTEFQVTGQDKPIQKSTVALQGTYVTRASFLKSHTGKKSKGTDGERDLSLESLSEEKPEVNKAHTDGGTAVIHNQNRSTTAAIAALPKYLHRHAATEANNAGDISSVQELDGVKASTDVDTTGTDVQHGSIEATKANAAGDAPGAFFQKQCAKAADVITIDDDDEDNSHRCYKEEQTAVVDLEADYAGDNHPVQLEANSRGHKHVKVKERIWYYIDPQGDEQGPFTMQHLSIWWSNGFFPGDFRVWRTGQTSNDAILLVDALQMTR

SEQ ID NO: 50531 - protein, 834 aa, Zea Mays
MFRDFVPSILNISRQCLANGEEDVASIAFEIFDELIESPAPLLGDSVRSIVQFSLEVSANQDLEINIRQQAIQIISWLVKFKASFLKKHKLVVPILQVMCPLLTETANEDEDSDLAADRSAAEVIDTMAINLPRHVLAPVLEFASLSFHHINPKYREAAVTSLGVISEGCCEHLKDKLEDCLKIVLEALKDQEQMVRGAASFALGQFAEHLQPEILSHYASVLPCILNALEDPSDEVKEKSYYALAAFCEDMGEDILPYLEPLICRLVMSLQSSPRNLQETCMSAIGSVAAAAEQAFTPYAEKVLEMMKGFMVLINDEDLCARARATEVVGIVAMAVGRARIEAILPPFIEASISGFGLDYSELREYTHGFFSNVAEILGDSFTQYLPHVVPLVFSSCNLDDGSAVDIDDADSIENGFGGVSSDDDVNDEPRVRNISVRTGVLDEKAAATQAIGFFALHTKSAYAPYPLGRLQQFIHMENNRSATPTIFCIKSRMDVLEKQKDVLDTVLNIYIKTMTEDDDKEVVAQACMSVADIVKDCGFAAIEPYMLRLAEVTLVLLRQESSCQQVESDGEDDGDIDHDEVLMDAVSDLLPAFAKVMGSYFDPIFAKLFDPLMKFAKSPHPPQDKTMVVATLAEVAQEMGAPISAYVDKIMPLVLKELASSDATNRRNAAFCAGEICKNGGAAALKYYGDILRSLHNLFSNSESDDAVRDNAAGAIARMIMVQPQSIPLNQVLPVFIKALPLKEDHEESMTVYGCVCGLLLSSHPQILPLVPDVIHVFAQVVVSPDESDEVKTNIGKAISHLISVYGQQMQPILSALPPAHANALASFASRR

SEQ ID NO: 50532 - protein, 242 aa, Zea Mays
MVDRSRAVLIGVTAGVAAALVAAAGVLLAVWLYRRRASVAARTRSPESPSATLRAGGAGRASLDSSVSVSVVSESAADWGHPPPHKRAAFWAWRGGAGHNGREPPPLSVSGIPKYHYKDLQKATSNFTTILGQGSFGPVYKAVMATGEVVAVKVLASDSRQGEREFQTEVALLSRLHHRNLVNLVGYCVEKGQRILIYEYMSNGSLARLLYGDNKRSLSWQERLQIAHDVSHGIEYLHEGVR

SEQ ID NO: 50533 - protein, 479 aa, Zea Mays
MLTQLLALASHALAEAETRPEPKDLWEEPINATMWRPCSDQRDWKASEGTNGYIMISANGGINQQRVAICNAVTISRLLNATLVLPKFLYSNVWLDKSQFGDIYQEDYFIKYLKSDIQIVKDLPVELQSLDLEAIGSLVNDTNVMKEAKPSLYVKKILPILLRNRVVHFIGFGNRLSFDPIPSDLQRLRCRCNFHALRFVHKIQETGAVLVERLHGHRASSSPLKDNLLGQFAIKSDPSTNKSDASKYLAVHLRFEIDMVAYSLCYFGGGKDEEDELEAYRQIHFPVLSELKKTTKLPSAALLRSEGKCPLAPEEAVLMLAAIGFKRSTNIYIAGAEIYGGQYRMAAISRLYPALVTKETLLSPSELEPFRNFSSQLAALDFIACAAADAFAMTDPGSQFSSLVQGYRMYYGGGNFPTIRPNKRRLASILVKNATIEWNEFESRVRKLIQQTKQVHERPVARSIFRHPRCPECMCRTEH

SEQ ID NO: 50534 - protein, 492 aa, Zea Mays
MATNSAVIVLLLVAAAVLACAGGARGFYLPGVAPAGFLKKDPLAVKVNQLSSIKTQLPYSYYSLPFCRPGTIVDSAENLGEVLRGDRIENSLYVFEMMEPRLCQIVCKIAPTQDEAKDLKEKIEDEYRINMILDNLPLVVPIKRLDQEAPTVYQQGVHIGIKGQYSGSKEEKHFIHNHFTFLVKYHKDDTGLARIVAFEVKPYSIKHEFDGDWKGNATLLKTCDPHSRRLVVDSDSPQEVDANKEIIFTYDINFEESPIKWASRWDTYLLMADDQIHWFSIVNSLMIVLFLSGMVAMIMLRTLYRDISKYNQLEDQEDAQEETGWKLVHGDVFRPPVNADLLCVYVGTGVQFLGMLLVTLLFAILGLLSPANRGGLMTAMLLLWVFMGLFAGYASSRLYRMFKGSQWKNVTIKTALMFPGIVFAIFLVLNALIWGEKSSGAVPFTTMFALVLLWFGISVPLVFIGSYLGFKKPAMEDPVRTNKIARPIPEQP

SEQ ID NO: 50535 - protein, 1848 aa, Zea Mays
MDVEMLPYGIISTFHCLSVRTSPLNMALLPCVYMQMDGVTLRHLLRPFAAQEAAAAGRVAAAPEQLFASHSTLQSGPPPRVGPSNELLTQVPGNYCTFDLAPDLTRANASNAAGTIDFTRAGPSSSAATLPKYPRHGLPASSSNEQSSFGALFPNRSANGMGIFTCQSSANEGIANVGVQFQDSSVHGLQKLPFKSMTHQHPTLPGGEFFVGEAGLFGVICLCHRLRMSVAKFCEHAGGIPEKAGEIVCLENGMSIAQWFKFCIGVGGSIANTRWDWPEWAHMKSSPEEHILKSLASRNSGTGKMGLLSRYGKITGHMNKPAYSNDLSVEGGGHTNVEKLVNRTDETYYRKSVDVHETFTKNSALLQNSAVVNLGPAKNHPVHAFDLNPLTTPSGSPHFEASMGRHYNGNHLAHSHGIHLEKNFDASFCNPMPRFTGVMNHDSRACRPNFSNKTFQDTSTMIEFQKPQTHRPPINQNPSPKQATKISKSLSEHNEPSISTGNKKQPLEVVNGMKRSEGDELTDDTSKNSFISLFLSHLERNNTPEPIDDILNSNEHYLPKALDVACGSDHPESATRQIETRVPNDKHSKLASAIVHTKRRSEGISLSVASSGYNPQDASHANSQEHLIHGDSLSHLLPSQPNTGISKISARVSCHANCMSCIHVGNKSHQVAHGEIGVPCFYDKMARGHGTFERVDDCTHRSLRAFTKISCDNGKSCCSSRELLPSFCQNDQPTLGKSICGCCCKIQEDASKLGFIPGHMCRTHFSSDVGPVLANKPTIEGLDEFCACSCSTFTQRSSLCSREYVLQSSCDSCPINGLHCRSCMGHAADSLTKHSLFDPLNTKERGSCCNGRCCYSVVPKCLSSCDFTKHCDVIIDQIGHAAPKDNHQLQMPTRCCTLGENEKLICQCLSNKIAVRNLPQTSHCKDVSEKVMNQPSIAITERLENVSEPSVADDSSSKAVAEKKDAYRDSAVSKGQPNFGFSSGSSSIIVTKFQKSPEFNNVSSTAKHSKHKNLCDEGSRIEKSSASSYVPTSTGCEEPLNSSAKSELGPSRVKRKCNQISEGRRLEETDNEEHCSELLKKTRTLRCSVKGSESDDCTRASSQSSQKGVYQPQNEVNSFSCRVLRTKRKHPIMHLNKHVKQLHRQTKFFEGDEQPDAKGNFLGGLDSYDRKRQVEDMSTLDKTRHHQEGSRAFVRKLPKYVSLNCIVNEPNTNSEGACSGSGGIDSSLIATGITNDNRKSPKIVPLNLVLKKAKRCNAVKLRKTESTHLYEEKSSDCSVNSSDYSIEKYSVDDENCSPQAEYELQDSKRSRYSSNDLRSHVALHKRTSGGTKNRRTSVSLARIKKFGSKSVCYSGSDKDNAVLAHEVNARRYSGRLSSNSPCCVCGISDLEPCNRLIECSKCYIKVHQACYGVLKVPRGQWFCRPCKNNTMDTVCVLCGYGGGAMTRALKTKNILKSLLQGLMNLERSEYYVDSLGNASSECTSLQNPVDSAHGDNIMNAKNITSNSWTSGKYYSSLLGPQPMQWVHMVCGLWTPGTKCPNDTTMSAFDVSGASPAKRNTACSICDRTGGSFVKCRAVNCLVFFHAWCAHQRGLLQSEPEGEHNENIGFYGRCVSHAIVFSSHVNPKKEYFRNNNWTCARTEGFKGRKGEGFSDSSHKKYEEYSGEFGVSQEQINAWLRINGSKPCGRGQKEYIHYKQLKGWKHLVVYKSGIHGLGLYTSVFIPRGSMVVEYVGEIVGQRVADRREIEYQSGKRQQYKSACYFFKIDREHIIDATRKGGIARFVNHSCQPNCVAKIISVRNEKKVMFFAERHINPGEEITYDYHFNREDEGQRILCFCRSRYCRRYLN

SEQ ID NO: 50536 - protein, 1182 aa, Zea Mays
MKSSPEEHILKSLASRNSGTGKMGLLSRYGKITGHMNKPAYSNDLSVEGGGHTNVEKLVNRTDETYYRKSVDVHETFTKNSALLQNSAVVNLGPAKNHPVHAFDLNPLTTPSGSPHFEASMGRHYNGNHLAHSHGIHLEKNFDASFCNPMPRFTGVMNHDSRACRPNFSNKTFQDTLSNASNTELKLGQSSYHQSMTTLSPLGQSTMIEFQKPQTHRPPINQNPSPKQATKISKSLSEHNEPSISTGNKKQPLEVVNGMKRSEGDELTDDTSKNSFISLFLSHLERNNTPEPIDDILNSNEHYLPKALDVACGSDHPESATRQIETRVPNDKHSKLASAIVHTKRRSEGISLSVASSGYNPQDASHANSQEHLIHGDSLSHLLPSQPNTGISKISARVSCHANCMSCIHVGNKSHQVAHGEIGVPCFYDKMARGHGTFERVDDCTHRSLRAFTKISCDNGKSCCSSRELLPSFCQNDQPTLGKSICGCCCKIQEDASKLGFIPGHMCRTHFSSDVGPVLANKPTIEGLDEFCACSCSTFTQRSSLCSREYVLQSSCDSCPINGLHCRSCMGHAADSLTKHSLFDPLNTKERGSCCNGRCCYSVVPKCLSSCDFTKHCDVIIDQIGHAAPKDNHQLQMPTRCCTLGENEKLICQCLSNKIAVRNLPQTSHCKDVSEKVMNQPSIAITERLENVSEPSVADDSSSKAVAEKKDAYRDSAVSKGQPNFGFSSGSSSIIVTKFQKSPEFNNVSSTAKHSKHKNLCDEGSRIEKSSASSYVPTSTGCEEPLNSSAKSELGPSRVKRKCNQISEGRRLEETDNEEHCSELLKKTRTLRCSVKGSESDDCTRASSQSSQKGVYQPQNEVNSFSCRVLRTKRKHPIMHLNKHVKQLHRQTKFFEGDEQPDAKGNFLGGLDSYDRKRQVEDMSTLDKTRHHQEGSRAFVRKLPKYVSLNCIVNEPNTNSEGACSGSGGIDSSLIATGITNDNRKSPKIVPLNLVLKKAKRCNAVKLRKTESTHLYEEKSSDCSVNSSDYSIEKYSVDDENCSPQAEYELQDSKRSRYSSNDLRSHVALHKRTSGVIGEDDSLGLTDVEINCLSISSSSNGTKNRRTSVSLARIKKFGSKSVCYSGSDKDNAVLAHEVNARRYSGRLSSNSPCCVCGISDLEPCNRLIECSAPSLLWCTKSS

SEQ ID NO: 50537 - protein, 1578 aa, Zea Mays
MKSSPEEHILKSLASRNSGTGKMGLLSRYGKITGHMNKPAYSNDLSVEGGGHTNVEKLVNRTDETYYRKSVDVHETFTKNSALLQNSAVVNLGPAKNHPVHAFDLNPLTTPSGSPHFEASMGRHYNGNHLAHSHGIHLEKNFDASFCNPMPRFTGVMNHDSRACRPNFSNKTFQDTLSNASNTELKLGQSSYHQSMTTLSPLGQSTMIEFQKPQTHRPPINQNPSPKQATKISKSLSEHNEPSISTGNKKQPLEVVNGMKRSEGDELTDDTSKNSFISLFLSHLERNNTPEPIDDILNSNEHYLPKALDVACGSDHPESATRQIETRVPNDKHSKLASAIVHTKRRSEGISLSVASSGYNPQDASHANSQEHLIHGDSLSHLLPSQPNTGISKISARVSCHANCMSCIHVGNKSHQVAHGEIGVPCFYDKMARGHGTFERVDDCTHRSLRAFTKISCDNGKSCCSSRELLPSFCQNDQPTLGKSICGCCCKIQEDASKLGFIPGHMCRTHFSSDVGPVLANKPTIEGLDEFCACSCSTFTQRSSLCSREYVLQSSCDSCPINGLHCRSCMGHAADSLTKHSLFDPLNTKERGSCCNGRCCYSVVPKCLSSCDFTKHCDVIIDQIGHAAPKDNHQLQMPTRCCTLGENEKLICQCLSNKIAVRNLPQTSHCKDVSEKVMNQPSIAITERLENVSEPSVADDSSSKAVAEKKDAYRDSAVSKGQPNFGFSSGSSSIIVTKFQKSPEFNNVSSTAKHSKHKNLCDEGSRIEKSSASSYVPTSTGCEEPLNSSAKSELGPSRVKRKCNQISEGRRLEETDNEEHCSELLKKTRTLRCSVKGSESDDCTRASSQSSQKGVYQPQNEVNSFSCRVLRTKRKHPIMHLNKHVKQLHRQTKFFEGDEQPDAKGNFLGGLDSYDRKRQVEDMSTLDKTRHHQEGSRAFVRKLPKYVSLNCIVNEPNTNSEGACSGSGGIDSSLIATGITNDNRKSPKIVPLNLVLKKAKRCNAVKLRKTESTHLYEEKSSDCSVNSSDYSIEKYSVDDENCSPQAEYELQDSKRSRYSSNDLRSHVALHKRTSGVIGEDDSLGLTDVEINCLSISSSSNGTKNRRTSVSLARIKKFGSKSVCYSGSDKDNAVLAHEVNARRYSGRLSSNSPCCVCGISDLEPCNRLIECSKCYIKVHQACYGVLKVPRGQWFCRPCKNNTMDTVCVLCGYGGGAMTRALKTKNILKSLLQGLMNLERSEYYVDSLGNASSECTSLQNPVDSAHGDNIMNAKNITSNSWTSGKYYSSLLGPQPMQWVHMVCGLWTPGTKCPNDTTMSAFDVSGASPAKRNTACSICDRTGGSFVKCRAVNCLVFFHAWCAHQRGLLQSEPEGEHNENIGFYGRCVSHAIVFSSHVNPKKEYFRNNNWTCARTEGFKGRKGEGFSDSSHKKYEEYSGEFGVSQEQINAWLRINGSKPCGRGQKEYIHYKQLKGWKHLVVYKSGIHGLGLYTSVFIPRGSMVVEYVGEIVGQRVADRREIEYQSGKRQQYKSACYFFKIDREHIIDATRKGGIARFVNHSCQPNCVAKIISVRNEKKNGT

SEQ ID NO: 50538 - protein, 166 aa, Zea Mays
MGKWDESMHYIINNDASKTNSHGSHEGSGATLLWEKNEPPVNPTRYNLSTFAITLNELTPELKEKLPPTDSRLRPDQRHLENGEYEKANAEKLRLETRQRMARKMQESGWKPRWFQRDSEDGTYRYVGGYWEAREQRTWVGCNDIFGNLSSSPKLPPSGLNTSSSI

SEQ ID NO: 50539 - protein, 193 aa, Zea Mays
MKIAGIYRWKHGRKGTGVYWFQQARDKVCLDRIAQQLFEHIGKSVTDDSFKQWEGLLELLGSDIGSAGGLEFLHRYRDFKRSLQQALDRRCGEAARQTVDFLIQLMKNPSTPQRFWLPLLHDSVELLNSKLSPLMDVAETTLLLNKLQELSMAKLRPDFSSNHLPSHAMSSVRLALASNLARAVLEDRSPSTL

SEQ ID NO: 50540 - protein, 139 aa, Zea Mays
MIDPMMSDKHPVKAMCDIRDLGLFYVVFSFPDKSNPPVFDKCDWHCVSHIEAAWDLAYSIASVCSAMVLIPSHRSIGKPSTENVLTVLARGRSKHYYSKKGLVVTVLLLTQFYTKLEEKHKALEAKKDKADARKKELHS

SEQ ID NO: 50541 - protein, 768 aa, Zea Mays
MSTSRQIDDGPAVLQLCRWTLLQPHLKLSKFREAFISPTRRLFGLLSDHGDLVLATAEINSSQVESHRALSDTCTQAVFKTFSTIPRVKSLAWGYCSDAFDDSSFNEILVVSSDASITVHAFCHSRKSTLTVNSMSDAKELHGEWKEWRPTECSVLEDGESGPENWFCSFLTTVTASVSNGKYQARLPMKSLLPNSAEVVSFSIYDITLSFLKYWYSKCSLKTMAETDSESPRRFLRASCSCQWECLKVLSSSSCYLIGLVLTPNESVRCEAHPSNAECILVTVLELNHWGIQWNFVADLQDVSDGITPSPKWVDFQLSDVFLACLNTAGFVAIWNVKTGGLVTSFSVLQQCRTDLEMPLRSSMSIVTNLDEGNIHVENFVGRMFKRLVLASYSYLLAVVDEVGVVYVFYADDILNFKANVHENFDLPVMNQFADCFSIWEAAGHEIGSLSFCANQSIQQGSLSLTKLVPEFSGKSDDIVRPRERRKYRCDENEVDSWPSGFVTAGQMKVGAGYRRTNSSCFFRRIILPPCRSQQDVISLCPLGLTRIFKGSIADGNEHVKIFHSELLMYSSFLGKGDIDIGFMDEMLPFKKDSTFVGDSVVCSCQGYLYLITQYGLSVVLPPVSISSFSSQCDAIKFWQMGPAAGSTCNALNLLSVDKSDTSWKTWQIEVLDRALLYEGPALADRLCWENGWDLKFSRLRWLQLALHYSMIGDLEQSLNLLAEVNLAEEGVLQLLLASIHRLSSRTGSDNEATVSSKSGNWCIVETC

SEQ ID NO: 50542 - protein, 955 aa, Zea Mays
MRTGGGGAVWGGGESSALGGPCSCAWECRGGELGWLQIPTTLGHDEGAEEGAGWDLKFSRLRWLQLALHYSMIGDLEQSLNLLAEVNLAEEGVLQLLLASIHRLSSRTGSDNEATVSSKLMVLAVRFATRMIKCYGLQKQTTDNNSVKLHEMALLLMAIRSIQSRVSAKNQNSVWMGDDKSSLKIGTEVFQHDSSVPVVVLDGVSSGPSGGLDTHDRQELVPVCVPDSNSMLALTPVGSSLSASTFHDIDTNKRTTQVGSQNFQGNIKEMINRWEMNNFDLKIVVREALQSGRLPLAVLQLQLLRQRELVSNDYSEDAFSEVHEIGRSIVYDLLMKGETGLAVATLERLGNDVESDLRQLMQGTVRRSLRLQIADEMKKRGYITPDDWKMLETITLIERLYPSSSFWNTYFYRENVIRDAAKIVTLPGDDKPVLALNIRNHPIIECGDVDGAVLGSWVNINDCTKEFSGSNISDGYWACAAVWSDAWGPRTVDRILLDQPYHVHAHVPWESQFEYFVAHNDVGKVCELLDMIPNSILSEGIIRVNVNSLQAPANTLSDLTVPDYNMYICDSEELEPFCVEIPHVKVFRSLWNHESTLYIRMVMQQELAKRHIFMKEYWQSTTEIIPLLARAGILIKVGLKEECSTIFSASEIPDDAHHQGREGALHKLIIRFCVQYNLPYLLDLYLDTCNLTPDKDCIRLLKENTGDCKWAQWLLFSRIKGYEYEASFSNARWNLSKKMVNNSNPTAVEIDEMLYTVDDMAERIGEMSALATLMYASAPIQKSICTGSVNRSGSSSQCTLENLAPCLQQFPTLWKTLFSACFGQDEYGCLNYSAAYGKRSISEYLRWRYSVFSSAGGDTSLLQMLPCWVPKSVRRLIQLFEQSVTFLDYHVDFGERIRRAGGGWLLEDVWHSGALGLKVPLGVAARRPTPKPVVEKMCYAFDQWRRQQFSPWYSL

SEQ ID NO: 50543 - protein, 2458 aa, Zea Mays
MRTGGGGAVWGGGESSALGGPCSCAWECRGGELGWLQIPTTLGHDEGAEEGAGWDLKFSRLRWLQLALHYSMIGDLEQSLNLLAEVNLAEEGVLQLLLASIHRLSSRTGSDNEATVSSKLMVLAVRFATRMIKCYGLQKQTTDNNSVKLHEMALLLMAIRSIQSRVSAKNQNSVWMGDDKSSLKIGTEVFQHDSSVPVVVLDGVSSGPSGGLDTHDRQELVPVCVPDSNSMLALTPVGSSLSASTFHDIDTNKRTTQVGSQNFQGNIKEMINRWEMNNFDLKIVVREALQSGRLPLAVLQLQLLRQRELVSNDYSEDAFSEVHEIGRSIVYDLLMKGETGLAVATLERLGNDVESDLRQLMQGTVRRSLRLQIADEMKKRGYITPDDWKMLETITLIERLYPSSSFWNTYFYRENVIRDAAKIVTLPGDDKPVLALNIRNHPIIECGDVDGAVLGSWVNINDCTKEFSGSNISDGYWACAAVWSDAWGPRTVDRILLDQPYHVHAHVPWESQFEYFVAHNDVGKVCELLDMIPNSILSEGIIRVNVNSLQAPANTLSDLTVPDYNMYICDSEELEPFCVEIPHVKVFRSLWNHESTLYIRMVMQQELAKRHIFMKEYWQSTTEIIPLLARAGILIKVGLKEECSTIFSASEIPDDAHHQGREGALHKLIIRFCVQYNLPYLLDLYLDTCNLTPDKDCIRLLKENTGDCKWAQWLLFSRIKGYEYEASFSNARWNLSKKMVNNSNPTAVEIDEMLYTVDDMAERIGEMSALATLMYASAPIQKSICTGSVNRSGSSSQCTLENLAPCLQQFPTLWKTLFSACFGQDEYGCLNYSAAYGKRSISEYLRWRYSVFSSAGGDTSLLQMLPCWVPKSVRRLIQLFEQGPFGMQLLSTAPSSEELFTHGVSNYIYNSTGYTEANALSLEASIQKSVEEELYSSLEEKDVRVEHHLHRGRALAAFRHLIAKRASQLKSASARQVISAQSNVQADVQLILAPLSQVERSILISVAPLAITNFEDSTLVASCIFLLELCGLCANMLRLDIAALRRISSYYKSVQENKHVDLSPPRGPELHVQSHGAGIAPALARALAEDYVQSDHLHVLEQTQTSMAPKREQTQYPLISILQHLEKASLPSLEEGKTCGFWLLTGVGDASLYRSQQNEASQHWNLVTEFCQAHYLPLSTKYLALLANDNDWVGFLTEAQIAGFSIEAVIEVAAKEIRDSRLRAHILTVLKNMISLRRKSSGNVPSGSSDPSFSSVDGNNPMELFCILGVCEKQKNPGEALLIKAKQMQWSLLAMIASCFPDVTPLTCLSVWLEITAAREMSSIKVDDVSLKIAKNVGSAVEATNKLPSTSRNVEFRYNRKNPKRRRFLEASHEKLCFSIDSTCGPDSAATSNPISIVDHQGIGKPISGETIMSVDIDERLASLSNMVAVLCEQQLFLPLLRAFEMFLPSCSLLSFIRSLQAFSQMRLPEASARLASFSARIKDEASHTQLNSSKEVSVIAEWVATTAVKAADAVLSNCSSIYEKRCLLQLLSAVDFADGGTSSSYFSRRYWKINLSEPSLCKDTDVYNWNDLMDDASLLTSLEKDGQWEQARTWARHLESSGIAWESTLDHVTESQAEAMVAEWKEFLWDIPQERAALWGHCQSLFMRYSFPPLKAGLFFLKHAEAVGKEIPAQELHEILLLSLQWLSGTMTKSSPVYPLHLLREIETRVWLLAVESESQSKVDGEFATSAVAHNKAVGNSSSIIEHTADIITKIDSNMSLPHMKITERNSTRDSLSYQHVQLFESNSEASSTTINNTRAKRRMKTNSPLKRGVNDNIESRANELDNNSNTLHSSKIGEQARNLLSEEEFVKMEASLSGWEQNVRPVDMEKAVLSLLEFGQITAAKQLQQKLSPSYIPEELVLVDVALRIAKNSSNGEINLSCFDTQALRILQSLRVANSCDMISPSQVMEILAAKCGEGRGRALIRRIIGVVRTARLLGLPFSEAFEKQPIELLQLLSLKAQDSFDEAKFLVETHIMPASSIARILADSFLKGLLAAHRGGYLDSQKEEGPAPLLWRSSDFLKWAKLCPSESEIGHALMRLVMTGHEVPHACEVELLILSHHFYMSSSCLDGVDVLVTFAANRVDSYVLEEDFSCLARLITGVSNFHSLSFILSILVENGQLELLLQKYSATDTATGTLASVRGFRMAVITSLKQFIPNDDDALSMVYKHFDMKHEAASLLESRAEQYMNSWLSRYDKERRNDELLDAMHHLVETAEVLSTIDAGQRTHRACARASLLSLQIRIPDLLWIGLSETNARRIFVEQSRFQEALIVAEAYNINQPIEWAPVFWNQMLKPDLIEQFVAEFVSVLPLQPPMLLELARFYRAEVAARGEQSHFSVWLSPGGLPAEWVKHLGRSFRSLLRRTRDMRLRLQLATLATGFIDVLVICNRVLDKVPDNAGPLILRKGHGGAYLPLM

SEQ ID NO: 50544 - protein, 3015 aa, Zea Mays
MSTSRQIDDGPAVLQLCRWTLLQPHLKLSKFREAFISPTRRLFGLLSDHGDLVLATAEINSSQVESHRALSDTCTQAVFKTFSTIPRVKSLAWGYCSDAFDDSSFNEILVVSSDASITVHAFCHSRKSTLTVNSMSDAKELHGEWKEWRPTECSVLEDGESGPENWFCSFLTTVTASVSNGKYQARLPMKSLLPNSAEVVSFSIYDITLSFLKYWYSKCSLKTMAETDSESPRRFLRASCSCQWECLKVLSSSSCYLIGLVLTPNESVRCEAHPSNAECILVTVLELNHWGIQWNFVADLQDVSDGITPSPKWVDFQLSDVFLACLNTAGFVAIWNVKTGGLVTSFSVLQQCRTDLEMPLRSSMSIVTNLDEGNIHVENFVGRMFKRLVLASYSYLLAVVDEVGVVYVFYADDILNFKANVHENFDLPVMNQFADCFSIWEAAGHEIGSLSFCANQSIQQGSLSLTKLVPEFSGKSDDIVRPRERRKYRCDENEVDSWPSGFVTAGQMKVGAGYRRTNSSCFFRRIILPPCRSQQDVISLCPLGLTRIFKGSIADGNEHVKIFHSELLMYSSFLGKGDIDIGFMDEMLPFKKDSTFVGDSVVCSCQGYLYLITQYGLSVVLPPVSISSFSSQCDAIKFWQMGPAAGSTCNALNLLSVDKSDTSWKTWQIEVLDRALLYEGPALADRLCWENGWDLKFSRLRWLQLALHYSMIGDLEQSLNLLAEVNLAEEGVLQLLLASIHRLSSRTGSDNEATVSSKLMVLAVRFATRMIKCYGLQKQTTDNNSVKLHEMALLLMAIRSIQSRVSAKNQNSVWMQGDDKSSLKIGTEVFQHDSSVPVVVLDGVSSGPSGGLDTHDRQELVPVCVPDSNSMLALTPVGSSLSASTFHDIDTNKRTTQVGSQNFQGNIKEMINRWEMNNFDLKIVVREALQSGRLPLAVLQLQLLRQRELVSNDYSEDAFSEVHEIGRSIVYDLLMKGETGLAVATLERLGNDVESDLRQLMQGTVRRSLRLQIADEMKKRGYITPDDWKMLETITLIERLYPSSSFWNTYFYRENVIRDAAKIVTLPGDDKPVLALNIRNHPIIECGDVDGAVLGSWVNINDCTKEFSGSNISDGYWACAAVWSDAWGPRTVDRILLDQPYHVHAHVPWESQFEYFVAHNDVGKVCELLDMIPNSILSEGIIRVNVNSLQAPANTLSDLTVPDYNMYICDSEELEPFCVEIPHVKVFRSLWNHESTLYIRMVMQQELAKRHIFMKEYWQSTTEIIPLLARAGILIKVGLKEECSTIFSASEIPDDAHHQGREGALHKLIIRFCVQYNLPYLLDLYLDTCNLTPDKDCIRLLKENTGDCKWAQWLLFSRIKGYEYEASFSNARWNLSKKMVNNSNPTAVEIDEMLYTVDDMAERIGEMSALATLMYASAPIQKSICTGSVNRSGSSSQCTLENLAPCLQQFPTLWKTLFSACFGQDEYGCLNYSAGNAYGKRSISEYLRWRYSVFSSAGGDTSLLQMLPCWVPKSVRRLIQLFEQGPFGMQLLSTAPSSEELFTHGVSNYIYNSTGYTEANALSLEASIQKSVEEELYSSLEEKDVRVEHHLHRGRALAAFRHLIAKRASQLKSASARQVISAQSNVQADVQLILAPLSQVERSILISVAPLAITNFEDSTLVASCIFLLELCGLCANMLRLDIAALRRISSYYKSVQENKHVDLSPPRGPELHVQSHGAGIAPALARALAEDYVQSDHLHVLEQTQTSMAPKREQTQYPLISILQHLEKASLPSLEEGKTCGFWLLTGVGDASLYRSQQNEASQHWNLVTEFCQAHYLPLSTKYLALLANDNDWVGFLTEAQIAGFSIEAVIEVAAKEIRDSRLRAHILTVLKNMISLRRKSSGNVPSGSSDPSFSSVDGNNPMELFCILGVCEKQKNPGEALLIKAKQMQWSLLAMIASCFPDVTPLTCLSVWLEITAAREMSSIKVDDVSLKIAKNVGSAVEATNKLPSTSRNVEFRYNRKNPKRRRFLEASHEKLCFSIDSTCGPDSAATSNPISIVDHQGIGKPISGETIMSVDIDERLASLSNMVAVLCEQQLFLPLLRAFEMFLPSCSLLSFIRSLQAFSQMRLPEASARLASFSARIKDEASHTQLNSSKEVSVIAEWVATTAVKAADAVLSNCSSIYEKRCLLQLLSAVDFADGGTSSSYFSRRYWKINLSEPSLCKDTDVYNWNDLMDDASLLTSLEKDGQWEQARTWARHLESSGIAWESTLDHVTESQAEAMVAEWKEFLWDIPQERAALWGHCQSLFMRYSFPPLKAGLFFLKHAEAVGKEIPAQELHEILLLSLQWLSGTMTKSSPVYPLHLLREIETRVWLLAVESESQSKVDGEFATSAVAHNKAVGNSSSIIEHTADIITKIDSNMSLPHMKITERNSTRDSLSYQHVQLFESNSEASSTTINNTRAKRRMKTNSPLKRGVNDNIESRANELDNNSNTLHSSKIGEQARNLLSEEEFVKMEASLSGWEQNVRPVDMEKAVLSLLEFGQITAAKQLQQKLSPSYIPEELVLVDVALRIAKNSSNGEINLSCFDTQALRILQSLRVANSCDMISPSQGLLAAHRGGYLDSQKEEGPAPLLWRSSDFLKWAKLCPSESEIGHALMRLVMTGHEVPHACEVELLILSHHFYMSSSCLDGVDVLVTFAANRVDSYVLEEDFSCLARLITGVSNFHSLSFILSILVENGQLELLLQKYSATDTATGTLASVRGFRMAVITSLKQFIPNDDDALSMVYKHFDMKHEAASLLESRAEQYMNSWLSRYDKERRNDELLDAMHHLVETAEVLSTIDAGQRTHRACARASLLSLQIRIPDLLWIGLSETNARRIFVEQSRFQEALIVAEAYNINQPIEWAPVFWNQMLKPDLIEQFVAEFVSVLPLQPPMLLELARFYRAEVAARGEQSHFSVWLSPGGLPAEWVKHLGRSFRSLLRRTRDMRLRLQLATLATGFIDVLVICNRVLDKVPDNAGPLILRKGHGGAYLPLM

SEQ ID NO: 50545 - protein, 699 aa, Zea Mays
MSSLVERLRVRSERRPRYALDESDDDLPLRVGAGKGKDQQNDAPAERIEREDAKEEACQRCGKSDNLVSCSTCTYKFHRKCLVPCLNITSDKWSCPECVSPLTEMERILDIEVLEAPREDSSSTEPRSKKMERYLIKWKGLSYIHCSWVSEKEYSEAANIHPRLRTRLNNFRRQKEAMKIEAERSGEDIVAIRPEWTTVDRILASRKNLVGDREYYVKWNELTYEECTWENESDITVFQPEIERFNEIQFRRKKSGDKGKATREPRQFKESPTFLSGGTLHPYQLEGLNFLRYSWFHNKRVILGDEMGLGKTIQSIAFLASLFEDKFGPHLVVAPLSTLRNWEREFATWAPQMNVVMYFGAAASRDIIRKYEFYYPKEKLKKLKKKKSSPSNEDKKQSRIRFDVLLTSYEMINMDSSILKNIEWECLVVDEGHRLKNKDSKLFGQLKDYNTKHRVLLTGTPVQNNLDELFMLMHFLEGESFGSITDLQEEFKDINQDKQIEKLHGMLKPHLLRRFKKDVMKELPPKKELILRVELTRKQKEYYKAILTKNYEVLARRNGGHTSLINVVMELRKLCCHGFMIDEPDLEPANPEEGLRRLLDSSGKMQLLDKMMVKLKEQGHRVLIYSQFQHMLDLLEDYLSYRKWTYERIDGKISGADRQIRIDRFNAKNSTRFCFLLSTRAGGLGINLATADTVIIYDR

SEQ ID NO: 50546 - protein, 121 aa, Zea Mays
MANTIRYSYLRGPSGRFRNPYDHGLRENCSDFLLKGYNEDIESTVQTLQSDEEMGPIQMSSPVSQNGESIPPHVNGTDHGSTISHANSKSHRQSPSNCLGLGLGTGHNNPSSRYARSLLPL

SEQ ID NO: 50547 - protein, 668 aa, Zea Mays
MLLGAAAARMEEKRVITGRERDQFPVGMRVLAVDDDPVCLKVLETLLRRCQYHVITTNQAITALKLLRENRDMFDLVISDVHMPDMDGFKLLELVGLEMDLPVIMLSVNGETKSVMKGITHGACDYLLKPVRIEELRNIWQHVVRRKFSKRERSNLDVYKDFNRLPGADPCHSHGHGHGQTTAGASDQSGRIGRKRKEMHSDEEDDGEENDFQEGDEPSAAKKPRVVWSIELHRKFVAAVNQLGIDTVPKRILELMNVEKLTRENVASHLQKYRLYLKRLSAVASQQASIVAAFGGRDPFLHMGAFEGLQSYQPFAPCAALSSFIPHHGSLGRTTAAAFGVPELAPAITVQAAASNGMISHCAGDASKFQLSGIQENQQPNLGQGSATSLGLPQLQQKWIQQETGDLSAVFSGSALANTLSGALQRVASSPLPPQELLEGVQTKVSAQPPITMASVSSELVERTVGVSANLQDSGISPQGTLPINDGFTADKLQLQDPFDSNGGTNFSVNMPVCPSGSLTASSNAKGGASSCSPVLLAPDTGRHSNYLQFGVAGNSGHDMNDIKQDHLHQGLSTGGFNHDFGTCMTEQTDPNVPYLMPQMKPNTLSSEDKLKQRNIYDLGIPKLHGGFSSSSCNFDGLLNSMIKAEKDDLSFTDSDLGCDFFPLGACI

SEQ ID NO: 50548 - protein, 117 aa, Zea Mays
MPKMVRFSSDDAKDVVHYQTISPKSLAKSVLEEGGWSNFMFSREDTQNNIDVAIVFIGSKLQSSDISKDKQVDPALADTLKPWSLEQKKVVAVFSRNMRPLSSGVNEGRRLWKSDIT

SEQ ID NO: 50549 - protein, 152 aa, Zea Mays
MDLSSRWAEPLKEAEGEVDQWMAYWCRVSRKQVGKTSSPCAPAIPRTATSIARRPAPAPPPPLHAPASPHSSTSTARAGQPPLLHLHRAPEAPAPPPPLCAPASPLLHRIRKASQRSSGPRKGGNTSLIRSRSPGSSIQWSGSLKPGTRHIQ

SEQ ID NO: 50550 - protein, 178 aa, Zea Mays
MSTQQVHMACVMQGRRVGVAYYDSDTRQLFVLEIWEDSVGEFPLIDLVKFQSKASTIYTSTKTEEALLSALQRNDGNGEAPVVKLTKSSTFSYEQAWHILIYLKVAAMDDGLSAKERICFLNSMMDLGSDVQVRAAGGLLAILDNERLLDTIEQMEGGASIAIDSVVQISFYPLMEIN

SEQ ID NO: 50551 - protein, 952 aa, Zea Mays
MPDKKIEGADSSHIVSSTKSLESSVGPNLIESTDGDYCNNLHKTAVANFVASMLQEHPMSLILAENKSNLQEISVEQKIPIFVSINLSPKVDGSELPCPIEVHDGITSSSSKTNEPMEAQDYSNTMKSNTASCMFEASKRQECPISLILADKKGSLQEVSVEQNVPCGDYVALSQKADGSELTSTREAPEGFLTSSSKVYVLKEAQDGSITTEASKVNVCAASHSMLRLIEGVQDEASCIDSDKVTCETPPAILKKLKEDKPLVVHRFHKHQMSLGDTHQKVPAPVSRSNTSKYLRMDKNIVDTTTPIESVKAVASKFGGSMNWKTRKTQTAQVSDRIVLELDKLKNEISECKHQAEAAEAAKLSVLKELERTKKLIDEMKHVLEREQAEEVDAKDDLELFQIILQAMEGVDCNDSVVVREKLNNIQERHKALDAKVISVKYVLGKVQEDYDSLLIGTDISINKAQAAFTMSKGAEKEVEELTIELQRLKEVFDLANAKFQDVEERKNTLMARDEDRLAWEEDLRQSDKELNQISMDLCSFQELQSKHDTSATMLLNLKNEVANYLEAKRIEEAREQESGTHKPVQEVIIMLKSELVEQRKSIARVTDELCVLKATAELLKSQLKKEKAALAAAQQMEVMASMSTQSLKMDIKLSQQELEALHAKAKECRDRSGKALQDASHEADEAKVIATKAQGELKKTEEEVAQAKAALSTVESKLEAVLRDIQAAKASERLALDTLTTTTLEEHSKVGARYSETVTLDLDEYTSLVQRSRQAEEAAHEKTTAASTAEVEAAKESAARTISRLNEILQALEEQKQALAAATERAGRASEGKLAMEQELRQRREEENGKRRRMASEAPKPVTGPRSAAEIAGRVDMTLTCTGKGDSSCPAASVHPVSDASGTGTGRSSPSDAALPVPVPAKTKKAKKLPFFTRVVMFLGGRRRRRLRAAR

SEQ ID NO: 50552 - protein, 160 aa, Zea Mays
MNVYVVGLNKVNKPTLPLAFGEFSMPTAVLLVVAFLVMSISIGIRSKSAPLMCALLVCFLLGSAYSIDVPLLRWKRHAFLAAFCIIFVRAVVVQLAFFAHMQQHVLKRPLAPTRSVVFATCFMCCFAAVIALFKDIPDVDGDRDFGIQSMTVRLGPTESA

SEQ ID NO: 50553 - protein, 54 aa, Zea Mays
MAEEKVGRIFVGGLSWNTTERTLERTFGQYGKVIEAQLLIHRDCSQFNFCMLGS

SEQ ID NO: 50554 - protein, 468 aa, Zea Mays
MAALDDKAMTDLETLEEEEVLRRLGTAEEAGLTDNEAARRLRLHGPNVVVLSHHEGSMLHGFLMALFSLWGWDHVFPKYNNMVRVILNSMSWVTVLTIVVSLAITSAGQRSCELAIIIFVVATCLIACFTAMLVLEYAKAPLEAKAHAPRAKVLRDGNWRDVHAANLVPGDIIFLKVGDIVPANARILRFQKIDTMTCWAKRSVDCAHGFLLYYAWTVSCGQGTAVVIATGRGIPRSTLRLYPQRYARPGQLKEGAMLTGCFCASLVLVGTFAEIVLRFLFQKQNYRGMPLDAHFMPLIGGIPMAMPTFFYLALALGSVRLCFLGIASRGTVALEDLASVDVILFNMTGTLTCNQPCFVRDKIEMFADSVNKDHAIVLAARASRSQHELYIEPIDAAILSLLDDPEQARLGVQVLEHHASFFVALKLMFQTTYIDEGNRFKCCVFKGHSCRTSSRLLLGLYCPSALHR

SEQ ID NO: 50555 - protein, 849 aa, Zea Mays
MAALDDKAMTDLETLEEEEVLRRLGTAEEAGLTDNEAARRLRLHGPNVVVLSHHEGSMLHGFLMALFSLWGWDHVFPKYNNMVRVILNSMSWVTVLTIVVSLAITSAGQRSCELAIIIFVVATCLIACFTAMLVLEYAKAPLEAKAHAPRAKVLRDGNWRDVHAANLVPGDIIFLKVGDIVPANARILRFQKIDTMTCWAKRSVDCAHGFLLYYAWTVSCGQGTAVVIATGRGIPRSTLRLYPQRYARPGQLKEGAMLTGCFCASLVLVGTFAEIVLRFLFQKQNYRGMPLDAHFMPLIGGIPMAMPTFFYLALALGSVRLCFLGIASRGTVALEDLASVDVILFNMTGTLTCNQPCFVRDKIEMFADSVNKDHAIVLAARASRSQHELYIEPIDAAILSLLDDPEQVAHHCGSSKEVKEKISMIMDELALDGYQAIAVGHQVDSCWDFIALLPYTDDLRSDSADVVDSLIDLGLDIRVLTESPLSTTKQVYLYLLCTSCKVLFLQVLVTILLSSYLSTEDKSDIVRRLRNFGCHCAMVGYEFLDHDAIGESHIGISVADATDYTKSESDLVLTQPALMPVSSAVQISRKICQMLRSYTIFTISSTVHLDPAGLTPILIVMKFGVRVILHLWNFDLSNILAFMITACNYCTSFAMLFERVELNKSPDKWRVQKIITSGAAFGSYIVLTTAIFYRVATTANPFACKFKHISLMGSDEEIRSALFLQISTVNQAIALFVHSDGCCIIRWPGPFVTFAFVVSQTVATQKVVHGDLNFALTKGIGCVRAGLIWLYNLVLLLALVLVCRKWRHAKMTSEKLLTICLRSAILHIVLTWFLYVILDVRVQQPVSSR

SEQ ID NO: 50556 - protein, 457 aa, Zea Mays
MAALDDKAMTDLETLEEEEVLRRLGTAEEAGLTDNEAARRLRLHGPNVVVLSHHEGSMLHGFLMALFSLWGWDHVFPKYNNMVRVILNSMSWVTVLTIVVSLAITSAGQRSCELAIIIFVVATCLIACFTAMLVLEYAKAPLEAKAHAPRAKVLRDGNWRDVHAANLVPGDIIFLKVGDIVPANARILRFQKIDTMTCWAKRSVDCAHGFLLYYAWTVSCGQGTAVVIATGRGIPRSTLRLYPQRYARPGQLKEGAMLTGCFCASLVLVGTFAEIVLRFLFQKQNYRGMPLDAHFMPLIGGIPMAMPTFFYLALALGSVRLCFLGIASRGTVALEDLASVDVILFNMTGTLTCNQPCFVRDKIEMFADSVNKDHAIVLAARASRSQHELYIEPIDAAILSLLDDPEQARLGVQVLEHHASFFVALKLMFQTTYIDEGNRFKCCVFKGCSSLWQQQRS

SEQ ID NO: 50557 - protein, 546 aa, Zea Mays
MAALDDKAMTDLETLEEEEVLRRLGTAEEAGLTDNEAARRLRLHGPNVVVLSHHEGSMLHGFLMALFSLWGWDHVFPKYNNMVRVILNSMSWVTVLTIVVSLAITSAGQRSCELAIIIFVVATCLIACFTAMLVLEYAKAPLEAKAHAPRAKVLRDGNWRDVHAANLVPGDIIFLKVGDIVPANARILRFQKIDTMTCWAKRSVDCAHGFLLYYAWTVSCGQGTAVVIATGRGIPRSTLRLYPQRYARPGQLKEGAMLTGCFCASLVLVGTFAEIVLRFLFQKQNYRGMPLDAHFMPLIGGIPMAMPTFFYLALALGSVRLCFLGIASRGTVALEDLASVDVILFNMTGTLTCNQPCFVRDKIEMFADSVNKDHAIVLAARASRSQHELYIEPIDAAILSLLDDPEQARLGVQVLEHHASFFVALKLMFQTTYIDEGNRFKCCVFKGDPAKVAHHCGSSKEVKEKISMIMDELALDGYQAIAVGHQVDSCWDFIALLPYTDDLRSDSADVVDSLIDLGLDIRVLTGHSVVHIAISCCRDFCYCHFL

SEQ ID NO: 50558 - protein, 255 aa, Zea Mays
MLSQLAAARRVRKIFAHCLDTVRGGGIFAIGNVVQPKVKTTPLVPNVTHYNVNLQGISVGGATLQLPTSTFDSGDSKGTIIDSGTTLAYLPREVYRTLLAAVFDKYQDLPLHNYQDFVCFQFSGSIDDGFPVITFSFEGDLTLNVYPDDYLFQNRNDLYCMGFLDGGVQTKDGKDMLLLGDLVLSNKLVVYDLEKEVIGWTDYNCSSSIKIEDDKTGSVYTVDAQNISAGWRFQWHNSLILLILIRTIWSCLVIA

SEQ ID NO: 50559 - protein, 290 aa, Zea Mays
MDDEEETNNSGGRGDEQDKDDVGLDDLDDDCPRLYTRHPARTSQSRRGRREPLARTPYAHPPARTLQTQPRPWRTARPTARSGQAACQSLRSTGTHDAADGETRKIRTSAPDPPVAAVRLPWNPPAPAVPTIILISLAALLIRMLVSVGPYSGQGAAPKFGNYEAQRHWMELTLHLTPADWYRNTSDNDLAYWGLDYLSLSAYQSLVHGQLVPWSSLDPNFSTGGNFEFAFNEANFSNQELQIEVIAGDDDAPGSRGDDAGGGGLADWARHCKHRRWEFFKEKGTRQYRL

SEQ ID NO: 50560 - protein, 780 aa, Zea Mays
MNTQEYWEKQVLFACRQNQPAGYGFYFPAIDDHEDEDILNLKMRKFSRLVSIVEEERNLCDGVEQQSTHCDSDSSKKDETAAVDHDLIIASLINTAEMLKKEKSSNWLCEFKEWMDDNTEKTEGDNLSVGLTNGNGKYIKQKKRQKAHKETSNNMSDLVQVSEGGSSSNLLESDSSFTDNAFSGSNGVIKQSSNELNFDQDHLKMHLNSFQRPPPLELVATSQTDPFSELENGSRNMLANGTPSNTMSKLIESSPPHTYSSPQSPPQYKEDILHRRLFMEEEFLQISGHLHSIGSLGSGSSCSDGSSSDFGSCNSEDDYEEIQTKMELSLNGQMVLFPSVNGDDHEANNNLEHFSGENTLSDHPEEGEPSCSDHREFDIEEFHNSNQRNGHLGHYLGHLIGQKGKEKFKWRVFPFKNHNGTKLENPKMNDDQVAEHVLVEGNGQLTCNPSKSTHKEGSKSHSSNILHKNNSSVCTINTGEHNTLEDFFNLEIADKDGFETCEQVACCAHMFQDSSGLVQREVALLRSSQNKLYLLLLDMVFDGQEIMPRILGSYSLQSLEKVSIGLGLQALRVHMSDDTTHLFITRTSKEAQDVLWLLSVTNFPKLNHKIHFQSWENIQVKLFEKCIIRRTANTGIFLYSMLMFWRNDVEEDSLFIRSIFVIEGSILVCIEDLDQFGGIPYDSNPPYFSLDASCSISNIREVVMDQRNNKCLTLILDNGRPGEFHNSIQNPQNKQSEEIGTVHTWKLKWFSEEASLKFISVIKALSSTAAISSLHVKCIS

SEQ ID NO: 50561 - protein, 919 aa, Zea Mays
MDESLQLLPATETLDLSRNKFAKVDNLQKCTKLRNLDLGFNHLRSISSLSEVSSRIVKLVVRNNALTTVNGIENLKSLMGLDLSYNIISIFSELEILGTLPLLQNLWLEGNPICCARWYRAHVFSFFRNPENLKLDDKGMNTQEYWEKQVLFACRQNQPAGYGFYFPAIDDHEDEDILNLKMRKFSRLVSIVEEERNLCDGVEQQSTHCDSDSSKKDETAAVDHDLIIASLINTAEMLKKEKSSNWLCEFKEWMDDNTEKTEGDNLSVGLTNGNGKYIKQKKRQKAHKETSNNMSDLVQVSEGGSSSNLLESDSSFTDNAFSGSNGVIKQSSNELNFDQDHLKMHLNSFQRPPPLELVATSQTDPFSELENGSRNMLANGTPSNTMSKLIESSPPHTYSSPQSPPQYKEDILHRRLFMEEEFLQISGHLHSIGSLGSGSSCSDGSSSDFGSCNSEDDYEEIQTKMELSLNGQMVLFPSVNGDDHEANNNLEHFSGENTLSDHPEEGEPSCSDHREFDIEEFHNSNQRNGHLGHYLGHLIGQKGKEKFKWRVFPFKNHNGTKLENPKMNDDQVAEHVLVEGNGQLTCNPSKSTHKEGSKSHSSNILHKNNSSVCTINTGEHNTLEDFFNLEIADKDGFETCEQVACCAHMFQDSSGLVQREVALLRSSQNKLYLLLLDMVFDGQEIMPRILGSYSLQSLEKVSIGLGLQALRVHMSDDTTHLFITRTSKEAQDVLWLLSVTNFPKLNHKIHFQSWENIQVKLFEKCIIRRTANTGIFLYSMLMFWRNDVEEDSLFIRSIFVIEGSILVCIEDLDQFGGIPYDSNPPYFSLDASCSISNIREVVMDQRNNKCLTLILDNGRPGEFHNSIQNPQNKQSEEIGTVHTWKLKWFSEEASLKFISVIKALSSTAAISSLHVKCIS

SEQ ID NO: 50562 - protein, 1080 aa, Zea Mays
MGTPRAGSPASPVTGDHYLDLLVRFVARNAGALLDGTVTLRLHPVGLHYVASRLEALRELEAVGAGAPVDYLRAYVADLGDHRALEQLRRILRLLTSLKVVAPGPRRDPAPLSILPFARLRVLELRGCDLSTSAARGLLELRHTLEKLVCFNSTDALRHVFASRIMDIKDSPVWSKLSYVSCASNGVVLMDESLQLLPATETLDLSRNKFAKVSSRIVKLVVRNNALTTVNGIENLKSLMGLDLSYNIISIFSELEILGTLPLLQNLWLEGNPICCARWYRAHVFSFFRNPENLKLDDKGMNTQEYWEKQVLFACRQNQPAGYGFYFPAIDDHEDEDILNLKMRKFSRLVSIVEEERNLCDGVEQQSTHCDSDSSKKDETAAVDHDLIIASLINTAEMLKKEKSSNWLCEFKEWMDDNTEKTEGDNLSVGLTNGNGKYIKQKKRQKAHKETSNNMSDLVQVSEGGSSSNLLESDSSFTDNAFSGSNGVIKQSSNELNFDQDHLKMHLNSFQRPPPLELVATSQTDPFSELENGSRNMLANGTPSNTMSKLIESSPPHTYSSPQSPPQYKEDILHRRLFMEEEFLQISGHLHSIGSLGSGSSCSDGSSSDFGSCNSEDDYEEIQTKMELSLNGQMVLFPSVNGDDHEANNNLEHFSGENTLSDHPEEGEPSCSDHREFDIEEFHNSNQRNGHLGHYLGHLIGQKGKEKFKWRVFPFKNHNGTKLENPKMNDDQVAEHVLVEGNGQLTCNPSKSTHKEGSKSHSSNILHKNNSSVCTINTGEHNTLEDFFNLEIADKDGFETCEQVACCAHMFQDSSGLVQREVALLRSSQNKLYLLLLDMVFDGQEIMPRILGSYSLQSLEKVSIGLGLQALRVHMSDDTTHLFITRTSKEAQDVLWLLSVTNFPKLNHKIHFQSWENIQVKLFEKCIIRRTANTGIFLYSMLMFWRNDVEEDSLFIRSIFVIEGSILVCIEDLDQFGGIPYDSNPPYFSLDASCSISNIREVVMDQRNNKCLTLILDNGRPGEFHNSIQNPQNKQSEEIGTVHTWKLKWFSEEASLKFISVIKALSSTAAISSLHVKCIS

SEQ ID NO: 50563 - protein, 841 aa, Zea Mays
MGLDLSYNIISIFSELEILGTLPLLQNLWLEGNPICCARWYRAHVFSFFRNPENLKLDDKGMNTQEYWEKQVLFACRQNQPAGYGFYFPAIDDHEDEDILNLKMRKFSRLVSIVEEERNLCDGVEQQSTHCDSDSSKKDETAAVDHDLIIASLINTAEMLKKEKSSNWLCEFKEWMDDNTEKTEGDNLSVGLTNGNGKYIKQKKRQKAHKETSNNMSDLVQVSEGGSSSNLLESDSSFTDNAFSGSNGVIKQSSNELNFDQDHLKMHLNSFQRPPPLELVATSQTDPFSELENGSRNMLANGTPSNTMSKLIESSPPHTYSSPQSPPQYKEDILHRRLFMEEEFLQISGHLHSIGSLGSGSSCSDGSSSDFGSCNSEDDYEEIQTKMELSLNGQMVLFPSVNGDDHEANNNLEHFSGENTLSDHPEEGEPSCSDHREFDIEEFHNSNQRNGHLGHYLGHLIGQKGKEKFKWRVFPFKNHNGTKLENPKMNDDQVAEHVLVEGNGQLTCNPSKSTHKEGSKSHSSNILHKNNSSVCTINTGEHNTLEDFFNLEIADKDGFETCEQVACCAHMFQDSSGLVQREVALLRSSQNKLYLLLLDMVFDGQEIMPRILGSYSLQSLEKVSIGLGLQALRVHMSDDTTHLFITRTSKEAQDVLWLLSVTNFPKLNHKIHFQSWENIQVKLFEKCIIRRTANTGIFLYSMLMFWRNDVEEDSLFIRSIFVIEGSILVCIEDLDQFGGIPYDSNPPYFSLDASCSISNIREVVMDQRNNKCLTLILDNGRPGEFHNSIQNPQNKQSEEIGTVHTWKLKWFSEEASLKFISVIKALSSTAAISSLHVKCIS

SEQ ID NO: 50564 - protein, 1104 aa, Zea Mays
MKRFVYINDESYQNDYCDNRVSNTKYTLLNFVPKNLWEQFRRFMNQYFLLIACLQLWSLITPVNPASTWGPLIFIFAVSATKEAWDDYNRYISDKQANDKEVWIVKNGARKHIQAQDIRVGNIVWIRENEEVPCDLVLLGTSEPQGICHVETAALDGEIDLKTRASPPPCVGLEFEQLHKIKGVIECPIPDKDIRRFDANIRLFPPFIDNDICPLTINNTLLQSCYLRNTEWACGVAVYTGNETKLGMSRGVPEPKLTAMDAMIDKLTGAIFLFQLTVVVVLGAAGNIWKDMEARKQWYVKYDDNEPWYQILVIPLRFELLCSIMIPISIKVSLDFVKSLYAKFIDWDDDIYDLENDTPARAANTAISEDLGQVEYILTDKTGTLTENKMIFRRCCIGGTFYGNESGDALRDVELLNAVANNSPNVIKFLTVMTLCNTVIPIKSPTGPILYKAQSQDEDALVNAAANLHMVLVSKNGSNAEIHFNRRVMQYEILDILEFTSDRKRMSIVILDCQSGKFFLLSKGADEAMLPCAYSGQKTKTFVDAVDKYAQLGLRTLCLGWRELEPEEYTKWSQSFKEANSSLNDREWKVAEVCQKLEHSLEILGVSAIEDRLQDGVPETIEILRQSGINFWMLTGDKQSTAIQIALLCNLISSEPKGQLLHINGKTQDEVARSLERVLLTMRITSSEPKELAFVVDGWALEIILSRYTEAFTELAVLSKTALCCRVTPSQKAQLVKLLKSCDYRTLAIGDGGNDVRMIQQADIGVGISGREGLQAARAADYSIGKFRFLKRLILVHGRYSYNRTAFLSQYSFYKSLLICFIQILFSFLSGIAGTSLFNSVSLMAYNVFYTSIPVLTTVLDKDLSEKTVMQNPEILLYCQAGRLLNPSTFAGWFGRSLYHAIIIFLITIHAYANEKSEMEELSMVALSGSIWLQAFVVTLEMNSFTSVQLLAIWGNLIAFYVLNFFISSIPTSGMYTIMFGLCRQPSYWITLVLISGVGMGPVLALKYFRYTYRPSVINILQKAERSRGPMYTLLNLESQLRSDKDSMMVAGSTAPAKNKSSVYEPLLSDSPMASRRSLAPASSFDIFQPAHSRTSHPRNIKAN

SEQ ID NO: 50565 - protein, 1368 aa, Zea Mays
MENCERTIKGFLTLKNLASVFLQQGFEFYDNALHCYLQAVELDSNDSVVWNHLGTLSCSMGLLSVSRWAFEQGLVCSPNNWNCMEKLLEVLISIRDEVACLSVANLILNSWPSHHRALHVKKTIECAEPVPFAPRGIDILEPKHAKLIFSNKRKSVDDEICQEIGTKKSKHSATLQLNEAKWLALLDGILSLISANTEKAGEYNCSNTVDRCSISEGSAKGLAYNIIDVVISTDTLKSVETAGGNGNDSHHGEILPYDCKATVKEKDGNSDREHPHERRSTRLERLRSRKSGKDENGSDGKDISHAMTQFLESFILKGPSPVEKAYCSGNADASNPDTHNYTSNEEANDLKQFLCKISKNFGPHHIGYMLLEEMAHLKVPFQDYFVKLIELDKLTRGWAEDRSASCNLFLAELYYDRALCSGSPPTSSELSDSSYHLCKIIESVALELPFNISVREIHSTNLDTESSRTGESSSELIERSHENGHINMLNDQKSKHDSSSNMNCAFWIRFFWLSGCLSLSSDCKEKAYKEFNIALSILKNSNKTKSYGEVILLPHTKLVKSLTTDRILREINLIRLESLLWNNDENINKITHTEFMQLLPPLLLSTKDAYVGNAYGPQRESENVISLELSALDVLISACEKAKPMNIQVYLDSHRRKIQVLTVAAGMVGSVTPLKAKGSSNVEFVEAMNRNRLENVVEAVKDVSRNASKAKDIIDQCDNSVPSITIVLIHKYISQGYQVDKSSRVDKASIKRRLSVALALRRAHRARRLARLPPWRKASAAAQCVRCGDGQDGWSPLMSIVGDIQSLLLTIMCAAVKIILSRKLSCSGTSYQVDHLECSCLIDAAIAFCKLQHLDPTISIKTQVDLIVAVHDLLAEYGLCCAGRDGEGEEGMFLKFAIKHLMALDVKLKSQLNSNGMEEDAVPKDVRAEDSVADEPSVSDNKQNSDDEEESELDEIQSCLDSALDQAFFCLYGLKINPDSCSEDDLAVHKNTSRGDYQTKEQCADVFQYVLPYAKALSKTGLVKLRRVLRAIRKHFPQPPYDLFVNNPIDNFLDGPDSCEKILSEICESNESREAILNVLFPGERGYEAFKKLSTASSEPYSDVYENLYYFIAQAEDISATDKHTGFVLKKEGEEFVEQSANIFKYDLLYNPLRFESWQKLSNLYDEEVDLLLNDGSKHISILDWRTNTDLIRRVEMGRRHSRRCLLMSSLLAKTAPEQSEAHELLALVYYDSLQNVVPFYDQRATLPVKDSSWETFCKNSMKHFEKAFEIKEQWLHAFYLGKLCEKLGHSFSKALSYYNKAMMLNPTAVDPVYRIHASRLKLLYTQGKQNLEAIQESGCCRDLLPTTDLAWLFVNLACYISCLTAVG

SEQ ID NO: 50566 - protein, 375 aa, Zea Mays
MAAASLLEATRFLSTPHPRSRSRPLPFPPGSGLHPHLLRTPRLSTLRVHLHRPAPLGAQEPARPGALLAVDALRRSVLDSLAALKRPALALLLAGVLLAAASAGGPHAAALAASGGRVGGSAFSSRSSSPRSYGYSAPAPRGGYTAAPFYSPSPFVSVGPALGIGFGGSGFLVTLMGFAAFLYLAGFLSDSSGATSVLTETEKTTVLKLQKELDQIAEKADTSTPAGLSYVLTETTLALLRHPDCCISAYSSVDVKRSIDNGEKRFNQLSIEERGKFDEETLVNVNSIKRNKGGSQRSSGFSNEYIVITILVAAEGVHKVPVINSSNDLKTALQKMGAIPSRKILAVEVLWTPQNENDTLSERELLEDYPLLRPL

SEQ ID NO: 50567 - protein, 425 aa, Zea Mays
MLGYLDFFLGGDEKRPDLPPRLRQRFPMSLIFGGDGSYMAPFSLNSDSVLTSLMSQAVPSWIWHRLVAGLNAQLRLVRGGNLKVTFLPVINWLESHANPSLAENGIRVDLAWFQATALGYCQLGLLVYAVEGEAALTEPDGSPRVKIEQHTPTQNMLADTQLSQSRIKDALMRKRITGGVLNSNSLRTLKDRRDLFYPFSHILHNSKPVGHQDLVGLVISILLLADFSLVLLTFLQLYSYSMVDVLLVLFILPLGILSPFPAGINALFSHGPRRSAGLARVYALWNITSLVNVVVAFICGFVHYKLSTKTHPSVQPWNLGTDESGWWLFPTGLMLLKCIQARLVDWHVANLEIQDRAMGKTIILLTCSMVFADSKAGKAVRNRCGLGDVPFAALQFIEGCKNLLTYLTLCHLQTCSGGWMAKWVT

SEQ ID NO: 50568 - protein, 1138 aa, Zea Mays
MACHLSPLFNLRLLLLLGAVLGNAVLVRAGGAEASDRAEPDPYSILTWHDYSPPSPPLPPPDPASSTATCEGDLHGKGDFRTHCEVFEEVELGDDIYITGNGSLVLLSGASLTCEKVGCVISANLSGEVHLSRGVRVRAGRVSLVATNITVADTVVVNTTALAGAPPDRTSGVPTGTHGDGGGHGGRGASCFVKEGQTQEDSWGGDAYAWSDLEHPWSYGSKGGSTSVEKDYGGAGGGIVWLFADDLVMNGTVLAAGGDSNEKGGGGSGGSIFIRAASMYGGGKISASGGDGLAGGGGGRVSINVFSRHDDTQIFVHGGRSSGCPDNAGAAGTLYEAVPKSLIVSNNNLSTQTDTLLLEFPNQPLWTNVFVRNRAKVAVPLLWSRVQVQGQLSLLSGAILTFGLTGYPYSEFELMAEELLMSDSIIKVFGALRMSVKMLLMWNSRMEIDGGGDSIVATSLLDASNLIVLKESSVIHSNANLGVRGQGVLNLSGDGDTIEAQRLILSLFYSIQVGPGSVLRGPLVNRSSDDVAPKLNCEADSCPVEIIHPPEDCNLNSSLSFTLQVCRVEDIDVWGVVQGTVIHFNRARSVTVHTSGTISATGFGCRSGVGQGKMLRSGVCGGGGHGGKGGNGFYKGDLAEGGAIYGNADLPCELGSGSGNDSTELSTAGGGIIVMGSWDYSLPSLALYGSVESNGGSYASGSVGGPGGGSGGTILLFVHTLSLAESSVLSSVGGFGSTGSGGGGGGRIHFHWSNIPTGDEYVPVAAVKGSILTSGGVSKGLGYSGGNGTVTGKACPKGLYGTFCKECPLGTYKNVTGSSKSLCFPCPPGELPHRAIYTNVRGGAAETPCPYRCVSDRYRMPHCYTALEELIYTFGGPWLFGLFLSGLLILLALVLSVARMKFVGTDELPGPAPTHQGSQIDHSFPFLESLNEVIETNRAEESQGHVHRMYFMGPNTFSEPWHLPHSPPEQITEIVYEDAFNRFVDEINTLAAYQWWEGSIYSILCILAYPLAWSWQQWRRRKKLQRLREFVRSEYDHSCLKSCRSRALYEGLKVTATPDLMLGYLDFFLGGDEKRPDLPPRLRQRFPMSLIFGGTRAISVTGCSLMDMAPSCSWIECTAAFGPWWKSESNVSSGHQLA

SEQ ID NO: 50569 - protein, 1454 aa, Zea Mays
MGSDREGRGSEAVAASKPRKRQLVMESSDSEADEFCISTRQNASGAASLGNAGVSSQGSGDRSEEKPVTSSPEKLPGVKSSDVDGSDKKTGVQLESSSSQPAVKRIRVETVHGDGNGCSGGASKCGTGGKMLPRGLPAWRFERPEVRGGRVLDDKGGVSMKASSASKMKEQVSSLGDKRQAELQKHERRTPLKTDQGKAIDSGQQEVLRLQGKRGVLRILPKNDKVTRDTGDGKILSRQTEVDEETGNGRIPTKRGVLKLLPKNNGAVMESNECKLLSKKVKVDEETGDDKMPMKKTKVVDKETSDGKILAITTNLDAEFGGHKLPMKNCTVDMETVAGKFQQKNSKADGETKGRYKGYEEKSGAPAEFQKHDANGEKRVLGKLLSPVALRKSDPSVVGVSLGQRMKQQNSKQQLKNYSLSLKDDSTKSSEQKNLKKRLLEHKGSSESLSKKAQLKAVDQQATSGPVLNKLEKKPRGGPLNKHKQDLRNKIKHVLLDNGWKIDLRQRKNKDYEDSVYVSPTGTGYWSITKAYAVFQEQFQNMGRSSKLNNTKPGASDAISKDDLALLKKNIVKRRTNKEICGAEKKPGVSRNRSSKDILANRDFRNKHQNKEDRVKIKDRRCGLLVRGSTHDTEDNMDGYIPYEWKRTLCSWMIDLGVISEDMHVKYMNSNRTREMLAGKITREGIFCGCCSKILTIAKFELHAGSKEKKPYANIFLEGGKVSLLQCLLDAWEKHTQSENKGFYKIDKGDDEHDDTCAICGDGGDLVCCDHCASTFHLDCLGIKLPSGDWYCRSCLCRFCGFPQEKPSSSPELLLSCLQCSRKYHQTCSSGTGTDSGCTMPGTSIDCFCSPGCRKIYKRLNKLLGIKNHMEAGFSWSLVHCFANDQAMPNKNKEKLAQCNSKTALAFTVLDECFQPHIDDRSGINMIHNVAYNCGSDFSRLDFSGFYAFILERGDEVIAAASVRIHGTDLAEMPFIGTRGMYRHQGMCRRLLNGIESALGSLSVQKLVVSAVTEMENTWTTGFGFKPVAPSKKQRMKSLNLLIMNGTGLLEKRLLPTQTVDGQITTKTANAVGSDKMDAKMLGEASGSVTPIHVSSEPDASDNREINRHESPHPLGNSAGLTLDQSPAADENEAKITTERTPPVSIGDAKTVKVHTLPGATCGVNLQCMVEAENIQQEKYKETNGRLIAENTISEQKCEDRSNSSRSNSCATPVTVDQCSHLSNEIGKGDNCLSSEVSVGAAPITGKTESSLTSVHCANQEDEKAYAAPVDTKIPLVIMDEKPDKHEFKTMVVGCSQGSMEPKSLENRTSIVNGTSMDAYRDKIPNEDHSASAVDTGVSVKLYAQQMETIEEKTGSVLPDSEHSSSCKDVLVTLTESKPLKNDILEMDDAVIKVGMTGQSFNEAGITAPALNISDPVGENVVKPTQTCGEGQLRGEDVIYSNNVMEDDLTSRAC

SEQ ID NO: 50570 - protein, 367 aa, Zea Mays
MFCLMCQSEQGIAREITESELQQSSSPNAEVGHAVPSISLAKKKFLGKYAISAEEFSEEMVGAKSRNIAYLKGKVPSWVGVPTSVAIPFGTFEKVLSDGLNKEVAQSIEKLKIRLAQEDFSALGEIRKVVLNLTAPMQLVNELKERMLGSGMPWPGDEGDKRWEQAWMAIKKVWASKWNERAYFSTRKVKLDHEYLSMAVLVQEVVNADYAFVIHTTNPSSGDSSEIYAEVVKGLGETLVGAYPGRAMSFVCKKDDLDSPKLLGYPSKPIGLFIRQSIIFRSDSNGEDLEGYAGAGLYDSVPMDEEDEVVLDYTTDPLIVDRGFRSSILSSIARAGHAIEELYGSPQDVEGVVKDGKIYVVQTRPQM

SEQ ID NO: 50571 - protein, 283 aa, Zea Mays
MAGISRAIRACAATSQRTLAAASAVTLPKEAGVKPATVGRRGRGPEDGRRVQWAFLGCPGVGKGTYASRLSQLLGVPHIATGDLVRDALASPGPFSKKLAEIVNQGKLVSDEIIINLLSRRLEEGEEKGELGFILDGFPRTMRQAEILEGVTNIDLVINLKLREEALVARCLGRRMCSQCGENFNVASIDIEGENGGAPMYLPPLLPPPQCESKLITRADDTEEVVKNRLRVYHDLTEPVEGFYKARQKLLEFNIPGGIPESWRKLLEALNIEDSNNMRSAVA

SEQ ID NO: 50572 - protein, 400 aa, Zea Mays
MGRNGSVKRSASSSAAGAAAGPPSFSVNPADYRLMEEVGYGAHAVVYRAIFLPTEDVVAVKCLDLDQLNNNIDEIQREAQIMSLIDHPNVIRAYCSFVVEHSLWVIMPFMTEGSCLHLMKISYQEGFDEPVIGSILKETLKALEYLHRQGQIHRDVKAGNILIDGAGVVKLGDFGVSACMFDRGDRQRSRNTFVGTPCWMAPEVLQPGTGYNFKADIWSFGITALELAHGHAPFSKYPPMKVLLMTLQNAPPGLDYERDRRFSKSFKEMVAMCLVKDQTKRPTAEKLLKHSFFKNAKPPELTIKNILSGLPPLWDRVKALQLKDAAQLALKKMPSSEQEALSLSEYQRGVSAWNFDIEDLKAQASLIHDDEPPEIKEDDDIPRNIEVEKIVDYFFPIEVI

SEQ ID NO: 50573 - protein, 127 aa, Zea Mays
MLALCRFLRDKYSLAAVTNDIFTKEDGEFLIKHGALPEERIRAVETGGCPHAAIREDISINLGPLEELSNLYKADLLLCESGGGIFFYLIQNKCRSFLLLCMLESTPERQPCRLPASSYLPGKFLQV

SEQ ID NO: 50574 - protein, 401 aa, Zea Mays
MYASSDLRQGPRLICSAEKRRTVCVLKLSEVRLGNGDGYQHGQCWRDVYDAICQARRLIYIIGWSMFHTIHLVRDGHDDMALGDLLRRKSQEGVQVLLLVWDDPTSRRLLGIKMEGYMGTRDEETRRFFKHSSVQILLCPRSAGKRHSWVKQQETGTILTHHQKTVILDADAGNHRRKIVAFMGGLDLCGGRYDTPKHTLFRTLQTFHKEDYYNPNFAVEDARGPREPWHDLHSKIDGPEAYDVLKNFEERWLKASKRSAAKKLSKLSRSHNDSLLWINKIPDIIAIDDEIYSNDDDPERWDVQIFRSIDSNSVKGFPKDPRKATSKNLVCGKNVLIDMSVHTAYVNAIRGAQHFIYIENQYFLGSSFNWDSHRDVDFRVQDVSMGRANKGDGALPPSCVF

SEQ ID NO: 50575 - protein, 500 aa, Zea Mays
MRRQSSLARSYSSVAPAPHNGGVNSKHLVPPMEVVSSAEEGGNAGGAAEGLDDDGRPRRKGTFWTASAHIITAVIGSGVLSLAWAIAQLGWVAGPAALLLFAFVTYYTATLLAECYRTGDPDTGKRNYTYMDAVRSNLGGTKVLLCGVIQYANLVGVAIGYTIASSISMKAVRRAGCFHVHGHGDPCRSSSTPYMILFGLVQILFSQIPDFDEIWWLSIVAAVMSFTYSSIGLSLGIVQTISNGGFMGSLTSISFGAGVSSTQKVWHTLQAFGDIAFAYSFSNILIEIQDTIKAPPPSESKVMQKATCVSVATTTIFYMLCGCMGYAAFGDNAPDNLLTGFGFYEPFWLLDVANVAIVVHLVGAYQVFCQPIFAFVERRAAAAWPDSAFISRELRVGPFALSLFRLTWRSSFVCVTTVVAMLLPFFGDVVGLLGAVSFWPLTVYFPVEMYIKHRRVPRGSTRWICLQTLSVTCLLVSIAAAAGSIADVIDALKVYRPFSG

SEQ ID NO: 50576 - protein, 1398 aa, Zea Mays
MALFRKFFLKKTPDRLLEISENVYVFDCCFSTDSMGEDEYRDYLSGIVAQLQEFFPDTSLMASNFWSGDKRSRISDILSEYDMTVMDYPQQYEGCPLLQLEMIHHFLKSCENWLSVEGQHNMLLMHCERGGWPVLAFMLAGLLLYRKIYTGEQRTLEMVYKQARRDFIQQFFPLNPQPSHLRYLHYITRQGGGSEWPPISRPLILDSIVLHVVPRFDTDGGCRPYLIVHGQDSSPGNKSAKVLYEMPKTKKHLQRYGQAEVPIKLSVSCHVHGDVVLEFIHIGDNIENKETMFRVMFNTAFVQSNILELNRDDIDVAWNVNNQFPRDFRAEVHFSDPVSFKPAATIEEVADDGDETDVASVDTGEEFYEAEEYWHDARKDPATHSIDGGISLNDIAEFDGGATTEERSSLEKHRSDEGVKIAVSQNFGSMNEKVAIAPTSSFENQEGLQQPREVLPNAKLSKNNDQENSDVHDIQVVATSVDSEGHKFGSTGQEDTKGVIAQTLVTTVDLSGSDGIHCQTDEQTKMSEYPDLDYTAFGSPRSLSRTDGDAHMRTKKNEGLQNGDIKIITENTISVDNELVIYEEKTIVVNGNAIQVVKNVVNEESIAAKIGKPITESRTSLDNDNGKIQTAKPSDIANGKLDGCRLESCLETVPTKKTTVHDRIVVLPATGVATEIKAKQEVLVDKQDFGIVLPQSRTVARARSPRLGSDDRGQIPDKAVLSVLKEMVVGNAKMEDQPKLAKPKIMRRWISPKKESDATSVRRPSHPPSRYYSSPAALGIRSISTDGKISVVNDAPLLSLKQPYGSNLTREATSAQSAPSPPQKSLLLGAQSASRSQVSPPPPPPPPPATNYSSSSTPMHMGLASTGLSNLPQGASPPRSPVAQKHAFAPPAPPPPPPPPPRSGVGGNTPPPPPPRLNNSAIAPPPPPSTITRSSAPPPPPPPQSMSRSAPPPPPPPPPSLCSNVPLPPLSCTLSAPPPPPPPPLPSMARSAAPSPPPPPPSRGAPPPLPLGRGAPPPPPPPPPPGRGAPPPPPPPGRGASLPPPPPPSRGAPPPPPPPVSRAGPPPPPPPPGARCGPPPPPPPPGASAPPPPPPPGARPGAPPPPPPLGARPGAPPPPPPPGGGGRGPLPPRAPGVPTPPRAPGVPLPPGSNPSLGRGRGAVRPMGSAIGAAASRKSTLKPLHWVKVTRALQGSLWEELQRNTDSQSVSEFDVSELESLFPAAVPKSDDSSKSERRKSLGSKPEKVHLIELRRANNTEIMLTKVKMPLSDLVSAALTLDQSTLDVDQVENLIKFCPTKEEMELLKNYTGDKQILGKCEQFFLELMKVPRMESKLRVFSFKIQFGSQVADLRRNLDIIDSSCNEIRTSLKLKEIMKKILLLGNTLNQGTAREYYFHLT

SEQ ID NO: 50577 - protein, 289 aa, Zea Mays
MALLVVRSHKGKVMGYTSPFFLLAFTTQFQLTRKIEGQLIFILSGGCNQNQDASACVTGFEIDYSHWVDEQKRHMAELTSTLQGQQTSELELRLLVETWLSNYERLFRIKATAANADVFYVMSGLWKTPAKRFFLWIGGFRPSDVLKDVALSRGGSPGVMTWGWVWELFSNLGVLGFGSASHFVFNEKKQTTNYSEGSSRPPLLGGSPPRNQPSQRQGDYSYLNRVFRDLFIQEGERTSGAAGPSMNKMEKAPGEAFGRRNPSGPMNQTDSYAQQPHETVSMSLKKIVS

SEQ ID NO: 50578 - protein, 1315 aa, Zea Mays
MEADAPLDLALFQLSPRRQRCELVVCGNGRTEKIASGSVKPFVAHLRAAEEQASAQPPPLAIRLQLERPAPWFSKGTLERFVRFVSTPEVLELANTYDLEMSQLEGARKIYAQGGTGDATSGGAAENVTASAAAAADITKKELLRAIDVRLSSLKQDLAAACSRASSAGFNPISVSELILFANHFGASRLSEACTKFMSLCQRRPDISPQTAQPAVSSHWKVFDDGNVRGSSSSDMSIDEPLVDLSESKNKSTVSGSGSQVHRLSNIQGLESAAAQQPKPTIQQAVDKQEAETDASPAPSKGELSRRLSVKDRINMFESQKKEQTPSSGNSNSAGTGRVVPGKGEHRRVPSGASMEKLVRRWSSVSDMSIDLSNNESSSLNDKKDNGTPAGTPTSTDLEADSKVRANEDSNGQKDSITSHSWPCQKDNVPMDLATTDLCPPSILSNTLAPHKESIYGDGAENDMVMNSSIESEASFGKEPGVIQGHTRMSNHATSNVSTQDRLKSSAKSVEEALLKNKVIVTSASSEEHVCMIDKEITAVAHEVPVASEQIPQNDIRGLHTKDIHTEAEVTGRKDQPSRSFGRVSGGVNPKPKASSNSRANAKGSSVRDAIASTETEFRDVSLQRNRLPRKSEDVGKKVTAGSDSDCSGRQGKNLSRQSSITDQELNLQARVTRPGKGNQDRHGELQMKANELEKLFAEHKLTSSRRGKPTDVQVESTPMVSEVKPTMVLHETIHTKQVVKESITVNDFDAGELLKMVNNQEFNISTPQKLGILSLEESRGKFYEHYMQKRDAKLKEGWKLQREEKEAMLKAMHDSLERSKAELLTKFSRSADVPDSTYVSHCSQKIPPSRSARKNKDQGVGSFLVEEEMNSDYLSGDGSSRSADSRKHFSNKVASTQNASAGPIHKRSSRTASSGYANRRNPPENPLAQSVPSFSDLRKENTKPSPGVSRVSARVQQKSFARSKSIIEESKSILKEDQSRRSQSMRKNQIPDELKDISSGNDDIYNWAPSRISKNQSEGPFAYSTRRSGPPKPFLRKGNGTHPVIGIAGFQAAAAMMANALQHGDSGDFEDQQEDSPDDAKEEEEYESMEENLRESDFPADSDSENPRVSHEFGNSDDPGSENGDADFPSKTPAIGSTKFTAFTGNVHNPAGDVPAPWSSRLPQLFPYTNDNSDGDAFADSPSGSPSPWNSHSLDEITDADVSRMRKKWGSAQMPFAGVNAPQQPRKDVSKGLKKLWKFGRKTRGGDGLVNDWVSASTASECDDDMEDGRDLVVGSSDDFRKSRMGYLASYDGFVENEVFSEQAPFQTHLQISD

SEQ ID NO: 50579 - protein, 200 aa, Zea Mays
MKQSIVILLLDLANMEISLNQWKDLTYDISRKIMRGIALALGGAIDAFEGDTAGDPFWVLRLIGYPVDIPEEQRTDTGCGAHTDYGLLTLVNQDDDICALEVQNRSGEWIYATPIPGTFVCNIGDMLKVWTNGIYQPTLHRVVNNSQHYRVSVAFFYESNFDAAVEPVEFCREKTGGAAKYEKVVYGEHLVQKVLTNFVM

SEQ ID NO: 50580 - protein, 267 aa, Zea Mays
MREVRNVTREFFQLPYEEKLKIKMTPQSGYRGYQRIGENITKGKPDMHEAIDCYTPIRPGKYGDLAKPMEGSNLWPKYPSNFEVLLENYIKLCRDISRKIMRGIALALGGAIDAFEGDTAGDPFWVLRLIGYPVDIPEEQRTDTGCGAHTDYGLLTLVNQDDDICALEVQNRSGEWIYATPIPGTFVCNIGDMLKVWTNGIYQPTLHRVVNNSQHYRVSVAFFYESNFDAAVEPVEFCREKTGGAAKYEKVVYGEHLVQKVLTNFVM

SEQ ID NO: 50581 - protein, 407 aa, Zea Mays
MATTTYQHFRSPSSMPRRKPAHRDSASMRRGEERQDLSFIEGRNIQDRKRRREFEWNYGVPDSLGEKREKVVYQDAGRKGRYHRRDEDREDPGRGGRHLRSRSWWDGRGSHCRGAVDDCYSNNNKHLFRGSSSYRSRDLSQNSWGHGSWLSNQVAAVKPQHMGTYSLKSSSIGKNVSFASPIATVLGAANTGDLRGPSVFISNTPSTVSCAFHDPMLDEALLSSGVVGGHNSSVMCWELQNSVAREGSAASPPTMMEVDGSDKRTNTAVPEPSLLPSELVQHFDQPLSKGKIKAIKTLLENGKQLKKKVQNRSGEWIYATPIPGTFVCNIGDMLKVWTNGIYQPTLHRVVNNSQHYRVSVAFFYESNFDAAVEPVEFCREKTGGAAKYEKVVYGEHLVQKVLTNFVM

SEQ ID NO: 50582 - protein, 302 aa, Zea Mays
MANDKDLLQVVRLLDDACKEAGFFYVKGHGIDESLMREVRNVTREFFQLPYEEKLKIKMTPQSGYRGYQRIGENITKGKPDMHEAIDCYTPIRPGKYGDLAKPMEGSNLWPKYPSNFEVLLENYIKLCRDISRKIMRGIALALGGAIDAFEGDTAGDPFWVLRLIGYPVDIPEEQRTDTGCGAHTDYGLLTLVNQDDDICALEVQNRSGEWIYATPIPGTFVCNIGDMLKVWTNGIYQPTLHRVVNNSQHYRVSVAFFYESNFDAAVEPVEFCREKTGGAAKYEKVVYGEHLVQKVLTNFVM

SEQ ID NO: 50583 - protein, 72 aa, Zea Mays
MCRVFLCGRLFASSVLCCSSSLFNEIIHSSPACYVRSREREREKKCLHIAVLCYHLPYFCNSAPNWEWFSLR

SEQ ID NO: 50584 - protein, 228 aa, Zea Mays
MWAHLAVALFVALAVAPPARGSDVPSFPLSQAQSPSNSSSPSNAASRPCHLDLSAELFGGVAAACGAGGGPGSLDRGRCCPVLAAWLFAAHARTALSVPPAPPPSALAGDEGMGPDGGDDGPMVPYDNQRCVDALGAALERRGVALPRPNATCDTVLCFCGIRLHQIGSLRCPAAFAVKAGAAARNATPTAAVKALEKSCRNASYAGCSRCVQSLQKMAGCWLQGVCG

SEQ ID NO: 50585 - protein, 530 aa, Zea Mays
MAAAQEKRLAIIGAGSSGLTACKHALAKGFRPVVFEAADAVGGVWARTLACTRLQSPAEAYRFSDFPWPPEVRPEEFPRSDQVAAYMAAYARQFGVVDCVRFGSKVLGAEYVGASEAEVAAWEQWSGNGEAFGDGTGVWHLTVQHGETEETQKYEFDFLIICLGRYGIAKVPTFPQGRGPEVFQGQVLHSMDYSRMPHADAHELIRGKRVVVVGSGKSGMDTVAQCARANGSKYPCTMVYRSANWMVDPNLAWGAFFKKMIGSRLAELMVHKPGEGFALSLLATVLTPMRWLMAKLAETYYRELMPMRKHGMAPGYNLSESMLLGWRIGLLPDRFYDMVEQGGIVLRRCDSFGFCADGLELDDGTGERVGADVVILATGFDDERLLTSVFVSPWFREIIVPKPSHTMLPLYRHCVHPRIPQMAVVCYVESAASIYPYEMMAKWVAHLLDGVVRLPSVAAMEENVAEWERWGRWAKRRSGAFFVKSCIAAVTTWYSDQLCRDMGRNPRRKRRGLLADWLQPYGPSDYAGIQ

SEQ ID NO: 50586 - protein, 225 aa, Zea Mays
MASSASRFIKCVTVGDGAVGKTCMLICYTSNKFPTDYIPTVFDNFSANVVVDGTTVNLGLWDTAGQEDYNRLRPLSYRGADVFVLAFSLVSRASYENIMKKWIPELQHYAPGVPVVLAGTKLDLREDKHYLMDHPGLVPVTTAQNFGDPAICTFQGEELRRQIGAMYYIECSSKTQQNVKAVFDAAIKVVIQPPTKIREKKKKKSRKGCSMMNIFGGRKMLCFKS

SEQ ID NO: 50587 - protein, 448 aa, Zea Mays
MLLGTTLLVQPTKFFSLERLILARLSGFGSLGLRVYAKGGKTIVFTRTKKDADEVSLALTTSIASEALHGDISQHQRERTLNGFRQGKFTVLVATDVAARGLDIPNVDLIIHYELPNDPETFVHRSGRTGRAGKAGTAILMFTSSQKRTVMSLERDVGCKFEFISPPSIEEVLESSAEHVIATLRGVHPESTQYFLGAAEKLTEELGPHALASALAHLSGFSQPPSSRSLISYEQGWVTLQLTREPGYGRGFFSPRSVTGFLSDVCSAAADEVGKIYITADENVQGAVFDLPEEIAKDLLTMEVPPGNTLTKISKLPALQDDSPATDSYGRFSNDRGSRNRRSRGGGASRGRGGWDTDSEDRYRRGGRSLRSDNDSWSDDDWSGGGRKSNRSSSSFGGRSSSYGSRGSPSPSFGVRSSSLGGRESRSFSGACFNCGESGHRASDCPNK

SEQ ID NO: 50588 - protein, 169 aa, Zea Mays
MRLVTLSNMPILQQLHLEEQLLRRTSDNWCVINDGMAPATILMGRKIQSCIGLLVPHVELLIWFCVMAGLQESLGACRHTAGPLGPSADCEEVQWRWHVIVDWGTVVVTFICNKNAVAGLQIYGKKFDRFGEFHLRENDYAFSHSKVWRKCSINNKKSLGSSHVVLVGL

SEQ ID NO: 50589 - protein, 327 aa, Zea Mays
MEGMGVPSPPTVGTPSASPCRITSPVDDTNASLGQEPECALTYIRQDDPDTFIISGNFHPRHQIDWDSIEVEERWNEEGRQDVTSERGLYIQLGLHNEDERVFKQREDDSSAHCAGNNREEFHDEASTAMPCSDFVLDGTRTIYDMNNPVMEPGSFLDLPLVKIQIWLLQGWLGWVSGATRPLMRLVTLSNMPILQQLHLEEQLLRRTSDNWCVINDGMAPATILMGLQESLGACRHTAGPLGPSADCEEVQWRWHVIVDWGTVVVTFICNKNAVAGLQIYGKKFDRFGEFHLRENDYAFSHSKVWRKCSINNKKSLGSSHVVLVGL

SEQ ID NO: 50590 - protein, 198 aa, Zea Mays
MPCSDFVLDGTRTIYDMNNPVMEPGSFLDLPLVKIQIWLLQGWLGWVSGATRPLMRLVTLSNMPILQQLHLEEQLLRRTSDNWCVINDGMAPATILMGLQESLGACRHTAGPLGPSADCEEVQWRWHVIVDWGTVVVTFICNKNAVAGLQIYGKKFDRFGEFHLRENDYAFSHSKVWRKCSINNKKSLGSSHVVLVGL

SEQ ID NO: 50591 - protein, 759 aa, Zea Mays
MEGMGVPSPPTVGTPSASPCRITSPVDDTNASLGQEPECALTYIRQDDPDTFIISGNFHPRHQIDWDSIEVEERWNEEGRQDVTSERGLYIQLGLHNEDERVFKQREDDSSAHCAGNNREEFHDEASTAMPCSDFVLDGTRTIYDMNNPVMEPGSLYASMEQFRLAIRQYAINKEFELGIEATNKTRFRGYCKGPDCPWSIHARSEMKGSPTIQVIVLNDEHTCTSSGRRKTTTPTGAWVAARALPLLMKKPHMGAKELQSMLQDTFGCTITYDTIWHGKEKALKQLFGSWEESFQLLWSWREAVIQKSPDSIIELDVKMDEGRPFFSRFFCALGPCITGFKEGCRPYLSVDSTALNGRWNGHLCCAIGVDGQNWMYPVAYGFFEAETTENWTWFFQQLRKAVGDLPLLALCSDACKGLKNAMNTVFPQAEKRECFRHLMQNYVKQFVGSEYMYPAARAYRREVFDHYFSNVQEIPKVSSWLYEHHDSLWYRSGFNPAIKCDYVTNNIAEVFNNWIKDWKDLPVCDLADKIRKEIMELFHRRREIGQRLQGRILPSVVHILHVRTRGLGHLTVKKADNYIAEVRDNNNVHSKHIVNAQLRQCSCNEWQHTGKPCHHALRLITTQQFRDVRMEDFVDDYYSVDKFMKAYSRVVEPIGDKSFWPTVPFAKEVCASIGKRGVGRQRKNMIKGCLEGGSGKKPNENENVKTKKMIRGKFKCPNCGELGHRKASYKCPLNGTKKRKRRARKNVTKGWFPKDVEA

SEQ ID NO: 50592 - protein, 192 aa, Zea Mays
MQVLDGGVNGIAAKHVDERRKPLNLLDGLVDARDRVAEPAMRDVRPSLSSILDCSRLSPPCSHRPTRRTTCQTLATGSAAAATTSGVCSLPSDSRQRQTLRLGDGHTGEEVIPTCHGRGGGEGVRLTGDWTRPPIPPAVADVSVQVSEAGTQAQTTVQIDEEPGSDEDDDLPPLEANTNMNRPYELISQRNN

SEQ ID NO: 50593 - protein, 568 aa, Zea Mays
MFVEEVMSLVELDVLRDALVGLPGVSGLSTEQRKRLTIAVELVANPSIIFMDEPTSGLDARAAAIVMRTLLLLKRGGRVIYAGQLGVQSRVLVEYFEAIPGVPKITEGYNPATWMLEVSSPLAEARLDVDFAEIYANSALYRKSEQELQNLLGATYAAVFFLGSANLLSSVPVFSIERTVFYREKAAGMFSPLSYSFAVTVVELVYSIAQGILYTIPLYSMIGYEWKADKFFYFMFFLTCSFLYFSLFGAMLVTCTPSAMLASIVVSFSLTGWNIFAGFLVPRPALPIWWRWFYWCNPVSWTIYGVTASQFGDVGRNVTATGNAGTVVVKEFLEQNLGMKHDFLGYVVLAHFGYILLFVFLFAYGTKALNFQKRIGAIFTTLYVSSVGVHTALFCHRALASLPAPAVPASAPAVPPRPQSPLPSSPAAPPPPANPTTTQQQIHHRRARRAPRRGTLDPTQQEVANQSPSPPAPTPPAAASGVRYRTPSSPDLLLPADAAKMRRYSALPNGGRQETLADRAHRYRGIVLVILAPLALVSLVLLLMPRSPAGTMGSARDRQDYYKVLETT

SEQ ID NO: 50594 - protein, 1001 aa, Zea Mays
MGFAPAAGRFFSQFLAYFLTHQMAVALFRLLGAILKTMVVANTFGMFAMLLIFLFAGILLPRQDIKHWWIWAYWSSPMTYSNNAISVNEFLATRWAMPNNEANIVAPTIGKAILKYKGYFGGQWGYWLSIGAMIGYTILFNILFLCALTFLSPGGSSNTVVSVSDDGDKEKSTDQEMFDVANGTNEAANRRTQTGMVLPFQPLSLSFNHMNYYVDMPAAMKDQGFTESRLQLLSDISGAFRPGVLTALVGVSGAGKTTLMDVLAGRKTSGTIEGDIKLSGYPKKQETFARVSGYCEQTDIHSPNVTVYESLVYSAWLRLSSEVDDNTRKMFVEEVMSLVELDVLRDALVGLPGVSGLSTEQRKRLTIAVELVANPSIIFMDEPTSGLDARAAAIVMRTVRNTVNTGRTVVCTIHQPSIDIFEAFDELLLLKRGGRVIYAGQLGVQSRVLVEYFEAIPGVPKITEGYNPATWMLEVSSPLAEARLDVDFAEIYANSALYRHNQELIKELSIPPPGYQDLSFPTKYAQNFLNQCMANTWKQFRSYWKNPPYNAMRYLMTILYGLVFGSVFWRMGKNVKSEQELQNLLGATYAAVFFLGSANLLSSVPVFSIERTVFYREKAAGMFSPLSYSFAVTVVELVYSIAQGILYTIPLYSMIGYEWKADKFFYFMFFLTCSFLYFSLFGAMLVTCTPSAMLASIVVSFSLTGWNIFAGFLVPRPALPIWWRWFYWCNPVSWTIYGVTASQFGDVGRNVTATGNAGTVVVKEFLEQNLGMKHDFLGYVVLAHFGYILLFVFLFAYGTKALNFQKRIGAIFTTLYVSSVGVHTALFCHRALASLPAPAVPASAPAVPPRPQSPLPSSPAAPPPPANPTTTQQQIHHRRARRAPRRGTLDPTQQEVANQSPSPPAPTPPAAASGVRYRTPSSPDLLLPADAAKMRRYSALPNGGRQETLADRAHRYRGIVLVILAPLALVSLVLLLMPRSPAGTMGSARDRQDYYKVLETT

SEQ ID NO: 50595 - protein, 573 aa, Zea Mays
MLGIIDPTKKRSTDDEAMFVTILRALSQAVSKIDTVYHHALLHNIFTMCVWHLHSDTRVVFLDLITRLAAVADQYLRECLQMLVNNFTPPGPLIRYIEEPRWLPKKEKIYSQLQESLKMISDTVPLAPRMLKDIIDRSMPKLFDSKAKMVSFVKCMLGLDAVVWDIIGSSLLEKVVYLLTELDVNITWEDILQDEHNKGIFDMELEDLAEDEDNLGQEGTKVHFGGNMCAEKLDGLMVVVCEHLKSRVEEPERLIKEFVTLKAIFKSHVLRVHKSKFAQFIMFYACSLHPEIGDGFANFLTDIFIDKDKNEDAITRVSAVSYVGSYLSRARFISVNIVVSVLKRLVDWCDYYCGHQLDNGVTANPIKHQLFYASCQAVMYVLCFRLRSIMDYPNLKQQLFRMRIRDILVHPLQPLKVCLPSIVNEFLRQATAASLFHAPAISMHEDAVESDLSKAFGGLNRLDMFFPFDPYLLKESDRYIRPNFEFWSLVKTTYSNDNSDEDDEELGDIDAPGMNVGSLDDHFEIDFNSDDDIEYKMNKMSITPQRTFYHPLATNSESNRMPARIRPSVSPPS

SEQ ID NO: 50596 - protein, 1230 aa, Zea Mays
MAAADGRSGDFRVRGGSVGGRIDRLVVENFKSYKGEQTIGPFVDFTAIIGPNGAGKSNLMDAISFVLGVRSTHLRGAQLKDLIYALDDRDKEAKGRKASVRLFYCQPNQEELCFTRSITGAGGSEYRIDRNQVTWDVYNAKLRSLGILVKARNFLVFQGDVESIASKNPKELTALLEQISGSDELRREYDELEEQKARAEEKSALVYQEKRTIVMERKQKKVQKEEAEKHLRLQQDLKLLKTEHYLWQLYTIEKDIEKIEAELVEDRESLQQVQEENRSSDYELTAKKKEQSAFLKKITLSEKSITKKKLELDKKQPELLKLKEQISRLKSKIKSCKKEIDKKKDDHKKHLGELRRLQSDLVEVTEAIEELNEQGQDTSGKLLLADDQLQEYHRIKEDAGMKTAKLRDEKEVIEKKLNADAEAKKNLVENMQQLESRKDEISSQERELQTKLSKILHSIPKLENELTHLHEEHNKIAKERQSSGSEYQMLKQRLDEIETQLRELKADKHESERDARLKETVGRLKRLFPGVHGRMLELCRPSQKKYNLAVTVAMGKFMDAVVVEDENTGKECIKYLKEQRHPPQTFIPLQSVRVKPIIEKLRTLGGSAQLVFDVIHFDRVLEKAVLYAVGNTLVCDKLDEAKALSWSGERYKVVTVDGILLTKSGTMTGGTSGGMEARSNKWDDSTIESLKKKKNLLENKMSELGSPRELQRKELAISEKITGLEKKLHYSNVEQNNLRGKLAKLASERSNIETEINRLKPGEEELETRIGKREAEARKLEKKINDIVDKVYRDFSISVGVKNIREYEEKQLKDAQALQERKLSLSNQMSKLKYQLEYEQKRDMHAPIVKLTETHESLEKELKGLQERESGAKAEAEQILAQMEELKTEADDWKSKSDECEKVIDELKEQNGNVASTLAKMDRQVKSKEGQLAQLISRQREVHEKCELEQLKLPTVNDPMDTGTSSQEPILDYSQLSKSHLQDIRPSERDKHEAEFKKRTGVLLADIERTAPNLKALDQYDALQQKEKEVTERFEAARKEEREISDKYNSVKQRRYELFMEAFDHISKGIDKIYKQLTKSHTHPLGGTAYLNLENEDEPFLNGIKYTAMPPTKRFRDMEQLSGGEKTVAALALLFAIHSFRPSPFFILDEVDAALDNLNVAKVAGFIRSKSCERVGDEQGSDGESGFQSIVISLKDSFYDKAEALVGVYRDSERSCSRTLTFDLRKYRES

SEQ ID NO: 50597 - protein, 358 aa, Zea Mays
MVVTLSPHNVVAARCASQYLEMTEDMEKGNLIFKIEVFINSSILRSWKDSIIVLQSTKALSPWSEELKVVGRCIDAIASKTSADPANVTWSYSHSSKKGGACAEIVEPAGKPSIAPKDWWVEDLCELDVDLYKRVMVAIKSKGRMSPELIGEALKAYAVRWLPDSYDALVAEDYMRRNQCLVETIIWLLPSDKSSGCSCRFLLKLLKVAILVGGGEHVKEELIRRISFQLHKATVKDLLLPATSPNDGTYDVRLVHNLVQRFVARTALSHNGGFIEKSDEKMIELNFEQESILSVGELVDGYLSEVASDQDLSLSMFVELATAVPEVARPVHDNLYYAVDAYLKVCSNVEGKHFVRLA

SEQ ID NO: 50598 - protein, 398 aa, Zea Mays
MASSATPYLGELDAKVSTEQLFYQTNARFMYAYNSGVLSSQDRAGANRIEENALVWTIEQKSSEFTLFDLSELLEATKSFAEENRLGQGGFGPVYKGQLSDGQEIAVKRLASHSGQGFTEFRNEVELIAKLQHTNLVRLLGCCIQAEEKILVYEYLPNKSLDFFIFDERQSSLLNWYKRRAIIEGVAQGLLYLHKHSRLRVVHRDLKASNILLDQDMDPKISDFGLARICSSNDAEGNTKRVVGTYGYMSPEYASEGIYSVKSDVFSFGVLLLEILSAKRNSGFHQYGDFLNLLGYTWHLWEIGRWLDLVEASISKEMHEAEARRYINIALMCVQENADDRPTMSDVVAALNSESVVLPEPKHPAYFNLRVSKSVESAVVVEACSLNEMTITQDPQGR

SEQ ID NO: 50599 - protein, 302 aa, Zea Mays
MAIVLLALLLFPSAYAQPWSVCGNTGNYTAASTYQDNLSQLAASLPKKASSNTSPLFATGTAGAVPDLVYALALCRGDINASACKDCVTIGFEDAQQLCAFNKEATVYYDSCLVSFSNEDFLSTTVNGNENEVTVLMDAQNFTESADYIRLLLFTLLNDTSESAINSIRRFTTARMDISSLPTIYCAVQCTPDLTADECAACLQDFPQVTLQYLDGQRGGRLLGVRCNMRYEIYKFYQGDPMLRIISLASAVPTIGKTPPGTPVTVYPQPPPAAPPAPQMITTPIAAQEETGAIIRWSGNCS

SEQ ID NO: 50600 - protein, 609 aa, Zea Mays
MAIVLLALLLFPSAYAQPWSVCGNTGNYTAASTYQDNLSQLAASLPKKASSNTSPLFATGTAGAVPDLVYALALCRGDINASACKDCVTIGFEDAQQLCAFNKEATVYYDSCLVSFSNEDFLSTTVNGNENEVTVLMDAQNFTESADYIRLLLFTLLNDTSESAINSIRRFTTARMDISSLPTIYCAVQCTPDLTADECAACLQDFPQVTLQYLDGQRGGRLLGVRCNMRYEIYKFYQGDPMLRIISLASAVPTIGKTPPGTPVTVYPQPPPAAPPAPQMITTPIAAQEETGRKGKLWIIGIAIPLVAILLCSTFTFLWLRRPKKGVLSSQDRAGANRIEENALVWTIEQKSSEFTLFDLSELLEATKSFAEENRLGQGGFGPVYKGQLSDGQEIAVKRLASHSGQGFTEFRNEVELIAKLQHTNLDMDPKISDFGLARICSSNDAEGNTKRVVGTYGYMSPEYASEGIYSVKSDVFSFGVLLLEILSAKRNSGFHQYGDFLNLLGYTWHLWEIGRWLDLVEASISKEMHEAEARRYINIALMCVQENADDRPTMSDVVAALNSESVVLPEPKHPAYFNLRVSKSVESAVVVEACSLNEMTITQDPQGR

SEQ ID NO: 50601 - protein, 703 aa, Zea Mays
MAIVLLALLLFPSAYAQPWSVCGNTGNYTAASTYQDNLSQLAASLPKKASSNTSPLFATGTAGAVPDLVYALALCRGDINASACKDCVTIGFEDAQQLCAFNKEATVYYDSCLVSFSNEDFLSTTVNGNENEVTVLMDAQNFTESADYIRLLLFTLLNDTSESAINSIRRFTTARMDISSLPTIYCAVQCTPDLTADECAACLQDFPQVTLQYLDGQRGGRLLGVRCNMRYEIYKFYQGDPMLRIISLASAVPTIGKTPPGTPVTVYPQPPPAAPPAPQMITTPIAAQEETGRKGKLWIIGIAIPLVAILLCSTFTFLWLRRPKKGVLSSQDRAGANRIEENALVWTIEQKSSEFTLFDLSELLEATKSFAEENRLGQGGFGPVYKGQLSDGQEIAVKRLASHSGQGFTEFRNEVELIAKLQHTNLVRLLGCCIQAEEKILVYEYLPNKSLDFFIFDERQSSLLNWYKRRAIIEGVAQGLLYLHKHSRLRVVHRDLKASNILLDQDMDPKISDFGLARICSSNDAEGNTKRVVGTYGYMSPEYASEGIYSVKSDVFSFGVLLLEILSAKRNSGFHQYGDFLNLLGYLYRSWRLDELSAVLQTWHLWEIGRWLDLVEASISKEMHEAEARRYINIALMCVQENADDRPTMSDVVAALNSESVVLPEPKHPAYFNLRVSKSVESAVVVEACSLNEMTITQDPQGR

SEQ ID NO: 50602 - protein, 197 aa, Zea Mays
MDPKISDFGLARICSSNDAEGNTKRVVGTYGYMSPEYASEGIYSVKSDVFSFGVLLLEILSAKRNSGFHQYGDFLNLLGYLYRSWRLDELSAVLQTWHLWEIGRWLDLVEASISKEMHEAEARRYINIALMCVQENADDRPTMSDVVAALNSESVVLPEPKHPAYFNLRVSKSVESAVVVEACSLNEMTITQDPQGR

SEQ ID NO: 50603 - protein, 609 aa, Zea Mays
MGIRHSSRPHYGVQFHPESIATHHGRQIFRNFKKITGNFGLRSSWIQERKVNSASHHDSIPKDLLHTERMELSESVLGKRGIGKKCLRLQWKKIENFVCPTVGSEDIFAVLFGHQSGEDTFWLDSSSVDQNRARFSFMGGKGGSLWKQMSFHLSGQRANCGGMLSIQDAYGFTAKKFIKDGFLEFLNKEIESIQYNEKDYEGLPFEFHGGFVGYLGYGLKVECDASSNKAKSSTPDACFVFADNTVVVDHSNGDVYILSLHDEFYSSNGDGICKNSTHTSWLVETEKKLLRLGGMPSGSPIIRKTHARSSSVHKQSFVVEKSKDQYVRDVQNCLDYIRDGESYELCLTTQMKRRADCINALQLYLKLRKQNPAPYAAWLNFSSENLSICCSSPERFLRLDRAGVLEAKPIKGTIARGRTPEEDECLRLQLRYSEKDQAENLMIVDLLRNDLGKVCEPGSVHVPRLMDVESYRSVHTMVSTVCGTKKPDLSPVDCVKAAFPGGSMTGAPKVRSMEILDSLETSPRGVYSGSIGFFSYNHTFDLNIVIRTVILHDGEASVGAGGAIVALSSPEAEYDEMLLKAKAPTEVVEDLVQTIYSSDRSDSMQTTIS

SEQ ID NO: 50604 - protein, 491 aa, Zea Mays
MGGKGGSLWKQMSFHLSGQRANCGGMLSIQDAYGFTAKKFIKDGFLEFLNKEIESIQYNEKDYEGLPFEFHGGFVGYLGYGLKVECDASSNKAKSSTPDACFVFADNTVVVDHSNGDVYILSLHDEFYSSNGDGICKNSTHTSWLVETEKKLLRLGGMPSGSPIIRKTHARSSSVHKQAGSPINGKTYVRSSSALKQSFVVEKSKDQYVRDVQNCLDYIRDGESYELCLTTQMKRRADCINALQLYLKLRKQNPAPYAAWLNFSSENLSICCSSPERFLRLDRAGVLEAKPIKGTIARGRTPEEDECLRLQLRYSEKDQAENLMIVDLLRNDLGKVCEPGSVHVPRLMDVESYRSVHTMVSTVCGTKKPDLSPVDCVKAAFPGGSMTGAPKVRSMEILDSLETSPRGVYSGSIGFFSYNHTFDLNIVIRTVILHDGEASVGAGGAIVALSSPEAEYDEMLLKAKAPTEVVEDLVQTIYSSDRSDSMQTTIS

SEQ ID NO: 50605 - protein, 191 aa, Zea Mays
MALLVLKCTGHGSFSATENFKKDDISSLSEAVTVVRVRIECRLLTEAFMYHRSYCSKVKEQHSADMTHAEDALKNSWVYHVEMMVTEFCAICIKRNLVDKMIDLPWDSEEEKHLHKSLFDSAHEMPMKPNGSLLVVYYLRRYRYLEAYEVDRSLQKFEQKILENTTEEIASKIRAIARWRESLVFCFITHV

SEQ ID NO: 50606 - protein, 332 aa, Zea Mays
MAEYRISIYGRKQSEWDQLASWIVNNELHSGNVVWLVQIPRLYNVYKEMGIVTSFQNLLDNIFVPLFEVTIDPASHPQLHVFLKQVVGLDLVDDESKPERRPTKHMPTPEQWTNVFNPAFSYYAYYCYANLFTLNKLRESKGMTTIKFRPHAGEAGDVDHLAATFLLCHNISHGINLRKSPVLQYLYYLGQIGLAMSPLSNNSLFLDYHRNPFPTFFQRGLNVSLSTDDPLQIHLTKEPLVEEYSIAASLWKLSSCDLCEIARNSVYQSGFSHALKAHWIGKNYFKRGPAGNDIHRTNVPHIRVQFREMIWRNEMKLVYSDNEILIPDELDL

SEQ ID NO: 50607 - protein, 688 aa, Zea Mays
MDVLRFVRAAAAPQPAVAPPASAATVPAQRQRLRMWPRGGGDQPPPVGAASTRGAEPRSPPDEERKAEGAQRGQGNWVLQMLRVQPRWVDAADAEATGGGQEPDEETAAAAAAGAGGVEECASCGCGEDDEGCAVGYGDGDGEVFDRASFSRLLRKASLGEAKEYSMMSYLCNIAYMIPRIQPKCLRRYNLRFVTSSVQDKAGVSNPDQKQERSTKKDESGDQASEAVDDAVPRRGLGTIKPFGAYHVVSSAASYLHSRAMGVMPFGPGNGVKDDHPAAVTSLVSGASGDGLSVDEASFVATTSSVTSMVAAKEETRQAVADDLNSSRSCPCEWFVCEDDQNSTIYFVVQGSESIASWQANLLFEPVKFEEVDVLVHRGIYEAAKGMYHQMLPYVKAHLKSWGKSARLRFTGHSLGGSLALLVNLMLLVRGEAPASSLLPVITFGAPCIMCGGDHLLRRLGLPRSHVQSVTMHRDIVPRVFSCHYPDHVANILKLANGNFRSHPCLANQKLLYAPMGEVLILQPDERLSPHHHLLPPDSGIYHLGGGGGGGGAGTAANAGEGSLPQLRSALSAFFNSPHPLEILKDGAAYGPRGSVYRDHDVNSYLRSVRAVVRKEARRAREAERERWRLLLWWPFGVHGVSSASAGRRGGLVDAVSEAARRAHLLLVVLLPAELLALGALLAVIRFR

SEQ ID NO: 50608 - protein, 333 aa, Zea Mays
MRSQEKNEGQGSSLSIVVLHREHQDEFVHKRTKGFWMKLAVASWITAFLKQFQDSVSKSDYEALRSAFVVEHYPEKPDIDFHKYMTRAVEYEFKRVVGISWYLWLFVILFLLLNINGWHTYFWLAFLPLFLLLIVGAKLEHIITRLAQEAAISLSNNTEEVPKIKPCKDHFWFHKPELVLHLIHFILFQNSFEISFFFWILVSEGFGSCMMERKPYVISRLVIGVIIEVICSYITLPLYAIVTHMTGQIKLHGFGSRVHESVHGWIGLRKKPFSFWKIPGGDPNADSGREADVTRRVAKERSGSSRSMPMAPADEIVTVDDVAVAAAAVGQGP

SEQ ID NO: 50609 - protein, 606 aa, Zea Mays
MPLPSPLSTSPSPASQPASIRVAAKGANRRRAMTPSVSCPVKCRPHPCLAPQPPAPSPELLAARGAPIAGELRACRSPPYLPLSRSADSLELRAACRGAPPASRARAAVALGGDGPSAALIAGAQSRHAIFRDELVRRAFTAAEAAHRGQVRASGDPYLQHCVETAALLAELGAGPAVVAAGLLHDTVDDAGLGYGFISEHFGAGVADLVKGVSNLSHLSKLARRNDTASRIDEADRLRIVFLAMEDARAVLIKLADRLHNMRTLDSLSKTKQQSVAKETLEIFAPLANQLGILNWKEQLENLCFKYLYPENFDELSTKLIEIYNIDMIAAATRRLEQALQVRGLSYYAIYGRHKSMYSIYRKMARKKLVMDKIYDIHGVRVILENKADCFATLEIIHHLWPRIPGKFKDYINSPKPNRYQSLHTVVLTEQTLPLEIQIRTRDMHLQAEFGIAAHWRYKEGERSCCTSVSEIVEWVRWVTWHCQTLNTGYPSSLACDASSKETHTIPSHSDACLLSYSKQCDHKGPVLMSVQEIPQNWTILDLLKRSSNYGMPLRLRLNCHAVHNWNQELKMGDVLELIPSTPCKSRGHTRELHQKFDHRLAVSQS

SEQ ID NO: 50610 - protein, 915 aa, Zea Mays
MLTMRMMLRQLGPRTQGVAMFYRLQKRGRREVQGRFLSQKGRKERVKNKRRHHPPRIKIVLKLMGKMLTGDNALMCHQCQRNDKGRVVWCNSCRNKRFCVPCIERWYPNLSEDEFAAKCPYCRKNCNCKGCLRMRGVEEPPKKEISEENQISYACNVVRLLLPWLRKLRQEQMEEKKLEAKIKGVLVNEMKLEQAEYNLDERVYCNNCKTSIVDFHRSCKYCFYDLCLDCCVEIRRGEIPGGEEIMRVKPEDRGRAYLFGTTNSKDGSKRFSMRRHSSSLENEPSNVVGSSEGANNSLELWKAESDGSIPCPPKELGGCGGSILDLKCFFPEKMLSNLEERADRIMRSEVFAKAVAKRSDQCPCYDHSGNIRTQDVRETANTKGSSDNHLYCPVATAIKEDDLAHFQMHWTKGEPVIVSDVLHLTSGLSWEPLVMWRALREKKTNGDVEDEHFAVRALDCLDWCETAHSSVVNRTHHMTHWPEMLKLKDWPPSSSFDQRLPRHGAEFISALPFPEYTDPRYGPLNLTVKLPDGALKPDLGPKTYIAYGFYQELGRGDSVTKLHCDMSDAVNILTHTAQVPYARYQLEKIEETRKKMKEQDLQELYGVSELNLSSPFTDSRNISADEMSKTSCNYGLDVNDVPPVNNESEVQSGAGQCSDYIDKDRSYAGMHNGERTGGALWDIFRREDSDKIQDYLRKHATEFRHIFCNPVKQVIHPIHDQTFYLTEEHKRKLKEEYGVEPWTFEQKLGEAVFIPAGCPHQVRNLKSCIKVAMDFVSPESVNECMKLTGEFRRLPPDHRAKEDKLEIKKIALHALNQVVNFLDPSSEWSKSWFAQLKNKKKAGAEEQEKPKRKRGRPCRKSNDEAAGDRHRKKGGRQRGRKRGYGKSKDGAGAVDVKPPKRQRNLLKGSGNRVGG

SEQ ID NO: 50611 - protein, 161 aa, Zea Mays
MDFHEELVNLEASSKLQLKALADEQLAVVKGLEKVEQELTASESDGPVSDVFRKTLKEFIDCSSADVRSLSAFYSEVGKSADGLAVYFGEDPAKFPFEQVATTLLTFVGLFRKAHDENLKQIEAEKKKAQKEAEKEANQDKTPVKSKNGNADKSPRSPSTF

SEQ ID NO: 50612 - protein, 149 aa, Zea Mays
MAWSWTRSFLTWATVPLCMGEAARQGFKGFLDLCEFFLELMKVPRVESKLQIFAFKIQFQSQIRDVRKNLQTVSSACEELRSSEKLKVIMKNILLIGNTLNQGTPRGQAVGFRLDSLLKLIDTRATSGRMTLMHFLFPCREVTGSNGFS

SEQ ID NO: 50613 - protein, 967 aa, Zea Mays
MLPEHKSAVPPTLEGHEASEVQLLQSDITVELSSSKHSEYTVQHVFGSTEDTISNISSSIPAAPPYPIFHIVTYNSSGSISAEQVNCEQALDQTALPIHLRPFKVEISQSETTNGLLASKTDDKEHGGLPIPSLPQNLPQPREHMKPPSPPPPPPRPPPCHATLVPSLCLSSNPPSLRELYENQPSTSPPPFPRESFVALPPPPAPHPNHLSLPGKHIKPSPPPPPPPPRENEAFCPSTLLSPTRHVIPPPPTLHHIAPTSPCLYQPSFPIDIEIQPTFSEDIVIVSPSHSTEVNIVPLPPPPPRRMSEILSQPLEGGQSALPASLLEVTKEIPPPPPLPPKVQRRSPLSTLCGGIVNIPLPPPPPPPPLPGGHGEVPLSTPKGSGAIPPPPPFTKGLGGITLAIQFHSGDFSLLEPTRESESTSRLPPPPLSSNGHIGDPPPPPPPPPTMSVFVEASIPLPPQTGCREAPPPPPPSPGGHVEFPPPPPGECALALPHPKASVGAPPPPPPPGGHVESPPPPPPPGECALALPHPKASVGAPPPPPPPGGHVESPPPPPPPGECALALPHPRASVGAPPPPPPPGGHVESPPPPPPPGECALALPHPKASVGAPPPPPPPGGHVESPPPPPPPGECALALPHPKASVGAPPPPPPPGGYVGAPPPPPPPGECALALPHPKASVGAPPPPPPPGGYVGAPSPPPPPGGYIGAPPPLPYGGIGGVPPPPPPFGGLGGTPPPPPPAGFRGGAPAPPPPPGGHGGPPPPPPRGHGGVGGPPPPPGAPSPPMPPGMPGGPPPPPGGRGMPAPPGGRGHGLARSLGPTLQSAVRRSSLKPLHWVKVTRAMQGSLWAELQKQVDANSRAEFDVNELESLFTIAPKTKAGPKSEGRGKSLGTKSDKVQLIDLRRANNTEIMLTKIKMPLPDMMSAALALDDSVLDADQIENLIKFCPTKEEMELLKWGQGSSWKV

SEQ ID NO: 50614 - protein, 1086 aa, Zea Mays
MLPEHKSAVPPTLEGHEASEVQLLQSDITVELSSSKHSEYTVQHVFGSTEDTISNISSSIPAAPPYPIFHIVTYNSSGSISAEQVNCEQALDQTALPIHLRPFKVEISQSETTNGLLASKTDDKEHGGLPIPSLPQNLPQPREHMKPPSPPPPPPRPPPCHATLVPSLCLSSNPPSLRELYENQPSTSPPPFPRESFVALPPPPAPHPNHLSLPGKHIKPSPPPPPPPPRENEAFCPSTLLSPTRHVIPPPPTLHHIAPTSPCLYQPSFPIDIEIQPTFSEDIVIVSPSHSTEVNIVPLPPPPPRRMSEILSQPLEGGQSALPASLLEVTKEIPPPPPLPPKVQRRSPLSTLCGGIVNIPLPPPPPPPPLPGGHGEVPLSTPKGSGAIPPPPPFTKGLGGITLAIQFHSGDFSLLEPTRESESTSRLPPPPLSSNGHIGDPPPPPPPPPTMSVFVEASIPLPPQTGCREAPPPPPPSPGGHVEFPPPPPGECALALPHPKASVGAPPPPPPPGGHVESPPPPPPPGECALALPHPKASVGAPPPPPPPGGHVESPPPPPPPGECALALPHPRASVGAPPPPPPPGGHVESPPPPPPPGECALALPHPKASVGAPPPPPPPGGHVESPPPPPPPGECALALPHPKASVGAPPPPPPPGGYVGAPPPPPPPGECALALPHPKASVGAPPPPPPPGGYVGAPSPPPPPGGYIGAPPPLPYGGIGGVPPPPPPFGGLGGTPPPPPPAGFRGGAPAPPPPPGGHGGPPPPPPRGHGGVGGPPPPPGAPSPPMPPGMPGGPPPPPGGRGMPAPPGGRGHGLARSLGPTLQSAVRRSSLKPLHWVKVTRAMQGSLWAELQKQVDANSRAEFDVNELESLFTIAPKTKAGPKSEGRGKSLGTKSDKVQLIDLRRANNTEIMLTKIKMPLPDMMSAALALDDSVLDADQIENLIKFCPTKEEMELLKNYSGDKEALGKCEHFFLELMKVPRVESKLQIFAFKIQFQSQIRDVRKNLQTVSSACEELRSSEKLKVIMKNILLIGNTLNQGTPRGQAVGFRLDSLLKLIDTRATSGRMTLMHFLFPCREVTGSNGFS

SEQ ID NO: 50615 - protein, 787 aa, Zea Mays
MWEGLIQKAKDGGLDVIQTYVFWNGHEPTPGNYYFEERYDLVRFVKTVQKAGLFVHLRIGPYICGEWNFGGFPVWLKYVPGISFRTDNEPFKTAMQGFTEKIVGMMKSENLFASQGGPIILSQIENEYGPEGKEFGAAGQAYINWAAKMAVGLDTGVPWVMCKEEDAPDPVINACNGFYCDAFSPNKPYKPTMWTEAWSGWFTEFGGTIRQRPVEDLAFAVARFVQKGGSFINYYMYHGGTNFGRTAGGPFITTSYDYDAPIDEYGLIREPKHSHLKELHRAVKLCEQALVSVDPTITTLGTMQEAHVFRSPSGCAAFLANYNSNSHAKVVFNNEQYSLPPWSISILPDCKNVVFNSATVGVQTSQMQMWGDGATSMMWERYDEEVDSLAAAPLLTTTGLLEQLNVTRDSSDYLWYITSVDISPSENFLQGGGKPPSLSVQSAGHALHVFVNGQLQGSSYGTREDRRIKYNGNVNLRAGTNKIALLSVACGLPNVGVHYETWNTGVGGPVVLHGLNEGSRDLTWQTWSYQVGLKGEQMNLNSVEGSGSVEWMQGSLIAQKQQPLAWYKAYFETPSGDEPLALDMGSMGKGQVWINGQSIGRYWTAYADGDCKGCSYTGTFRAPKCQAGCGQPTQRWYHVPRSWLQPSRNLLVVLEELGGGDSSKIALAKRSVSSVCADVSEDHPNIKKWQIESYGEREHRRAKVHLRCAHGQSISAIRFASFGTPVGTCGNFQQGGCHSASSHAVLEKRCIGLQRCVVAISPDNFGGDPCPSVTKRVAVEAVCSPAA

SEQ ID NO: 50616 - protein, 327 aa, Zea Mays
MYGAPVPKDLNLPAALPQPTRAGARTPPQQQQQMSSAGLLRYRSAPSTLLGEVMCGDQDFPATDGGGGHGPPDHAATDNVLALFLAGHHSEARDCKPPRPAAAAHFMDEAAASQQQQLMYQSQQQQQMAAMEGLYHNVSSGGTEHGAGVGAGNNSLIRQSSSPAGFLTNGYGGMLRAGMGMAGGFRNGVSDARLKGQLSFPSRQGSVMSQISEVGSEELDGGGGGSPEAAGSNASGAPRGYVGIPGYPMGGGTSGAWSDEPSPSPTSGAKRRPRDSGPAPQNVQQQPLAPQLSLPSGGKPASAEMAAIEKFLQFQDAVPCKIRAKRG

SEQ ID NO: 50617 - protein, 678 aa, Zea Mays
MAYLSSLHHAPYPRLLLHHRYLFFSASSPPPVVTTRRLVPTLACHGRDLLDVMPYRDSRPSGTEGSRAGPGGAPRVTNSSTVRGNATAQEAHMPMWRERTPGTPRTWKKGDRVMLQEHAEGESQEKSWRRGLTRSLESKGPMVRKSWTRDGNGMRAKESGKVGNSRDEGTGRRNACKKMKKPPDGEYAGKLRVELDMCSKRGDVMGAITLYDSAVEEGIKLGQHHYNVLLYLCSSASLGFVQPAKSGNMGSGIASIGPAQKLDPSPSRSLGGSEGDNAYASESHVQDQGKNKADLIPGGLKAQTVSIPVEDELGDYARARGFEIFDKMCSEKERVQMSEAALTAKARMALSMGDSDMAFEIVKQMKGLGLKPKLRSYGPALTAFCNSGNVEKAFEVEAHMLESGITPEEAELETLLRASVVGRRGDKVYYLLHKFRTAVRQVSHSTAELFEAWFRSPTASKVGKRKWDAGAIAKAIENNGGGWHGFGWLGRGKWTVAHSNINENGVCLACGEKLAIIDLDPKETEDFATFVAKLAIKRERKSNFENFQKWLEKHGPFEAVVDAANVGLFSHKHLSLSKVNSVADAIRLRFTSKKWPLIVLHNKHLIGERMKKLNDHKLVQKWKQENSIYATPTGSNDDWYTSLWKTAASHFKCHLHTQLLYRNPIKVTGISLSRRKAC

SEQ ID NO: 50618 - protein, 577 aa, Zea Mays
MAYLSSLHHAPYPRLLLHHRYLFFSASSPPPVVTTRRLVPTLACHGRDLLDVMPYRDSRPSGTEGSRAGPGGAPRVTNSSTVRGNATAQEAHMPMWRERTPGTPRTWKKGDRVMLQEHAEGESQEKSWRRGLTRSLESKGPMVRKSWTRDGNGMRAKESGKVGNSRDEGTGRRNACKKMKKPPDGEYAGKLRVELDMCSKRGDVMGAITLYDSAVEEGIKLGQHHYNVLLYLCSSASLGFVQPAKSGNMGSGIASIGPAQKLDPSPSRSLGGSEGDNAYASESHVQDQGKNKADLIPGGLKAQTVSIPVEDELGDYARARGFEIFDKMCSEKERVQMSEAALTAKARMALSMGDSDMAFEIVKQMKGLGLKPKLRSYGPALTAFCNSGNVEKAFEVEAHMLESGITPEEAELETLLRASVVGRRGDKVYYLLHKFRTAVRQVSHSTAELFEAWFRSPTASKVGKRKWDAGAIAKAIENNGGGWHGFGWLGRGKWTVAHSNINENGVCLACGEKLAIIDLDPKETEDFATFVAKLAIKRERKSNFENFQKWLEKHGPFEAVVDAANVGLFSHKHLSLS

SEQ ID NO: 50619 - protein, 683 aa, Zea Mays
MAYLSSLHHAPYPRLLLHHRYLFFSASSPPPVVTTRRLVPTLACHGRDLLDVMPYRDSRPSGTEGSRAGPGGAPRVTNSSTVRGNATAQEAHMPMWRERTPGTPRTWKKGDRVMLQEHAEGESQEKSWRRGLTRSLESKGPMVRKSWTRDGNGMRAKESGKVGNSRDEGTGRRNACKKMKKPPDGEYAGKLRVELDMCSKRGDVMGAITLYDSAVEEGIKLGQHHYNVLLYLCSSASLGFVQPAKSGNMGSGIASIGPAQKLDPSPSRSLGGSEGDNAYASESHVQDQGKNKADLIPGGLKAQTVSIPVEDELGDYARARGFEIFDKMCSEKERVQMSEAALTAKARMALSMGDSDMAFEIVKQMKGLGLKPKLRSYGPALTAFCNSGNVEKAFEVEAHMLESGITPEEAELETLLRASVVGRRGDKVYYLLHKFRTAVRQVSHSTAELFEAWFRSPTASKVGKRKWDAGAIAKAIENNGGGWHGFGWLGRGKWTVAHSNINENGVCLACGEKLAIIDLDPKETEDFATFVAKLAIKRERKSNFENFQKWLEKHGPFEAVVDAANVGLFSHKHLSLSKVNSVADAIRLRFTSKKWPLIVLHNKHLIGERMKKLNDHKLVQKWKQENSIYATPTGSNDDWYWLYAAIRCKCLIITNDEMRDHTFQILERNFFPKWKERHQYCFH

SEQ ID NO: 50620 - protein, 1089 aa, Zea Mays
MVTPPTVEEDEEMLVPRQEAVDTDAAQPMEGTVVAQTEVVSTAESQPVEDPQTSRFTWTIENFTRFSEKKHYLEVFVVGGFKWSVLIFPKGNNVDHFSMYLDVADSTSLPYGWSRYAQFSLAVVNQIQPEFTIRKETQHQFNARESDWGFTSFMPLSELYDASRGYLVNDTVVVEAEVAVRRIVDYWTYDSKKETGYVGLKNQGATCYMNSLLQTLYHIPYFRKAVYHMPTTENDIPSGSIPLALQSLFYKLQYSDSSVATKELTKSFGWDTYDSFMQHDVQELNRVLSEKLEDKMKGTVVEGTIEQLFEGHHINYIECINVEHKSNRKESFYDLQLDVKGCRDIYSSFDKYVEVERLEGDNKYHAENHGLQDAKKGVLFLDFPPVLQLQLKRFEYDYMRDSMVKINDRYEFPLQLDLDRDGGKYIAPNADRSTRNLYTLHSVLVHSGGVHGGHYYAFIRPTLSEQWYKFDDERVTKEDAKKALEEQYGGDEELPQINPGFNNAPFKFTKYSNAYMLVYIRESAKEKIMCTVDEKDIAEHLRVRLKKEQEEKEHKKKEKAEAHLYTIIKVARDEDLKEQIGKGIYFDLVDHEKVHNFRIQKQMPFSCFKEEVAKEYGIPVQFQRFWLWAKRQNHTYRPNRPLTVHEETQSDLRPLPPPEKGKEDILLFFKFYNPEKEELCFMGRLFVKALGKPSEILAKLNEMAGFPPDQEIELFEEIKFEPNVMCETIDKKLTFHYSQLEDGDIICFQKSPGAEYDAPVRYPDVPSFLEYVHNRQVVHFRSLEKPKDDDFSLELSKLHTYDDVVERVARQLELDDPAKIRLTPHNCYSQQPKPQPVKYRGVVHLSDMLIHYNQTSDILYYEVLDIPLPELQFLKTLKVAFHHPTKDEVVIHSIRLPKNSTIADVIYDLKTKVELSSPNAELRVLEVFYHKIYKIFPLHEKIENINDQYWTLRAEEIPEEEKNIGPNDRLIHVYHFKKDINQTQIQNFGDPFVLVVHEGETLAEVKKRIQSKLQVSADEFSKWKFAFISMNRPDYLQDSDVVPTGFQRREVYGAWEQYLGIEHADTAPKRVYTVNQNRHAYEKPVKIYN

SEQ ID NO: 50621 - protein, 840 aa, Zea Mays
MQHDVQELNRVLSEKLEDKMKGTVVEGTIEQLFEGHHINYIECINVEHKSNRKESFYDLQLDVKGCRDIYSSFDKYVEVERLEGDNKYHAENHGLQDAKKGVLFLDFPPVLQLQLKRFEYDYMRDSMVKINDRYEFPLQLDLDRDGGKYIAPNADRSTRNLYTLHSVLVHSGGVHGGHYYAFIRPTLSEQWYKFDDERVTKEDAKKALEEQYGGDEELPQINPGFNNAPFKFTKYSNAYMLVYIRESAKEKIMCTVDEKDIAEHLRVRLKKEQEEKEHKKKEKAEAHLYTIIKVARDEDLKEQIGKGIYFDLVDHEKVHNFRIQKQMPFSCFKEEVAKEYGIPVQFQRFWLWAKRQNHTYRPNRPLTVHEETQSVGQLREISNKAHNVELKLFLEVELGLDLRPLPPPEKGKEDILLFFKFYNPEKEELCFMGRLFVKALGKPSEILAKLNEMAGFPPDQEIELFEEIKFEPNVMCETIDKKLTFHYSQLEDGDIICFQKSPGAEYDAPVRYPDVPSFLEYVHNRQVVHFRSLEKPKDDDFSLELSKLHTYDDVVERVARQLELDDPAKIRLTPHNCYSQQPKPQPVKYRGVVHLSDMLIHYNQTSDILYYEVLDIPLPELQFLKTLKVAFHHPTKDEVVIHSIRLPKNSTIADVIYDLKTKVELSSPNAELRVLEVFYHKIYKIFPLHEKIENINDQYWTLRAEEIPEEEKNIGPNDRLIHVYHFKKDINQTQQIQNFGDPFVLVVHEGETLAEVKKRIQSKLQVSADEFSKWKFAFISMNRPDYLQDSDVVPTGFQRREVYGAWEQYLGIEHADTAPKRVYTVNQNRHAYEKPVKIYN

SEQ ID NO: 50622 - protein, 1113 aa, Zea Mays
MVTPPTVEEDEEMLVPRQEAVDTDAAQPMEVVAQTEVVSTAESQPVEDPQTSRFTWTIENFTRFSEKKHYLEVFVVGGFKWSVLIFPKGNNVDHFSMYLDVADSTSLPYGWSRYAQFSLAVVNQIQPEFTIRKETQHQFNARESDWGFTSFMPLSELYDASRGYLVNDTVVVEAEVAVRRIVDYWTYDSKKETGYVGLKNQGATCYMNSLLQTLYHIPYFRKAVYHMPTTENDIPSGSIPLALQSLFYKLQYSDSSVATKELTKSFGWDTYDSFMQHDVQELNRVLSEKLEDKMKGTVVEGTIEQLFEGHHINYIECINVEHKSNRKESFYDLQLDVKGCRDIYSSFDKYVEVERLEGDNKYHAENHGLQDAKKGVLFLDFPPVLQLQLKRFEYDYMRDSMVKINDRYEFPLQLDLDRDGGKYIAPNADRSTRNLYTLHSVLVHSGGVHGGHYYAFIRPTLSEQWYKFDDERVTKEDAKKALEEQYGGDEELPQINPGFNNAPFKFTKYSNAYMLVYIRESAKEKIMCTVDEKDIAEHLRVRLKKEQEEKEHKKKEKAEAHLYTIIKVARDEDLKEQIGKGIYFDLVDHEKVHNFRIQKQMPFSCFKEEVAKEYGIPVQFQRFWLWAKRQNHTYRPNRPLTVHEETQSVGQLREISNKAHNVELKLFLEVELGLDLRPLPPPEKGKEDILLFFKFYNPEKEELCFMGRLFVKALGKPSEILAKLNEMAGFPPDQEIELFEEIKFEPNVMCETIDKKLTFHYSQLEDGDIICFQKSPGAEYDAPVRYPDVPSFLEYVHNRQVVHFRSLEKPKDDDFSLELSKLHTYDDVVERVARQLELDDPAKIRLTPHNCYSQQPKPQPVKYRGVVHLSDMLIHYNQTSDILYYEVLDIPLPELQFLKTLKVAFHHPTKDEVVIHSIRLPKNSTIADVIYDLKTKVELSSPNAELRVLEVFYHKIYKIFPLHEKIENINDQYWTLRAEEIPEEEKNIGPNDRLIHVYHFKKDINQTQIQNFGDPFVLVVHEGETLAEVKKRIQSKLQVSADEFSKWKFAFISMNRPDYLQDSDVVPTGFQRREVYGAWEQYLGIEHADTAPKRVYTVNQNRHAYEKPVKIYN

SEQ ID NO: 50623 - protein, 757 aa, Zea Mays
MASSLVTTDRRWGATPARKSSMTVLGKVPKPINLPSQRLENNGLDPNLELVPKGTHTWGSKAPSTTPNAWSSSSILSSKNDGSSTSSSHFNVRPTSGGGSRPSTAGSESLGSPNAWGANSRPSSASGTFPSSHLPMATNRPQSAETRPGSSQISRFADNASDNVKASIRTIDRSESSSRGPGFTLSTGDFPTLGSEANSQRGHSSKGRPTSSLGKEVSQGEQVKSLATGTGEVISPSNNHPVDIMKTEHHAHTGGAPVPATSVPNEGLQQQPYPPNFPMPPLQFDSWRAPPGHPPEGMWHRGPVPGGPYRPVGPPGSFPVEPFGYYGQFPPNSEAAGRQGSGHGGYHTKNDVYHPMPHNSYIMNQPVIPVRPVYQGPVLYDGYYGPQANFNNTNVRDPHFVGGPGILNQFPNQNDRFHPGHPQNRPGKHETVPREQLESDKLHVFHQEHPGSLHDNPDRLGGSREFERNVQPAPPLLPHPDGKQTDMNMRADTRDTFSETERTVVLTKSVPNQRGSVGIDHLSVYENTRSHHRETCDGTLRKKFKEDSSVVLDQHPVIKKNAALIEKIESLNNKARNVYAQNLPEPASSKEFKKHKKTTDVSSNDVISTTCTSDQAVSVSHISAVVQRRPNVTIEGTILGPAHSHLTEFSKAEKLGDSINNHLHRRVDSSRNSYHGPCKDRPANKFGSCGRGESYITNSLPVADLGNDIHHGQQPQIASQLQPVIVPDDMPASLDYESQDLVGIHITVQLVHIVRKH

SEQ ID NO: 50624 - protein, 1074 aa, Zea Mays
MDELKSVNLSKFVSEAVSYICEAKLRSADIQAAVQVCSLLHQRYKDFSPCLIEGLLKIFFPGKSGDDLDADKNSRAMKKRSTLKLLIELYFVGIVEDASIFVNIIKDLTSAEHLKDREGTQTNLSLLSTFARQGKFFVGLQPHGQEAYDEFFKDLNVTAEQKKFFKKALNSYYDAVAELLQSEHASLRLMEAENAKVLSAKGELSDENTSSYEKLRKSFDQLLRGVSSLAESLDMQPPVMPDDGNTTRVTTGTDALPSSGKESSALEPIWDDEDTKAFYESLPDLRAFVPAVLLGEVEPKSNEQHVKGRELSGESTSEQETELHDNVPTSATERQLEVKVDDLVKESEDRDKEKGKDGEKEKSKEKDLDKKNEREKEKGRVLDGASLDNLLQRLPGCVSRDLIDQLTVEFCYLNSKANRKKLVRALFNVNRTSLELLPYYSRLVATLSTCMKDVPSMLLSMLEEEFNFLINKKDQINIETKIKNIRFIGELCKFKMAPPALVFSCLKACLDDFSHHNIDVACNLLETCGRFLYRSPETTIRMANMLEILMRLKNVKNLDSRHSTLVENAYYLCKPPERSARISKVRPPLHQYIRKLLFSDLDKSSVEHVLRQLRKLPWAECQQYLLKCFLKVLEEIRVGLELNDYGMQQRRLAHMRFLGELYSYKHIDSSVVFDTLYLIIVFGHGTPEQDVLDPPEDCFRIRLIITLLQTCGHYFSKGSSKRKLDKFLLHFQRYIISKGPLPLDIEFDIQDLFGELRPTMSRYSSIEELVAALVEFEENERSAPVEKVENERHSDNESQKRHSRDAGPSVNGESAANGTEENGKAHEVADSESYSDTGSIDGREEEEDILSEDKSNDGSDNEGDDEDDGIPVVSDEDENVEVRQKVMNVDPKEQEDFDRELKALLQESLESRKSEARSRLPLNMMVPMNVLEGSKDSRATESESGEETVDEEGGNAGGSSKVRVKVLMKKGHKQQTRQMLIPADSSIVQSTKQQEAAELEEKQSIKRRILEYNEREEELNGASQMGNWGQGATSTSSIRSGGRGSWDGSARGGGRQRHHITGSGGFYHSYGRRR

SEQ ID NO: 50625 - protein, 1193 aa, Zea Mays
MDNAQSDNRTDTKQDDDARQSKQDDEEARLEEYKKIIDQKISLRRSNQNPERPDANYLRTLDSSIKRNTTVIKKLKTINDEQKDVIMDELKSVNLSKFVSEAVSYICEAKLRSADIQAAVQVCSLLHQRYKDFSPCLIEGLLKIFFPGKSGDDLDADKNSRAMKKRSTLKLLIELYFVGIVEDASIFVNIIKDLTSAEHLKDREGTQTNLSLLSTFARQGKFFVGLQPHGQEAYDEFFKDLNVTAEQKKFFKKALNSYYDAVAELLQSEHASLRLMEAENAKVLSAKGELSDENTSSYEKLRKSFDQLLRGVSSLAESLDMQPPVMPDDGNTTRVTTGTDALPSSGKESSALEPIWDDEDTKAFYESLPDLRAFVPAVLLGEVEPKSNEQHVKGRELSGESTSEQETELHDNVPTSATERQLEVKVDDLVKESEDRDKEKGKDGEKEKSKEKDLDKKNEREKEKGRVLDGASLDNLLQRLPGCVSRDLIDQLTVEFCYLNSKANRKKLVRALFNVNRTSLELLPYYSRLVATLSTCMKDVPSMLLSMLEEEFNFLINKKDQINIETKIKNIRFIGELCKFKMAPPALVFSCLKACLDDFSHHNIDVACNLLETCGRFLYRSPETTIRMANMLEILMRLKNVKNLDSRHSTLVENAYYLCKPPERSARISKVRPPLHQYIRKLLFSDLDKSSVEHVLRQLRKLPWAECQQYLLKCFLKVHKGKYSQVHLIALLTASLSRYHDDFAVSVVDEVLEEIRVGLELNDYGMQQRRLAHMRFLGELYSYKHIDSSVVFDTLYLIIVFGHGTPEQDVLDPPEDCFRIRLIITLLQTCGHYFSKGSSKRKLDKFLLHFQRYIISKGPLPLDIEFDIQDLFGELRPTMSRYSSIEELVAALVEFEENERSAPVEKVENERHSDNESQKRHSRDAGPSVNGESAANGTEENGKAHEVADSESYSDTGSIDGREEEEDILSEDKSNDGSDNEGDDEDDGIPVVSDEDENVEVRQKVMNVDPKEQEDFDRELKALLQESLESRKSEARSRLPLNMMVPMNVLEGSKDSRATESESGEETVDEEGGNAGGSSKVRVKVLMKKGHKQQTRQMLIPADSSIVQSTKQQEAAELEEKQSIKRRILEYNEREEELNGASQMGNWGQGATSTSSIRSGGRGSWDGSARGGGRQRHHITGSGGFYHSYGRRR

SEQ ID NO: 50626 - protein, 276 aa, Zea Mays
MITQKILLSSDFYNWNTVVIRYCDGASFAGDAEGGDLDGTKLFFRGLRIWKAVVDELMGKGMDAAKQALLTGCSAGSLAALLHCDNFHGRFPHEVSVKCLSDAGFFIDEKDLSGERSMRSLISGVVHLQCFFPAELIKGITTPTFILNSDYDSWQIRNILAPNGSYPGQEWSSCKADIRNCSCAQLDVLHGFKKKLVSELKVAEDNKDWGLFIDSCFTHCQTPFDITWNSPISPRLGNKSISEAVGDWYFDRRQNAKQIDCEYPCNPTCSSLLPTA

SEQ ID NO: 50627 - protein, 311 aa, Zea Mays
MTNFGSSKYMGAVNFTGILSNDHTENPDFYNWNTVVIRYCDGASFAGDAEGGDLDGTKLFFRGLRIWKAVVDELMGKGMDAAKQALLTGCSAGSLAALLHCDNFHGRFPHEVSVKCLSDAGFFIDEKDLSGERSMRSLISGVVHLQNVKEVLPNDCLQKKDPTECFFPAELIKGITTPTFILNSDYDSWQIRNILAPNGSYPGQEWSSCKADIRNCSCAQLDVLHGFKKKLVSELKVAEDNKDWGLFIDSCFTHCQTPFDITWNSPISPRLGNKSISEAVGDWYFDRRQNAKQIDCEYPCNPTCSSLLPTA

SEQ ID NO: 50628 - protein, 118 aa, Zea Mays
MEGVNLARPDKAKPKGRTIKSSEQQVLRLGVKGAKKMSRKCQKCGIADGHNSRTCLTVEDNRIRLANLAGRKRGRPSGSRNKIGGATPKWNETSTSKNEQCMSKMMIHLVESRIPKEL

SEQ ID NO: 50629 - protein, 142 aa, Zea Mays
MRPTSSTFKFRKAGWSAPARPAASSPSRRSTPSRPPPTPTSASPSSRSGRTSPASSPSATSLPSPRAWYACTTWNTRRRTPASGGGTSSRPSGWPSTAGTTASTLRQARDVPLGNNLSRNFREARTCLLRWTNARLRSTDRT

SEQ ID NO: 50630 - protein, 325 aa, Zea Mays
MDEAATAALAAARGRWTQWEEVVVSNDRGSRLVHYYLRGNSEEKQLAVVGRERSPRHMSYAVQGRFLRALAAAAGAVAVAPSPSRSPLPAAGADGGAPRRWRSRREVVDWLSSLVSGHNYGSSSMATRCSRDSYDDSVNNCTQVTASKDVSSREPSNVFTWLGAPCYCPQRLKHYKSFCRRGITISVHSFVFIMSEEMKRLIAYVEDLYEDTNSCNMVKVQWFDKVDEVGVPLPMDFDDREIFFSLGRQDLNVECIDGLAAVLSVQHYEKFKGDTRYNLWQPYFCCRQIDNGDIKPFDVTQLQGYWSQEVLRTMFNATSSLKVLW

SEQ ID NO: 50631 - protein, 545 aa, Zea Mays
MATRCSRDSYDDSVNNCTQVTASKDVSSREPSNVFTWLGAPCYCPQRLKHYKSFCRRGITISVHSFVFIMSEEMKRLIAYVEDLYEDTNSCNMVKVQWFDKVDEVGVPLPMDFDDREIFFSLGRQDLNVECIDGLAAVLSVQHYEKFKGDTRYNLWQPYFCCRQIDNGDIKPFDVTQLQGYWSQEVLRTMFNATSSLKVRFKVPKSRPSSDGGLKRKRDAFNDDANPQKFISSGASTSRFYGENIQQLCPGCHVEVLSQDSGIRGCWFRCLILKRHKDKIKVRYLELQDADETGNLEEWVMLTRVAKPDQLGVRFLGRPMVRPQRVEQSKASCFDVGAIVDAWWHGGWWEGIVLYQVGSGRLQVYFPGEKRTAEFGEDELRCSLEWVGNKWNPLKGRKDVTSKLTSTADCGSEYLIAKQDPLNFHVPKNSEPQLEGHQYDKRGIEKSSVSTISRDQKRVLADLTNDLKLDNLRWRPRKRSRRSGSRKQSDTSSGSSSGDMDLFSPSPSGSFGQHNLVPDEETCKSSGEQTFMGVPVQVPNLVMSR

SEQ ID NO: 50632 - protein, 414 aa, Zea Mays
MPLLPLLPVMASTFSPTSAARALLPGSTSRPLFLAASASSGRIQPSRKGLDFRRGRFTVCNVAAPTAAEQETQRPVYPFAAIVGQDEMKLCLLLNVIDPKIGGVMIMGDRGTGKSTTVRSLVDLLPDIRVVVGDPFNSDPDDPEVMGPEVRQRVLQGDTGLPVTTAKITMVDLPLGATEDRVCGTIDIEKALTEGVKAFEPGLLAKANRGILYVDEVNLLDDHLVDVLLDSAASGWNTVEREGISISHPARFILIGSGNPEEGELRPQLLDRFGMHAQVGTVRDAELRVKIVEERARFDRDPKTFRESYHDEQEKLQQQISSARSNLGAVQIDHDLRVKISKVCSELNVDGLRGDIVTNRAAKALAALKGRDSVTVEDIATVIPNCLRHRLRKDPLESIDSGLLVIEKFYEVFS

SEQ ID NO: 50633 - protein, 565 aa, Zea Mays
MLGSMTKVLQSSSDKTSLDTKEENKFFESDILDKVWHILYDDCLYALGTCVEGELKHFHKARYKLAQGYYRRGEAGDLERAKEELSFCFKSSRSSFTVNMWEIDGTVRKGRRKNPNVGGSRKNLEVSLSESSRKFITCIRKYMILYLNLLEKNTDLWTLEKAYTYLRTDKRFALCLGDIVPVGLGKYILVLTAAIHNPEIRRASGDASVEQLLEKMFTVFMDHANMWADISNIPEVNSPELSESNLYSYIHQYIHLLESDVRLDVLEGLNEKIRKRFKTPKLSNSNFAKICKHASLAWCRCILIKLASITPLPESADATNQPAPLSNGLLLYVDLQPDELLISSPDGPAQFKGLDMNWFETLNRIKNIPVKQTSEDNLETAVTLMKSTYNFYRESPCGTFPSGINLYTVTPSQAPIEGLPPTAAVVETLDLSIPRKLLLWVYTLVHGRYSNISSVVKYCDEMKLRSKRGTPAASASSQVVQPVSHSTVSSQVVSKEKSSQVEPAEAAQNPSDLAATCVPAYQEVGGASASQSAIEAQKATAAASQLTRSGSSRAMENAQDGGERK

SEQ ID NO: 50634 - protein, 289 aa, Zea Mays
MLPSTVGGRGRYLMLGIALALAALLALASASESDHKYKTEEPVKLWVNKVGPYNNPQETYNYYSLPFCQPSENPTHKWGGLGEVLGGNELIDSQLEIKFLKNVEKGFICTLELDAKKVQQFADAIESSYWFEFFIDDLPLWGFVGETDKNSENKHYLYTHKNILVKYNDNRIIHVNLTQESPTLLEDGKKLEMTYSVKWVATDVSFARRFEVYLDYPFFEHQIHWFSIFNSFMMVIFLTGLVSMILMRTLRNDYAKYAREDDDLESLARGYHHNLHCVLCSYIFYFWIC

SEQ ID NO: 50635 - protein, 341 aa, Zea Mays
MDKTVRLWHMSSTYCLKTFSHTDYVTCIQFNPVDDRYFISGSLDEKVRIWSIPKREIVDWVDLHEMVTAACYTPDGKGALVGSHKGSCHLYDTSDDMLCYKTQIDLQNKRRKSSQKKITGFQFVPGDSSMVIITSADSRIRVLDGFELAHRFKGFRNTSSQISACLAGNGRYIISASEDSHVYIWRNNDGPKPSRKKGIVSVTDSHEYFHCQSVTVAVTWPFASTAMTCLMNPGKQEELERGSEPQDLQTKLAKAQEMPDVEYRSTNITSNNSNHNNGDRTSPTWPEKLNTPPNQSLRATTCHANEGDQALNRSAWGLVIVTAGRGGQIRTFQNFGFPVRV

SEQ ID NO: 50636 - protein, 563 aa, Zea Mays
MAGRGASPAAAAAVQVRCAGCRGVLAVAPGMTEFICPKCRMAQRLPPELMPPSPPKASPTPPPSGPTPPPPPPPSLPPPPPPPPQPVPHPLTRRSAPRAQGVDPTKIQLPCARCKAVLNVPHGLDRFRCPQCGVDLAVDLSKLRHFLASAGPGFFPPPLPPPPPPQPPVPMPHLPFLPMMPRLPLPMLPMLSPAELPEEINEVAVDVERDEDESGTFGETFIDYRPPKLSFGFPHPDPVVETSSLSAVQPPEPTYKLTIMKELDETNALSSLQIETIVYACQRHHHHLPTGARAGFFIGDGAGVGKGRTVAGLIWENWQQGRHKALWISIGSDLKYDARRDLDDVGAKCVEVHALNKLPYSKLDSKTFGITDGVVFVTYSSLIASSENRSRLQQLVQWCGSEFDGLLVFDECHKAKNLIPEAGSQPTRTGKAVLEIQDMLPQARVVYCSATGASEPRNLGYMVRLGLWGDGTSFENFNQFLGALEKGGVGALELVAMDMKARGMYVCRTLSYKGANFDILESLLEERMMEMTIKEGIWKEEDDTINMWEKMTTCIWKVASKVC

SEQ ID NO: 50637 - protein, 386 aa, Zea Mays
MAPWVWVALQAAAVAASAAEALSLDVHHRYSATVREWAGHRAPPAGTAEYYAALAGHDLRRRSLAGGGEVAFADGNDTYRLNELGFLHYAVVALGTPNVTFLVALDTGSDLFWVPCDCINCAPLVSPNYRDLKFDTYSPQKSSTSRKVPCSSNLCDEQSACRSASSSCPYSIQYLSDNTSSTGVLVEDVLYLVTEYGRQPKIVTAPITFGCGRTQTGSFLGTAAPNGLLGLGMDTISVPSLLASQGVAAANSFSMCFAQDGHGRINFGDTGSSDQQETPLNMYKQNPYYNISITGATVGSKSIHTKFNAIVDSGTSFTALSDPMYTQITSSFNSQVQDKPSQLDSSLPFEFCYSISPKASTNPPNISFTAEESDGILLGCYEERRC

SEQ ID NO: 50638 - protein, 162 aa, Zea Mays
MAPWVWVALQAAAVAASAAEALSLDVHHRYSATVREWAGHRAPPAGTAEYYAALAGHDLRRRSLAGGGEVAFADGNDTYRLNELGLISSSTLTALRSRALAERSHAAAICAMNRVHAGQQAAAAPTASNTCLITHHPPVCWLRMSCTWSRSMGGNPKSLRPP

SEQ ID NO: 50639 - protein, 262 aa, Zea Mays
MTSPCKQHNPWNFRQKGVLMCFFFSFCAKGRQRDLGEELLGVAPDLHGSLAAYVLLYTAPGTAVLLQGLQEELVLVLGPFLPLLGYRVWLACLRGPCSSWQVHVAGAQGVLQMIHEVSVADVICSRPLIAPRLETSHLRISEPAEPQPPSLIAALHHEHESSSSSSRRRRERAPPRRSHQLLNTLASAAGFAGEKRREERRGGRQGAKWKERLYVWCSGWEREGGEEKGRRGQGATSDGIFPLEELFRARFSVRPHAATGTG

SEQ ID NO: 50640 - protein, 71 aa, Zea Mays
MSGRGKGGKGLGKGGPAIRRLARRGGVKRISGLIYEETRGVLKIFLENTVTAMDVVYALKRQGRTLYGFGG

SEQ ID NO: 50641 - protein, 731 aa, Zea Mays
MASRRASNGRSPLVRKQSQITAFFSSPTPSPSPSGPSPGASKPSPSPLNPSARTRSPLAAVSPSSPKLPQPQQKQKEVKKVKEEHDAALVPAPAAAEVVGRCLRVYWPLDDAWYKGKVEAYDAASRRHRVKYDDGDEEEVDLRKEKFEWAAVVEESTLLPARKLRRLRRMSDISVAKSPAEAEDGAGDSTEDEDWKRDTVVEDASEEVELDEEDEEEVVAVRSRKRNPKNSLMSGSTPSTLGSGLTSESEPRISKRRKNVDVASLDFAKRFTFEAVNTNRKVDPEVPMSCGQKGQTTGNDYTAPTGDAAERFGQRDAEKFKFLGEGRKDAKGRRPGNPGFDPRTLLLPPQFLKNLTGGQRQWWEFKSQHMDKVLFFKMGKFYELFEMDAHVGAKDLDLQYMKGEQPHCGFPEKNLSVNLEKLAEKGYRVLVVEQTETPDQLELRRKEMGIKDKVVRREICAVVTKGTLIEGEHLLANPDPSYLLSVTESYQRSPNKSQDTCTIGVSIVDVSTSKFIVGQFQDDPERHGLCSILSEMRPVEIIKPSKMLSPETEKALNNNTRKPLINELVPSTEFWDAEKTIDEIKQYYSSANKQKKADDIQDCVDCLPNLLRELIGAGDKTYALSALGGSLFYLRQTLLDEKILPCAEFEPLACSGFINNIRKHMILDTAALENLELLENTRTGGLSGTLYAQLNHCVTGFGKRLLKRWIAKPLYDRREILRRQSAVATFK

SEQ ID NO: 50642 - protein, 72 aa, Zea Mays
MQYSCYSCFVLRCWCAKMDLMTDNFIGVGYLVEWSSLHFVGDLTISIEKICFKPSKLLDAEISYSPRVNLPI

SEQ ID NO: 50643 - protein, 50 aa, Zea Mays
MLHCCDTKSFCFSWALAVVLARHWLTLYSIPTYMNSIVFIIHEIKKHYTE

SEQ ID NO: 50644 - protein, 660 aa, Zea Mays
MWRAIVVDEFQDTSAMQYCLLKILASHNHITIVGDEDQSIFSFNGADVSGFDSFRKDFPDHKEIRLSKNYRSTRAIVEAATALIQNNTKRHHPRLVETDNPSGCKITVKECHSEDSQCAFVIDKIIEITSGTAEGCNFGNIAVLYRRQITGKAFQVSFRNRKIPFNIHGVAFYRKKVIKAIMAILRTTLPGCDDGPWRQAFKALLPGDKEEKKKIIYHVQKISLARTCSFLTAASDIFSAKVSGTFKRAQITQGRKVLSTLDSLSKLVEKEQSVSVIISSAGDMLPQKYLLEKRAVVDVDNGKLLNEDSDIRSVLQFLMDDVSDFLSTHFSSSMERSKTDEKGCASTLKAFIDYISLRETENFRSRKEENKNSITLTTIHQSKGLEWDVVFIVQANDSEIPLLHEYNGSVKEAGSTLEEERRLLYVAMTRARKKLYILHVTIDSNRQLLQPSRFLREIPDHLLEVQGEEPLRKMPERPSGDVPFDDSEVDTSIGKPIMGPNEASSYPEQAQACLANDFLRRFDIDDRSVVSHIFHHWGKKQAFQNPKRLLEKISFVIDERLRGKGYKRKDVLRKLKSFLSGDEALGYAQYVIKWEQIPIEKRNHLIRERQEHFQKQRIENSMGSSEPTAKQISYLRSLGCTITPTSRLHASHLIEKYKSL

SEQ ID NO: 50645 - protein, 397 aa, Zea Mays
MPLQASPSPVVKNLNYVSEDGVTANLSNLGSGFGGHPSLEQRNKSFNINESMTVHCGFVRGKKPGQGTGFDIKDDDLLEMEQCRELVVASAIFGNYDMIQHPRNISEFSKANACFYMFVDEETEAYVKNSSSLYNNNKVGLWRLVVVRNLPYEDPRRTGKIPKLLLHRLFPNVKFSVWIDAKLQLVADPYLLLERFLWRKNTTFAISRHYKRFDVFEEAEANKAAGKYYNASIDYQIEFYRNEGLTHYSPAKLPITSDVPEGCVIIREHIPITNLFTCLWFNEVDRFTSRDQISFSTVRDKIRARVGWMPEMFMDCERRNFVVQAYHRELLEQMIASGRMPPSGAVVVTDAAPSRKVRAGSRKATPSKKPSVKRKKEKKSSSRRRLPKPVAGGLGAM

SEQ ID NO: 50646 - protein, 943 aa, Zea Mays
MEIDDNKSTNITAEGYSNMDGGPSSHVKLGPLNADDLGGNSIRNWTGYNVQTPDLNDILLHNNEDIAGPSTSYYQPSPFTCDEPASPEFISAQAPATPGLMEETVPSRVHESPVLSPQRKASPSTNDETAKADTPAAPASDFLHSATGNASDVVGAEMTELGLAKPVQVESSVVQDSDASVQQHTSEGLPSQGQASHLEAAADKLVGSDGIAASVDETVTVNATIEDVPLAVNDSEPCVDGSAGPSVVNLVQMDGPLFDAQGTVLSADFQHEVQAMQQVVASNDRLNELSTSEFAEPEKMLTAPNAEFNHAIDLGQITAEKGTIESDGSNIIGSLTSRKRHLEYSLPALESETTKKLPSRPHVKRTNDFVPHDDDILASILVGRTPGFTLDSTPLPPRESSLKRPRLGSKMGTLKRKVQIDDAMVLHADTIRQQLINTEDIRRIRKKAPCTRSEIWMIEKGSLEDDLFHEPIFSCLSEELNNLHNRTYETIVHPAVQRMELHGQLDMPETIPEYRNIAGFGSATIDGPLHIPDGIQSDAMLSGANVAYGATAAFGLQIPPDYQVNRASNDFVVGTQLQEVAKPFIGNEHEVAPPDREHAQVDTLYSDRFQGVPSDLQRSNDANVSSQDVVLDNSGQACAHAVDGMTREFNHFVHRDANLFGSTEVPASEITGVEYNQDASGFPRQTEDDNTVEYNQDASGFPRPTEGGNAVEYNQDVSGFPRPTEDGKTVEYNQDASGFPRPTEDENTVEYNQDASGFPQPTEDENTVEYNQDASGFPRPTEDENAASATGDNSGFQENNTGSHMDLDMMNDYEVKECNDFGSAIHGVDTDFLNYGDDDNDDDFVDADEPNPSEFQSLDNSGWSSRTRGVARYLKTLFDEESGLGRKSVAIDHLVRGKTRKEASRMFFETLVLTTKDYISVDQPNPFDFVSVKPGPKLLMSEF

SEQ ID NO: 50647 - protein, 1149 aa, Zea Mays
MFYSQFILAKKGPLGTIWIAAHLERKLRKNQVADTDIGVSVDSIIFPDVPIALRLSSHLMLGVVRIYSRKVNYLFHDCSEALLKIKQAFRSTAVDLPPEESTAPYHSITLPETFDLDDFELPEAVFQGDTDHHVSTKEQITLQDNPEKTGYSTSQFGLDERFGDGSSSHIGLDLEEELILNKDHSIHLESDDGIIIQGRSSVPSTDMEIDDNKSTNITAEGYSNMDGGPSSHVKLGPLNADDLGGNSIRNWTGYNVQTPDLNDILLHNNEDIAGPSTSYYQPSPFTCDEPASPEFISAQAPATPGLMEETVPSRVHESPVLSPQRKASPSTNDETAKADTPAAPASDFLHSATGNASDVVGAEMTELGLAKPVQVESSVVQDSDASVQQHTSEGLPSQGQASHLEAAADKLVGSDGIAASVDETVTVNATIEDVPLAVNDSEPCVDGSAGPSVVNLVQMDGPLFDAQGTVLSADFQHEVQAMQQVVASNDRLNELSTSEFAEPEKMLTAPNAEFNHAIDLGQITAEKGTIESDGSNIIGSLTSRKRHLEYSLPALESETTKKLPSRPHVKRTNDFVPHDDDILASILVGRTPGFTLDSTPLPPRESSLKRPRLGSKMGTLKRKVQIDDAMVLHADTIRQQLINTEDIRRIRKKAPCTRSEIWMIEKGSLEDDLFHEPIFSCLSEELNNLHNRTYETIVHPAVQRMELHGQLDMPETIPEYRNIAGFGSATIDGPLHIPDGIQSDAMLSGANVAYGATAAFGLQIPPDYQVNRASNDFVVGTQLQEVAKPFIGNEHEVAPPDREHAQVDTLYSDRFQGVPSDLQRSNDANVSSQDVVLDNSGQACAHAVDGMTREFNHFVHRDANLFGSTEVPASEITGVEYNQDASGFPRQTEDDNTVEYNQDASGFPRPTEGGNAVEYNQDVSGFPRPTEDGKTVEYNQDASGFPRPTEDENTVEYNQDASGFPQPTEDENTVEYNQDASGFPRPTEDENAASATGDNSGFQENNTGSHMDLDMMNDYEVKECNDFGSAIHGVDTDFLNYGDDDNDDDFVDADEPNPSEFQSLDNSGWSSRTRGVARYLKTLFDEESGLGRKSVAIDHLVRGKTRKEASRMFFETLVLTTKDYISVDQPNPFDFVSVKPGPKLLMSEF

SEQ ID NO: 50648 - protein, 1102 aa, Zea Mays
MFYSQFILAKKGPLGTIWIAAHLERKLRKNQVADTDIGVSVDSIIFPDVPIALRLSSHLMLGVVRIYSRKVNYLFHDCSEALLKIKQAFRSTAVDLPPEESTAPYHSITLPETFDLDDFELPEAVFQGDTDHHVSTKEQITLQDNPEKTGYSTSQFGLDERFGDGSSSHIGLDLEEELILNKDHSIHLESDDGIIIQGRSSVPSTDMEIDDNKSTNITAEGYSNMDGPSTSYYQPSPFTCDEPASPEFISAQAPATPGLMEETVPSRVHESPVLSPQRKASPSTNDETAKADTPAAPASDFLHSATGNASDVVGAEMTELGLAKPVQVESSVVQDSDASVQQHTSEGLPSQGQASHLEAAADKLVGSDGIAASVDETVTVNATIEDVPLAVNDSEPCVDGSAGPSVVNLVQMDGPLFDAQGTVLSADFQHEVQAMQQVVASNDRLNELSTSEFAEPEKMLTAPNAEFNHAIDLGQITAEKGTIESDGSNIIGSLTSRKRHLEYSLPALESETTKKLPSRPHVKRTNDFVPHDDDILASILVGRTPGFTLDSTPLPPRESSLKRPRLGSKMGTLKRKVQIDDAMVLHADTIRQQLINTEDIRRIRKKAPCTRSEIWMIEKGSLEDDLFHEPIFSCLSEELNNLHNRTYETIVHPAVQRMELHGQLDMPETIPEYRNIAGFGSATIDGPLHIPDGIQSDAMLSGANVAYGATAAFGLQIPPDYQVNRASNDFVVGTQLQEVAKPFIGNEHEVAPPDREHAQVDTLYSDRFQGVPSDLQRSNDANVSSQDVVLDNSGQACAHAVDGMTREFNHFVHRDANLFGSTEVPASEITGVEYNQDASGFPRQTEDDNTVEYNQDASGFPRPTEGGNAVEYNQDVSGFPRPTEDGKTVEYNQDASGFPRPTEDENTVEYNQDASGFPQPTEDENTVEYNQDASGFPRPTEDENAASATGDNSGFQENNTGSHMDLDMMNDYEVKECNDFGSAIHGVDTDFLNYGDDDNDDDFVDADEPNPSEFQSLDNSGWSSRTRGVARYLKTLFDEESGLGRKSVAIDHLVRGKTRKEASRMFFETLVLTTKDYISVDQPNPFDFVSVKPGPKLLMSEF

SEQ ID NO: 50649 - protein, 456 aa, Zea Mays
MSDPRGRAAGPDRYGDEPHDLPLAEDANGEEAWQTPEKEAVAVSEGAAARSGDTTPDAEQESDDGEEGVGSPDQAEPNASGEGVPPVAATVEPDGIVSGAKVETNSEDAISHDADEEEKDDDDDSTQDASPIAEVNVEGESGAVHRLEVEPDPFLDGDASGTEEEQAAFMVELERFHKEHSLEFKPPKFYGKGLNCLKLWRQVAHLGGHEQVTVCKLWRQVGETFRPPKTCTTVSWSFRIFYEKALLEYEKHKVRTGQLQIPPPGLPQPSGADREVVVNQSSSARVRRDVAARAMQGWHAHRLLANGTYGDNILKDKDSMPSSSRDNLKSFGVLKRKKASSPEYALKSSCSKINKSEEDSMVIDVGEPADWVKINVRQTKDCFEVYALVPGLLREEVHVQSDPAGRLVITGDPEQPDNPWEITPFKKVVNLPSRINPHQTSAVVTLHGFMSVLLRK

SEQ ID NO: 50650 - protein, 459 aa, Zea Mays
MSDPRGRAAGPDRYGDEPHDLPLAEDANGEEAWQTPEKEAVAVSEGAAARSGDTTPDAEQESDDGEEGVGSPDQAEPNASGEGVPPVAATVEPDGIVSGAKVETNSEDAISHDADEEEKDDDDDSTQDASPIAEVNVEGESGAVHRLEVEPDPFLDGDASGTEEEQAAFMVELERFHKEHSLEFKPPKFYGKGLNCLKLWRQVAHLGGHEQVTVCKLWRQVGETFRPPKTCTTVSWSFRIFYEKALLEYEKHKVRTGQLQIPPPGLPQPSGADREVVVNQSSSARVRRDVAARAMQGWHAHRLLANGTYGDNILKDKDSMPSSSRDNLKSFGVLKRKKASSPEYALKSSCSKINKSEEDSMVIDVGEPADWVKINVRQTKDCFEVYALVPGLLREEVHVQSDPAGRLVITGDPEQPDNPWEITPFKKVVNLPSRINPHQTSAVVTLHGQLFVRAPFGSS

SEQ ID NO: 50651 - protein, 545 aa, Zea Mays
MEPDDEALKVARGPPHQRRGISYSQPLTRDAASARRAALRKHSLDDEHILPASHSLNYPLHHDPSGMVPMVYHPPLPPHQHHPSASYSSNTRRSAGGLSEGSMTLERAMSEYGGGHGSLPEFVGAGGGKGIFRVPLRAAMHPGRPPPLEVRPHPLRETQAGSFLRSLAAEPQRRQLWAGAESGIRVWSLDEVFAEWGAGARRGDEESAPFREGMPAPPALCVVVDRANRLLWTGHKDGRIRSWRMDLDAAATAPAPPAAGAGDGGGSVGGSSHGGASNNAPVFREALTWQAYGRTPVLSMVVTSYGEIWSGSEGGMIKVWPYDAIAKSLSLSPEEKHMAALLVERAYIDLRNHCTVGNVCSLPASDVKYMLADHSRAKVWTVTSMTFALWDARTRELLKVFGMDGQVDSAKLETPVMPEQPMEEEINPNPKAKPSKKDKSQGSLNFFQKSRNALIGAADAVRRVATKGTFVEDNRRTGAVAQAMDGTIWSGCTNGAIILWDGNGNRVQEFHHHTSSVQCIKALGERVWVGYASGMIQVMDAEGRA

SEQ ID NO: 50652 - protein, 286 aa, Zea Mays
MSAAAVALEEPAVQMVMVSVASPRSPAVRSEEDLGPAWLRPLLGTSFFVPCRLHPELSKNECNLFCLGCCTGDALCAYCLPAHRDHHVVQIRRSSYHNVIRVSEVGKLIDISHVQTYVINSAKIVFLNGRPQARPGKGVTNTCQICCRSLPDSFPLLLPRMQAGRDAVGPEPDVRHTAETRAGIRRRRRLRLRRLVQPQEATEDGRVRPRPLRAAGRHPVVRRRGQQVQQRAHHAGDTADQPVPAVQEEGHPPPRPVLRLARSSKLLQRLECNTQSSSSSTFKIIQ

SEQ ID NO: 50653 - protein, 613 aa, Zea Mays
MTPNTLLSTPRASPKNQTYFRIFTIFSRPIHDSPTAREILALSVGLPAHQSTQLARQPASNTYLPPSQLPPNPLSLPYAIEWRAGNPLQTTAVEGVIRRRGPDLLRSYLPQGPKLGRASSARRATIRSSQAWCIAAVLNSMLPGAPPATRPCMEGFQVELNINYVKKDKTPFVDYPELKKEWWPDFVEWVTSDEYIALGEKVEKSQSMKKFCQKLGRRSYTVQKRKWAKEDAQALTEGKSIPFQDMPGGRHKDWARARNPSSDVNITESHPIIKKIVDLNEKSVAGTFTPLDNMDILATTIGSNHPGRTTGVSAYVGLGMGLAQGDGPRKKKRRTTKEYVKRIVDEYEAKFDKLTALCQSMECRLNNSESCSSSKFVDTPDHATHHSVNSLQEVMKCKLVVQIGPQSVVVARGQAYPRKDVVTVHGIERKQQFMQSLNKSHTHRLRAFGAYVDKKVAITRILVAQLYGNIFSLNTILLKPMQYDVINIYMVYVFKGRAGFATCPLLPDEIANVRERLLDFFMNEVIDIGGSAGLKDLKYEGIIHFRKHWKNTEPIIIREAFEPSLSSSWDPLSIWRGIQEIMDEEMDEDVIVKAVDCSNQSEISSSNSLSKAT

SEQ ID NO: 50654 - protein, 991 aa, Zea Mays
MELWFPSFAAQNIPLPGSTVNQLGESNTLRNGVHQIQPWEITYRLHDSRDNFSLPGNTQFSNGTVNPSSENYIQSNAIHEHQCLENVVAKVPVLSETQNTSTQEGHNHCTAATTDEHIRTTSDEVVRSLTRRASQPTTNGNYNIKSSRVTAEANCTEKPRKRGRPRKVVNPNGEPKERGTKGKQNVGHAELISPKGSCADFLKTNGITYASESSTGITPRMSTVELKSSDQDKEIHGGAMPQATAASVDPLDGIIEKIKLLTINGPDKGVSEVPKNALVPYEGEFSALIAFEGKAKKSRPRAKVNIDPVTTMMWNLLMGPDMGDDAEGLDKDKEKWLDEERRVFRGRVDSFIARMHLVQGDRRFSRWKGSVVDSVVGVFLTQNVSDHLSSSAFMAVAAKFPVKIEVPKKPVAEMSHTPEQKDSCSGLFGDSIKLQGNIYIEEISDIKSLITTEDNEESNNNELIGNSAGNGVNCATGGCHVSYSKSLTGSHGNGLSGSVFPTTGFSGVVETEDGSLEDVISSQNSAVSSQNSPDYVVRRTDPIGSSSLQNFTEEGCIMRNMSNGTGISTDYTLFLPIQDPKGMLGLSEYCGLNPLPVSGVNKDMLLDLNRSYQPLHTYMPYDQNSESDFTGVSCLNHMGKSFHTGPDKVNLSSVTQSEASLYPIDPLEQGDFSPLIKQNFQPLHSSDEVPFFKEHSSCNDFLRNKTEAHFLEPLVCSNPQEVYTTSTDQMGAEQSQSGCGQKYNDARVQTASHERHQSSTLCDNQNSCSVVLQGVASDSTQKFVDTQKGPSKARQNGSKAKVRGRPKKKTDDWDSLRKKVLSNGGDKQRSHDARDTVDWEAVRQAEVREISETIRERGMNNMLAERIKEFLNRLVTDHGSIDLEWLRDVQPDKAKDFLLSIRGLGLKSVECVRLLTLHHMAFPVDTNVGRICVRLGWVPLQPLPESLQLHLLEMYPMLEHIQKYLWPRLCKLDQRTLFSAQKVSLIAIHVQ

SEQ ID NO: 50655 - protein, 147 aa, Zea Mays
MPAGRSAPARGAAVAAMLLLTMLARLPCLEAQSSRRPTVLTVDMTGKGDYRTIQEAIDAIPAAANNSTSAAIVTINVNPGIYTEKVVVNKAGVSLVGRSATSTIVTWSGPWNQNHQSEFALYVQATDFVAKGLTFQVLLNHNILVRQ

SEQ ID NO: 50656 - protein, 782 aa, Zea Mays
MDGQFESAKLETPVMPEQPMEEEVNPNPKAKPSKKDKSQGSLNFFQKSRNALIGAADAVRRVATKGTFVEDNRRTGAVAQVTDGTIWSGCTNGAIIQWDGNGNRVQEFQHHTSSVQCIKALGERVWVGYASGMIQVMDAEGNIIAGWTGHSCPVIRMAIGCSYIYTLAHHGGIRGWPLTSPGPLDDIIRTELSNKELSYTRMEKINIMVGSWNVAQGKASAESLRSWLGSVASDVGLVVVGLQEVEMGAGFLAISAAKETVGLEGSANGQWWIDNIGKALDEGTSFHRVGSRQLAALLIAAWARKSLKPYVGDVEAAAVPCGLGRAIGNKGGVGLRIRVYDRKMCFVSNHFAAHLEAVSRRNADFDHIYRTMAFNKPHGSTASATSVQLHRTVNVNGNQVEEVRPDLAEADMIVFLGDFNYRLYGITYDEARDMVSQRSFDWLREKDQLRAEMKAGKVFQGMREAVINFPPTYKFQKHQPGLGGYDSGEKKRIPAWCDRVLYRDSRSVSVAECSLECPVVASITSYVACMDVTESDHKPVRCTFSVDIARVDELIRRQEYGEIIESNEKVRSLLQDGCFVPDTTVSISEITLEKQEDIVFQIANKCETSRAAFEILCDGQSTKEDGTKSELLPRASFGFPLWLEVQPAVGLIKPGETVEITLHHEDFYTQEEFVDGIPQNWWCEDTRDKEAVLRINITGNSSTKTKTHTINVQHRCPPPSAPPPAMNQQPVAAAPPSNVLASEGHSSKRSSKKSQSKHREQQQDYPQFGTSEVHDLCRMRCP

SEQ ID NO: 50657 - protein, 414 aa, Zea Mays
MPLRRGLNCLEALEPHVKAIAEKQHIDYQFSGLEDDASDNDDYSSYQDDCSDDGELSFDYEINDKDQYFVASSGSMDLDKRDVTNSPQPVKESMQEGVKQTKGNVITPRVKPEINTHSAPILAGNLPDPSERSWQTKPSSAKLSYKLPMPVDDKDPRSAGAQRPHHSQQLESKPRVSANPWHSSPLTKDFRPGGHVKTPPSAEGASAFSQPVSDFKKMKRQFYSGPMASGPGLSMPSSLNDRRSSAAQAQHLVMPGNLQGLFWQPSSASPKVPPKMLGRHPTKSPRISELHELPRPPPASVESLRPSGLVGYSGPLVSKRQTQIPAATARVSPTASRTPSPLPPPPATLTRSYSIPSNSQRIPIVTADRLLEARNSRDGSDIYSPPLTPLSLTDLSQQQGTKTTAGGTRMKGAL

SEQ ID NO: 50658 - protein, 134 aa, Zea Mays
MASSGVRNGVGPRMSAKPDRQGAGATPKTAAGKHRVSSAGGAGAYRRTSSGPLPAAAGGRAASDGERLRQNQGFWLNGIYPIEELLKNDLIPINSSIGLIKLFHFVFILTACQVYKLSLIVDHVATSVLRLQMR

SEQ ID NO: 50659 - protein, 391 aa, Zea Mays
MDEQPARGRYHPFEEISEAVQLDDGEPAHLTDAESARTIVEVNNKATVMISTLVGDGVHERIILPEFPYLTDENGDIYFEVDNEDALLESIMGEDKIAHVIIGLDNTQVFADLDLVSASATEFAQEDDNGDEDDDGSDDDEESDFDEDFNDVEGVFSVDEDDEDDREEEEEEDDDDDDEDLPSWSNLETVNSCHPLYFARMIVETATKSSIDWLDRPPASLVVEGQLRPAFAEESTMVAKHISSDAPKKDTKESGATFFKVEVLSIELITAYGTEPKVKIEEYQKAKPDIIAHSAPNVISRLRAGGDKVTQALKSLCWRSKAIQVEEAAVIGVDCLGFDLRVCSGTQVQTLRFAFPTKATSEFSAEKQIHELLFPRNTHQEGQSPQARQKS

SEQ ID NO: 50660 - protein, 596 aa, Zea Mays
MEHLSKDDARQQFLRILRTLPYGNSVFFSVRKIDDPIGLLPGKIILGINKRGVHFFRPVPKEYLHSAELRDIMQFGSSNTAVFFKMRVAGVLHIFQFETKQGEEICVALQTHINDVMLRRYSKARSANSVTSQNDVNHAYKPPNIEMYEKHVQELTKTVEESQKQADQLREDLQLKTKQETEMQEELEGLKDTLQSERQSSKEVKNELDKLKSLCDEKESALQAALMEKSRLETRLTSSQGRERDTLTTVGSVNSDIEMLTKLKEDLKSYQKELDASKQVSKKLMSEKNLLDQKVQRLERMKNEEKSTMEKVYADECRKLKSQIAELEQKLEDATQSLNVAESNLAVRNAEVDSLQNSLKDLDELREFKADVDRKNQQTAEILKRQGAQLVELENLYKQEQVLRKRYYNTIEDMKGKIRVFCRLRPLSDKELSFEEKNIVCSPDEFTIAHPWKDEKSKQHIYDRVFDANTSQEEIFEDTKYLVQSAVDGYNVCIFAYGQTGSGKTFTIYGSDNNPGLTPRATSELFRVIKRDGNKYSFSLKTYMVELYQDNLVDLLLPRNVKPLKLEIKKDSKFPLGISEVCFIHVHPFILIELII

SEQ ID NO: 50661 - protein, 854 aa, Zea Mays
MSRDDASQLSALQILVEIGFIDNPESCVEWISLLERFLPRQVAITRAKRDWELDIISRFQLMEHLSKDDARQQFLRILRTLPYGNSVFFSVRKIDDPIGLLPGKIILGINKRGVHFFRPVPKEYLHSAELRDIMQFGSSNTAVFFKMRVAGVLHIFQFETKQGEEICVALQTHINDVMLRRYSKARSANSVTSQNDVNHAYKPPNIEMYEKHVQELTKTVEESQKQADQLREDLQLKTKQETEMQEELEGLKDTLQSERQSSKEVKNELDKLKSLCDEKESALQAALMEKSRLETRLTSSQGRERDTLTTVGSVNSDIEMLTKLKEDLKSYQKELDASKQVSKKLMSEKNLLDQKVQRLERMKNEEKSTMEKVYADECRKLKSQIAELEQKLEDATQSLNVAESNLAVRNAEVDSLQNSLKDLDELREFKADVDRKNQQTAEILKRQGAQLVELENLYKQEQVLRKRYYNTIEDMKGKIRVFCRLRPLSDKELSFEEKNIVCSPDEFTIAHPWKDEKSKQHIYDRVFDANTSQEEIFEDTKYLVQSAVDGYNVCIFAYGQTGSGKTFTIYGSDNNPGLTPRATSELFRVIKRDGNKYSFSLKTYMVELYQDNLVDLLLPRNVKPLKLEIKKDSKGVVTVENATVVSISSIEELRAIISRGSERRHTAGTNMNDESSRSHLILSVIIESTNLQTQSYARGKLSFVDLAGSERVKKSGSAGKQLKEAQSINKSLSALADVIGALSSDGQHIPYRNHKLTMLMSDSLGGNAKTLMFVNVSPAESNLEETYNSLMYASRVRCIVNDTSKHVAPKEIMRLKKLIAYWKEQAGKRSDEDELEEVKEERISKERADNRLTG

SEQ ID NO: 50662 - protein, 1481 aa, Zea Mays
MTVLGKVPKPINLPSQRLENNGLDPNLELVPKGTHTWGSKAPSTTPNAWSSSSILSTKNDGSSSSSSHFNGRPSSGGGSRPSTAGSEPLGSPNAWGPNSRPSSASGTFPSSHLPMATNRPRSAETRPGSSQLSRFADNASDNVKASIRTIDRPGSSSHGPGFTLSTGDFPTLGSEANSQRGHSSKGRPISSSGKEVSQGEQVKSLTTGNGELISQSNNQPVDIMKTEQHAHTGGAPVLATNVPNEGLQPRPYPPNFPMPHPQFDSWRAPPGHPPEGMWHRGLVPGGPYRPVGPPGSFPVEPFGYYGQFPPNSEVAARQGPGHGGYQAKNGDVYHPTPPNSYIMNQPVIPVRPVYQGPVPYDGYYGPRAHFNNANVRDPHFVGGPGILNQFPNQNDRFHPGHPQNRPGRHETVPREQLEYDKIHVFHRGNPGSLHDNSDRLGGSREFERNAQPASPLLPHPDGNRTDVNMRTDTRDTFSESERTRVLTKSVPNQRGSVGTEHLSVYDNAHSHHRETGDGTLRKKFKEDGSAALHPVIKKNAALIEKIESLNNKARNVDARNLPESASSKEFNKHKKSTDVSSNDVMGMACKSDPAVSVSCVSPAVQRLPNVPIKGTILGPAHPQLTEFSKAEKLGDSISDHVHRKSDSSRNSYHGPSKDRPANKFGSHGRGESSTTDLRNNIDHGQQPEIASQLQPAIVPDDMPASLDYESQRAKMKELAAERAKKLKAEEEERIKNQKAKALAKLEELNRRSSVLQKKSNDIKVETYDAHDKQHAGLDVTAKLDTSTEPHDVIAPDRLTDLLPPNDPNHTMVHIQAQSTAQSHALDGGKDPDAHATSSLVKNTHSNMEPVVQKSISQLHDITVVKAKQGYRKRHVSEEKISDEKASASITTRNITKNVDVLIDTVTAVVAPHDDPPTQNKKGTRHLRSKKKLDDAPVTSKHPPVVLNEPNTVKVSTEPKTHTGGVIISSSIVPTEGTIVTVGSITVGGISLKPMNQERVKSPDGTNNTESSQPRPQQTRKSGKHQHVLRPVEKPHGNDGILCAPVKPPVPNEHSDGAMPTAAVADLTKPVGKAINDGENVTRTKRAEMERYVPKPMSKELQQQNPSDDKEAVDKPSGAKSHPAAEPKKTSKAHGGKSNPSWRKRNPDESALVAPNSVEQADVSYESKEVQNFTYQKQPVELGKQDTQLKFSVDAAAENSSAPVQTVPLSVGGAKQHSAANRQRRQHVKAQRNEASGYSNESKGSEGKNDVVYQSATPVMDSNSSNHRNVPRSDVKNSGVVSHSRAWKPKTNSHPQDSSDGKIAVDGQVDSHGGRLEMNTSKGSDTITHLVTSSEPTKRSDGKEVSHSKHENLAREDGNQKGETEQEQANPTLRRQGQPNARYHRGGGSHRGRGGYDTGRPNHVTNVERRKGGSHLEYQPVGPQNKAADFQQSLGMEERTEGPPASGQAFRQRGHNRGLRPAGRFVQRNPASTPTTNSHQNE

SEQ ID NO: 50663 - protein, 776 aa, Zea Mays
MASSLLTTDRRWGATPARKSGMTVLGKVPKPINLPSQRLENNGLDPNLELVPKGTHTWGSKAPSTTPNAWSSSSILSTKNDGSSSSSSHFNGRPSSGGGSRPSTAGSEPLGSPNAWGPNSRPSSASGTFPSSHLPMATNRPRSAETRPGSSQLSRFADNASDNVKASIRTIDRPGSSSHGPGFTLSTGDFPTLGSEANSQRGHSSKGRPISSSGKEVSQGEQVKSLTTGNGELISQSNNQPVDIMKTEQHAHTGGAPVLATNVPNEGLQPRPYPPNFPMPHPQFDSWRAPPGHPPEGMWHRGLVPGGPYRPVGPPGSFPVEPFGYYGQFPPNSEVAARQGPGHGGYQAKNGDVYHPTPPNSYIMNQPVIPVRPVYQGPVPYDGYYGPRAHFNNANVRDPHFVGGPGILNQFPNQNDRFHPGHPQNRPGRHETVPREQLEYDKIHVFHRGNPGSLHDNSDRLGGSREFERNAQPASPLLPHPDGNRTDVNMRTDTRDTFSESERTRVLTKSVPNQRGSVGTEHLSVYDNAHSHHRETGDGTLRKKFKEDGSAALHPVIKKNAALIEKIESLNNKARNVDARNLPESASSKEFNKHKKSTDVSSNDVMGMACKSDPAVSVSCVSPAVQRLPNVPIKGTILGPAHPQLTEFSKAEKLGDSISDHVHRKSDSSRNSYHGPSKDRPANKFGSHGRGESSTTDLRNNIDHGQQPEIASQLQPAIVPDDMPASLDYESQNKKQSRMQHQMVKTVRQLNMVFRNLNADCSLASYLLFFLFSVQK

SEQ ID NO: 50664 - protein, 210 aa, Zea Mays
MAKPSVQTHFVLDAMAAERVKVAENWERALDSLENMNQRLGKFAKVQRQLVEQSEVAAQAAKQAAKERSVLSRQVEESGQLLARVQLESMAAETEKSRRSGSTSPSSRSSPPVQCLDYFHIFKVSEAMWVQVASLHLEGIAARWFHVHRLKQRTGWNHFTRDVLNKFGADEYPKAMRRLMGLRQTGSLDEFVRAFEEARYMVSLHNPKLG

SEQ ID NO: 50665 - protein, 313 aa, Zea Mays
MGKHVWAAALMALAVIVGLGVPPGRIAEARTLEKDDLLGGGGDFGAGEGGGFGGGAGGGLGGGFGGGGGLGGGGGAGGGFGGGAGHGGGLGGGFGGGKGGGAGGGGGLGGGVGGGFGGGKGGGLGGGGGLGGGGGAGEGGGLGVGAGGGGGLGGGAGGGFGGGAGGGVGGGGGLGDGAGGGAGAGSGLGGGAGGGAGGGAGAGGGLGGGAGSGVGGGFGGGKGGGFGGGIGGGGGAGGGAGGGFGGGKGGGFGGAGGGFGGGKGGGFGGGKGGGFGGGAGGGFGGGKGGGFGGGAGGGFGGGGGSGGGIGGGL

SEQ ID NO: 50666 - protein, 430 aa, Zea Mays
MGAMGIVVRACAPPAPAAAAAPAPSGSRDAGQAQRRSKPSRTGRVRVLGGTGRVGGSTATALSKLCPKLGILVGGRNREKGESIAAKLGGQPEFVQVDTRNAGMLEEALQGQYHTSSHVVAVRGVAKPEAAATPARRSRPIPLASVAVWSLVATGAANAAELWDPLALHGSSGLVLADLGIGDWFGGLLFSAGQQANEAVQDQLSALSFSSLAVIFGAGLVTSLSPCTLSVLPLTLGYIGAFGSGKGRSEVVGNSIAFSLGLATTLAILGVAASFAGKAYGQVGQGLPVAASGLAIIMGLNLLEVLELQLPSFFSDFDPRAAAANLPSGVQAYLAGLTFALAASPCSTPVLATLLGYVATSRDPIIGGSLLLTYTTGYVAPLLIAASFAGALQSLLSFRRYSAWINPIRSWTLGTLLWIVMGLGNWRGGC

SEQ ID NO: 50667 - protein, 428 aa, Zea Mays
MGAMGIVVRACAPPAPAAAAAPAPSGSRDAGQAQRRSKPSRTGRVRVLGGTGRVGGSTATALSKLCPKLGILVGGRNREKGESIAAKLGGQPEFVQVDTRNAGMLEEALQGQYHTSSHVVAVRGVAKPEAAATPARRSRPIPLASVAVWSLVATGAANAAELWDPLALHGSSGLVLADLGIGDWFGGLLFSAGQQANEAVQDQLSALSFSSLAVIFGAGLVTSLSPCTLSVLPLTLGYIGAFGSGKGRSEVVGNSIAFSLGLATTLAILGVAASFAGKAYGQVGQGLPVAASGLAIIMGLNLLEVLELQLPSFFSDFDPRAAAANLPSGVQAYLAGLTFALAASPCSTPVLATLLGYVATSRDPIIGGSLLLTYTTGYVAPLLIAASFAGALQSLLSFRRYSAWINPIRRRGFEWSLYTIFYIITLYL

SEQ ID NO: 50668 - protein, 425 aa, Zea Mays
MGAMGIVVRACAPPAPAAAAAPAPSGSRDAGQAQRRSKPSRTGRVRVLGGTGRVGGSTATALSKLCPKLGILVGGRNREKGESIAAKLGGQPEFVQVDTRNAGMLEEALQVVAVRGVAKPEAAATPARRSRPIPLASVAVWSLVATGAANAAELWDPLALHGSSGLVLADLGIGDWFGGLLFSAGQQANEAVQDQLSALSFSSLAVIFGAGLVTSLSPCTLSVLPLTLGYIGAFGSGKGRSEVVGNSIAFSLGLATTLAILGVAASFAGKAYGQVGQGLPVAASGLAIIMGLNLLEVLELQLPSFFSDFDPRAAAANLPSGVQAYLAGLTFALAASPCSTPVLATLLGYVATSRDPIIGGSLLLTYTTGYVAPLLIAASFAGALQSLLSFRRYSAWINPISGAFLLGGGVYTLLDRVFPATSMVM

SEQ ID NO: 50669 - protein, 1081 aa, Zea Mays
MRVPCCSLCNVRYDEEERTPLLLHCGHGFCRACLSRMLAAAPGATLPCPRCRHLTAVGNSVSALRKNFPILSLLSTSPSSPSFLHSDSGSSSDGSEDEDDFFARPSRRPAPAPAAAPPGCSFFDLASHPDLKLARRIGSGPPGPAGQEVWAGTLSRGGGVKRCKHQVAVKRVPLAAGDGLEVVQEEVERLRRASTWCRNVCTFHGAVRVGGHLCFVMDRYVGSVQAEMRQNGGRLTLEQILRYGADIARGIAELHAAGIVCMSIKPSNILLDAHGHAFVSDYGLSAILKNLTSRRVPDDSSAGIDATLLSPNYTAPEAWGPLKKSLNMFWDSANGISPESDAWSFGCTLVEMCTGAVPWAGLSAEEICKSVVKEKKPPPQYSRVVGVGLPGELWKMIGECLQFRASRRPSFQDMLKTFLRHLLDIPRSPPASPEIDFANENLPNGMQPPTTSILEMVHDNPNALHHLVCEGDAAGVRDLLAKAASERNDSLIRSLLEAQNTDGLTALHLACRRGSAELVEAIVAYQENVDILDKDEDPPIVFALAAGSPRCVRALVGRSASINSRLREGLGPTLAHVCAHHGQPECMQELLMAGADPNAVDGEGESVLHIAVARRYTDCAIVILENGGCRSMGISNSQHKTPLHLCIETWNTAVVRRWVEVASLEDIAETIDVPSPVGTALCMAAALKKEHEKEFHKVQDYWTIMFFHLFQTLFVLIVKLLLLAEGRELVRILLAAGADSTAQDDPHCRTALHTAAMIDDVELVKIILEAGVDVNIRNAQNTTPLHVALNRGANSCVGLLLAAGANCNIQDDDGDNAFHIAADAAKMIRENLAWIAQMLLQPSPAVDVRNHRGWTLRDFLERLPREWIYEELMETLEDKGVHLSPTIYEVADWVKFRRTVTSPAFGWQGAGPRSIGFVQSVVDNDHLAVSFCTGEAHVLTSEVIKVIPLNRGQHVQLKPGVSEPRFGWRGQSRDSIGTVLCVDDDGILRVGFPGASRGWRADPAEIERVEEYKVGNWVRIRPSLTVAVHGMESITPGSVGIVYSIRPDSSLLLGLCYLSNPWLCEPEEVEHVDPFKICMGW

SEQ ID NO: 50670 - protein, 900 aa, Zea Mays
MRRDAVPPPTAPSASSSSSLFSGGGGERLFESGPSPLVFLPLLLIQGGGMDLSRVGEKLLSSVRSARSLGLPPIPTAPPPRPEVPERAAAAAAAARAIAGLPPHERINLPSNSEDLVSIYGSNPQGQPVEELEEVFYEEEFDPIKYILQSIPEEGGGDATYFDKQSTLRLEQLDKIAERLAHHVMGHHEEMVKGMQLVMELEHDLKVANVICMNGRRHITSSKNEVSRDLVVNVKSKKKQALLDVLPILTELRHALDMQMELETFVEKENYFQAFQLLPEYLQILENYSGLSAVQEMGRGIEAWLVRTIQKLDTHLLGVCHIFDAENYLTVVDAYALMGDVSGMAEKMQSFFLQEVLSRTHYVLKEMLEEEVGNNTQKNRFTYSDLCVQIPEPKLRLCLLRTLEFLFSLMCSYYTIMSFSSGDKNIDSKGQDEAYKDGTSQNSSETLVNLGRGHSSAAVTQDGSAAEKIDRASSSEVSNPDTSTSETGSPFYQLRTDATKLVAQTFQRGRRNLWQLATSRLSVLLSSSAVCSTSTYQFLKNYEDLAIFILAGEAFCGFEASEFRQKLKTVCLNYMVSFHRQNVYALKMVLEKESWTIMSAEASQIISLAGLTGDGAALCSPTSRSPKLPINCYHGTTTANSGKEKLGFASWLVIENPFSFKLENGSAESPKSNMLVDSSASNNHGNGNNSSLDEENEDLLADFIDEDSQLPSRTPKAKMVKGNSLHWKDGDISSQTGSSLSLLRMMDKYARLMQKLEIVNVELFKGISQLFGIFYHYIYETFGNQDKSQSSKPLPDHQSSRLKAALSKITQDSDQWTKPNTVSYSPSSPLSKNSTFGQMDVMPTAPPSSMFTSYGLKERCAAAETLSLVARILNRSRAHLHSVLSKNNSSVVEEFFRTLI

SEQ ID NO: 50671 - protein, 450 aa, Zea Mays
MLACSSSKPHRPVKALGAQFSPALPSAASLQPQQHVHFTCPFLPPFPLPPRHLRSPPPAAPAMAMTEGLVPITRTYLARYYDKYPLPPLPDATTDLAARLRALSADLAAVAPIAPDEELLEQEAAGIPAHKIDENLWKNREQMEEILFLINTSHRPVALQQKSTPEDAEIVCTLDDIEAKLKDMLKNLEQFQLKNADNVFNTVMTYMPQDFRGTLIRQQRERSERNKQAEVLLDFIRQINDDNGPMEEQRERYGPALYTLTKLVLAIRLYLHVSLARYGQRKIEKDDAAVLQQAVVIYTKEFLKFTEFIGEVFVNAPFFISAEDAGAVDARKSDEYKETIIPAGKTHEVILSVEAVNSYIAWDFSLQQGALNMVLDIGFHVEYISPSGEKTLILPYRRYEADQGNFCTVSSGSYKLVWDNSYSSFFKKVLRYKVDAVPPVVEPALSATEL

SEQ ID NO: 50672 - protein, 239 aa, Zea Mays
MAEEMAQAQPRLTAPRSVRCIVKLGGAAITNKGELESINEENLRSACAQLRHAMSESDGDGAMEKVLGMDWSRKPGDPVDPAVDAEWIAGIARLGLDTNFVVVHGAGSFGHFQASRSGVHKGGLHSTLVKAGFVATRISVTSLNQEIVRALAREGIPSVGMSPFACGWSTQQRKVLHGDAVLDELLDCTILSGDVIIRHLAQLLSPKYVVFLVLLPSLLYSFKSFMLSMEDGFVHYMVF

SEQ ID NO: 50673 - protein, 127 aa, Zea Mays
MRAACACSGRPPTTTRCAWYEDRLAALRSRLCAFWCPPSACELKNLRRQKLQENTLCGGGLAADPDPDPDSESAEQLAASGDGDGDGDSLAPSVRFSHAAPSPCCSLACSPWMAGWCIRSSLQFVAL

SEQ ID NO: 50674 - protein, 589 aa, Zea Mays
MAPPLPLPLLRWLLLAAAVAATVAQPQPQPLASRTDLAALYSLRASLGLRARDWPLRADPCARWAGVDCAAGRVVGVTVAGLRRTRLGAARPPLLALDGLRRLTALARFNASGFPLPGEIPPWLAAGLPPPLAVLDLTSAAVNGTLPPDLGASGNLTALLLSGNTLTGPVPPALLSAAGLRVLDLSRNNLSGPLPNVSVSLGAAGASVFNVSGNSLYGVAADAIGALRRRFQVVDVSSNYLDGAWNGSDTTVLATTNCFYGVPAQRSRADCEEFYRKQGVKLVDPPAPSPVPSSEPPPSPSPEKKKKKKHGISKKLLIGVLVAAGTLVAVFFIALLFCLVKRRSRGRRGGRGRGVAPNEEGTRSVSVRRRDSSVNPVVLSPSAVSPSANDGPKDASAVIGEITYEQLVLATGGFGDDQLIKHGHSGDMYHGVLENGSHVIVKKVGAKGANRHASELDFYVRYSHERIVPLLAHLSNDDDEFMAYKYMPKGDLTHALHKKPVDTADGLPSLDWITRLKIATGVAEAMCFLHEECSPPLVHRDIQSSSVLLDDKYEVRLGSMSDICIQQSGGSQNVFTRILRSSKLNSGGI

SEQ ID NO: 50675 - protein, 326 aa, Zea Mays
MLTVMLPLLIAAAAAAGALALIVATRLLREDAVASLRREIREVLTALVADDEDGDGESASPPPPSVLITGFRAHGKSSLVNTACRALAAEDGPLLLRAEASPPGGGTDGLRRLLRVNAVVAGADGDSAGAGESDAVELLDAPPLPEAFRLKREDVDAAISVGDPECVVFVLRCDAPTKERSAAIKCLPEISAAVRNKGLNLIVVLTFKKATRSIRQAEELLREVSFRARTDCVYFIENYTWSKNGPNLRHPPVIKNEFETHFTVLTIIRQCLEFIKLNRSQSKDKKRNGKQEKAPEPKPKNPRTETKQYRKIKEPSVRLFFNGSET

SEQ ID NO: 50676 - protein, 214 aa, Zea Mays
MGRSYNHSPSPPRGYRRRTRSPSPRGRYGGRDTDRDLPTSLLVRNLRRDCRPDDLRRPFGKFGPVKDIYLPKDYYTREPRGFGFIQYFDPEDASDAKYYMDGKMLLGREIAVVFAEENRKKPSDMRAREKIRGRSYDGRLRSRSPGLNGSPRGRSRSQSRSYSPAPKRKHYSRSPAPRPRERSLSRSPAVNRSRSASPIVSRSPHRQGSLSVSE

SEQ ID NO: 50677 - protein, 683 aa, Zea Mays
MSWGLAWKRSSEIFHLTLNYGDYDDNDDRQPSSPPPPASSSPPASASSTPVYSSSPIATRNGDLGFRIELDWSAGDDEDQVALRLQSQLMVALPPPHDAVSVDLTPRDHGEEEGVRIEMRVVRRREALRSVRVSRAPGSALGSGDGAGVLARLIRSNLAPAPAVDGPTAASGVPVLADHWRPITMVSLCNCGMSMLPVELTRLQFLEKLYLDNNKLSVLPPEVGALKNMKVLSFNNNMLVSVPAVELRQCVMLEELSLEHNKLVRPLLDFRSMPKLRILRLFGNPLEFLPEILPLHNLRHVTLANIRIEAVESLKSVTVQIETENSSYFIAARHKLSAFFSLVFRFSSCHHPLLASALVKIMEDRSNHIAISKEENAVRQLISMISSDNRHVVEQACLAISSLASDISSAMQLIKCDIMKPIEAVLKSSDEEELVSVLQVVVTLTFVSDHVAQKVLTKDVLKSLKALCAHKNSEVQRLSLFAIGNLAFCLETRRILMHSESMCDLLIRLTISQECRVSKAAARALAILGENENLRRAIRGRPVAKKGLRILSMDGGGMKGLATVQMLKQIEQGTGKRIHEMFDLICGTSTGGMLAMALGIKQMTLDQCEEIYTKLGDSLLPFEVSLPMPMLPTELLIFLGKLVFTEPIPKDEAATWKEKIDQLFKSSSQSFRVVVHGSKVLMK

SEQ ID NO: 50678 - protein, 341 aa, Zea Mays
MAEVHLGLPGPWAADYREMADHYTTKIGGVPDWPTGDMGFKPETLQCSLCGTKLCLVAQIRDGTKRFWKVLRVQKCHNVMQTEGGGDELGQPNGPSSTSLPEEQNDKNKIPETNDDDFDLDALAEALEQAATLASNSKKKNKSKHANAPVKRPVLKEQACDLSIPVLPCFYIHYNKELYGGKGAVGSSSSELVLDKEIMDAANDEEEKWEGEKYEYDRAIGADRTFLKFKKRLDAYPQQCFRYSYGGKPLLATTKLQDPGTCRLCGSPRQYELQLMSPLSYFLHEAGDGSSNYAPSSWTWLTVIIYTCPKSCCPSSCGGKPQSCCWGAAEEEILIQEDEVL

SEQ ID NO: 50679 - protein, 1735 aa, Zea Mays
MAEVHLGLPGPWAADYREMADHYTTKIGGVPDWPTGDMGFKPETLQCSLCGTKLCLVAQVHAPVAKLNIEERIIYVLVCPTPECGPKPQSWKVLRVQKCHNVMQTEGGGDELGQPNGPSSTSLPEEQNDKNKIPETNDDDFDLDALAEALEQAATLASNSKKKNKSKHANAPVKRPVLKEQACDLSIPGEDNFETTRYHELYGGKGAVGSSSSELVLDKEIMDAANDEEEKWEGEKYEYDRAIGADRTFLKFKKRLDAYPQQCFRYSYGGKPLLATTKLQDPGTCRLCGSPRQYELQLMSPLSYFLHEAGDGSSNYAPSSWTWLTVIIYTCPKQQGNKVLPLLFVPRSGDFCFNRTSPDTDGQQHEGTGCVSRGVISVIQRNAGLTGVGKVQGVHQEFAFLMAVGRGCNKGAESRTTFCKAHGGGRRCQELGCTKSVAGKTEFCIAHGGGRWCGIKECSSAARGKSGFCLKHGEGKRWRIEGCTRGAEGHSGLCISHGGGRRCQHPNCELQKDSALPSNSSDSEPEAMELDDNGAGKSHSIEGNRDSPIDTDEGQPSMDVDIKGKSSLNDDVNGKSSSEPFSNPPINMSVESLEKFCKEASRSFFDEVGLISHQINSYNEFVSHGLQELFDSLGEVIVEPGYDPSKKGSGSWKHAIIKFGRVKLEKPVFWTGKDEVSVDFKPWHARLQNMTYASRLRVEVTIQVYSLEKSDKSKTGNDGFVQKRNFMNETHWIFIGLLPVMVKSNLCLLHSLKESECLFDAGGYFLVKGMEKVFIAQELRCLRRLWISDRPCWTISFMSEMKRRRIYIKLVESTRSEDFSGSKIISISFLYATMPVWLLFFALGISSDKEAFDVIDMQDCDASVINTISATIKESDELCGGFRKSDKARQYVDELVKSSKFPPVESFDDYIAKFLFPGISGNRNKALFLGYMVKCLLMAFTGKRKCDNKDDFRNKRLDLPGELLGRELRAHLRQAERRMVKAIQRDLNSDRELQDLERYIDASIVTNGLNRAFSTGSWCHPYKRAERCSGIVATLRRTNPLQMMSDLRKTRQRVAYAGKAGDARYPNPSYWGKLCFMSTPDGENCGLVKNLAVTSIVSSKVVQPLIESFISCGMNKLNDIPTEHIQRMDKIFLNGNWLGSCSDSASFVFRLRCMRRSSLIDPQVEIKRDKHYKEVRLFSDAGRILRPLLVVENLNKIRKPKGRSFSFQELMQQEIIEFIGVEEEEDIQCAWGIRHLFESEGAISSYTHCELDPSFILGLSCGIIPFANHNFARRVLYQSEKHSQQAIGYSTSNPRIRVDTLSHQLYYPQRPLFKTVIADCLGRSDCTTFGRKDDFTRPEYFNGQNAIVAVNVHQGFNQEDSLVMNRASLERGMFRTEHLRSYKADVENKDGTKRLKLKEKIDFGKTESKRGRVDNLDDDGLPYIGASLQTNDIVIGKVSESGEDHSIKLKHTEKGMVQKVLLSANDEGKNFAVVTLRQVRTPCLGDKFSSMHGQKGVVGFLESQENFPFTHDGIVPDIVINPHAFPTRQTPGQLLEAALGKGIACKGTMRYATPFTTASVDVIAEQLHKAGYSRWGAENVLNGRTGERMKSLVFMGPTFYQRLIHMSEDKVKYRNTGPVHPLTRQPVADRKRFGGVKFGEMERDCLLAHGSAANLHERLFMLSDFSQMHICQTCERVANVVMRSVPGGKKIRGPYCGFCKSSENIVRINVPYGAKLLYQELFSMGICLKFETEVC

SEQ ID NO: 50680 - protein, 196 aa, Zea Mays
MSKKRKHLDPANSLKDSEQVVASDFIRGDDLDDLLSKLIRSVEIAKASRGRLPEKIWMKQQFAIGVNDVTRVLERMPHSVTAHPAQMSSEAPTVSGQRQAPLVPLQAVLVAADCNPKWLTKHIPTLAFTRQVPVLCMKDNKGGSVRLGHVVNVRTALAIGVKIVIADESHFMKNGQAKRTVASLPVLQNQLIVTYN

SEQ ID NO: 50681 - protein, 268 aa, Zea Mays
MVASSDTSLKINAAALLRALVPYTDVKIASTHILPALVTLGSDQNLKVKYASIDAFGAVAQHFKNDMVVDKIRIQMDAFLEDGSHEASVSVIRALAVAVPHSTDRLREYLLTKIFKMTCITPVGNDIERRRERANVLCEALRALDATDLPAMGIRDLLLPSIQNLLKDLDALDPAHKEALEIISRERSGGTLESISKVMGAHLGIASSVSSFFGENSLLTKKEGGEEHDPAGPTAPEQNLQAQPESTRFGRIMRSGFGDILRGQSKGQ

SEQ ID NO: 50682 - protein, 64 aa, Zea Mays
MLQDHMKIIEDDGPGAAFYASAKAMTNGNHTFYVSKLIQRLARLSKYDTMYHMHRDLSSNNLNG

SEQ ID NO: 50683 - protein, 85 aa, Zea Mays
MALRNFPRHLVAERAILQCLKKCPGNHLQALKGIPRTLRMISTTVSSSAFILCIYLLMPSTVKLFSHSKGDFSHWQQEGPGSGRL

SEQ ID NO: 50684 - protein, 94 aa, Zea Mays
MQAAPAGLASRSSRMVAPPARADAVEAPSEVSEKCSLLLPKFRDHSSEAQRLNRVWNGLLDAIRHMQVSADELRRLTRRNHVPEYVEYLRKNRL

SEQ ID NO: 50685 - protein, 1064 aa, Zea Mays
MAVQIMKQLSWRIHPILLKRDVLETEHTTLQSEIASEPCAQQNFVEENNLTDVKTVNEDKSDDVIADAAAAARSAQPTGNTFLTTKVRTKFPFLLKHSLREYQHIGLDWLVAMYEKRLNGILADEMGLGKTIMTISLLAHLACEKGIWGPHLIVVPTSVMLNWETEFLKWCPAFKILTYFGSAKERKQKRQGWMKPNYFHVCITTYRLVIQDSKVFKRKKWKYLILDEAHLIKNWKSQRWQTLLNFNSKRRILLTGTPLQNDLMELWSLMHFLMPHVFQSHQEFKDWFCNPISGMVEGQDKVNKEVIDRLHNVLRPFILRRLKRDVEKQLPKKHEHVIYCRLSRRQRNLYEEFVASSETQATLASGNYFGMISIIMQLRKVCNHPDLFEGRPIISSFDMAGINMQLSYSVCMLLDKSPFSQVDLSDMNFVFTQNEFSMSSWEADEVISAFPSSITSRDCDLDIFCSNKDHQGSNLTNIFEDIQKALQEERIKESRERAASVAWWNRVRCQKRPVYGTNMRHVLTVKHPVSNILNKRNNPLCHMDYSSRLADLVLPSVERFQKMLYFVESFTFAIPAARAPPPVCWCSKGKSPVFIDPAYREKCMYKFSPILSPIRSAIVRRQVYFPDRRLIQFDCGKLQELAILLRRLKSEGHRALIFTQMTKMLDVLEEFINLYGYTYLRLDGSTPPEERQTLMQRFNTNPKFFLFILSTRSGGVGINLVGADTVIFYDSDWNPAMDQQAQDRCHRIGQTREVHIYRLISESTIEENILKKANQKRALDDLVIQRGSYNTEFFKKLDPMEFFSGHTSLRVEGQEKNCSTSVGASNDVDLALSIADVEAAIRQAEDEADYMALKKLEEEEAVDNQEFSEEVAGRPEEDELVNEEDGKPDEHINEDHKYYSSDVEKEKHITLSTNRLNNEKALTLAVGDEDTDMLADVKQMAAAAAAAGQACSSFENQLRPIDRYAMRFMELWDPVIDKAAVNHQVNVEEEEWELDRIEKLKEDLEAEIDEDQEPLSYQSWDVDFATTAYRQHVEALTQKQLLEEQERQAQEAAKELEENNDNMS

SEQ ID NO: 50686 - protein, 1351 aa, Zea Mays
MMATAESDDDAIWVPPDEAAAAADSMMQDDDDDDDDYHAGTGEEDDESEDDDDATSSICRWRHDSDHQSAAHREERQKAMLRAMNGQLRMLAARFLESAGIDTSSWLDIVISLSWEAALAIKPDVGTAVGNQMDPSSYIKVKCLASGTPRQCEVVKGLVFRKNVAHKHMPTKCHNPRLLLLSGLLGHSHVGFSSFSSIEQEKDHLDKSVCEMMEICRPDVVLVERTVSRDIQELLLKEGVTLVLDMKLNRLQRVARCSGAPIVSFSEVLSKPKLKQCDYFHIEKVTEEHSLITCSAGVGSRPSKTLMFLEGFHKPLGCTILLRGANTQELKKIKQVMNYTVFAAYRLVLETSFFEDQRLILNNKDSSKEEVSVARKAGPSSLGSVQETTDSNALNPLDKGFPNQALLPSEGLVVSAVPESPRRFIDILRYHNIYLPVTSSQEATDHQIQDSIHISPNVGVPIGSVESVDHLSDPQEQASSETNQQMALDGPSVSEKHEQSLENIKTSDTDEVDDVLESQSILILLSSQCITKQVICEQSRLSRIRYYGNFDVSLGRYLQDILQKQNLSCSSCGEPPEAHMYSYTHRNGNLTVLVRHLLPKYRLPGESEGKIWMWTRCLRCERESGISRSSRRVIMSAEAHYLSFGKFLELSFSNHSTARRLSICGHSLNTDCLRFFGLGSKVAMFQYSSVEIYNACKPQPTLEFHNPDMHEWYGQEVRNVLATGVTLFSEVTSALQKLKDQFPVKDLSQLEEMLIKEKAEFMDSLAKTVDRNRESSSVDDILNVNWLYQDLLLELYVWDCRLHQLVDCTLAENAIVANGQTAAAAEADGIGERMSSIAPFENRCIKEPEKFIEAGTASALLDDAWNDKHCNDQHNTNCECDGGEEKWIWNPVNESRLAFRQEVEVGCLERFEVVNHYCPSHLSPLHKHRESGEEMGGSPQFTVGPGGSILCVSEDEISSIISRALAVSEERRHLLMDAVAETEPADTTRSKTMDKSYSSLSESSSASLWSSDSEASISSDDLSSYDTSLLLSSSLHPEIAVNGITALKGRYSVICVHSNQFYNLRRKCCPSELAYVASLSRCKRWDAQGGKSKAFFARTMDGRLIIKQIKKTEFESFIKFAPDYFRHVNHSLDTGSQTCLAKILGIYQVKQTRHGKEIKMDLMVMENILFGHNVSRTYDLKGAIFSRYVSDPNDHAGTVYLDQNFVDDMRVSPIYIGGRAKHLLERAIWNDTSFLTSINVMDYSLLVGVDRQKRELVFGIIDYLRQYTWDKQLETMVKASLVVPKNESPTVISPRDYKKRFRKFMSKHFLTVPDEWSTESRPPVAWESCAHAGELPGVKPQHPSPILLACA

SEQ ID NO: 50687 - protein, 221 aa, Zea Mays
MGNVHVIKWMFNKGQGKTMGSYYTLLNALIELFGMIFADMEELGVRPDGSIIRMLGDVFQKLEMMDKYEKLKKKYPPPKWEYRYIKGKRIRIRVYLDSKSEEAARGDPDNDELGEVESIHLDNELEEEASLGLDRSVLDDAALETLNIYNSKLPFGIFFNACLIKAAWSKLNGRRPYPGHRTWQSSRYIIHMILHCSAWKDTVSDTGVVCATHIQCGGKNP

SEQ ID NO: 50688 - protein, 876 aa, Zea Mays
MAWPWSPPPRQTARFVVVVVVAVVLLFAAAPWPRAAAQAGYHVVSVSGTGGQLSARLELTGAGQKAELGPDVRRLSLTASLETDSRLHVRITDADHRRWEVPQSVIPREAPRDDVPLEASTGASPPHSRVLSAATSDLAFTLHASPFRFTVSRRSSGDALFDTSAALVFKDRYLELTTALPPEGGASLYGLGEHTKRTFRLQRNDTFTMWNADIPAANADVNLYGSHPFYLDVYFFAGPSPLDVVDQYTQLIGRPAPMPYWSFGFHQCRYGYKNLADLEGVVAGYAKARIPLEVMWTDIDYMDAFKDFTLDPVNFPAGPMRQFVDRLHRNGQKYVVIIDPGISVNETYGTYVRGMQQDVFLKRNGTNYLGKVWPGYVYFPDFLNPRAAEFWAREIALFRRTLPVDGLWIDMNEVSNFVDPAPLNALDDPPYRINNSGVHRPINNKTTPASAVHYGGVRDYDAHNLYGFLEARATHGALLADTGRRPFVLSRSTFVGSGRYTAHWTGDNAATWDDLRYSINTMLSFGLFGIPMVGADICGFGGNTTEELCSRWIQVQAFHALQDQHAMSTDMYELSFRCLLVKLGAFYPFARDHSAIGTVRRELYLWELVARSARKALGLRYRLLPYMYTLMYEAHTTGAPIARPLFFSYPKDEATYGVDRQFLLGRGVLVSPVLEPGATTVEAYFPAGRWFSLFDHEVVVASATGKHVTLPGPADTVNVHVAGGNILPLQLPELTTSRARQTAFHLLVALAEDGSASGELFLDGGDLPEMAGPRGEWSLVRFSCTQGRDGVKLMSHVVHDAYGPSRKLVIGKVMFLGLPSLAPPGEFAVYVNGVKMANSTGATLGYQRRGALGAAQVEGLSLVVVEEFELKVVTSS

SEQ ID NO: 50689 - protein, 843 aa, Zea Mays
MALSWSPAVVVFLLLLLLLPAPWPRAAAQAGRYHAVSVSRAGGQLSARLELAGAGAGGQKPELGPDVQRLSLTASLETDSRLHVRITDADHRRWEVPQSVIPREAPRDDVPLEASTGASPPHSRVLSAATSDLAFTLHASPFRFTVSRRSSGDALFDTSAALVFKDRYLELTTALPPEGGASLYGLGEHTKRTFRLQRNDTFTMWNADIPAANADVNLYGSHPFYLDVYFFAGPSPLDVVDQYTQLIGRPAPMPYWSFGFHQCRYGYKNLADLEGVVAGYAKARIPLEVMWTDIDYMDAFKDFTLDPVNFPAGPMRQFVDRLHRNGQKYVVIIDPGISVNETYGTYVRGMQQDVFLKRNGTNYLGKVWPGYVYFPDFLNPRAAEFWAREIALFRRTLPVDGLWIDMNEVSNFVDPAPLNALDDPPYRINNSGVHRPINNKTTPASAVHYGGVRDYDAHNLYGFLEARATHGALLADTGRRPFVLSRSTFVGSGRYTAHWTGDNAATWDDLRYSINTMLSFGLFGIPMVGADICGFGGNTTEELCSRWIQLGAFYPFARDHSAIGTVRRELYLWELVARSARKALGLRYRLLPYMYTLMYEAHTTGAPIARPLFFSYPKDEATYGVDRQFLLGRGVLVSPVLEPGATTVEAYFPAGRWFSLFDHEVVVASATGKHVTLPGPADTVNVHVAGGNILPLQLPELTTSRARQTAFHLLVALAEDGSASGELFLDGGDLPEMAGPRGEWSLVRFSCTQGRDGVKLMSHVVHDAYGPSRKLVIGKVMFLGLPSLAPPGEFAVYVNGVKMANSTGATLGYQRRGALGAAQVEGLSLVVVEEFELKVVTSS

SEQ ID NO: 50690 - protein, 605 aa, Zea Mays
MAAGRGDWEDMVRRMFPPGTTIPEPLPDMDYSFALTYNGPDVSYELPRIQPVCVPAIPTAEPASGPLGLGSGVVPVAPVVGPAAARARANPPAASRAGAADRRAARMTPSDSSDDEEDDAGSSGSRSTKASRPAVPEGRRPQVVTFGVPEEDSGGRYESSEMDGGHDAASAEQHVAVTRPAERKGRTCCRRCGKSKWESKESCIVCDARYCGHCLLRAMGSMPEGRKCVTCIGQPIDEAKRSRLGKGSRILSRLLGPLEVRQILKVEKECQANQLRPEQLLVNGFPLDDEEMTDLLSCQRPPGNLKPGRYWYDKESGLWGKEGEKPDSIISTNLNFNGKLQPDASNGTAQVFINGREITKIELRILKIAKVQCPRDTHFWVYHDGGYEEEGQNNIKGKIWESPLTRFACALVSLPVPPTNFDATKDEAPYSSKTVPDYLDHKRIQKLLILGSPGAGTSTIFKQAKLLYGNRFTDEELENIKLMIQSNMFKYLGILLEGRERFEEEALAVPNHPSSVGDDPQQDESKSSSSNSCIYSINAKLKKFSDWLLDIIATGDLDTFFPAATREYAPVVDELWKDPAIQATYKRKDELHFLPDAAEYFLSRV

SEQ ID NO: 50691 - protein, 303 aa, Zea Mays
MANPSEAPVTLTPSSSASPVPLPRRRRRRKHRADCRSPSAVVKLEKMHVPTSPPPWLHLIYEYSTPTRNSGTTRQTPVRETAPRTKRSKGNEAPPPPATTVPGYSPSRSTMLPGGGGEEWKRRGAPAGEDAADADADAATSASAASLNDLCATAAAGAPAPFPTAAAWAVAALLAVGLGVGALVLAVVRSPALLVVAVLLAASVAAFLLWNAAAAASGHALRRFVDGLQASSLRVAADGQLVKITGFVSCGDISLISSYEKVENCVYTSTILRKCARWGSMTLNPWNRCSKWKLAHAEVGGPW

SEQ ID NO: 50692 - protein, 1082 aa, Zea Mays
MASSSFAPDDQTDADFFDKLVDDDDPATDLPRAVSATSVADDPPPVLEPQVPAPAPSEGSGKGGAGVHTAVKQVQWASFGGGVDDGPDPFADLSGGAGDDDGFLGNTAGTQAALDHAAEVTDQDFFAGSSSSDQQNVHGQHDQGRGSAAVDSADPKSLEAMYPGWKYDEASQQWYQLDGSVNSTGNAAQALDDSAQNAHHHQQQLDAAYLHNSAHAGLGTIAEESTTAAGAANSWGQGAAPEYPPSMLFYAEYPGWYFDTNTQQWHSLESYQQAAVQAGTSSTGQTVVASDDVVATSSLTGHNAGQTEDLVAHNQVTQRNSSSNSFTHQNQWQTTDALGNNVQSESLASSFYGFEQHMNAETTSSSTSQQTGFHTAETITDHYGGRKAFESSSLQSGYSSSDSQQSSHKAFEPSTGYQAGYNGFEPASGHHTAFEPAMHNQSGYKAFDPSTGHHSASWGFMPSTGQQTDFKGSRASTVHQAGYEEFEISRGYNTNFKAFESSSSQNAGYNGSQPSSGHQPNYMGFDTSANHHGYTDVNGVASTQGFVPMQTTYQGQKQANATSQGHLSNSYLGTDNSMNFNQQQFLGANASNLQFGHSPHEGRSSAGRPPHALVAFGFGGKLIVMKETTSMPASFNSGNQGNSSSTVSVLNLLEVVFDKVDPSSVTNGSALSYFHALCRQPVPGPLVGGSAASKDVNKWLDEMIARYESSSSEFHRGDTRKLLISLLKILSQHYGKLRSPFASDPSQEETDGPEMAVTKLFSSCKRSTVHMGDYGSLVPCMKSIPSESQMQAVAQEVQSLLVSGRRKEALHCAQAGQLWGPAIILALQLGDKFYVDTVKKMAHFHFVSGSPLRTLCLLIAGQPADVFNVENNVNSDYGASHQPVEPGPNMLDDWEENLAIITANRTEGDVLVITHLGDCLWKEKNEVAAAHSCYLVAELNIDSYSESARLCLIGADHLKCPRTFASPEAIQRTEVYEYAKVLGNSQYILLSFQPYKLIYAYMLVEVGKVSDSLRYCQASIKVLKASGRAPELEVWKQLFSSLEERIRTHQQGGYGTNLAPGKIVGKIFTSLDKSISRMMVND

SEQ ID NO: 50693 - protein, 226 aa, Zea Mays
MSNGSLEMLLHSEDRSHMGFQFHTRMDTMLDVSMAMEYLHHEHHEVVLHCDLKPSNVLFDDDMTAHVADFGIAKLLLGDDNSMVVSTMPGTLGYMAPEYGSLGKASRKSDVFSFGIMLFEVFTGKRPTDTMFEGELSIRQWVQQAFPSQLDTVVDSQLLQDAISSSANLNEVLPLIFELGLLCTTDSPNQRMSMSDVVVTLKKIKMNYTKFGISKDTMSFPAIDHA

SEQ ID NO: 50694 - protein, 1172 aa, Zea Mays
MSPAPLLRLASLLFLFLVHSAAAGDTRRALHEPLFPIEWTPPPSTTAPPAPGFASDPSTPVPPVYNGGPALLPAPPPPNTVAADASSSRTGPAPRRHGGGGGGTPKAAIVVASAAAAAVLALLAFAAAFLLTGRLARHPAWTHKPTGLAAAAHPGPASAVVLHADAVGTSAAAAAASSSGATATSTPHRKARSERARWGMCRDVDTVPSPELRPLPPLRRAGSSDEDAAYYTPGQRSAGSAGGEGAGTGTWSEASASSPRTTTPSRRSLPSLTSDFFPPTPAAAVPAASVAPPPPAPPVPRSRRTLPRTRFSAGSASDMIKQVVSPPSNPPPPPPPPPPRCTNAVPKPSPPPPEPSYTPLSTRRLHKLKQTEGPGVAVPSAPVMAVNKDNDGMPIRTNDDPAAAGDEARPKLKPLHWDTVRASSDRDMVWDRLESNSFQLDEDMIEVLFTNNAANAPPRDTLRKPGVPLCGAQEKVLDPKKAQNIAILLRALNVTLEEVTDALLDGNAECLGADLLETLAKMAPTKEEELKLRNFTGDISKLGSAERFLRALLDIPFCFKRVDAMLYRANFDGEINYLRKSFQTLEGACDDLKGSRLFLKLLEAVLQAGNRMNVGTNRGQARAFKLDTLLKLADVKGADGKTTLLHFVVQEMVRSEEDARTTSERAAEDEARKIARDETFRSKQGLKVVSGLSGELGNVRKAAAMDFDVLHGYVSKLQAGLGGVRSVLALEKQCAQLQAQGHHHRFFARMRGFLEEAGAEIGRVRRDEERALGRVKEITVYFHGDAAREEAHPLRIFVVVRDFLSTLDRVCREGSATNRPWQTRSIRPLSSMAAAPSAPSFFPSSPSKISSTWSPRNRIWEQGHQCRRPSSRRSCGLRSTCPTCSATLTWLSEVNRIEEVEQPLKPALTFASPSERRLEGEKEQAKFIGGGVRTHLMPSLTSHEPSLLWLHVPRLDRVASRRENGGVELVAREGCYHFRIRISPSPPLSCLQTNFGDIEFGFFPHVAPKTVEHIFKLVRLGCYNTNHFFRYAVFGRVTKGDDTLTKLERLPTRREGIFVMPIERINILSTYYYGQQLAICITKVRLKTSEVISHTRENSCVKFERILDSRVRTEPTSTTVSKRRGASLLDWSLVSLINMIIFFAIRFAVPRRGMVRVMVILLRKGEIKKDEI

SEQ ID NO: 50695 - protein, 274 aa, Zea Mays
MPPSPHPRARLPPACASPPELARAPISPSGIPPASPRTKLLPRDKLPPPRRVFLLALDRRPSSLLTPQSPPPMLRSLLAPDRRPCSRGLGTGPNYLHGLRVRDNPISSRSPWKARPPPVILDSPRPRPRSTLLSPTIPTDSAPYHHPGSLERDPLSSLLQSPLPQPRSPPSLSILAHALHGRRGRDARVDLCRGCDALPGRLLPVLRAPCAALERHRAVHVLVVSPRLAHVVPPASTDHQAHSHCRPERIATNRCVQFYSTPASSRCASTRGRS

SEQ ID NO: 50696 - protein, 921 aa, Zea Mays
MADAQTDFNLTFDYTADPSFASDCMEQTRGQMTAMLCGQAEIELYIESLANASSRSNPRISPNCNQNSWALGCQPGWACMVSGTEPSDGPSAELVPQRAESCRPCCPGFFCPRGLTCMMPCPLGAYCPLGTLNDTTGLCDPYFYQITPGKSTACGAADSWADIVTTNDIFCPPGHYCPSTTQKYNCSSGHYCRKGSTDEKITAHIFAECFWKNTCKDNAIKENLTFYGIILIAILGFVLLLVYNCSGLFISFQVKMSSRSRKKAAKRADKSAAARERWKLAKELILRHEVPTEGFGHAYNQADTDRAMKTNNDKLTFSGVVSLATEIRPRRPTLEVAFRGLTLSIGKKKLLQCVTGKLSPGRVTAIMGPSGAGKTTFLNAVLGKTSGYKKDGVVLINGLPGLMQSYKKIIGFVPQDDIVHGNLTVEENLWFSSCCRLSKGMSRSHKVRILERVIESLGLKEIRNSLVGTVEKRGISGGQRKRVNVGIEMVMEPSLLILDEPTTGLDSASSQLLLRALRHEALEGVNVCAVVHQPSYTLFNMFDDFVLLARGGLIAYHGPIYEVETYFAGLGIKVPDRENPPDYFIDILEGIVKTKMRGNVTPKHLPLLWMLHNGYEVPDDLQKDLENIDTIRELYTVRSISSEQSSEEQSENTDSVHRNLSQSNELLERKTPGVFAQYGYYLGRVAKQRLREATQQAVDYLILCIAGICIGTIARVRDDSFGVASYGYTIMAVSLLCQLASLRSFSPEKLQYWRERESGMSSLAYFLARDTVDHFNTAVKPIIFLSTFYFFNNPRSTLRDNYLVLLALIYCVTGIGYSFAIWFELGLAQLSSAIVPVVLVLVGTKPDLPRVIRELCYPKWALEAFIIAGAKKYSGVWLITRCGALIQGDYDINDFNLCITIIILYGVLFRLVAFLSMLKLK

SEQ ID NO: 50697 - protein, 984 aa, Zea Mays
MRAAVVLLISVVALSLLRPARCQLPPGGVVGRAPPPIAQVIEGAPPLPVVQPQDGLEKDLRSVSDKLTAELQKKQTDFNLTFDYTADPSFASDCMEQTRGQMTAMLCGQAEIELYIESLANASSRSNPRISPNCNQNSWALGCQPGWACMVSGTEPSDGPSAELVPQRAESCRPCCPGFFCPRGLTCMMPCPLGAYCPLGTLNDTTGLCDPYFYQITPGKSTACGAADSWADIVTTNDIFCPPGHYCPSTTQKYNCSSGHYCRKGSTDEKKCFWKNTCKDNAIKENLTFYGIILIAILGFVLLLVYNCSGLFISFQVKMSSRSRKKAAKRADKSAAARERWKLAKELILRHEVPTEGFGHAYNQADTDRAMKTNNDKLTFSGVVSLATEIRPRRPTLEVAFRGLTLSIGKKKLLQCVTGKLSPGRVTAIMGPSGAGKTTFLNAVLGKTSGYKKDGVVLINGLPGLMQSYKKIIGFVPQDDIVHGNLTVEENLWFSSCCRLSKGMSRSHKVRILERVIESLGLKEIRNSLVGTVEKRGISGGQRKRVNVGIEMVMEPSLLILDEPTTGLDSASSQLLLRALRHEALEGVNVCAVVHQPSYTLFNMFDDFVLLARGGLIAYHGPIYEVETYFAGLGIKVPDRENPPDYFIDILEGIVKTKMRGNVTPKHLPLLWMLHNGYEVPDDLQKDLENIDTIRELYTVRSISSEQSSEEQSENTDSVHRNLSQSNELLERKTPGVFAQYGYYLGRVAKQRLREATQQAVDYLILCIAGICIGTIARVRDDSFGVASYGYTIMAVSLLCQLASLRSFSPEKLQYWRERESGMSSLAYFLARDTVDHFNTAVKPIIFLSTFYFFNNPRSTLRDNYLVLLALIYCVTGIGYSFAIWFELGLAQLSSAIVPVVLVLVGTKPDLPRVIRELCYPKWALEAFIIAGAKKYSGVWLITRCGALIQGDYDINDFNLCITIIILYGVLFRLVAFLSMLKLK

SEQ ID NO: 50698 - protein, 680 aa, Zea Mays
MAAPGRRTADVSSSSPAPSPSPSTGRRLLRTQTVGNLGESIFDSEVVPSSLVEIAPILRVANEVEATNPRVAYLCRFYAFEKAHRLDPTSSGRGVRQFKTALLQRLERENDPTLKGRVHQSDAREMQRFYREYYKKYIQALQHAADKADRALLTKAYQTAAVLFEVLRAVNVSQSVEVDQAILDTHNKVEEKKKLYVPYNILPLDPESTGQAIMRYPEIQAAVYALRNTRGLPWPKDQDKKPGEKNTGKDLLDWLQAMFGFQKDNVSNQREHLVLLLANVHIMKVPKVDQQPKLDDKALDAVMKKLFKNYKKWCKYLGRKSSLWLPTIQQEVQQRKLLYMGLYLLIWGEAANLRFMPECICYIYHHMAFELYGMLAGNVSPMTGENVKPAYGGDEEAFLIKVVTPIYKVIEKEAERSKTMKSKHSHWRNYDDLNEYFWSVDCFRLGWPMRADADFFKTPKDAYLNLLNGENRSAGNTHWMGKVNFVEIRSFWHIFRSFDRMWIFLILSLQAMIIIAWNGGTPSDIFDAGVFKKVLSIFITAAILKLGQAILDLIFGWKARRNMSFAVKLRYILKLICAAAWVVILPVTYAYTWENPTGLARTIKSWLGDGQNQPSLYILAIVIYMAPNIVASMLFLFPFMRRFLESSNVKVITIIMWWSQPRLFVGRGMHEGIPCSGFFF

SEQ ID NO: 50699 - protein, 1490 aa, Zea Mays
MESAGNTHWMGKVNFVEIRSFWHIFRSFDRMWIFLILSLQAMIIIAWNGGTPSDIFDAGVFKKVLSIFITAAILKLGQAILDLIFGWKARRNMSFAVKLRYILKLICAAAWVVILPVTYAYTWENPTGLARTIKSWLGDGQNQPSLYILAIVIYMAPNIVASMLFLFPFMRRFLESSNVKVITIIMWWSQPRLFVGRGMHEGAFSLFKYTMFWVLLLATKLTVSFYIEIKPLVQPTIDIMREPIRTFQWHEFFPHGTNNIGVVISLWAPIILVYFMDTQIWYALFSTLIGGIYGAYRRLGEIRTLGMLRSRFESLPEAFNERLIPSDANKSKGLRAAFSSRPKASGDERQKEKRAARFAQMWNVIITSFREEDLIDNREMDLLLVPYCKDRELDIFQWPPFLLASKIPIALDMAADSGGKDRDLTKRIKSDPYFSFAIRECYASFKNIINTLVFGQREKDVLAQIFAVVDQHIEDETLIKDLNMRNLPALSKKFVELLELLQKNKEEDLGQVVILFQDMLEVVTRDIMEEQDQLGTLLESAHGANSRKHEGITPLDQQDQLFAKAIKFPVDESIAWTEKIKRLHLLLTVKESAMDVPTNLDARRRISFFANSLFMDMPNAPKVRNMLAFSILTPYYKEDVLFSLQNLEEPNEDGVSILFYLQKIYPDEWKNFLERVGCKNEEGLREDEELEEKLRLWASYRGQTLTRTVRGMMYYRKALELQAFLDMAEDDDLMEGYRATEVMPEDSQLMTQCKAIADMKFTYVVSCQQYGIQKRSNEPCAHDILRLMTEYPSLRVAYIDEVEAPSQDRNKKIEKVYYSVLVKASVTKPDEPGQSLDQVIYKIKLPGNAILGEGKPENQNHAIIFTRGECLQTIDMNQEHYMEEALKMRNLLQEFEKKHGVRYPSILGVREHIFTGSVSSLAWFMSNQETSFVTIGQRVLANPLRVRFHYGHPDIFDRLFHITRGGVSKASKIINLSEDIFAGFNSTLREGNVTHHEYMQVGKGRDVGLNQISLFEAKIANGNGEQTLSRDIYRLGHRFDFFRMLSCYYTTIGFYFSTMITVWTVYVFLYGRLYLVLSGLDEALATGRRFVHNAPLQVALASESFVQLGFLMALPMMMEIGLERGFRTALSDFILMQLQLASVFFTFSLGTKTHYYGRTLLHGGAEYRATGRGFVVFHAKFADNYRLYSRSHFVKGIELMILLVVYEIFSQPYRGAVTYIFITVSMWFMVGTWLFAPFLFNPSGFEWQKIVDDWTDWHKWISNRGGIGVAPEKSWESWWEKEQEPLRYSGKRGTVVEILLALRFFIYQYGLVYHLNITKKITKDNQSVLVYCFSWVVIFVILLVMKTVSVGRRRFSAEFQLVFRLIKGLIFITFTAIVVILIAIPGMTVLDIFVCILAFMPTGWGLLLIAQAIRPVIHKTGLWGSIKALARGYEILMGLLLFTPIAFLAWFPFVSEFQTRMLFNQAFSRGLQISRILGGHKKDRGTRNKE

SEQ ID NO: 50700 - protein, 1280 aa, Zea Mays
MFWVLLLATKLTVSFYIEIKPLVQPTIDIMREPIRTFQWHEFFPHGTNNIGVVISLWAPIILVYFMDTQIWYALFSTLIGGIYGAYRRLGEIRTLGMLRSRFESLPEAFNERLIPSDANKSKGLRAAFSSRPKASGDERQKEKRAARFAQMWNVIITSFREEDLIDNREMDLLLVPYCKDRELDIFQWPPFLLASKIPIALDMAADSGGKDRDLTKRIKSDPYFSFAIRECYASFKNIINTLVFGQREKDVLAQIFAVVDQHIEDETLIKDLNMRNLPALSKKFVELLELLQKNKEEDLGQVVILFQDMLEVVTRDIMEEQDQLGTLLESAHGANSRKHEGITPLDQQDQLFAKAIKFPVDESIAWTEKIKRLHLLLTVKESAMDVPTNLDARRRISFFANSLFMDMPNAPKVRNMLAFSILTPYYKEDVLFSLQNLEEPNEDGVSILFYLQKIYPDEWKNFLERVGCKNEEGLREDEELEEKLRLWASYRGQTLTRTVRGMMYYRKALELQAFLDMAEDDDLMEGYRATEVMPEDSQLMTQCKAIADMKFTYVVSCQQYGIQKRSNEPCAHDILRLMTEYPSLRVAYIDEVEAPSQDRNKKIEKVYYSVLVKASVTKPDEPGQSLDQVIYKIKLPGNAILGEGKPENQNHAIIFTRGECLQTIDMNQEHYMEEALKMRNLLQEFEKKHGVRYPSILGVREHIFTGSVSSLAWFMSNQETSFVTIGQRVLANPLRVRFHYGHPDIFDRLFHITRGGVSKASKIINLSEDIFAGFNSTLREGNVTHHEYMQVGKGRDVGLNQISLFEAKIANGNGEQTLSRDIYRLGHRFDFFRMLSCYYTTIGFYFSTMITVWTVYVFLYGRLYLVLSGLDEALATGRRFVHNAPLQVALASESFVQLGFLMALPMMMEIGLERGFRTALSDFILMQLQLASVFFTFSLGTKTHYYGRTLLHGGAEYRATGRGFVVFHAKFADNYRLYSRSHFVKGIELMILLVVYEIFSQPYRGAVTYIFITVSMWFMVGTWLFAPFLFNPSGFEWQKIVDDWTDWHKWISNRGGIGVAPEKSWESWWEKEQEPLRYSGKRGTVVEILLALRFFIYQYGLVYHLNITKKITKDNQSVLVYCFSWVVIFVILLVMKTVSVGRRRFSAEFQLVFRLIKGLIFITFTAIVVILIAIPGMTVLDIFVCILAFMPTGWGLLLIAQAIRPVIHKTGLWGSIKALARGYEILMGLLLFTPIAFLAWFPFVSEFQTRMLFNQAFSRGLQISRILGGHKKDRGTRNKE

SEQ ID NO: 50701 - protein, 1525 aa, Zea Mays
MSTFVDCFRLGWPMRADADFFKTPKDAYLNLLNGENRSAGNTHWMGKVNFVEIRSFWHIFRSFDRMWIFLILSLQAMIIIAWNGGTPSDIFDAGVFKKVLSIFITAAILKLGQAILDLIFGWKARRNMSFAVKLRYILKLICAAAWVVILPVTYAYTWENPTGLARTIKSWLGDGQNQPSLYILAIVIYMAPNIVASMLFLFPFMRRFLESSNVKVITIIMWWSQPRLFVGRGMHEGAFSLFKYTMFWVLLLATKLTVSFYIEIKPLVQPTIDIMREPIRTFQWHEFFPHGTNNIGVVISLWAPIILVYFMDTQIWYALFSTLIGGIYGAYRRLGEIRTLGMLRSRFESLPEAFNERLIPSDANKSKGLRAAFSSRPKASGDERQKEKRAARFAQMWNVIITSFREEDLIDNREMDLLLVPYCKDRELDIFQWPPFLLASKIPIALDMAADSGGKDRDLTKRIKSDPYFSFAIRECYASFKNIINTLVFGQREKDVLAQIFAVVDQHIEDETLIKDLNMRNLPALSKKFVELLELLQKNKEEDLGQVVILFQDMLEVVTRDIMEEQDQLGTLLESAHGANSRKHEGITPLDQQDQLFAKAIKFPVDESIAWTEKIKRLHLLLTVKESAMDVPTNLDARRRISFFANSLFMDMPNAPKVRNMLAFSILTPYYKEDVLFSLQNLEEPNEDGVSILFYLQKIYPDEWKNFLERVGCKNEEGLREDEELEEKLRLWASYRGQTLTRTVRGMMYYRKALELQAFLDMAEDDDLMEGYRATEVMPEDSQLMTQCKAIADMKFTYVVSCQQYGIQKRSNEPCAHDILRLMTEYPSLRVAYIDEVEAPSQDRNKKIEKVYYSVLVKASVTKPDEPGQSLDQVIYKIKLPGNAILGEGKPENQNHAIIFTRGECLQTIDMNQEHYMEEALKMRNLLQEFEKKHGVRYPSILGVREHIFTGSVSSLAWFMSNQETSFVTIGQRVLANPLRVRFHYGHPDIFDRLFHITRGGVSKASKIINLSEDIFAGFNSTLREGNVTHHEYMQVGKGRDVGLNQISLFEAKIANGNGEQTLSRDIYRLGHRFDFFRMLSCYYTTIGFYFSTMITVWTVYVFLYGRLYLVLSGLDEALATGRRFVHNAPLQVALASESFVQLGFLMALPMMMEIGLERGFRTALSDFILMQLQLASVFFTFSLGTKTHYYGRTLLHGGAEYRATGRGFVVFHAKFADNYRLYSRSHFVKGIELMILLVVYEIFSQPYRGAVTYIFITVSMWFMVGTWLFAPFLFNPSGFEWQKIVDDWTDWHKWISNRGGIGVAPEKSWESWWEKEQEPLRYSGKRGTVVEILLALRFFIYQYGLVYHLNITKKITKDNQSVLVYCFSWVVIFVILLVMKTVSVGRRRFSAEFQLVFRLIKGLIFITFTAIVVILIAIPGMTVLDIFVCILAFMPTGWGLLLIAQAIRPVIHKTGLWGSIKALARGYEILMGLLLFTPIAFLAWFPFVSEFQTRMLFNQAFSRGLQISRILGGHKKDRGTRNKE

SEQ ID NO: 50702 - protein, 1275 aa, Zea Mays
MFGFQKDNVSNQREHLVLLLANVHIMKVPKVDQQPKLDDKALDAVMKKLFKNYKKWCKYLGRKSSLWLPTIQQEVQQRKLLYMGLYLLIWGEAANLRFMPECICYIYHHMAFELYGMLAGNVSPMTGENVKPAYGGDEEAFLIKVVTPIYKVIEKEAERSKTMKSKHSHWRNYDDLNEYFWSVDCFRLGWPMRADADFFKTPKDAYLNLLNGENRSAGNTHWMGKVNFVEIRSFWHIFRSFDRMWIFLILSLQAMIIIAWNGGTPSDIFDAGVFKKVLSIFITAAILKLGQAILDLIFGWKARRNMSFAVKLRYILKLICAAAWVVILPVTYAYTWENPTGLARTIKSWLGDGQNQPSLYILAIVIYMAPNIVASMLFLFPFMRRFLESSNVKVITIIMWWSQPRLFVGRGMHEGAFSLFKYTMFWVLLLATKLTVSFYIEIKPLVQPTIDIMREPIRTFQWHEFFPHGTNNIGVVISLWAPIILVYFMDTQIWYALFSTLIGGIYGAYRRLGEIRTLGMLRSRFESLPEAFNERLIPSDANKSKGLRAAFSSRPKASGDERQKEKRAARFAQMWNVIITSFREEDLIDNREMDLLLVPYCKDRELDIFQWPPFLLASKIPIALDMAADSGGKDRDLTKRIKSDPYFSFAIRECYASFKNIINTLVFGQREKDVLAQIFAVVDQHIEDETLIKDLNMRNLPALSKKFVELLELLQKNKEEDLGQVVILFQDMLEVVTRDIMEEQDQLGTLLESAHGANSRKHEGITPLDQQDQLFAKAIKFPVDESIAWTEKIKRLHLLLTVKESAMDVPTNLDARRRISFFANSLFMDMPNAPKVRNMLAFSILTPYYKEDVLFSLQNLEEPNEDGVSILFYLQKIYPDEWKNFLERVGCKNEEGLREDEELEEKLRLWASYRGQTLTRTVRGMMYYRKALELQAFLDMAEDDDLMEGYRATEVMPEDSQLMTQCKAIADMKFTYVVSCQQYGIQKRSNEPCAHDILRLMTEYPSLRVAYIDEVEAPSQDRNKKIEKVYYSVLVKASVTKPDEPGQSLDQVIYKIKLPGNAILGEGKPENQNHAIIFTRGECLQTIDMNQEHYMEEALKMRNLLQEFEKKHGVRYPSILGVREHIFTGSVSSLAWFMSNQETSFVTIGQRVLANPLRVRFHYGHPDIFDRLFHITRGGVSKASKIINLSEDIFAGFNSTLREGNVTHHEYMQVGKGRDVGLNQISLFEAKIANGNGEQTLSRDIYRLGHRFDFFRMLSCYYTTIGFYFSTMVFW

SEQ ID NO: 50703 - protein, 85 aa, Zea Mays
MVARSSPASPGPGVRLNVLAASRRRCRLRRSCPSRAGFNIRSICVFFCVITTSTCVCLWCVSLTAPCVSVTACFSSASHSVEVKN

SEQ ID NO: 50704 - protein, 1045 aa, Zea Mays
MVSHYQLLYELALSLHLREPKNSHMPRSSRLRDKKKNEGERMIKETFVGSVIENNSFLSTLLDKSSCIIIPEIEFPLPSVPTTRAPEVSDKQGLIAGPCSISQQKAEETLVYGDEIDEIKEVENMSESTTSSACNQRKFYETKFGIVSSTAFCLSTSDIQIGVIGKGRSHQGGGLLDQGRLPCVQCGILSYACVAIIQPKEAAVQYVISRECMSSSAIHREIMESDDTSNRMVIAHQQGYAHQTDDNTIQNVSAAQVSDRCRQLYSSSTHGCTSALGLLASAYESSESDEEADAPNNISNNCENNNAANGATNIQSSRTSVQDENTNLQLYEEENNSRAIASLMQPVEDKSTAMTPVSMETNIIHLADQGESLTFHEQWHAYLDFDDLTASGVKASPNTSLGTAKAAMKTDALTLFKYSKDSCRMHVFCLEHALETWTRLEQIGGANIMLLCHPEYPRAESAAKVIAEELGMKHAWKDITFKKATREDTGRIQLALQDEDAEPTSSDWAVKMGINIYYSAKQSKSPLYSKQVPYNSIIYKAFAQENPDSFADGQRSSTTKKKVAGWWCGKKWMSNQVHPLLACEQVEQNHETVYSKTMLSASCDRMQEQSTRSTTLINQNSSKKITRRKEGDSVEKSRGKKKRCSASASDEAALHCSVYDQPVNSDNHAKYEDGDESVEARNTRHHQQYESLNKKSSLKRRKDNNRSNSFHELHKDNVDIDCRFDTDGTENTSIGDWDNSPPQGGDVKAVKSGARLLGTKRFSKEKGSNGLSNVNKKLVKMGKKISTKKQKNDKTNRQFQENHKKADIVDLLHEDDGDEGTYIDCNEIRKQKTDDVRVKSRGKMQSGKKKVSRCQASDGSHNGGKEMKLSSDIEVCNRRGDGTTAANFEEIPKEKADAVKVKPKMQGDKKKTSKHQAGDGDKGAKFSCDIEGCDMSFSTQHDLSLHKRDICPVKGCKKKFFCHKYLLQHRKVHLDERPLMCSFPGCAKTFKWPWARTEHMRVHTGVRPYACTEPGCTQTFRFVSDFSRHKRKTGHSCDKKKKRGL

SEQ ID NO: 50705 - protein, 554 aa, Zea Mays
MFGDVEVPAEVLTDGTLRCYAPAHQSGRVPFYVTCSNRVACSEVREFEYRDSEAHYMETSRSQANGVNEMHLHIRLEKLLTLGPDDHQMLVISSGNEKYEIMNAINSLMLDGKWSNQESSVKEVVSTARVQSLKKLVKEKLHQWLICKVNDDGKGPNVLCKEGQGVIHLVAALGYDWAIRPIMIAGVNVNFRDAHGWTALHWAASLGRERTVSVLIANGAAAGALTDPTSEFPSGRSPADLASVNGHKGIAGFLAESALTSHLSALTIRESNDSTVEACGLPFAEDLTGIDSVHLAGEGPDAESLEGSLSAVRKSTQAAARIFQAFRVESFHRKKVVEYGDDTCGLSDECTLSLVSLKNVKPGQHDTHLHSAAVRIQNKFRGWKGRKEFMIIRQRIVKLQAHVRGHQVRKNYRKVVWSVGIVEKVILRWRRKRPGLRGFRPEKQLEGPSQIQPAKAEDEYDFLHDGRRQAEARLQRALARVHSMSQYPEAREQYHRLTTCVAEMKQSRMMQDEMLSQAAGGADDFMAGLEDLICIDDAPPRCLPFGEAEPFYIR

SEQ ID NO: 50706 - protein, 126 aa, Zea Mays
MVRMNVLVYATCFADAASSSELSLAYVKLIQQLAVFKGYSAAFCALKLAEKKFPSSTSLHIQLLGMQILHERALHRGHLKVAQQICDEFGVLSSSVSGVDIELKTEFSVRRARTLLAAKQFSQYMN

SEQ ID NO: 50707 - protein, 758 aa, Zea Mays
MSLTAAPVAFIGLDELSVELAASFLRSGACVRSFTPEAERSPSAALAELNGLLQCASPVEAARDAALVVVLSDAGGVDELFFGVEGIAKGLCAGSIVLIHSTLLPSQLEKLEQELTDQKKDVFLLDGYIFTGLSDELKQQIIIVASGRQDIAEKASKFFHGLYKTIYFAEGEFCTSRKIRMVNDLLEGIHFVASIEAMYLGVRAGIHPTIIYDIISNAAGSSRIFVELVPKLLSEDPLLIDFLKSTRKKASHVMDMSKSVTFPLPLLGVAYQQLVHGSSAVTGDGSASPLKVWEASFGVNIVDAAGEQIYDASKLADQLVAESKAAKRIGFIGLGAMGFGMASHLLKSGFCVVAYDVYKPTMARFADLGGSTKGSPEEIAKDVEILIIMVANESQADSVLFGNAGAVPVLSAGTSVILSSTVSPGFVIHLNRRLEAECRQIKLVDAPVSGGVKRAADGTLTIMTSGTDEALHCTGSVLSALSEKLYVIKGGCGAASSVKMVNQLLAGVHIASAAEAMSFAARLNLRTRRVFEIMQHARGYSWMFGNRVPHMLDNDYTPYSAVDIFVKDLGIVSCESSNSRIPVHVSSIAHQLFISGSASGWGRYDDAAVVKVYETLTGVKVEGKAPMLSKEDVLQSLPSEWPEDPIDNLVPIASHSSKKFLVVLDDDPTGTQTVHDIEVLTEWPVEALVEQFLKLPTCFFILTNSRSMTADKAMLLVQTICKNLKAAAEKVPGVSYTIVLRGDSTLRGHFPEVRWMLG

SEQ ID NO: 50708 - protein, 418 aa, Zea Mays
MEISPLEPFTCWGITLCCLIYYYVSIKGKAGDWGDGFKSAYFQLALRSLRSLGANQVHPKNWYPIPLVFCRPWGKLPENVPCHPKLADFANCMKKKGRGMSIFVSIIDGDYHELAEDAKTACRQLDAYIDYKRCEGVAEIIVAPNMSDGFRSIVQTMGLGNLKPNIVVMRYPEIWRRENLTQIPSTFVSIINDCIIANKAVVIVKGLDEWPNEYQRQYGTIDLYWIVRDGGLMLLLSQLLLTKESFESCKIQVFCISEEDTDAEELKADVKKFLYDLRMQAEVIVVTMKSWESHMESSSNGAQQDNSHEAYTSAQQRIRTYLDEMKETAQTERQLLMENGRQVVNEQKVDKFLYTMFKLNSTILRYSRMAAVVLVSLPPPPLYHPSYFYMEYMDLLVENVPRMLIVRGYTRDVVTFFT

SEQ ID NO: 50709 - protein, 438 aa, Zea Mays
MEDVLTPPPQPELVGEKRKRDETSLDASIEDAPAAPASTGGAEDAAGSDVARHPMWKTSLCSYFRRRGAGAEECSHGESCRYAHTEEELRPRPDGTWDPTSDRAKKLRKVAAEAQEEAEEEVTVDEQSLEKCLVGLPMGWTADRLKPFLQDQGISYAIAKKKKGMTVGFVTFQSVEQLTNAVQILKKNPSGGKEIKIVDANRRSHQKAHDGALVSNTGTTTENGSSPTTPAEETSVLESVSSSKKGARDAVTPLANMTYIDQLEHKNQSMAQILKKLTRNARKACPPAIPHPDWVFKSKEIGGLPCKFEGILESPVVNGYRNKCEFSVGYSLEGKKTVGFMLGNFREGVTAVEEPVNCPNVSEISCKYAQMFQDFLQPSSFPLWSRIDNSGFWRQLTVREGRCPAEAVVSQNAESQISEVMLIVQDDPSSPHSSQANN

SEQ ID NO: 50710 - protein, 668 aa, Zea Mays
MPPPAAMLLLTAASGPPTLSLTLAARRAPLRAPSRRRLRALRPARIRAAAAIGGEFGGLGRRRVVVGEFIERLRNVLPGGSWWRLEDGDEAGDGAGRAEGSGTTAVSALRRMWALVAGDRLVIYVGFASLVGAALSEIAIPHLLAASIFSAQNGGAVFYRNAKLLVVLCLVSGVFSGIRSCCFGVANMILDISFFDEETVGDLTSRLGSDCQQVSRVIGNDLNLISRNLLQGAGALIYLLVLSWPLGLCTMFVCATLSAIMLVHGRFQKRAAKFAQEFTANANNVAQEVITLVRTVRVYGTEKQEFKRYANWLDKLYDVSFRQTVAYGGWSLSLNYLYHSTQVIGVVIGGLAIMSGKLTAEQLTKFTLYAEWLILSTWWIGDNWSSLMQSVGASEKVFRLMDLLPSKQLSSEGLKLEKLKGQIQYADVSFSYPSRPTVPILGGLNLTLNPNEVVAIVGLSGSGKSTIINLLLRLYEPTNGQILIDGVPLTELDIRWFRERIGFVGQEPRLFRMDISSNIKYGCPRDVSHEEVIWAAKQAYAHDFIMALPDGYNTIVDDALLSGGQKQRVAIARALLRDPSILLLDEATSALDAESEHYVKSVITKVSRDSKAKRTVVIIAHRLSTIQTADRIIVMENGNIVEDGKHIDLIEKGGLYSRLARRQNDDLK

SEQ ID NO: 50711 - protein, 378 aa, Zea Mays
MPPPAAMLLLTAASGPPTLSLTLAARRAPLRAPSRRRLRALRPARIRAAAAIGGEFGGLGRRRVVVGEFIERLRNVLPGGSWWRLEDGDEAGDGAGRAEGSGTTAVSALRRMWALVAGDRLVIYVGFASLVGAALSEIAIPHLLAASIFSAQNGGAVFYRNAKLLVVLCLVSGVFSGIRSCCFGVANMILVKRMREELFDSILSQDISFFDEETVGDLTSRLGSDCQQVSRVIGNDLNLISRNLLQGAGALIYLLVLSWPLGLCTMFVCATLSAIMLVHGRFQKRAAKFAQEFTANANNVAQEVITLVRTVRVYGTEKQEFKRYANWLDKLYDVSFRQTVAYGGWSLSLNYLYHSTQLCVGHWSGDWRPSNHVWEVNC

SEQ ID NO: 50712 - protein, 514 aa, Zea Mays
MVSLTCSGIRSCCFGVANMILVKRMREELFDSILSQDISFFDEETVGDLTSRLGSDCQQVSRVIGNDLNLISRNLLQGAGALIYLLVLSWPLGLCTMFVCATLSAIMLVHGRFQKRAAKFAQEFTANANNVAQEVITLVRTVRVYGTEKQEFKRYANWLDKLYDVSFRQTVAYGGWSLSLNYLYHSTQVIGVVIGGLAIMSGKLTAEQLTKFTLYAEWLILSTWWIGDNWSSLMQSVGASEKVFRLMDLLPSKQLSSEGLKLEKLKGQIQYADVSFSYPSRPTVPILGGLNLTLNPNEVVAIVGLSGSGKSTIINLLLRLYEPTNGQILIDGVPLTELDIRWFRERIGFVGQEPRLFRMDISSNIKYGCPRDVSHEEVIWAAKQAYAHDFIMALPDGYNTIVDDALLSGGQKQRVAIARALLRDPSILLLDEATSALDAESEHYVKSVITKVSRDSKAKRTVVIIAHRLSTIQTADRIIVMENGNIVEDGKHIDLIEKGGLYSRLARRQNDDLK

SEQ ID NO: 50713 - protein, 244 aa, Zea Mays
MGSASSDGLREHLLDVDGGGAAAVPKIRVRGLRRRADATGEEILRGVHLDVPRGAVMGVIGPSGSGKSTLLRALNRLWEPAPGAVLLDGADICALDVLALRRKVGMLFQLPAMFDGTVADNVRYGPQLRGKKLTEAEVKSLLHLADLDPALCSKPASELSVLLLDEPTSALDPISTQNIEEAIVRLKKTRGLTTVIVSHSVKQIQRIADLVCLVVAGEVVEVLAPSDLSDAKHPMARRFLELSG

SEQ ID NO: 50714 - protein, 628 aa, Zea Mays
MALREHYSCHICQRQHPEQYDYFRNYDDLELHFRKDHFLCEDEACLAKKFVVFLSEAELKRHNAMEHGGRMSRSQRNAALQIPTSFIYRRNEQAQRRGRGRGRNALHDRFDSHISSSAQNGQATADRRLDSVSGSFQSLSIGSSSGGAEVGQGSRTGQVLEQLSFPPLLDPDIPDNNVDSFHDETSFPSLSEQQSRYALALSQSARGTARLGDESLFPPLPGSSGSNNNRGAGSVQQGLQSLAKSTLAARLQQRSKGPVKVLNTARPRPPENVEALSSSTQTWPTPDQGLVLSGYSQLRSGTQPTRENAMPTISSNTVWNPVAPNKMKHSVSTPNLVSGGSSAQVSLSTAYGSNKSQDPPQGNQTLPVPEDFRAANKTLVERMRSALGMDEDRYSAFKEIAGEYRQGIIGTLEYLSYVEQFGLSHLVPEMARLLPDPQKQRELADAYYTNTRFKSLQENGGGTSSQEGNRKKKGKGKAPVTESSAANDVNSALADNILETVRRLQSNQQAREGGAEVLSKDGYRPSKGVQPAAGSSSNLDSDTSSNTKSSGAKDNIGKGGGNKQPKKTAKFLRARLGDNSLATLDLSRPSASPERPERELQGPETGLPARGAWKNGGGQKLFSSNGRK

SEQ ID NO: 50715 - protein, 355 aa, Zea Mays
MQIVSKLGSSFSVVPFVIVVASCTILAMVASLPVAQLLFFHILLIKKGISTYDYIIALREQEQDDLSGQQSPQMSRVSSYTGLSSASSFGPLRRGSWCTPPRLFLEDQAASSHNSATKRKEDQGKRKKGSGAVKISPWALARLNAEEVSRVAAEARNKSKVLVPIRKDDYSRGHETDSSYGGTSSGRIDLGPDSKRRTNRRGRQPSDLFLKPVAKISTDAIDSASSDMSNLAPLQLEARSAFHPSRAASSVNVGGSSPDSSLDSPDLHLYRVSAVSSSGAEDLQLTALTAPGSTSHQGIQLSRSTSDGYEASGGEDSDRIPSQIVHRSSNWASIILNSDQSASSSGILVPKNRLS

SEQ ID NO: 50716 - protein, 334 aa, Zea Mays
MAVISSTYESSIGLASYIQLAHYVDQQSSIVSRIRNKDTCRATAHGLGTYQWLREDVSEQKLKIHASPLGDGIRATVEDAHGYLHHLNINNEKIKSTYGEEKHRSYSIQVDVDDCSYLVKLREAGDHTNEKVVLLLHGFLGTSEDWVPTMKALAPSARVIAIDLPGHGESQILQRHKNSEQPAVTVQLVADLLLKLIYHITNGEVVVVGYSMGARIALHMALNQDHKIRGAVTISGSPGLRDEASRRRRIAIDKSRAQFLMCCGLECFLQTWYSGKLWTSLREHPEFNSLVRTRSKHKNIKALAKVLADSSVGRQKSPVGRPEALEEAFTRRCW

SEQ ID NO: 50717 - protein, 203 aa, Zea Mays
MYYPQPTVSLAAAVALLRPSLRRHSQRASSLLRSSTPPPWVSARRRTAVSDDFFTVELDATGVEPEPDSIDDGLPSPWEGAVVYRRDAAVQHLEYASTLERLGLGDLSSPDSRARAADLGLAGGTLDSTGAQPRTPVLVSVDVTRRRGRLRLDGIVRTVITLGCFRRPSRGGTRPRHDFSRGRRQRWCFASLRHGWRSRYRLG

SEQ ID NO: 50718 - protein, 1051 aa, Zea Mays
MLVVKNSNSPGHLNEANCVIFMKNVGVERMEMGCFWSVALLGARSIVLDPANPSVKSQAKSMAAAAVEGNPRRMHWKQKSEFLKKNKAAVITPTKSVLKVKLSNNIPKGNISSSPAPSPEQPGESNPSFPVGSDANNEVITPFDFNKEENSKYEKSVRNKMSNKDINRRASSHAANVDDNTNEVRSYLISVLSKNPKGMGLKALEKAVADAFPNASKKIQSIIKNIANYQGPERYVLKSGLEVESSKSHVSEGVRSISKKIEESAPSLTIDDPDICERIDIVGSLVAPTDGKLSNDSEGKAGTSSDSGSDSDSDSSNSGSDSGSQSRSAAETGSGSSSNSDSDGSSSSKEGSDAAVDITSDDDKANIAHTKVVDDLNLSSSPRDLKRLDVDDEQIDIETNLDYRSTSPHIGLNKFNTGNDDAAAEGFSAGNLSKPSEMSGSKNMTSTRMDSIGVDTKYNEMSFLDNLFDDSMRIASENSPKGEAGQLTVQHVNKRKSTSKDESKFGPVSIAKPKLKRSSGSENSTAKPESAKKVKADIASSIGSLSEHKRSLPPEKYSNDRFNKGTWDVSRHASQDSSPAMKGRPLAPGNLQRIDQSPNLPVPTMHSERTKENTVKSSLKKKSDKSQKPWHGMDGDFGPGYSHGVDHHANFDGSDDFSTRKRSRHGNLLIDDKMFKRSKDANANVDSMNLTKSSRETVVPDEITAFPESNECNGEQSNSQRDNVERSPYGKKKLQREFSDLELAELRKTSLENDDGRIRKQFESSSSKSLDAKLNVINSYPSMNDRKVPVTVFNDTKRKPSPQEYGIGGHINQEGFPRKAAGYEFDDNRPQQNIPDSQHLPRIYNTDFENLIYPDSSGKTSKRETRMTHGGMLEYADIQKKKTTSRLPQNGTNNVRVSRMQKSISPSDNDERSRNDSLIETKTGRKRRGSSSDDDNLFFSKYDKDAPELKDPIKDFSQYKDYVQEYNEKYGVYSYLNSQIDKTMSEFLKIQDDLNVGKERGKEQYYNTLERLRDMYHESGTRHKLMKKVFVLLHEELQNNSQLRSDDELHY

SEQ ID NO: 50719 - protein, 114 aa, Zea Mays
MTESAAVGTRGFNTSKHKKYGSVGLLAPNMHARIVHVETGCSLPPGSCGELWLHGPAIMKGYLNHVDPCAINGGWLRTGDIAYFDFDGYLYIVGRLKEVIKYKGFQLQLTWKQF

SEQ ID NO: 50720 - protein, 354 aa, Zea Mays
MQDAVATHGPANAAAGATFYCAAAGVYASTHPPVALPSDPSLSLVPHIFARLPAARPDAPALVDAATAEALSRADLRRLVSALAAGLRRRRGLREGDVVLLALPNSIAFPVAFLAVLAAGSIATTMSPFSAPAEIAARVRDTSPALVFATLDNVGKLPPLRVPVVLVPDAFHLADEGAPEFAPFRELLLLDSEPLPGPSVGQDDAAAILYSSGTGGRSKGVVLTHRNLIATVELFVHFEASQYAAPACDNVYLAALPMFHVYGLSLFAVGLLSLGSTVVVMKRFDAGEAVKTIRRFKVTHFPVVPPIMAALVHTTKPAAMPLECLVQVSTGAAPSSRRLIDDFVKAFPHVDLIQ

SEQ ID NO: 50721 - protein, 374 aa, Zea Mays
MQDAVATHGPANAAAGATFYCAAAGVYASTHPPVALPSDPSLSLVPHIFARLPAARPDAPALVDAATAEALSRADLRRLVSALAAGLRRRRGLREGDVVLLALPNSIAFPVAFLAVLAAGSIATTMSPFSAPAEIAARVRDTSPALVFATLDNVGKLPPLRVPVVLVPDAFHLADEGAPEFAPFRELLLLDSEPLPGPSVGQDDAAAILYSSGTGGRSKGVVLTHRNLIATVELFVHFEASQYAAPACDNVYLAALPMFHVYGLSLFAVGLLSLGSTVVVMKRFDAGEAVKTIRRFKVTHFPVVPPIMAALVHTTKPAAMPLECLVQVSTGAAPSSRRLIDDFVKAFPHVDLIQGSMVLNLTATRPACSDARLQ

SEQ ID NO: 50722 - protein, 937 aa, Zea Mays
MWNGVPPPPPPPLQMAAAPPPPGTTVPGAGQPPPPPPPPAGASQGGKPLTPMELEAQLVEKARKWHQLNSKRYGDKRKFGFVEAQKEDMPPEHVRKITRDHGDMTSKKYRHDKRVYLGALKFVPHAVYKLLENMPMPWEQVRHVKILYHITGAITFVNEIPWVVEPIYLAQWGTMWIMMRREKRDRRHFKRMRFPPFDDEEPPLDYADNLLDVEPLEAIQLELDEEEDAAVYEWFYDHKPLMKTKLINGPSYRKWHLSLPIMATLYRLAGQLLSDLIDRNYFYLFDMESFFTAKALNMCIPGVMIGIDLAYNLHSAFGNWFPGSKPLLQQAMNKIMKSNPALYVLRERIRKGLQLYSSEPTEPYLSSQNYGEIFSNQIIWFVDDTNVYRVTIHKTFEGNLTTKPINGAIFIFNPRTGQLFLKVIHTSVWAGQKRLGQLAKWKTAEEVAALVRSLPVEEQPKQIIVTRKGMLDPLEVHLLDFPNIVIKGSELQLPFQACLKIEKFGDLILKATEPQMVLYNIYDDWLKSISSYTAFSRIVLILRALHVNNEKAKMLLKPDKTIVTEPHHIWPTLNDEQWLKVECALRDLILSDYAKKNNVNTSALTQSEMRDIILGAEIAPPSQQRQQIAEIEKQSRETTQLTAVTTRTTNVHGDELIITTTSPYEQQAFASKTDWRVRAISATNLYLRVNHIYVNSDDIKETGYTYIMPKNILKKFICIADLRTQIAGFLYGLSPQDNPQVKEIRCIAMPPQHGTHQMVTLPANLPEHEFLNDLEPLGWMHTQPNEAPQLSPQDLTSHAKILENNKQWDGEKCIILTCSFTPGSCSLTAYKLTPSGYEWGRSNKDNGSNPHGYLPTHYEKVQMLLSDRFLGFYMVPDNAPWNFNFMGVKHDPQMKYNMKLGMPRDFYHEDHRPTHFLEFSNIEEGEAAEGDREDTFT

SEQ ID NO: 50723 - protein, 1255 aa, Zea Mays
MWNGVPPPPPPPLQMAAAPPPPGTTVPGAGQPPPPPPPPAGASQGGKPLTPMELEAQLVEKARKWHQLNSKRYGDKRKFGFVEAQKEDMPPEHVRKITRDHGDMTSKKYRHDKRVYLGALKFVPHAVYKLLENMPMPWEQVRHVKILYHITGAITFVNEIPWVVEPIYLAQWGTMWIMMRREKRDRRHFKRMRFPPFDDEEPPLDYADNLLDVEPLEAIQLELDEEEDAAVYEWFYDHKPLMKTKLINGPSYRKWHLSLPIMATLYRLAGQLLSDLIDRNYFYLFDMESFFTAKALNMCIPGGPKFEPLYRDMEKGDEDWNEFNDINKLIIRQPLRTEYRIAFPHLYNNRPRKVKLGIYHTPMIMYIKTEDPDLPAFYYDPLINPITSTNKVDRRERKAAEEEDDEDFCLPEDVEPLLKQTELYTDTTAAGISLLFAPKPFNMRSGRTRRAEDIPLVSEWYKEHCPPAYPVKVRVSYQKLLKCYVLNELHHRPPKAQKKKHLFRSLQATKFFQTTELDWAEAGLQVCKQGYNMLNLLIHRKNLNYLHLDYNFNLKPVKTLTTKERKKSRFGNAFHLCREILRLTKLVVDANIQFRLGNVDAFQLADGLQYIFSHVGQLTGVMIGIDLAYNLHSAFGNWFPGSKPLLQQAMNKIMKSNPALYVLRERIRKGLQLYSSEPTEPYLSSQNYGEIFSNQIIWFVDDTNVYRVTIHKTFEGNLTTKPINGAIFIFNPRTGQLFLKVIHTSVWAGQKRLGQLAKWKTAEEVAALVRSLPVEEQPKQIIVTRKGMLDPLEVHLLDFPNIVIKGSELQLPFQACLKIEKFGDLILKATEPQMVLYNIYDDWLKSISSYTAFSRIVLILRALHVNNEKAKMLLKPDKTIVTEPHHIWPTLNDEQWLKVECALRDLILSDYAKKNNVNTSALTQSEMRDIILGAEIAPPSQQRQQIAEIEKQSRETTQLTAVTTRTTNVHGDELIITTTSPYEQQAFASKTDWRVRAISATNLYLRVNHIYVNSDDIKETGYTYIMPKNILKKFICIADLRTQIAGFLYGLSPQDNPQVKEIRCIAMPPQHGTHQMVTLPANLPEHEFLNDLEPLGWMHTQPNEAPQLSPQDLTSHAKILENNKQWDGEKCIILTCSFTPGSCSLTAYKLTPSGYEWGRSNKDNGSNPHGYLPTHYEKVQMLLSDRFLGFYMVPDNAPWNFNFMGVKHDPQMKYNMKLGMPRDFYHEDHRPTHFLEFSNIEEGEAAEGDREDTFT

SEQ ID NO: 50724 - protein, 643 aa, Zea Mays
MLLVMGNPGRSRQLSALVASAAILLSLSALPICRPYTYEQDVFAINGLYTALGAPQLPNWTSNGGDPCNEGWQGVSCVASNITSIILSGANLGGQLGNTLGNFTSLITFFLSANQLSGSLPSTLSSLTLLTSMSLNSNHLTGAIPDVFSALTGLANLDFSDNNLTGPLPPSMGNLTSLTSLHIQNNQISGTLNVLQDLPFQDLNVENNLFSGPVPVKLLNLPNFKKDGNPFNTSIAPSAQPPIAPTPLPSIPPSSGHVPSKEPAHSSSVPEKRSRDDIYMKNKIGRVPQKLGEPKIKEPPLKLKNDAEKETSNVVYDPSPRDGAELRFITDSFSEENIIRDSRFGKVYLAKLPDGELLEILKIDSSNSKVPVDAFLELVVRISELRHPNILGLVGYCAEFEQRLLVYEYCSKMTLHDELRHVDDSSKPLSWNARLQVASEAAKALQHLHDGCQPPVVHQNFEPSVVLLNSTLVVHISECGLASLASKSVSQLSGHTLFHYEAPEVHESGSVSDRSDVYSFGVVMLELLTGRKPYDSSYPRAEQHLVRWATSQLYDIDAITKMVDPSIRGQCSDKALSRFADIISRCIQHEPEFRPPMSEVVQDLTRMMPLTTIDAVVGYFGQCKMGGTQWQDAETAPRFVHCQ

SEQ ID NO: 50725 - protein, 410 aa, Zea Mays
MWFMIQVQGMGQNLDSSPTAVPLAVTMNKKEHVIDMEKADNFVEDQLHPPQPMALRTEKVTVNPSVRTRRGRVPSVEKVESTTTVKSFSIASLQQYTNSFSEENIIRDSRFGKVYLAKLPDGELLEILKIDSSNSKVPVDAFLELVVRISELRHPNILGLVGYCAEFEQRLLVYEYCSKMTLHDELRHVDDSSKPLSWNARLQVASEAAKALQHLHDGCQPPVVHQNFEPSVVLLNSTLVVHISECGLASLASKSVSQLSGHTLFHYEAPEVHESGSVSDRSDVYSFGVVMLELLTGRKPYDSSYPRAEQHLVRWATSQLYDIDAITKMVDPSIRGQCSDKALSRFADIISRCIQHEPEFRPPMSEVVQDLTRMMPLTTIDAVVGYFGQCKMGGTQWQDAETAPRFVHCQ

SEQ ID NO: 50726 - protein, 737 aa, Zea Mays
MLLVMGNPGRSRQLSALVASAAILLSLSALPICRPYTYEQDVFAINGLYTALGAPQLPNWTSNGGDPCNEGWQGVSCVASNITSIILSGANLGGQLGNTLGNFTSLITFFLSANQLSGSLPSTLSSLTLLTSMSLNSNHLTGAIPDVFSALTGLANLDFSDNNLTGPLPPSMGNLTSLTSLHIQNNQISGTLNVLQDLPFQDLNVENNLFSGPVPVKLLNLPNFKKDGNPFNTSIAPSAQPPIAPTPLPSIPPSSGHVPSKEPAHSSSVPGGSTSGSGKHTTLKLVGYILIGVVLAVVLVLIAMYCLSKYKEKRSRDDIYMKNKIGRVPQKLGEPKIKEPPLKLKNDAEKAPNVVSDGREEHKLKVPTSETSNVVYDPSPRDGAELRFITDSVRTRRGRVPSVEKVESTTTVKSFSIASLQQYTNSFSEENIIRDSRFGKVYLAKLPDGELLEILKIDSSNSKVPVDAFLELVVRISELRHPNILGLVGYCAEFEQRLLVYEYCSKMTLHDELRHVDDSSKPLSWNARLQVASEAAKALQHLHDGCQPPVVHQNFEPSVVLLNSTLVVHISECGLASLASKSVSQLSGHTLFHYEAPEVHESGSVSDRSDVYSFGVVMLELLTGRKPYDSSYPRAEQHLVRWATSQLYDIDAITKMVDPSIRGQCSDKALSRFADIISRCIQHEPEFRPPMSEVVQDLTRMMPLTTIDAVVGYFGQCKMGGTQWQDAETAPRFVHCQ

SEQ ID NO: 50727 - protein, 422 aa, Zea Mays
MLLVMGNPGRSRQLSALVASAAILLSLSALPICRPYTYEQDVFAINGLYTALGAPQLPNWTSNGGDPCNEGWQGVSCVASNITSIILSGANLGGQLGNTLGNFTSLITLDLSNNNIGGTIPDGLPLTMQRFFLSANQLSGSLPSTLSSLTLLTSMSLNSNHLTGAIPDVFSALTGLANLDFSDNNLTGPLPPSMGNLTSLTSLHIQNNQISGTLNVLQDLPFQDLNVENNLFSGPVPVKLLNLPNFKKDGNPFNTSIAPSAQPPIAPTPLPSIPPSSGHVPSKEPAHSSSVPGGSTSGSGKHTTLKLVGYILIGVVLAVVLVLIAMYCLSKYKEKRSRDDIYMKNKIGRVPQKLGEPKIKEPPLKLKNDAEKAPNVVSDGREEHKLKVPTSETSNVVYDPSPRDGAELRFITDSCTFGCYNE

SEQ ID NO: 50728 - protein, 351 aa, Zea Mays
MKLRLHLFVLCVIIIFLVYNMANFQHKQTTLEAKSHPFDTVTVSDRDAVKVPQKAEARIGYLPHGIVESNSDMDLKPLWLTTSARSKKPKQNDNFLIAIAAGINQKKTVDAIMKKFLPENFTAILFHYDGNVNGWNDLPWSKSVIHIAASNQTKWWFAKRFLHPAVVSIYQYIFLWDEDLEVDNFSPRRYLNIVRSEGLEISQPGLDSKLSEIHHRITVRKKAGTFHRRVSRANKKCSREGPPCSGWVEGMAPVFSKSAWQCVWHLIQNDLIHGWGIDYKFGYCAQGDRTKNIGVVDSEFIVHRGVQTLGGSTITKDGIRGKNAKPLGQKAAQIQRSRGRAPGLDMRTKVS

SEQ ID NO: 50729 - protein, 392 aa, Zea Mays
MKLRLHLFVLCVIIIFLVYNMANFQHKQTTLEAKSHPFDTVTVSDRDAVKVPQKAEARIGYLPHGIVESNSDMDLKPLWLTTSARSKKPKQNDNFLIAIAAGINQKKTVDAIMKKFLPENFTAILFHYDGNVNGWNDLPWSKSVIHIAASNQTKWWFAKRFLHPAVVSIYQYIFLWDEDLEVDNFSPRRYLNIVRSEGLEISQPGLDSKLSEIHHRITVRKKAGTFHRRVSRANKKCSREGPPCSGWVEGMAPVFSKSAWQCVWHLIQNDLIHGWGIDYKFGYCAQGDRTKNIGVVDSEFIVHRGVQTLGGSTITKDGIRGKNAKPLGQKAAQIQRSRGRAPGLDMRTKIRRKSRSELRDFQKRWDRAAREDRTWVDPFARSRRKRKNRNPQ

SEQ ID NO: 50730 - protein, 268 aa, Zea Mays
MDVLYMNLVVQHSPWSQGIPRHIFPELFSFAKNSKMTIKEVKDQEQFHDLFHLPVSDQAFDQFLVLKGSWEQIILNNVHDRWKYIWGSDKFSSQKAYRSFMGQMQTHPIYKLVWKSKCQPKHRVFYWLWLKNRLNTRNMLRRRNMELDSYSCENCLWQREETLYHLFLRCNFAKACWNSIGITPPRISNPEEASVNLKHQLNVPFSMEITILMTWSIWKSRNEWLFSNRDPSVLRCTQEFSRELRLIIHRARGEFDTSIPNWLNLWQI

SEQ ID NO: 50731 - protein, 490 aa, Zea Mays
MVSYKWLSRNFSVSSNDAKRLLQDFVNKHGTDLQVIYSVSGWLKSNPQNYCVKLISGPKLEEARQIFKDSCSVQIYSIQACIPKDTAVLWNPEFVQAEELFNQPFDYENCLRDNRFCGVLNSFVKRTSNGKHVSSLPPKPLNSAAAAAQSKPSVTPKEQFVTARRQDLPVSSKQGADTKSEKDNSTVLDKAGNGPVVKEQSVDAHASKSKAQNGKAMPSNGGSLANMWGRASAKPKPPSTTNSTAVASVAATADAQICAKEEADGNSSDDEHGIKYKRGSTNANNRKRRAVFDYSDDEEDDNIVSIASPELPKQHTPDPVVGIAEDAEVNQKNLETEHHVPNNGKGSSTGVDSDFTSECKIKTIDPMNDSGITLKEKSSDPPINDKKQDSAAEPASTSPKRRKVLKTRIDERGREVTEVVWENEASADDKAEQNVNTIDATASGATVPSKPKPATNADKSKAPSKTAAGNKKAAKAGAKQGSIMSFFKKA

SEQ ID NO: 50732 - protein, 705 aa, Zea Mays
MDFYVVLERAGYRVARRRRCKSRVGIQHRVTKEDAMKWFQVKELLLLLLRGRAHRDRSRRRNAEQVGPLVQPEDADTPARETNAQICLADVWGPPWRGLRPPRPVRRDPLCLCQGNREPPRRERENRRLVAHPRLHAQNPKFPIPIPRALFFVYLSPDSEGNPRRHARVLEPSLPTPRFGSPSLEGSGTFWRGRMAVVDQSLLPQIHALFSDPLRVVSYKWLSRNFSVSSNDAKRLLQDFVNKHGTDLQVIYSVSGWLKSNPQNYCVKLISGPKLEEARQIFKDSCSVQIYSIQACIPKDTAVLWNPEFVQAEELFNQPFDYENCLRDNRFCGVLNSFVKRTSNGKHVSSLPPKPLNSAAAAAQSKPSVTPKEQFVTARRQDLPVSSKQGADTKSEKDNSTVLDKAGNGPVVKEQSVDAHASKSKAQNGKAMPSNGGSLANMWGRASAKPKPPSTTNSTAVASVAATADAQICAKEEADGNSSDDEHGIKYKRGSTNANNRKRRAVFDYSDDEEDDNIVSIASPELPKQHTPDPVVGIAEDAEVNQKNLETEHHVPNNGKGSSTGVDSDFTSECKIKTIDPMNDSGITLKEKSSDPPINDKKQDSAAEPASTSPKRRKVLKTRIDERGREVTEVVWENEASADDKAEQNVNTIDATASGATVPSKPKPATNADKSKAPSKTAAGNKKAAKAGAKQGSIMSFFKKA

SEQ ID NO: 50733 - protein, 140 aa, Zea Mays
MVSWRRSASWLSSASRSSLGTAVGGEAKVTPEADPAAQHDEADEERWSRLLPELLTEIMRRVDAGAERWPPRRDVVVCACVCRRWRDAAVSVVRPPLECGRITFPSSLKQPGPRDAPMHCFIRRDKKNSTFSLYLSLTQA

SEQ ID NO: 50734 - protein, 209 aa, Zea Mays
MLMLPSVTMLVVLLRTDAVDAAGNTTAAIGKGFAIGSAALVSLALFGAFVSKAGVKVVDVLSPKVFIGLIVGAMLPYWFSAMTMKSVGSAALKMVEEVRRQFNTIPGLMEGTAKPDYATYWKISTDASIKEMIPPGALVMLTPLIVGTLFGFETLYGVLAGALVSGVQPSFSRGCDFLFHCIGYDLRPLSHPIRRPSACARLVFSVSPP

SEQ ID NO: 50735 - protein, 357 aa, Zea Mays
MPLGMLVCSNVAIVTVALTAQWPWAADIIAVCTSLLDTLPAVTTPTERADDDDEMPMDVNIKINLDVDLERQITAAIDSKLLQHLVNALFRGTLSTNDSDLSGPSDAEVDAVGSICAFLHVTFNTFPLERIMTVLAYRTEIVPALWKFIKRCHASRRWPFFLKFASSLPADSPGWLLPMSVFCPIYKHMLKIIDTGEFYEQEKPLSLKDLKSLVLILKQTPGEALILGGWALWQLLWVIPSSSTQKVSPNPSGLKKLSVENVKTRARVGLSELLTQLQDWNSRLPFTAASDFYSQEATSENFVSQAILGNTRASEIIKLAPFLAPFTSRVKIFTRFKIRRSRLLEDAFDQLSLLSEE

SEQ ID NO: 50736 - protein, 443 aa, Zea Mays
MLVASHVGHHPCCCLKVDPRWSFSSQLLSIPFLWHRLPQLKKVFSVNGLNKYYIHQIACLLPSLVDVLPNDISANHPGYACVLANVLEAATWILSDAKLASDSAADIIAVCTSLLDTLPAVTTPTERADDDDEMPMDVNIKINLDVDLERQITAAIDSKLLQHLVNALFRGTLSTNDSDLSGPSDAEVDAVGSICAFLHVTFNTFPLERIMTVLAYRTEIVPALWKFIKRCHASRRWPFFLKFASSLPADSPGWLLPMSVFCPIYKHMLKIIDTGEFYEQEKPLSLKDLKSLVLILKQALWQLLWVIPSSSTQKVSPNPSGLKKLSVENVKTRARVGLSELLTQLQDWNSRLPFTAASDFYSQEATSENFVSQAILGNTRASEIIKLAPFLAPFTSRVKIFTSQLTCSRQSTSHSALTRQRFKIRRSRLLEDAFDQLSLLSEE

SEQ ID NO: 50737 - protein, 1426 aa, Zea Mays
MNINDMEIVLSIMKNEGYDEIVPDPESAEIIFINTCAIRDNAEQKVWQRLNYFWFLKREWKANVAEGRAKSMRPPKIAVLGCMAERLKEKILDSDKMVDVVCGPDAYRDLPRLLQEVDYGHKGMNTLLSLEETYADITPVRISDNSITAFVSIMRGCNNMCSFCIVPFTRGRERSRPVSSIVREVGELWKVGVKEVMLLGQNVNSYNDTSEVEELEPGKNWQLSEGFSSMCKVKNMGLRFADLLDRLSLEYPEMRFRFTSPHPKDFPDELLYLMRDRYNICNLIHLPAQTGSTAALERMRRGYTREAYLELVHKIRDVIPDVGLSSDFITATAGWRLQQCSRRAGLQEKGQGAVAAGVAAGFCGETEDEHAETLSLVRAVGYDMAYMFAYSMREKTHAHRNYEDDVPEGVKQRRLMELINTFRETTKKNYDSQVGTVQLVLVEGPNKRAPKTEVIGKTDRGHKVSFARVPVPHTFEGEEAREPAVGDFVEPNFCAVLVLPEQILCSVAKSSIRANSKPQIHSTTLQIKTKLNDSREPSTVDHLQPSIRGRTVQTRIKSNGRKYPQSPKPRSLPTNATLCHPPPSMAMASSPACHFRHPPRLRLLLPLSTSAPHPWLYSWSHPRQRGRLRAPPAALDLRPEPSPSSDSDDEDAVGASRSSGRSTMSLILSRLRRAGYSGEDPRAAAPPHPPRGSVEDVFRADDGVLPNARGGFDADDEERALGDARFPWERPMPPPEAAPRSARSPTWMAELTLPAAELRRLRHAAIRIKSRTKVGGAGVTREIVEKIKEKWKTEEVVRVKVSGTPALNMRLFHEILERKTGGLVIWRSGTSVSLYRGVDYDEPEPTKKSKKNSQSLAMDFPIKGSSNPSLLPTETANSVRDSNVALVSNAAKEELVVQAPEIKYEDEIDKLLDELGPRYTDWPGSDPLPVDADLLPANMPGYKPPFRVLPYGVRPSLSRRDTTNLRRLARGLPPHFALGRSRQLQGLANAMVKLWEKSSIAKIALKRGVQLTTSERMAEDIKKLTGGVMLSRNNEFIVFYRGKDFLSSELAEVLLERERLAKSLQDEEEARRKAASYFSSAETYAQPTVAGTLGETLEANSKYGTKHDENHADKMARTIEAARHADLVRKLEWKLSLAQKKMEKAERVLGKVETALRPTEDSRPPETITDEERFMFRKLGLRMKAFLLLGRRGVFDGTIENMHLHWKYRELVKILVKAKSFADVKRIALSLEAESGGILVSVDKVSKGYAIVVFRGKNYRRPSSLRPRNLLSKRKALARSIELQRHQALSRHFAKLNRKVERLKAELVQMEDVKEQGDEELYAKLDAAYSSDDEDMEDEDDEAYLKRFDNEVAGATADDDGSDDYTSAADEADYPDSDDEAGDCSEDEGEDDEDEAAAGVSDAGFHGEVVGFSSDTDRRNHDVNEY

SEQ ID NO: 50738 - protein, 173 aa, Zea Mays
MARPASTARKPSSLSFSPSPPLSIQSMCDAAATLLHGLRVSLLPCPLPLPTAASCPALVHARRPHQRPPPVSHTLENRRRRRSSSISIMDQKANEAILEVLDLRCLGLEGEADQLLLDELNLNHHIIGGELLELSKNEVPPEDIVFHRLYLNKTGPVNRKAKRKDSVLDEGKV

SEQ ID NO: 50739 - protein, 1993 aa, Zea Mays
MEAAAPDGAAQASPPPAEADRPPEPRPPPLPAAGTHDPHFLSSIIGDAAPPPPPPPLGQKRKRGRPPKRKDGAAVAAGPVVPAPAPALARAARRRQDEEEVVCFICFDGGNLVVCDRRGCPKVYHPACIKRDEAFFQSRSKWNCGWHICSSCEKAVHYMCYTCTYSLCKVCIKQDLKGKLSLTLEELTTAKNRWNVPSTSARKEKEESSDDLYDANNDDDAGSDCSSGKRRRTNSRKKGQKRRKVNRDCSILEKKVELPLRNTESIPVEVPNERVPYPVHTKVPNGRVPMPVDTKVPNEPVSLAANTKWASPELLEFIGHMRNGDQSFISQFDVQTLLLDYIKKNNLRDPQRKSQIICDSRLHFLFRKARVAHFEMLKLLEMHFLTNETSTVTNSSQVTINLNSAHVDTNGHNDTAAKVSPDKRRRIYRKMERDTQVNLEDYAAIDMHNINLIYMRRSLMEDLVDDVKFSDKIHGGFVRIKISDVCQKQDIYRLVKVIGTHKVPEKYSIGKKMTNVALEILNLNKKEIITMDTISNHDFTEEECKRLRQSMKCDLISRLKVGDILEKAKILQYWFENEKQRLGHLRDRASETGRRKELREYVEKLQLLNDSEERTRRIIEILELHVDSHMDPNYESAEETDEKGTVGKSVNQTRPDTTISRRISRYLSTVQNHPKKVSDSSHLPKSLSTESAICGSGARSLENSTANRTMYGAGPLSSSVVTMTNDTEPEKVWHYKDPSGNVQGPFTLLQLSNWTSYFPRDLRVWLTFESEERSLLLTEVLSKQQKDFTQAASHTSSKATLVGTGHTRNNPSVDQTNAFSPVGHSVVSSSGIPVQYNKYSVPERESVYSPDDSLSLSTSSVPPKDAYTVNSQAHCQNKHSVFIQSPGSSYGHTDLNHDGIQGGCSGESNHHHSSRALWSPTVAHVSCGRGNVESHQNQHVSWSESQHESKNGSQGGFVKDLNSRQDLSKNLPAQRIGKDVSSPLFAWSPAESRTASSQQEGSCLSSTTNPSFLDELHSSIASAKPKSCAPATPIEDRGSSSPSDMLSHEERVPICSPQSAPLASASDMCKMEEIMNQQRTLVVDTSNASVNQSPESRAFPVSSPDNQDIDREFPSPVPRSENKDIAVDSSELAPASPENITTNLPVSDTCKMEEVVSQQQVIGAVVSNSSDNHSPQSKVSPVSSNNEDTKHKYPSSTPRPENKNPAVDSLLSTSAAPENLTTTSTHDSDTCKMEVVNQPKTFEADASNAPLHQLPHSHSFLVPSDNQDIECECPGPTPRSDSEEALMNNSATTASASDTSKMEEFVNQQKTLEADSSNAPLNQSPHSHIFSVPSDKQDIERECPGPTQRSDTKEPLMNNSVLTSGPSEIQTTASAASDTCKMEESVDQPKALEADASNAPLNHHPHSHIFRVSSDNQDNQCEHPSPNPKSDSKEPLVDNSVLTSVVPGMLATTSASDKCKMEEFANQQKALEVDASNASFNQPHIFAVSSDNQDMERERPSPTPRSECKESLTENSVLTSLAPEILARSSASASDKCKTEEFVNQQKPIEADASNASLNQPHVFAVPSDNQDIERECPSPTPRSECKESFMENSVLTSAVPEIARSSVSASDTCKMEEFVNQQRPIEVDASNASLNQPPRCHIFTASSNNQDIERECPSSTPRSDSKEPFVDNLVLTSAVPGNLLTSSAVASDTCKMEILNKKITLEADASNAPLNQPPLSSVFASSSGDDQDNVCGRPSPNPRPEGEQPLMGNSGLISTVPRNLTSTSASASDICKMEILNEKRTLEANPSNGLITQSPQPKVFLVPSPDILECEFSSETPRHEFKEPVADSSGLTSAAHENLGTKPHVHSPDAFVPPKSGALTGELGDTKSDFKGEETIQKEQYFGSESIAATRENLLIDPSSGVESIDVSDVLDSLMEERSGTSYMPGSIEDFLAEEEPQYSSPIALSPWGEPSYYQGDAVDSALWGTQDLINDMWSLLSPRPMLQPSSG

SEQ ID NO: 50740 - protein, 69 aa, Zea Mays
MVTTTSPRIIKKKYPVWQLNHQDVCASVSPGACWKLVWAASTVRAEFGPISQMAGDWKEDGSFRCSWCA

SEQ ID NO: 50741 - protein, 507 aa, Zea Mays
MAPVKMLIRPVGARQSGRVVAGSRAGAEHDHDPVALARDPGAGELAVVEEPVVLRLGVVSEDDDGDEAQHARRHHLAVLGHRRVEVAAVQGSTYKPAKRGAPHRTASRSHRSVDVRKTPGSCALLTLSTSVSGSRFQLRSNPASVPRRASTSGAGAAGEIREHSSPATPHRPWPQLAADRERRRRGRADPDPVGGKDLIAPTTMAGAVSALFLLDMKGRVLVWRDYRGDVSALQAERFFTKLLDKEGDSEVHSPVVYDDAGVTYMFIQHNNVFLLTAARQNCNAASILLFLHRVIDVFKHYFEELEEESLRDNFVVVYELLDEMMDFGYPQYTEAKILSEFIKTDAYRMEVTQRPPMAVTNAVSWRSEGIRYKKNEVFLDVVESVNILVNSNGQIVRSDVVGALKMRTYLSGMPECKLGLNDRVLLEAQGRATKGKAIDLDDIKFHQCVRLARFENDRTISFIPPDGSFDLMTYRLSTQVLFLINCGMLYRRYGMFSLHCFHMPVFI

SEQ ID NO: 50742 - protein, 113 aa, Zea Mays
MFGPVQDVRIPYQQKRMFGFVTFVYAETVKVILSKGNPHFVCDARVLVKPYKEKGKVPGRFRKLQHTHHGGAEFVGCASPTGLLDSRDPYALLLLSGAQNFSRFSPGHEAIGL

SEQ ID NO: 50743 - protein, 227 aa, Zea Mays
MTVRVVMRYLVNKLGLEDDSQVNDTIEMLERMAHRGACGCEKNTGDGAGIMVALPHDFFKEVAKDAGIELPPLGEYAVAMFFMPTDEKRRKKGKAEFKKVAESLGHVILGWRLVPTDNSDLGESALETEPVIEQRRRLTCSISFIVLFYKGFNTIRKGAIFTQRLPRHQIKGCILSPVSPFPFYSLRVAVCSRATVGMLLGVEDMHRFPVRSPWMDRGDLIRSPAAR

SEQ ID NO: 50744 - protein, 383 aa, Zea Mays
MVKFKVLLRYPNNNVPAIVASYLNVDPATGDYYPTVFFNEFWLLRDKLIALNESVKELPLNLEVGPISMTKWQFFLQIEQSFQVHRSYGSMLEGEADELKRVFLEGNPYLLGLTMIVSLLHSLFDFLAFKNDIQFWNKNKSMEGLSAKSVVLNFVCQLIVFLYLLDNDTSWMILASSGIGVCIEFWKIGKAMHIEVDRSGKIPMLRFRDRESYAQNKTKEYDAIAMKYLTYVLFLLVIGFSIYSLKYEKHKSWYSWILSSMTSCVYMFGFIMMCPQLFINYKLKSVAHMPWRQMTYKFLNTIIDDLFAFVIKMPMLHRLSVFRDDVIFLIYVYQRWKYPVDKKRVNEFGFGGEEEPAAQETLEGSDPAAAAAAAEPTEDKKTK

SEQ ID NO: 50745 - protein, 379 aa, Zea Mays
MGITRYPNNNVPAIVASYLNVDPATGDYYPTVFFNEFWLLRDKLIALNESVKELPLNLEVGPISMTKWQFFLQIEQSFQVHRSYGSMLEGEADELKRVFLEGNPYLLGLTMIVSLLHSLFDFLAFKNDIQFWNKNKSMEGLSAKSVVLNFVCQLIVFLYLLDNDTSWMILASSGIGVCIEFWKIGKAMHIEVDRSGKIPMLRFRDRESYAQNKTKEYDAIAMKYLTYVLFLLVIGFSIYSLKYEKHKSWYSWILSSMTSCVYMFGFIMMCPQLFINYKLKSVAHMPWRQMTYKFLNTIIDDLFAFVIKMPMLHRLSVFRDDVIFLIYVYQRWKYPVDKKRVNEFGFGGEEEPAAQETLEGSDPAAAAAAAEPTEDKKTK

SEQ ID NO: 50746 - protein, 365 aa, Zea Mays
MAEVKPEEISHPPMEQLQGFEYCIDSNPPWGEAIILGFQHYILALGTAVMIPTVLVPMMGGDDGDRVRVVQTLLFVTGINTLLQSLFGTRLPTVIGGSYAFVIPIMAIIQDPSLSGIPDGHERFLETMKAIQGALIVSSSIQIILGYSQLWGIFSRFFSPVGMTPVVALLGFGLFERGFPVVGRCVEIGLPMLILFVVLSQYLKNIQIKEIPILERFSLFICVALVWAYAQILTSGGAYKNSAEVTQNNCRTDRANLISSAPWIKIPYPLQWGAPTFNAGQSFGIVSAVLVSLVEPPTKPLLVLRVRLHLRLTSSAEALGGRESASSLTGSLERGLAPLSQWRTSGCLGRQGSGADGSYRSQLAS

SEQ ID NO: 50747 - protein, 647 aa, Zea Mays
MDRVGLQAFCKRHGLSARGSNADLIARLDAALGRAAGAEEAAAGVAARKACVRQTGGDADETKKVTFVEVGGDVPVKLSRRNSLGAHVPVRRSRRNSLGADVLVRQSSRNSLCAEAQDCELRSQVTCSPVVAKTRGKSAQAGSVEVGAVVPLRRSRRNSLRAAESEEVEVAVFVDRKRKCKNQENDKGVVLSAQVGASSRVTRRSSLAVAAAVLPPLVEPKRGRGEAAGVQTSTQVEVPARITRSRSIAPVVMSPTVVENKRRKNGDAQTNVELPTVSDVPRNDAPVTRSLRNRVVQVNNSVVDANKPATKEPVRGLRRRSVVSELHEKEKDVEKQLIVKQPVRRSSRKSVLPDMLENNIQSGKSQDNEKEQKLKEPIRRSRRSVATVLLEEQNSGLHEEKLSKLTMRRSTRKSVALNGVEKTSMDHTEIVVQSETLKGRSSKRRRTIDPVEMMPVKEANDDMIIREATIDTHKATHEYNKSTSRIQESCQVNATREEFSSGPLLVTVTPTNEIYTVQSIHEVVPGSESGDNAKENLDKSKQPQEHHDIQAVDSHLSETRSGELDQSSCIAGLVPHNCVASDDKALISGDRVEQSPVSGEGRVGLEANAIESGEKNLTGIMSTALYTKSLQHDIDIVAEETAKGKHT

SEQ ID NO: 50748 - protein, 674 aa, Zea Mays
MDRVGLQAFCKRHGLSARGSNADLIARLDAALGRAAGAEEAAAGVAARKACVRQTGGDADETKKVTFVEVGGDVPVKLSRRNSLGAHVPVRRSRRNSLGADVLVRQSSRNSLCAEAQDCELRSQVTCSPVVAKTRGKSAQAGSVEVGAVVPLRRSRRNSLRAAESEEVEVAVFVDRKRKCKNQENDKGVVLSAQVGASSRVTRRSSLAVAAAVLPPLVEPKRGRGEAAGVQTSTQVEVPARITRSRSIAPVVMSPTVVENKRRKNGDAQTNVELPTVSDVPRNDAPVTRSLRNRVVQVNNSVVDANKPATKEPVRGLRRRSVVSELHEKEKDVEKQLIVKQPVRRSSRKSVLPDMLENNIQSGKSQDNEKEQKLKEPIRRSRRSVATVLLEEQNSGLHEEKLSKLTMRRSTRKSVALNGVEKTSMDHTEIVVQSETLKGRSSKRRRTIDPVEMMPVKEANDDMIIREATIDTHKATHEYNKSTSRIQESCQVNATREEFSSGPLLVTVTPTNEIYTVQSIHEVVPGSESGDNAKENLDKSKQPQEHHDIQAVDSHLSETRSGELDQSSCIAGLVPHNCVASDDKALISGDRVEQSPVSGEGRVGLEANAIESGEKNLTGIMSTALYTKSLQHDIDIVAEETAKGTTSVFKASPRRPGGGLTPRRLTRLPRLGAA

SEQ ID NO: 50749 - protein, 629 aa, Zea Mays
MASSSPTPASPLTISSSTELQPSHQTASSSSPTERTSRQATPSTQPRCSSRGRPTERNFPGALPGQFLGLTDIRNDGNASNHFFTVELDTIENKEFGDINANHAGANVNGLRSLNSSSAGYYADGDVNGGEFHFHNLSLISREAMQVWMDYDATASSITVTMAPSKAARPARPLFTATHNLTSVVTDAAYVGFSSATGTINTRHYVLGWSFAMNGPAPAIDVSRLPKLPRMGPKPLSKALEIVLPIATAAFVLAVGSAAFLLVRRHLKYAELREDWELEFGPHRFSYRDLLDATEGFKDELLLGVGGFGRVYKGTLPVSKLEVAVKRVSHDSRQGMKEFIAEVVSIGRIQHRNLVRVLGYCRRRGELFLVYEYMPSGSVDKYLYGNNEGTTRPVLSWEHRWRVVKGIASCLLYLHEEWEQVVVHRDIKPSNVLLDSDMNGRLGDFGLARLYDHDADPQTTHVVGTIGYLAPELGHTSKATPQTDVFSFGMFVLEITCGRRPVVVVVVGDDESSQEESQCMLVDWVLERWASSGALLETVDARLGGDYNAAEACLALKLGLLCSHPFSKSRPTARQVMQYLDGEVPLPEMAPTDMSLHMMAIMQNEGFDDYVVTGSTASIGTTSVVSGGR

SEQ ID NO: 50750 - protein, 804 aa, Zea Mays
MAGSRFTQNGSSSTQIYAQMTLPYVSNQGGYMDLMMEQIRNSQGESVSELGNEMQSALCTQNETMNKNLLVAPCETYTQMILEEDSMLANADISKVGYMDLMMEQIYNSQGESVSEVGNEMQSGLCTQNETMNNNLLGEPCETYTQMILEEDSLLASADISKEIFGECNEADTSKYGEAVYHRDLFEIMHVQQLTECAQNDDGKETKTSSASANFDDADAETTNAGDEELTEDQIDAFIMSEQIATTEGNNASIDSKYTPQVGMEFKTRGDAEHFLFFYGFLAGFKPAITHSFRTSNKKRSNEVTKVELKCNKHGKTKKTNQQEQDICIEKKRCEKGPKRNTNVQVKTDCRVFMVIKEHGQKWVIDKLDLEHNHELRPADSNNMFSGHKYMTDMEKGIIRTLNHNNIPTRKMIAILSYLRGGMPEDFEDIVNYSLTVSEFERDWKQMVEDYHLENNKYFSKMWETRARFIPVYFKNDFFPFLQSTGRSEGTNSRFKDNVTSTYSVISFLREYQRIVEQVNVSEEYEDNESNRKRPKELMFGYTIERQAQEVYNRNIFKKFQFQLQSTPRLSYSRTSNLHTFEVYPKSNQEEKPHKLRRYLVMANLTYGMEEFTCVCGKFDKDGILCSHILKVIIEEGLTKIPEQYILNRWKKKQKQIDGPLLRASMPTHPVLRHNLLSRKVALLTSAAAKTEKTMEFICEELDKLQEKVCQMLSSEEDVIAGPSTGREKEDNAAKHTGPVVENLHNPEAVKQKGRPKKPTRLKPLVEEIHIKMKKAEQKKNKKTSNAAASPQGKEKKKMKRTAP

SEQ ID NO: 50751 - protein, 742 aa, Zea Mays
MFKNEPAAMLDDLERSNAGERAVCGSVWGHNDVAYRCRTCESDPTCAICVPCFQNGNHKDHDYSIIYTGGGCCDCGDATAWKREGFCSKHKGAEQIKPLPVELACSVGPVLDVLLQFWKERICLLEPHHAKGSDGSSCKRIAEELTTSISSMLLEFCTRSENLLSFLSLRIREFPDMLDALIRSDRLLDKKVARKLHEFLLKLISDPAFKYEFAKVFIHYYPITFGEVIKGCNDSLLEDYPLMTTFSVQIFTVPTLTPRLVREVDLLGVLLGCLTDLFLSCIGEDGRLQTNKWGNLFDASIRLLDDTRYVLSHEEVSKHVAYGRPDLTRSWIKLLSLVQGMDPQKRVTSIHAEDENEHLSAPFVLGHYLGIVQNLLMRGSFSPPDQHESTDVTVCSTAIKGVESAENQRHAKVGRVSQESSVSDLSSRDSSLCCGLPSPAAWLVLQCLKAIESWLWLENDIALRSKLSSLDASSNDSHKLMALLEDPLTSLTGNSSNTNMCVMDVKINEGSQTDCTADYYEASSSPVQGQGQEAMPLVSNSTGKGKMHGSSNSTVVQLHPEDAITYTLTDGSILYAHPDSRIEELGILNTRGWPHVVFDVSSQETSFHIPLHRMLSLLLRKAMKKCFGEDGHSDVQSNEFFPQILRGCEPYGFASIVMEHPLRVRVFCAQVRAGMWRKNGDAAILSAEWYRSVQWFEQGLESDLFLLQCCAALSSPELFVRTIQERFGLSSYTDLGLAEQNE

SEQ ID NO: 50752 - protein, 829 aa, Zea Mays
MVLATAERGGEEKVDHRPAAAAVVDVESGSLYSSSSSVVDRQDSLFREAVTGGHHRGAGGHSHDHDSWGTTLRLAFQCVGIMYGDLGTSPLYVYSTTFAHGGVGHPDDILGVLSLIIYSFLLFTVVKIVLVALHANDDGDGGTFALYSLISRYAEVSLLPNHQAEDELVSGYTCTSHGKPPSAALRRAHWLKHLLETSKSAKISLFLLTILAIAMVISDAVLTPPISVLSAVSGLKEKVPDLTTDQTVWITVAILVLLFAIQRFGTDKVGYSFAPIILLWLLLIGGVGLYNLVKYDAGVLRSFNPKYIVDYFRRNKKDGWVSLGDILLVFTGTEALFANLGYFSIKSIQFSFSLGLLPSVLLTYIGQAAYLRKHPEHFADTFFRSTPSALFWPTFILAIAASIIGSQAMISCAFATVSHLQTLSCFPRVRILHTSKRYHGQLYVPQVNLLLCVAACLVTVSFKTTTIIGKAHVNVYAEICVILVMLITTLLMTIVMLLVWRVNVWWIALFFVVFVPTESIYLSSVLYKFTHGPYVPVAMSAVLMAAMVVWHYVHVKRYKYELRHTLSPAKAEKLLAEKRDHLKSVPGVGLFYTELVQGVPPIFPHLVDKVPAIHSVLVFVSIKHLHVPHVDASERFLFRQVVEPREFRVFRCVARYGYRDSLGDEAQDFVAALLESLQCYVRDVNLYSVHEMQNVSYPVSRDQSLSREKPSGRHAVYAEEMITPIQSFSELSHGASSNRLPQFQQASKMNIEELARIEEEQMVIQREAEKGVVYILGETEVVARPQSSLIKKIAVNYIYSFLRKNFMQGEKMLSIPHGKLLKVGISYEI

SEQ ID NO: 50753 - protein, 200 aa, Zea Mays
MIGVGKAKQYANVLDKPLSRGRQEVSLSAFAFLFSELVQYNQTQVDNITELERRLEDAGYAVGARVLELLCHREKGNRRETRLLGILSFIHSTVWKVLFGKVADSLEKGTEHEDEYMISEKELLVNRFISVPKDMGAFNCGAFVAGIVKGVLDNAGFPAVVTAHFVPIEGQQRPRTTILIKFAEERSKTGLSFYVCTQNL

SEQ ID NO: 50754 - protein, 246 aa, Zea Mays
MNATDRLLLETRDIAQKLNTGIHMHIAEIPYENQLILRTKGIDHGTVTYLDKIDFLRSNLLAAHSVWLNVPEIGFFSKAGVKVSHCPASAMRMLGFAPIREMLDSGVCVSLGTDGAPSNNRMSIVDEMYLASLINKGREAYISGTTNPTALPAETVLKMATINGAKAVLWDNEIGSLEVGKKADLVVVNPFTWSMVPLHDSIANIVYCMRTENIESVMCNGRWIMKDHKIMNLNETTSSPRFPSVF

SEQ ID NO: 50755 - protein, 264 aa, Zea Mays
MNATDRLLLETRDIAQKLNTGIHMHIAEIPYENQLILRTKGIDHGTVTYLDKIDFLRSNLLAAHSVWLNVPEIGFFSKAGVKVSHCPASAMRMLGFAPIREMLDSGVCVSLGTDGAPSNNRMSIVDEMYLASLINKGREAYISGTTNPTALPAETVLKMATINGAKAVLWDNEIGSLEVGKKADLVVVNPFTWSMVPLHDSIANIVYCMRTENIESVMCNGRWIMKDHKIMNLNEVLLNGSPGNHIFHQRGLRQGDPLSPMLFV

SEQ ID NO: 50756 - protein, 86 aa, Zea Mays
MEATITSTLMAAISSLTKRLSGEGVGEVAAAVTGAGKRRGRGRGARTARRRRWVEKEKGPRGPDGCGPRAIERAVGGNGRGVGWAG

SEQ ID NO: 50757 - protein, 321 aa, Zea Mays
MQRRTNQQKEAPHPRLGGAAISPSHIPVPSRFPFAPLPLARSLLTPQSSLTIRTRTHQGRARAPAAMRWDAAEAEAALERIWDLHDRLSDAILAVSRAHLLLPAPPPPPVPSAPSAKGAHRIGVGRNGCVFVKDGAAGGGGEALAAAAEALAEARSLHAIRSALEDVEDHLEFLHTVQSQQRAERDAAIARLEQSRLVLAMRLAEHRGKKYKVIDEALAFVGEVSDKSQFISPEDVRATHSRSEDNADDNRGSGSRIMSNVLSCSLSLAKNSFRLDKIGGTLGNAAVFAEENRVQSSIRELTTEWERKTSGGLPSQRLKNY

SEQ ID NO: 50758 - protein, 852 aa, Zea Mays
MTLKTLRMMKMNLMGEGLLEDIKLTLVIYRCCYHHLKQITESMDIRTRQGLLNAMVGKVGKRMDNLLIPLELLCCISRTEFSDMKAYLRWQKRQLNMLEEGLINHPVVGFGELGRKVNEIRSLFRKIEESESLPPSAAEVQRTECLRSLREVATSLSERPARGDLTGEVCHWADGYHLNVALYEKMLGSVFDILDEGKLTEEAEEILELLRSTWRTLGITETVHDTCYAWVLFRQFVLTGEQGLLKVVIDNLRKIPLKEQRGPQERLHLKSLRSSVDAEGSYQDFTFFQSFLSPIQKWTDKKLNDYHLHFSEGSSLMADVVTVAMLTRRILGEENDKVAESPDRDQIDRYITSSVKNTFLKMAHSVEFKADTTNEHVLASLAEETKKLLKKDTAIFTPVLTKWHPQAAVVSASLIHKLYGNKLRPFLEHAEHLTEDVVSVFPAADALEQYVMSVMASVTGDDGLDSLCRHKLVPYQIESKSGTLVLRWVNGQLERIETWVKRAADQEVWDPISPQQRHGNSIVEVYRIIEETADQFFAFKVPMRDGELNSLCRGLDKAFQVYTQLVTAPLVDKEDLAPPIPVLTRYKKELGIKAFVKKEVQEVRTVDERKASEITQLTMPKLCVRLNSLYYGISQLSKLEDSINERWARKKSENTNIRRKSEKSKSAVPNQKNQFDGSRKEINTAIDRTKVIFWDLQQPFVENLYRNGVAQARLDTITEVLDLVLNQLCDVIVEQLRDRVVTGLLQACLDGFLRVILDGGSTRVFSPNDAALLEEDLETLKEFFVSGGDGLPRGTVENLVSRVRPVINLIKQETRVLIDDLREVTQGGKSKFGADSKTLLRVLCHRNDSEAS

SEQ ID NO: 50759 - protein, 1062 aa, Zea Mays
MDEENVVELLQRYRRDRQVLLNYILSGNLIKKVAMPPGAISLDDVDIDQVSVDYVLNCAKKGEPLDLGDAIRLFHDSLDYPYVNNTGAVDEFYLLTKPEYSGPAPTREPPPIPATAPSSVVIPPPDVEPAPIIVSSPVTATNLPKSQPFDSPTEKELTIDDIEDFEDDEDEFDGRRASRRHQTDASDLSLLLPSFETGITDNDLREAAYEILVAAAGASGGLIVPQKEKKKEKRHRLMRKLGRSKSESVDINTQRQPGLVGLLETMRAQLEITESMDIRTRQGLLNAMVGKVGKRMDNLLIPLELLCCISRTEFSDMKAYLRWQKRQLNMLEEGLINHPVVGFGELGRKVNEIRSLFRKIEESESLPPSAAEVQRTECLRSLREVATSLSERPARGDLTGEVCHWADGYHLNVALYEKMLGSVFDILDEGKLTEEAEEILELLRSTWRTLGITETVHDTCYAWVLFRQFVLTGEQGLLKVVIDNLRKIPLKEQRGPQERLHLKSLRSSVDAEGSYQDFTFFQSFLSPIQKWTDKKLNDYHLHFSEGSSLMADVVTVAMLTRRILGEENDKVAESPDRDQIDRYITSSVKNTFLKMAHSVEFKADTTNEHVLASLAEETKKLLKKDTAIFTPVLTKWHPQAAVVSASLIHKLYGNKLRPFLEHAEHLTEDVVSVFPAADALEQYVMSVMASVTGDDGLDSLCRHKLVPYQIESKSGTLVLRWVNGQLERIETWVKRAADQEVWDPISPQQRHGNSIVEVYRIIEETADQFFAFKVPMRDGELNSLCRGLDKAFQVYTQLVTAPLVDKEDLAPPIPVLTRYKKELGIKAFVKKEVQEVRTVDERKASEITQLTMPKLCVRLNSLYYGISQLSKLEDSINERWARKKSENTNIRRKSEKSKSAVPNQKNQFDGSRKEINTAIDRLCEFTGTKVIFWDLQQPFVENLYRNGVAQARLDTITEVLDLVLNQLCDVIVEQLRDRVVTGLLQACLDGFLRVILDGGSTRVFSPNDAALLEEDLETLKQVMSCWSRKGLLAHIPHGKLAMPFLLAWQNRIAMPPGLAWLG

SEQ ID NO: 50760 - protein, 978 aa, Zea Mays
MDEENVVELLQRYRRDRQVLLNYILSGNLIKKVAMPPGAISLDDVDIDQVSVDYVLNCAKKGEPLDLGDAIRLFHDSLDYPYVNNTGAVDEFYLLTKPEYSGPAPTREPPPIPATAPSSVVIPPPDVEPAPIIVSSPVTATNLPKSQPFDSPTEKELTIDDIEDFEDDEDEFDGRRASRRHQTDASDLSLLLPSFETGITDNDLREAAYEILVAAAGASGGLIVPQKEKKKEKRHRLMRKLGRSKSESVDINTQRQPGLVGLLETMRAQLEITESMDIRTRQGLLNAMVGKVGKRMDNLLIPLELLCCISRTEFSDMKAYLRWQKRQLNMLEEGLINHPVVGFGELGRKVNEIRSLFRKIEESESLPPSAAEVQRTECLRSLREVATSLSERPARGDLTGEVCHWADGYHLNVALYEKMLGSVFDILDEGKLTEEAEEILELLRSTWRTLGITETVHDTCYAWVLFRQFVLTGEQGLLKVVIDNLRKIPLKEQRGPQERLHLKSLRSSVDAEGSYQDFTFFQSFLSPIQKWTDKKLNDYHLHFSEGSSLMADVVTVAMLTRRILGEENDKVAESPDRDQIDRYITSSVKNTFLKMAHSVEFKADTTNEHVLASLAEETKKLLKKDTAIFTPVLTKWHPQAAVVSASLIHKLYGNKLRPFLEHAEHLTEDVVSVFPAADALEQYVMSVMASVTGDDGLDSLCRHKLVPYQIESKSGTLVLRWVNGQLERIETWVKRAADQEVWDPISPQQRHGNSIVEVYRIIEETADQFFAFKVPMRDGELNSLCRGLDKAFQVYTQLVTAPLVDKEDLAPPIPVLTRYKKELGIKAFVKKEVQEVRTVDERKASEITQLTMPKLCVRLNSLYYGISQLSKLEDSINERWARKKSENTNIRRKSEKSKSAVPNQKNQFDGSRKEINTAIDRLCEFTGTKVIFWDLQQPFVENLYRNGVAQARLDTITEVLDLLIFRSLINFVMSLWNN

SEQ ID NO: 50761 - protein, 200 aa, Zea Mays
MDAPAAAAQGCGGKHIVLVHGACLGGWSWFKVAPALREVPTFRDYTGPLLELLASLPDGDRVVLVGHSLGGLSVALAAETFPDKVAAVVFLCAFMPDCAARPSHVLEKDVTLMTSLLRPSSMFVEDLVLQQPYTKERYGSARKVYVVCTEDHAIAEGFQRWMVENSPVDEVREIVADHLVMLSRPSDLVRCLADIADKYA

SEQ ID NO: 50762 - protein, 305 aa, Zea Mays
MRIRTSVHTAAFCQPRPATRSRPTPQPAAALATARIRGFHPEISVAIASRNRHNPPNLALPCALRPPHFTQPISAPCAVFVREVGADDGGGGADSDFCGGQVGDTGDARRGASGGSRVPRLAARVRGPPRVLGLLPLRAVERAVEPGTPQPQPEQPCEIGARTIALFAMEPPRRRLSPARAIPSRRLSAPDTTSAVMGNLQGLNGATVGFSAAGGPEEATEEEDMRGCKGCARRWPKSGLSWGCARSRRWRREPRLFNEGYGFGSRGTPGDCASWKRLLSCQLSYFNFGLTIIVCVPLSSLFYLL

SEQ ID NO: 50763 - protein, 1914 aa, Zea Mays
MGKPCFSGLVAIELCSMGGIAECGVSIDTKASPRRAAIEKAQDELRQEYDVREERRRELEFLEKGGNPLDFKLGHVASLSVQSTSVTEQIAEQNVISEAKGSSAFATSPHGDSVESNDKPGNSLCREGNTADNITLLDGDASSMGVDKIVKRGTKRTNSAQAEQFLHCDGQNNAKEEDSGLYRLGPKSQAYARRRSKPIRENAYSVSVRYPPIPPLSSQQKDVTGLIPETKTEDNGVSSIGDSKPTSPNSKNLVTNASLLNDKVEMETENVQAIPEGNQAPKNELSNSNNGSPAIEISPNSVPDNSRLTVSDQMVTAFVSVESPDAISKVAASRIVCSLPYISNEILKEAQTLEKAGNNPSMVSVVDVHAYGMDNNGAAPYSAVKSASLNENEVDPIHEYAAKAVTEHPDQNENLVPVNADEMADEGLNKILPDDKDDKKDCQLEVSSGPVILNDSSTPVYPEFSNSFYARDGTEVSNNAVDSKNNAEQLASSNQGKGNMEECKDSDGNNASELSVAQKLVSVIVPPASDAGDVSNFVENDVDKSSRDQEKVAKKEYEDSVVAKKDHEDAILRRARYIEANIKRAGEWSLCNISLEKKQKSHWDFVLEEMVWMANDFTQERLWKNTVAAQMSHWISSRGRAVFEEASIQRKQKSVARVLANGIMNFWCSVHTLRASGGIPKPIKIEQPNELEENKLGGFKSGKADEECLEQEKSRQSPIQSFALRFLEYNINASEFLPLAEAPSTPDRLNDFGILKANLFYGVAPGAMQAYRESMDRLLIYNNKKIGDTVLKDDYEPSTYASVTDVPMENAYGDDESEAHTYLLPGAYNGGLASKNSHKKKHHLPQRMNGARSYEIGVDSPYEPLYLESKSGNQQLLSNGKQTDFLSIPIKRIRTAARQRVVSPFPAGASGTPQFTNKTDASSGDTNSCQDDQSSLHGGSFSRKNADIESTVDFDRQLLYDGSEVSTKSKKKKKTKHPGYKALPNVSESCSLRAPGKGNYDHRSQIDMIAQYEQKDYIKKRQETNGNFGVIDLSTVVNGLHAAKKPKLLNQAPDISLEALKPIGPMASLAASQMSNMANPTRVIKISTRGRKSKGLKMRAGHSGPGSPWSSFEDQALVVLVHDMGENWELVSDALNSIIQLKCIYRRPNECKERHKLLTDRSCGDGADSADDSGSSQHYPSALPGIPKGSARQLFQRLQGPFEEGTLKTHFEKIILLGQKLHQTRRKDEIHELRQKNPLHTSHGFALSQACPGNLSGVILTPLDLCDGPSNSDALTGSNTSGLGLSNNNCSVGPTLPTSNMNLRLPGSPGMVLGSNSPLPLNAPSRDVQRYGVPRPTSIQGDEQSRIHYNQMVNGRNLQQPGVPVPGVLPSGVDRGARMMPPAHGVGIMAGLNRGTPITRPGFPRLGSLGNMSPTDGQGLKNTVNVHPGAILGPGSTMLRPRDPMQMFRPGQNSEEHRQMMMPEFQLQVSQGNNHAVHFSGPPYSNTGASSPVQSLPAQQSQPHQMPQQSHMYGNTHLLHTQGTNQSNPQQQQAYAMRLAKERHMQQMMPQQQRPLSVASAVSAVQNGSPMQQQSQGSATCVIPATQTQHKQQYPAQNAQDNSMLPHQPSATTTHKQKKQQGQQQPRQNQQQRNQGSQQAKLMKSLGRGNMMQQSPVDVIQASGISTSCKDQVPDKNMMQQGPGHFVVSKGSIPLIPQPGNQPNVYTSQMPPSPMQTPDISNQGAVKGSSNHALLTSQQGSLHTPSQLAQQQQQQLRFMNPSQNNMQRLIMQQNRHVNTDGRIELPADQVQHNQVMSSASLARSTDSGSPGISSISQRKQESSHDPSAITSTSQLASSPQDTFVGSDRVLPSSSQSMPQRQMSGGVPVHGYGIGGQVQLQQSRQQLQSQQQQQQQQRPVVQGGVYAHPSNSGQG

SEQ ID NO: 50764 - protein, 323 aa, Zea Mays
MSSFNCNEGDNDPEEESKVRNDDKNAIMHSAMRAQTVQRERALPSAADSDSSVDRLDLEHDIQKGCIEKDKVRNACHGQHRRYYKRNRKNDKYENEDLDAEQSVPKSQRKVEGTGDDTPGVATMSSFNCNEGDSDPEKESKVRNDDKNAIMHSAMRAQTVQRDRALPSAADSDSSVDRLDLEHDIQKGCIEKDKVRNACHGQHRRDYKRNRKNDEYENEDLDAERSGPKSQRKVEGTGDDSPGIAAMSSFNCNEGDSDPEKERYNEREKFERVLTFNSKEGAAHEASTFPSKEKYNLCKPISELDLSNCQWCTPSYRLLPKNV

SEQ ID NO: 50765 - protein, 326 aa, Zea Mays
MSQKHFLSMFQFWSKRKSMTLLWKFFLETWDLFLEGRRTSFVCRDVFLLKRVAICLLLKYTRRFWSLGCLLEHDVNLPKPSTGEHTCPSCSVDSALSNKTSLDKELVESRLTSALSFVQSLQENNSSDCVRGPHLAKIEIERQRCLNGNPDNIKLMEALVQYLHRFGHLSCSASDVEIYLHMLSNNEISELLDEITRSFDASSISVNTLGSTITLFKVQELLGTSFTKPTSELEGIAKRMVDTFYKNLPLSNYLDPQESMYGEELLSMASSILVQLYWRTRDLGYLLEAILILEFGLTVRKYVWQYKVTLVHLYSYLGALPLAHKW

SEQ ID NO: 50766 - protein, 560 aa, Zea Mays
MTSKFGLAGGIPERRVRPIWDAVDSRQYKPALKLCTALLAKHPTSPYALALKALILERMGKPDEALSGALNAKELLYSDNIFHFDDLTLSTLQIVFQRLDRLDLATSCYEYACTKYPSNLELMMGLFNCYVREYSYVKQQQTALKMYKTVGEERFLLWAVCSIQLQVHFSSGGVKLLALAEALLKKHINSHSLHEPEALSLYVSILEQEKKYDTALEVLSGDLGSLLGREEDKLRLQSLFASESSSSGSSESSSASSDVKLDLWWHGERDGNLVGRCLHGRAGEIHGQCGRREWHGRGWEAASCSGVGGGGASRGVDAFLALIVATNISLSNKTSLDKELVESRLTSALSFVQSLQENNSSDCVRGPHLAKIEIERQRCLNGNPDNIKLMEALVQYLHRFGHLSCSASDVEIYLHMLSNNEISELLDEITRSFDASSISVNTLGSTITLFKVQELLGTSFTKPTSELEGIAKRMVDTFYKNLPLSNYLDPQESMYGEELLSMASSILVQLYWRTRDLGYLLEAILILEFGLTVRKYVWQYKVTLVHLYSYLGALPLAHKW

SEQ ID NO: 50767 - protein, 558 aa, Zea Mays
MANVLKQANRSEEAIEAIRSFRDRCPYEAQESLDNILLDLYKKCGRTDEQIEMLTLKLRIVDEELASGRWKTKLSKSHGRVVYLSLRDEKARLLGNLAWAYMQSENYEEAEMLYRQALAIEADYNKECNLAICLMKTGKLAEAKYLIHAIPYNCNDESHVKSLSRATEMLREFDLQSLPSPITQAKSKEPRNFVADDVEMLVDLQPQTLSTPFSELKYKEAHISVSQNAEKHENCNSCLPSPITQLRREEPHTMVTADAEKNEGFAEFQDLSRLFNDAATPHSVLEKLRKRLVKEAPKVSIHDQIQTPPTESLPNSERNLDASETSVQEGKLLTKGVRKTWSDMVDEEEQQLGDDKPWADMVAKDDQQLGDGKSTHGVGITEQNESSKHASKLEYRTPSSSQESRTHQRPVMGGQLQGSSAGSWRRSDSKIYMDKNVNWDLVRTAPTWSRHKVHDHNNRVWQRLHTIHPRERASGTKQVPRRSNTSQRALFPDWKSKGEGYGHGYVPFDDNEHTQCSSHIEAATHRWHNNEASTGSWRPQNRLRVFQEITNEINQNVV

SEQ ID NO: 50768 - protein, 146 aa, Zea Mays
MCDLLRINTDRGVMIADGKSRFSINGKPIYHFVGTSTFSEYTVMHVGCVAKINPQAPLDKVCVLSCGISTGLGASINVAKPPKGSTVAVFGLGAVGLAAAEGARIAGASRIIGVDLNPSRFEEGTVHTHMYICMMYPFDRRHALVE

SEQ ID NO: 50769 - protein, 246 aa, Zea Mays
MDAAAAASLLPRAAASSLLPRRVLSPLHVSRSGLLPRQSSFLAARCAHSRAPPPHPPLPRADCDDAAAKAHPRLRLRLLAEEFRALPSDADRARRLLSLAAALPRLPEPDRAQGNRVMGCVARVWLVARCNASTGWRMWFSADSDSDLSRGYCACLVAALDGAKPEDVLAVDPADPDLAPLGAGTTAAWSRASTWHNVLVGMQKRARTAIAAREGRHPGKPFPSLVIARDGAVSAQGSYAEAQKGR

SEQ ID NO: 50770 - protein, 342 aa, Zea Mays
MGSAMEKEQRRPPSSKTAPVSMKASPANATPQCMKNRKIALQQDVDKLRMKLRHEENVHRALERAFTRPLGALPRLPPFLPSQTLELLAEVAVLEEEVVRLEEQVVNFRQGLYRETVITTSMAAKSVYFPDGYRSTPARHKPPAQPQSPELSTSTRQGSDQDAADWLPSLRRATNAMWTPRRPGRSLSQGDSPGKENQSFGSGTNSCREFGLAPLSKVPGCRVVQVAETRAGFQTTSAVEDHKAVEGSNGTGPSKASTAANEVSEELLACLLAIFSQKSASSGQDEERVSLPPVSGSCGSSSADPYCVPEFGWRDIGRYKQFRSVDMNTCAGDDSALGQRLK

SEQ ID NO: 50771 - protein, 412 aa, Zea Mays
MEELSNKALAPSLLSLCLDAVADRLISDNAAAGGGVGRTGSSGGCSGGGGLAGFSEDDGGEADEDRLHPQELAEGLPWELLHRLASRLPPVVLESLHHAAHARYCSAETTSGLGVQDGERRGVKRSRCEDFNSTWQLLFKLRWPLGGNTGHNNLVTVDWQQKYWEKHLQECLNEAAEHAFLPFFCGSIGELSISAKIMNSIYQSMGTSQQHSRLAYQCSKFGCYVRSLRLQGVLCTAETYVLLQQCKLERLMFIRIISDLEIAGWLSELNKCSTNLLALKSDIFMNSLSVLNLRSLIPFISWSIQKENPLLRLTVENCELSSIGVIILLECLTNAKQLLDVLSIADNHLGSSVAAALARFLGSHVRALNATDIGLGTVGFQILEETLPTEVALSHINIRIVVGSEQHILFPD

SEQ ID NO: 50772 - protein, 338 aa, Zea Mays
MEELSNKALAPSLLSLCLDAVADRLISDNAAAGGGVGRTGSSGGCSGGGGLAGFSEDDGGEADEDRLHPQELAEGLPWELLHRLASRLPPVVLESLHHAAHARYCSAETTSGLGVQDGERRGVKRSRCEDFNSTWQLLFKLRWPLGGNTGHNNLVTVDWQQKYWEKHLQECLNEAAEHAFLPFFCGSIGELSISAKIMNSIYQSMGTSQQHSRLAYQCSKFGCYVRSLRLQGVLCTAETYVLLQQCKLERLMFIRIISDLEVNGACLLLSWHAETLLSLEFIHCQLYPTVMDKICMSVYLKGSQSHGIQQFSIKSSQICETKPLTISSGLFKILSSGK

SEQ ID NO: 50773 - protein, 181 aa, Zea Mays
MIWKPPPSNESITNGHLETPTPSCTEVAQNDAARVPRGAHTKAVTDGEGRHEEVKPELDGTRRQSLRMRRRSLSDVTARSGEQQAWWRWRRQDEEKRESAREDAKAARRRQEHVVASGVRRVRMHSSTSSAVRFRHEEGSRLYRKLLQQSTVLLKPPLILDTKKKWSGHVDFLCLFRIDKW

SEQ ID NO: 50774 - protein, 433 aa, Zea Mays
MIHDEVPLSGGCSAFSVGDILEMDVEISKLPEFSLVESGPLILAWAVFLCLVLSLPESNTNLEIDHTSYARRAFEFAPFNYLLGVLCSSIFRESDGPVSGYRGILRTFISAFIASYEVSYQKEHSSFDMISSILCEVYDGEESLCMQFWDKDSFVDGPIRSVLHMLEEEYPFQISELIRFLSAVCHGTWPANCVYNYLERMNGVTTIYTIPCVADGVGYGHQIESHHPVSIPSIEGITIPQGTHGYILKVLQEDTTLVRWEFPHSGVSFLLITLAQELHSCNYKKACDIIGLLYRMVSSNKDLCFALMHVDKSLAVQTSNNLGQIEKHVRIDIAKVFCNSIFKYVRDVNNADILSKTFGLLAEMMKCAPYHVFDAAFECNIFTSQLSSPSSDWLLSGALARMLFAAYEGNGDCSSLTSSVSDPWMARYICFET

SEQ ID NO: 50775 - protein, 224 aa, Zea Mays
MTTGHMNPNYTLSMIMPLVTKTFNLLSMLEGTKLKRTMVGKIKKQCWALRDLVASVKDKTKAHVRRVDSWSSRGAEEEGGECGGEASSAVAFRFLPVAAAVPPRTLLPVLGLTADPDLSIIQRGRNMFRRKHGADVNSDDAEQREAKISELKAALGTLSARGEKYCSEACLRRYLEARNWNVAKSRKMLEESLKWRAAYKPEDIRWVKCTGQVSETGRAELLLS

SEQ ID NO: 50776 - protein, 610 aa, Zea Mays
MGLFSSPAKVYKPAADVDLGPGSDELYISPNVKAPRVAGLLVKIFVWILEMPIVGQIVLYILKKDNLINKLVSDADIPEPPLFTASHSWEDTPEQSVRLTKPDLSAAERVQEAVGCLPARLEAALAADARGIRRWTVRDFSDAYRSGEVTPVQVAARFLAAVRESSGPGVSNMAFFISCDPDDVMRQAEESTLRYQRGAPLSALDGVLVGVKDEIDCLPYPTTGGTRWLGAARRCEADAACVAQLRACGAVLAGKANMHELGAGTSGINPHHGSTRNPYNASTIAGGSSSGSAAIVCAGLCPVALGVDGGGSVRMPAALCGVVGFKPTAGRLSNAGVLPLNWTVGMPGILAGTVEDALIAYSAIVDQSQPSYLRPELNLPQLGSTLSIGNIKLARYGKWFNDSAEDIRSCCDKALQALRANYGWQTVDVTIPEVEEMRLAHYVTIGSECTTSLAKYLDKLKRSEIGWDARVALSVYGSFSSRAYLNAQRLRNRQMYFHKQIFKAADVIVSPMTGVTAYPLQDDALSTGELDYINGAALVRYSIAGNFLGLPAITVTVGYDRGGLPIGLQFIGRPWAEATLLHVAFATQQACAKGYKKPPVFYDLLGKQQD

SEQ ID NO: 50777 - protein, 116 aa, Zea Mays
MPVCCHLTSTVACPSTRIRTPSFRDTDAAPKEGASRGTQTSTSSSSSMAVMWRLCCCNCQVDETDRCESHVKATTNKIDGVTKGLRDSATAKVEPHDDAPPIDVDVLSLDDLIKNC

SEQ ID NO: 50778 - protein, 331 aa, Zea Mays
MQENMSARTLTLSSSTQQTIVRFVKLPLVDKITAWIFLEKLLRYSATTARAKVLKEVRNIAVTISMEKGAMARGKKENLMLPGSSIKKVPWWGGGGDGQTISEAGREVKEIEELEEKASFFRSWHVSWRGNSTFACLAYMSYMRVAIRFAYGCWPTRMVVWPVTDWKAATDSSFSQRTYSAIKLLFLQLSSMARDMCTLVRMEAFTALGKIQRVSEGVLLQSLEKKVRRTACKSLGALAKFSTQYTEKALDLLMDMMNDDTEAIWLQALEALFRMATYGCLSVQEKHMHMVLTTNILRSQMHDWSFQIDNYHGSGMVPLADLCVRRRPYPV

SEQ ID NO: 50779 - protein, 1079 aa, Zea Mays
METSISPPGTSKQSAVRKPSPGSSLKDLCLVSKQGSIAEVESALALLKKSGGNIDGRNAFGLSALHLATWRNHLPIVRRLLDAGADPDARDGESGWSSLHRALHFGHLCIAGVLLQFGASLALEDTKGRTPVDLISCPVSQANGDFPDAVATEVFSWGSGTNYQLGTGNAHIQKLPCKVEALHGSYIKTVAASKFHSVAVSSNGELYTWGFGRGGRLGHPDIHSGQTTAVITPRQVTVGLGRKRVNAVAAAKHHTVIATELGELFTWGSNREGQLGYPSVDTQPTPRRVGSLKQRIISVAAANKHSAAVADTGEVFTWGCNKEGQLGYGTSNSASNCIPRMVEYLKGKVLRGVSAAKYHTIVLGADGEVFTWGHRLVTPRRVVVARCLKKGGNTNLKFHRMERLQVISVAAGTTHNTALTADGALFYWVSSDPDLKCQQIFSMCGRNIVNISAGKYWTAVATSTGDVFMWDAKKRKDETPIFTRVHGVKRATFVCVGETHMLVLSSIYHPEYPPKPKSQGLKSMLEWNGGTEELGEDILFDDVQPNSGLSGSSGEMSKGVPSLKSLCEKVAVEYLLEPKNSIQLLEIADSLEAKELKKHCEDLAIRNLDYIFTVGASSIMNASSEILVNLEKLLDEKSSEPWSQHRLPTMTATYPAVIDSDVEEDEAREFPKTRKCGKSASRPSAMSSDDSFLQKDCTAEQAVSKQIRALRKKLQQIEILEAKQLAGHQLDSQQVAKLESRAALEGELAELGIPSEIYSTSSACPAEGRTNRKPEVSKKQKRKNKQSTQTPSVKNEPGQQIPITELQVLQVNVSAEKQEAYAADPIKPMEAAAFSNTKDTASPPEKKPSQPTPSKKKNRKGGLSLFLSGALDDTPKPSLPAPAVPATPKPEGPAWGGVKITKGPASLRDIQTEQSRTNEPASAKAKDRHENSPDSAGRATRLSSFIPDARSSPVAVVAPARAAAAPSSEGDRSTPPWSSSATSPNVSQPSLRDIQQMQQRHHGGVSHSPKTQTSGFCIPPHGGAPEAAGGGGVKDNVPNRWFRPETDAPSSIRSIQIEEQAMKDFRRFYSSVRIVKPQV

SEQ ID NO: 50780 - protein, 1690 aa, Zea Mays
MADGQHIQAASEEVDSIHFSFYSDDEIKRISIKKITKSERLDAKNLPVPGGLLDPAMGPINDIDICKSCGQHSVRCPGHFGHIELAKPLFNPLLFMSLKNLLHVTCFHCHKFRLNKEQVDRYVNELELLVKGDIVCAKNLEDSVEEAYLSKEDENMNKTTSGDNSSSVKDKKTWTSIQLKEVLSIFSKIMKKRQKKCAKCDMKSPTISSPIFGWLVKDTKASAVRTNAIADFKLKGDGDIHNSGETGVSGLEEESSSPGMVSKDSINEVRGLSDDTIKELVASSGKKHLLPTEVESILKDLWKNEARFCMLLCDFQKNMSSEPEKRRGYEMFFLSSLLVAPNRFRPSTSSSLGIMEHPQSVLLSKVQESNLALQHNNASSNHMDVLQRWMDLQRSVNVLYDSSKGLARSEKNAHGIRQLLEKKEGILRQKMMGKRVNYACRSVISPDPYLAVNEIGIPPVFATRLTYPEKVTPWNTKRLQEAIRNGADIHPGATHYRDNNSMYKLQAVPAKRRSIAKMLPASRGSICQPGRDPNCEFESKVVYRHLQDGDIVLVNRQPTLHKPSMMAHFVRVLPGEKTLRMHYANCSTYNADFDGDEMNVHVPQDEISRAEAMNIVDANKQYIGPRSGDAVRGLIQDHIVGAVLLTKPDTLLSREEYSQLVFGSCVPSSNCGSHHPAKVSAIEDYDTLELVHPAIWKPRPLWTGKQVITTILNHLTKGCPPFTVEQKGKIPKEYLKEDPSAQKEKEDPSARKEAHSAKKGKREDPSAQKEKDSSVNKEKQEKIQKQKQKDRSELVLYIHNNELIKGIIDKAQFGKYGIVHTVHELYGAYTAGILLSTFSRLFTLFLQLHGFTCGVDDLLLLPEKDKLRSKILSGSEVRSNEVHWKFTGADEDHKGDLVKLHMEVEKAVRSNGESDTATLDNDMKNALNGITTDVNKILFPDGLQKPFPGNCLSLMTTTGAKGGPVNMNQISSLLGQQELEGKRVPRMVSGKTLPCFPPWDISSRAGGFISDRFLTGLRPQEYYFHCMAGREGLVDTAVKTSRSGYLQRCLIKCLESLKVSYDHTVRDADGSIVQFCYGEDGVDVLKTSFLNEFKELADNRKAVLAKLGGCSKDPTLSKCNGYITELPPKLIDKAEEFLKHSKECCRYNIEAKELKELLKVKFLSSLVDPGEAVGVVAAQSIGEPSTQMTLNTFHLAGRGDMNVTLGIPRLKEILMTASDNIRTPVMKCPLLEHISEDDAKMVVAKLRRVRVADVVEKIEVCTVPFYNSNGRVSTLYKLQMKLYPQDQLESGLTIDECQATLRTVFVEAMEHAIEKHLDLLYKINEIRAVKIEDTEGSLLNGDEESQSRHADGGDTGTSDDDDQNDNDVDLGTDAEKMKRQEKDEMEYDDDTETEEGMGSESEESDEDPAESGDDSQEADKEHTISKSETTSVDDLPYSVKKGKKSKDDRGTAKLEEKNQNEGRLDDQKQGQIKKRRKKLKHTIHVESSDLDFEIHYAFHDEPHILLAQIAKKIARTILVKACNNIDHCKIVKPMHNHTRLETAGVNFEVVWNLSEYISVNDITSNDIHAMLKTYGVEAARGTIIKEVSGVFEPYGINVDMRHLSLIADFMTLDGGYRPMNRLGIGQFSTSPFGKMTFETATKFIVDAATHGEADFLECPSASVCLGKPPKVGTGIFGLLQNLELEQPKNI

SEQ ID NO: 50781 - protein, 131 aa, Zea Mays
MPDSDQKVFLKQGPYGYYVQVGEDKKGLFPKRVSLSKVKDIDSVTLEDAIELLQYPKILGKHPEDDNLVLITHSKVGYNIKHRRFIAQVPKNMDPKKMTLERALKLLSSKSVRRIGRLKGKVEKKEPIEWH

SEQ ID NO: 50782 - protein, 739 aa, Zea Mays
MRPRPSRFLQLLLVVVIACAVPGVRCSDRRFPHLDRVRELQRREGSSSAEQEAAARGLLARLLPSHSTSFEFRVISTSTELCGGKTCFVINNHPLFDGEGTPEILILGASGVEISAGFHWYLKHYCAAHISWDKTGGAQLSTIPRPGSLPRVPDGGVLIQRPIDWSYYQNAVTSSYSFAWWDWDRWEKEIDWMALQGINLPLAFTGQESIWQRIFERYNISKSDLDDFFGGPAFLAWSRMANMHGWGGPLPQTWLDDQLVLQKKILSRMYSFGMFPVLPAFSGNIPAALKSKFPSAKVTHLGNWFTVDSNPRWCCTYLLDASDPLFVEIGKMFIEEQIREYGRTSHIYNWCMLHNFAADFEMYGVLDALASGPIDARLSDNSTMVGVGMSMEGIEQNPIVYDLMSEMAFHHRQVDLQVWVKTYPTRRYGKPVKGLQDAWWILYRTLYNCTDGKNDKNRDVIVAFPDVEPFVIATPGLHVNTRQMYSTVPSKNYIRKDVSSDAYEHPHLWYDTNAVIHALELFLQHGDEVSDSNTFRYDLVDLTRQVLAKYANDVFLKIIESYKSNNMNQVTILCQHFLSLVNDLDTLLSSHEGFLLGPWLESAKGLARNSEQEIQYEWNARTQITMWFDNTETKASLLRDYANKYWSGLLQDYYGPRAAIYFKHLLLSMENNAPFALKEWRREWISLTNNWQSDRKVFSTTATGDPLNISQSLYTKYLSNADLLGLVEGTGSPWKSASL

SEQ ID NO: 50783 - protein, 500 aa, Zea Mays
MFIEEQIREYGRTSHIYNCDTFDENTPPLSDPNYISSLGAATFRGMQSGDNDAIWLMQGWLFTYDPFWEPPQMKALLHSVPVGKMIVLDLYAEVKPVWINSDQLYGVPYIWCMLHNFAADFEMYGVLDALASGPIDARLSDNSTMVGVGMSMEGIEQNPIVYDLMSEMAFHHRQVDLQVWVKTYPTRRYGKPVKGLQDAWWILYRTLYNCTDGKNDKNRDVIVAFPDVEPFVIATPGLHVNTRQMYSTVPSKNYIRKDVSSDAYEHPHLWYDTNAVIHALELFLQHGDEVSDSNTFRYDLVDLTRQVLAKYANDVFLKIIESYKSNNMNQVTILCQHFLSLVNDLDTLLSSHEGFLLGPWLESAKGLARNSEQEIQYEWNARTQITMWFDNTETKASLLRDYANKYWSGLLQDYYGPRAAIYFKHLLLSMENNAPFALKEWRREWISLTNNWQSDRKVFSTTATGDPLNISQSLYTKYLSNADLLGLVEGTGSPWKSASL

SEQ ID NO: 50784 - protein, 683 aa, Zea Mays
MPLQLEIKRKLAQRSERVKSVDLHPTEPWIMSSLYSGSVCIWNYQTQTMVKSFEVSELPVRSAKFIAQKQWVVAGADDMFIRVYNYNTMDKVKLFEAHTDYIRCVAVHPTLPYVLSSSDDMLIKLWDWDKGWMCTQIFEGHSHYVMQVTFNPKDTNTFASASLDRTVKIWSLGSPDPNFTLDGHSKGVNCVDYFTGGDRPYLITGSDDQTAKVWDYQTKSCVQTLEGHAHNVSAVCFHPELPIIMTGSEDGTVRLWHSTTYRLENTLNYGLERVWALGYMKGSRRVVIGYDEGTIMIKIGREAPVASMDSSGKIIWAKHNEVQTVNIKAVGADAEIADGERLPLAVKELGSCDLYPQSLRHNPNGRFVAVCGDGEYIIYTALAWRNRSFGSALEIVWSTEGEYAARESTSKIKIYSKNFQERKSIRPAFSGERIYGGVLLAICTNDFICFYDWAECRLIRRIDVNVKNVYWADSGDLVTIASDSSFYILKYNRDLVSSHLDGGASVGEEGVEDAFELLHEINERVRTGLWVGDCFIYNNSSWRLNYCVGGEVTTMFHLDRPMYLLGYLANQSRVYLIDKEFNVVGYTLLLSLIEYKTLVMRGDLEHANIILPSIPKEQHNSVAHFLESRGMLEEALDIATDPNYRFDLAVQLGSLEVAKEIAIEAHSESKWKQLGELAMSTGK

SEQ ID NO: 50785 - protein, 659 aa, Zea Mays
MSNSQNLASPKSEFYYVKGKRRFRTNKIEQGNSRPLDISKQVQLSKHELSNMRRSQVPLIRDTLSQLWENGMLPAIWFIFSRRGCDAAVEYLEDCRLLHDCEASEVELELRRFKMQYPDAIRESAVKGLMRGVAAHHAGCLPLWKSFIEELFQRGLVKVVFATETLAAGINMPARTAVISSLSKRIDAGRQLLTPNELFQMAGRAGRRGIDTVGHAVLVQTPYEGPEECCDIIFAGLEPLVSQFTASYGMVLNLLAGSKVTHKQKESDDVKDKHSGRTLEEARKLVEQSFGNYVGSNVMVAAKEETERIRQEIQYLSSEITDESIDRKCREELSEEDYAEISLLQKRLKEEKQIRNELKKKMELERMAAWKNRLEEFESGHLPFMCLQYKDKDSIQHTIPAVFIGNLNSFADQKIMNMVEDDSLVSGKPKRDSGEQLYRPSYYVALSSDNSWYLFTEKWIKTVYKTGLPAVPSVEGGTLPRETLKQLLLREELVWDKVEKSEYGSLLSMEGSLDTWSWSLNVPVLNSLSEDNEVERFSQEHQDAVECYKQQRRKVSHLKKTIKATRGFKEFQKIIDMRNFTKEKIERLEARSRRLTRRIRQIEPTGWKEFLQISKVIQEARALDINTQEQGPLGSKAISTGSSLWKFSFRRDQTSSLEK

SEQ ID NO: 50786 - protein, 92 aa, Zea Mays
MDQAVEPRSRDRVSRMFRTGAEMGLTVCRSWAFNDDTYNALQVSPGHFDERIFKTGNALGDSDTEEWLVAVKVISSWSGSVIMLMFASMVST

SEQ ID NO: 50787 - protein, 652 aa, Zea Mays
MDNMLGDLYKPDDGDDFYSKKYRDELENVSFQLLEEITDGFSESRELGRGSFGVVYRGLTKNGDYVAVKKLHANVTDLNHKQFQNELYNLAKLKHENIVRIYGYCYEIKKTFMEHDRRKILVEEPRIALCLEYLHNGSLQDHISDEFSGLDWDTRYRIMEGVCRGLYHIHRNLKKPLYHLDLKPANILLSKTMQPKLADFGLSRIFRNEELTRTTKSPLGTLGYQPPEYIERGEVSEKFDIFSLGVVMIHLVSGRGGFERYACMHSEEFINQVKTNWRKRFKQLQRNSLRKVKVYCHEVETCTRIALNCVEKDTQKRPDIDMVINNLKDRKTHRFKSTWTSSFRQDGRMYGSYMPYSNRYLNKLMSGSICTETKFYRREKLPNVGEEFIIGRKEEKQKIVASLLQSMTQHITILPIYGIGGIGKTTIAKLIYYDTNFNSYSRVWVYVSPKFDLKKVGNTVISQLSSEESQINETQMIHSCLMKLLSGKKVLIVLDDLWEDSLFQLNNLKDMLSYGDSINVIVIVTTRSKHVAENVSTNVEPHKIEPLTDSMCWDIMKQRSNFEAKNHKEHLAHIGMEIAVKCGGVALAAQSLGFMLKPMELCDEWIEVRDSDIWNKSISKDANSPNHICEKYILQLIGLSFIQDTMSPKVLQ

SEQ ID NO: 50788 - protein, 1512 aa, Zea Mays
MDNMLGDLYKPDDGDDFYSKKYRDELENVSFQLLEEITDGFSESRELGRGSFGVVYRGLTKNGDYVAVKKLHANVTDLNHKQFQNELYNLAKLKHENIVRIYGYCYEIKKTFMEHDRRKILVEEPRIALCLEYLHNGSLQDHISDEFSGLDWDTRYRIMEGVCRGLYHIHRNLKKPLYHLDLKPANILLSKTMQPKLADFGLSRIFRNEELTRTTKSPLGTLGYQPPEYIERGEVSEKFDIFSLGVVMIHLVSGRGGFERYACMHSEEFINQVKTNWRKRFKQLQRNSLRKVKVYCHEVETCTRIALNCVEKDTQKRPDIDMVINNLKDRKTHRFKSTWTSSFRQDGRMYGSYMPYSNRYLNKLMSGSICTETKFYRREKLPNVGEEFIIGRKEEKQKIVASLLQSMTQHITILPIYGIGGIGKTTIAKLIYYDTNFNSYSRVWVYVSPKFDLKKVGNTVISQLSSEESQINETQMIHSCLMKLLSGKKVLIVLDDLWEDSLFQLNNLKDMLSYGDSINVIVIVTTRSKHVAENVSTNVEPHKIEPLTDSMCWDIMKQRSNFEAKNHKEHLAHIGMEIAVKCGGVALAAQSLGFMLKPMELCDEWIEVRDSDIWNKSISKDANSPNHICEKYILQLIGLSFIQDTMSPKYSQAYKKGLTLFTMHDLVHDLARLLTAGEILDASNIGTMDARHVAREPATRSLFHGYMHAKSNFRSFIRTNSNIYTYRRRREPEGSGQQYKYALLTNCHKPLEVLTDSPNMIRALHFRDCHGSKGLKDYAFLPAKLSLKVLDLSGCNIAYLPASIGELAVLRYLNAPEIKNEMLPDSLSKLSKLIYLNLSGSNISALPDSIGDIEGLMHLDISNCVLLCELPESFVDLKNLVYLDLSHCQIKITARVFSGLTNIQHLNLSKSLIHGGDGLEGLQEAVGGLTELRYLNLSGCFENLRPDEVLSFVDRICRLTNLVHLDLSFNLGLVSVPESIGSLRKLHTLDLLCCRNLVTLPKCMFNMDSMKMLNVTCCPHLDQSTLPRYRYFTLPYFEVHADDGESTSNIGLLRYVNPTHELYISGLDNTISAEEVDSINLSQKQGIQSLSLSWTRDAQRSVEDMEVLGKLVPPDTLKCFELRGYDSMSFPTWVMGITLYLPRLTKVVLWELRKCNSLPPLGQLPTLQKLVIGGMDSTLTVDEGFCCAGPGAFPLLQELQLCQMENLEVWNTTYSCGQSNEDVQEFMFPNLRELLIRDCPKLRLKPCPPKTVGWKIENSDNVLSSWDEEGEIDLAALFPSRKEFKKLWEGKTKVPAACSAQFEKCRKPGASYNACPERVEVKSSKLPLGKWRLFRHLLPTYDLRISCCTYATSGSSQEIIQGLAFIESLCLEDDAQSELPNWLGELTSLETLEISKYPGLEAPLDGMKQLAHLRKLSLINCRSMSALPQWLGELISLKELIISEWPNLSDFPESMQLLTSLKMLRLERCPRITALPGWLGDLASLKILVISNCKGIVSLPDSIQKITRLVRV

SEQ ID NO: 50789 - protein, 312 aa, Zea Mays
MSTLPEEAANAEQSFKTLEVACHELRNSRLFKKLLEAVLKTGNRMNDGTFRGGAQAFKLDTLLKLSDVKGVDGKTTLLHFVVQEIIRSEGVRAVRAAKEQNNSSISSVTSDDLTEDVSDDTEHYKQLGLGVVSSLGDDLQNVRKAAILDADTLTISVASLGHKLVKANEFLNTGMKSLDEDSGFHRKLGEFIEQSQVRVTQLLEEEKKLRALVRTTVDYFHGSTGKDEGLRLFVVVRDFLGILDKVCREVKEAAAKAAANNKKPSAAGSGSKGRQPSQSSSSFRDPRQQLVPAIKDRRSAAARSSSSSSDSD

SEQ ID NO: 50790 - protein, 327 aa, Zea Mays
MLSFSGSYVALTIKTGIMTGILSLTEGIAVGRTFASINNYQVDGNKEMMAIGLMNMAGSCASCYVTTGSFSRSAVNYSAGCRTALSNVVMAAAVLVTLLFLMPLFHYTPNVILAAIIITAVVGLVDVRGAARLWKVDKLDFLACVAAFLGVLLVSVQTGLGVAVGISLFKVLLQVTRPNVVVEGLVPGTQSYRSVAQYREAVRVPGFLVVGVESAVYFANSMYLVERVMRYLRDEEERALKSNHPSIRCVVLDMGAVAAIDTSGLDALSELKKVLDKRNIELVLANPVGSVAERMFNSAVGESFGSGRLFFSVAEAVAAGACKAAQP

SEQ ID NO: 50791 - protein, 98 aa, Zea Mays
MTEEYEMIWLSLVENYVFVAVNQGVCRRGCRWRAHRLVSAAAPCRAHQPAEVSGASIIARVLGVALPYPAVQEAIQKQEVRHTALKCGNIDIFFFCTL

SEQ ID NO: 50792 - protein, 262 aa, Zea Mays
MLVQWLDGGSQEGFAFSHCTTCKAPYYLRVHSHTDRKWRTLKFRFFVTRDILFIFALVQTVISALAYLVHFLDGYQQYWLRTAWGFDNQVSFYYICGALLFFALLGLSGCFITCYDRRVRNDLAQPCRELCLCCCQPGMCADCHLPGTLCMWTDCTTCFEGCATTAGECGGCLGGAGEAGLPLLLIMGVIVLGLFTVIGIFYSVLVATMVGQRIWQRHYHILAKRMLTKEYVVEDVDGERTDWCPPPLPAEHISQLRSLGLL

SEQ ID NO: 50793 - protein, 527 aa, Zea Mays
MTSSESGAPAALATAFKEAQKYSPCIILLRHFDAIGNASSNEGPQSEQSGIASNIESVIKQYIGQRWVAKDSLPGKDVNGSSYLVEPECVSSLQIILVATADSSEGMQQSIRRCFRYEIDMKTMNEEQRNELISETLQGIPKVADESICDKFIKDLAAQTSGFMPRDILALVADAGVSFAHKIAAGKDSKAISKHTEVLPESSSATQNEEHHFSKEDIMSSLERAKKRNRAALGTPKVPNVKWEDVGGLEDVKKVILDTIQLPLMYKHLFSSKLRKRSGVLLYGPPGTGKTLLAKAVATECSLNFLSVKGPELINMYVGESEKNVRDIFEKARSARPCVIFFDELDSLAPARGSSADSGGVMDRVVSQLLVEIDGLSDNSQDLFIIGATNRPDLLDSALLRPGRFDKLLYVGVNTEASYRERILKAQTRKYKLHKNVSLLSVAQRCPPNFTGADIYALCADAWFHAAKRSVETFEIDPSRSNEASAEEVIVEIDDFITVLGDIAPSLSLDELQNYEQLRQKIEGPSR

SEQ ID NO: 50794 - protein, 785 aa, Zea Mays
MASGGGGIRATTSGRMKSRGWGDSSDDFGTPAIALRRGGDCSGTASSDSSAVFFAVAFCAPSPGLSVTAAAAMVEMRQRRKPLVLASTQALLDSLPGDRPPPPPQKPVRLKAGVLRFPSGGGGAEFGELASFVGIPAPALRRLAVVTGTPVLVKNTDNNVGRIVKAVLFGNPSLDKSCSEHTDQVVSASLSGHAMGFLPCRTFPAIGFTSMDEDVGYVSPLLAFNLGLHVSCLKLLIQREGQPFKFCSRAEEIDATASSGSDLSLHLDLLPCPQVPKYALHLRVSVVRIPDCGVLASLKIYSSFGGSEYQDMVDQALNEYFKFDRFLARGDVFGIQNSWKCGSSCCLACNKQDNKLNPRNMIYFKVTGMEPSDEPILRVNCNETALVLGGAASAAIPPYSFFASSGNSVPLHSEVVEHLASVIAPALCPSDILPKIKFSTFLYGPPGCGKRTVVRHVANHLGLHVVECSCHDLMTSSESGAPAALATAFKEAQKYSPCIILLRHFDAIGNASSNEGPQSEQSGIASNIESVIKQYIGQRWVAKDSLPGKDVNGSSYLVEPECVSSLQIILVATADSSEGMQQSIRRCFRYEIDMKTMNEEQRNELISETLQGIPKVADESICDKFIKDLAAQTSGFMPRDILALVADAGVSFAHKIAAGKDSKAISKHTEVLPESSSATQNEEHHFSKEDIMSSLERAKKRNRAALGTPKVPNVKWEDVGGLEDVKKVILDTIQLPLMYKHLFSSKLRKRSGVLLYGPPGTGKRQRSRTDKHVCWRIREKCSGYF

SEQ ID NO: 50795 - protein, 372 aa, Zea Mays
MKNSGGGAAHGDGGDIYNVRAAEILANEALLLPINEAAPIYENLLATFPTAAKYWKQYVEAYMATNNDEAAKQIFSRCLLNCLHISLWRCYINFIRRINDKRGSEGLDETKKAFDFMLNYVGNDAASGPVWMEYINFLKSMPVVTPHEESHRMTTVRKVYQKAILVPTNHVEQLWKDYENFENSVSRTLAKGLLSEYQPKFNSAKAVYRERKKYIDDIDWNVLATPPTGSYKEEQQCMAWKRLLVFEKGNPQRIDATTANRRITFTYEQCLMYLYHHPDIWYDYAMWHVKNGSMDSASKIFQRALKAIHDSEVLKYAFAEMEESRGAIQTAKTVYESLLGENASETSLANIQFIRFLRRTEGTEAARGTKCF

SEQ ID NO: 50796 - protein, 1049 aa, Zea Mays
MTAEGTACNGAGEALKAEFAPEKVVAVSLEEKPVGEREGEDVGGPFLIVNGGDSDGHSEPGSDLGKAPDEDPASEEDDVPTFNAAPDAAVAGDHGTAEGQVGAQGAALGASSADGGDRASDGSEGSADESRGDPSSDCVAEVAQQEAVGEEDSGAAALASRECEPTITSADSEAHYVDSEVEDKEGTVDGSAVVDAVEAVVHQEASTEQDEDAAVMSSGHDDALTSPKSCSAAVESEVIREDSKEQSITDGVEPQQQGTVGASTLVENEHLCADMMADSFVAANEPDSQEDAAVMSSGHDDALTSPKSCSAAVESEVIREDSKEQSITDGVEPQQQGTVGASALVENEHLCVDMAADSFVAATEPDSQEDAAVESCGHDDLLTFTESGSADIESEVYGEDSEQKESNTVVVEIVVQGVGRADVLMANGHLCADTQAGSSEATTEPENHANGSKLTDVAESVEGDAGSGEQDTMDSSQTNGHIYVALSADSCIVPSESKAHSFETDGQRTDQLQEEAPKLEAEVLEGVLKPTERNCAGSVEKLIGEEVGTDGHASIGGTADAYGEQEAKPMQVEGEVTCGILEFEKVDKDGEEGLCDDYTVGVVSSNEETELPMKEKVDEAVPSVNVGGPEKVTDNTSQDTKTVDFIDEITAESNFKAENMVEVKSAAREVDKTEVKDLAFADEANVAPLHLQRDCESVMETIEHEKVELPGGCQAHEIVYSSELEPKKEFEMGVDGAVPLQGAAASVASVFHHEPMSIDLSENDSGNHSGPTTALESCDHVQNEESISQEISMTTIEQPIAIDQVEPVNLNVDELVVDDDQPGFAPRCESARLDKPGCTSKKDDSNEIVEDSKSLENQLEICNAATMSDECSSRNANEDPSPINMSAECSSRTANEGFSPINEASHLAEESCLSDKSYNAISYENGNGPAKSSEEPDKSCNAIICENENEPAKSSDVVETRCVEALAPSSVGTVVTAEQKDNGHRASGEWHGDNVQVIGQQQKIYIIKVPKFAGDDLWNKIQAAQAHLDHLTQERDAINRRRQKQKGEA

SEQ ID NO: 50797 - protein, 869 aa, Zea Mays
MSASASAGKLAAALHRRTRRVTSALACAALEWVLIALLLVNGLLAYAVARFADYFGLSPPCLLCSRVDRLFQAEGGGGGDASGAGARWLRDALCDAHAAEISALGYCLRHRRLAEAGEMCVGCRPSSWKERTSDAGACACCEAAAVLRASPVRELEDTTRDARVSEKEVEDGDQGYVLLAQDDHEEEPDEVENRQQEPQSEVDGRQHLEDEVMAAVQDESLEFMDQVEDITIEDDRLVSVVALDEMTIADDSGLHRDVEEVDGTNHVVEDEQDPRDVDVGAVLEEKRMLDSSVATPVDLTEDSVVPTSPVPCPETSTDPSHPDHSSVSQDDGDVLEDTSTAEEEHIFVPQVSEAVSEDDNRTAAEVDTNCEVSIGSDICEREQDEHVVPFQDLAAFEELVAPLATGDDLPLPSEVLEPPDQVEAGEVEQEDVTTSTGLDLQPNEQNEIEEDRAPETPTNSVATQRSDRMFLLERKRSLSLSLDGSVASEMEGSEPSTVDQLKSALQAERKALGALYAELEEERNAAAIATNQTMAMINRLQEEKAAMQMEALQYQRMMEEQSEYDQEALQLLNELVSKRAREKQELERELELYRQKVQHYEDKERRRTASFKANGVSPSGSGTSVSSSGEDSDGHSDDYCELGDSPDGGNVQSSSDAALSSMRDQDDGTKHLAALDDSLTYFEVERLSILEELKTLEERLFTLEDDDINTSKEVTGHSSSDMDLPHDGLQSPEYILTGDRPRFGGRASISRGKSLLPLFDAVGDEACDRMPPSAGAGEADQADDAATKPASVLVKEQERLAIIEEVDHVYERLQALEADKEFLRHCIKSLKKGDKGMDLLQEILQHLRDLRSVELHVKNAGGAMAANSA

SEQ ID NO: 50798 - protein, 675 aa, Zea Mays
MQQAGLADDDDEEIWVKEEDDEEEEDGYYMDPRSPAVWTPGGRAGGTSNRRRAREEKERTKMRERQRRAITGRILAGLRQHGNYRLRARADINEVIAALAREAGWVVLPDGTTFPSSSSFAAVAAQPPRPVMVAAASPSATPLALPASSALPLRGIAPVAARPISHRPAPAFALLLPPRAAAASRSPADDVPDGNSSHLLAVPVPVPMDPAAAEDVPVAKQLQVPDVSPRPPERDFAGTPYVPVYVMLPLGVVNGNGEVVDADELVGQLRVLKASGVDGVMVDCWWGNVEAHKPQEYNWTGYRRLFQMIRELKLKLQVVMSFHECGGNVGDDISIPLPHWVIEIGRSNPDIYFTDRAGRRNTECLSWGVDKERVLQGRTAVEVYFDFMRSFRVEFDEYFEDGIISEIEIGLGACGELRYPSYPAKHGWKYPGIGEFQCYDRYLQKSLRKAAEARGHTIWARGPDNAGHYNSEPNLTGFFCDGGDYDSYYGRFFLSWYSQALVDHADRVLMLARLAFEGTNIAVKVSGVHWWYKTASHAAELTAGFYNPCNRDGYAPIAAVLKKYDAALNFTCVELRTMDQHEVYPEAFADPEGLVWQVLNAAWDAGIQVASENALPCYDRDGFNKILENAKPLNDPDGRHLLGFTYLRLGKDLFERPNFFEFERFIKRMHGGNIS

SEQ ID NO: 50799 - protein, 1215 aa, Zea Mays
MADLALAGLRWAASPIVNELLTKASAYLSVDLALVGLRWAASPIVKELLTKASAYLSVDMVREIERLQDTVLPQFELVIQAAQKSPHRGKLESWLRRLKKAFYDAEDLLDEHEYNVLKAKAKSGKGPLLREDESSSTATTVMKPFNSAINMARNLLPGNKRLITKMNELKNILEDAKQLRELLGLPHGNIAEWPTAAPTGVATTTSLPNSKVFGRDGDRDRIVDFLLGKTTTAEASSAKYSGLAIVGLGGMGKSTLAQYVYNDKRIEECFDIRMWVCISRKLDVHRHTREIMESAKKGECPRVDNLDTLQCKLRDILQESQKFLLVLDDVWFEKSHNETEWELFLAPLVSKQSGSKVLVTSRSETLPAAICCEQEHVIQLQNMDDTEFLALFKHHAFSGAEIKDQLLRTKLEDTAEEIAKRLGQCPLAAKVLGSRLCRKKDIAEWKAALKLGDLSDPFTSLLWSYEKLDPRLQRCFLYCSLFPKGHRYESNELVHLWVAEGFVDSCNLSRRTLEEVGMDYFNDMVSGSFFQLVSQMYRGSYYVMHDILHDFAESLSREDCFRLEDDNVTEIPCTVRHLSVHVQSMQKHKQIICKLYHLRTIICLDPLMDGLSDIFDGMLRNQRKLRVLSLSFYNSSKLPESIGELKHLRYLNLIRTLVSELPTSLCTLYHLQLLWLNHMVENLPDKLCNLRNLRHLGAYSSDAYDFVNERPICQILNIGKLTSLQHIYVFSVQKKQGYELRQLKDLNELGGSLRVKNLENVIGKDEAVESKLYLKSRLKELALEWSSENGMDAMDILEGLRPPPQLSKLTIEGYRSDTYPGWLLERSYFENLESFELSNCSLLEGLPPDTELLRNCSRLRINSVPNLKELSNLPVGLTDLSIDCCPLLMFITNNELGQHDLRENIIMKADDLASKLALMWEVDSGVIRRVLSKDYSSLKQLVTLMMDDDISKHLQIIESGLEESEDKVWMKENIIKAWLFCHEQRIRFIYGRTMEIPLVLPSGLCELSLSSCSITDEALAICLGGLTSLRTLQLEYNMALTTLPSEKVFEHLTKLDRLVVIGCLCLKSLGGLRAAPSLSCFNCWGCPSLELARGAELMPLNLDMELSILGCILAADSFINGLPHLNHLSIYVCRSSPSLSIGHLTSLESLCLNGLPDLCFVEGLSSLHLKHLSLVDVANLTAKCISQFRVQESLTIARSRQFHLKNLQISHPSST

SEQ ID NO: 50800 - protein, 319 aa, Zea Mays
MDAGTNERRFVGRVDCRGGPAPGWVHSFPITDHYVVVPEMPLRYCARNLLRAEPTPLYKFEWHLESGSYMHVMCKASGRVVATVEVPPFVTFHFINAYEEKDDEGRVTAIIADCCEHNANTSILDKLRLQNLRSSTGQDVLPDARYGTKFRSERERLVSESDVRAVVLGGTGRDIQGGPLQDPAGREPVRRAGAGAGPGPARPRDGHVQHQPGPRRQEVPVRLRLRSPPAVQLPQHPHQDRPGGEDGQELVRGGRRAVRALLRAAPRRRGGGRRRRDLDGERQGRIGLRVGAGRQDVPRDRAGQVPVRDALRLALLLGA

SEQ ID NO: 50801 - protein, 542 aa, Zea Mays
MSPTMASSLCVFAAMSGASGRPSAGGSAVPGRLSSSTQGGKGKRAVVQPLAASVVTETPAPAVAPARPVVDAPPRRRGGRGTVEHAAWKSVRQERWEGALELEGELPLWLDGTYLRNGPGLWNLGDYGFRHLFDGYATLVRVSFRDGQAVGAHRQIESEAYKAARAHGKVCYREFSEVPKAEGFLSHVGQLATLFSGSSLTDNSNTGVVRLGDGRVLCLTETIKGSIVVDPDTLDTIGKFEYTDRLGGLIHSAHPIVTDTEFWTLIPDLIRPGYSVVRMDAGTNERRFVGRVDCRGGPAPGWVHSFPITDHYVVVPEMPLRYCARNLLRAEPTPLYKFEWHLESGSYMHVMCKASGRVVATVEVPPFVTFHFINAYEEKDDEGRVTAIIADCCEHNANTSILDKLRLQNLRSSTGQDVLPDARVGRFRIPLDGSPFGELEPALDPDQHGRGMDMCSINPAHVGKKYRYAYACGAHRPCNFPNTLTKIDLVEKTAKNWRRDLDGERQGRIGLRVGAGRQDVPRDRAGQVPVRDALRLALLLGA

SEQ ID NO: 50802 - protein, 95 aa, Zea Mays
MAGELGQQTVELGAVVRRAAEESYLALRELVEKSQAEAEGKGIGAGANGSWQRSDTEKKIDLLKFITRTRQRMLRLHVLAKWCQQCSGIVKIGDC

SEQ ID NO: 50803 - protein, 788 aa, Zea Mays
MKGLSSRTSALNTASECLHILRFWSRDYGRGISLAESSHSLTVLVSIVSFLQAELNISDKPANATGISSRNSGSANSKNSNIWDMKISAFSMLEDILSKVASNMTENLWQSVIEVLRKVMDFVTARNLVIESSIMSRFYTSFLRCLHLVLVDPKGPLSGHVAGFVANLQIFFVYGLRSSSPPTLAPKETRTDSKPRASRGRYRPPHLRNKERRENDSLEGQNSDSEYSWYDMSSSDSDLSDSDGYAKSGDRFRSSKARLAAILCIQDICHADPKLLTSQWPVLLPENDVLQQRKYQATLMTCLLFDPITKVRVEAASTIATMLERQALVLTQVAEYKESSKRGSFTTLSSSLGQILMQLHTGALYLIQRETQATLLAALFRVLILLISATPYARMPKELLPTVIKVLCSRLLNKHSNKTEHYAVLVTVLSCLETAFSKVPPTLDVFAVLTEDCCAGPSHEQEESNVIAFLLHCIEEEMHYSVRHGAFQVLRSAVHNYPSCANMIWEKLRDNVLNLLQIQSFEDQKYDANFGPPGAKEESSIKGRCLVAGIKVMDECLRVSSGFTGADDIKECRLLDIQQISDCTINKTIKSAPHFEMEAAGSSQNCTLDITLGINRWIEVIETHLPQGLSHGSAMVRTASLTCFAGMTSDVFFSLPENKRDYVTSSSVHAALNDMVPSVRSAACRAIGIVACFPQILSSLPGKFIDAIEFNTHNSSTPVRVTAAWALANLCSCIRFRALEVHTDPYAGVGVLSKSSISLLVEVALRLAKDSEKKRILSSGGIALNGGS

SEQ ID NO: 50804 - protein, 803 aa, Zea Mays
MSSSDSDLSDSDGYAKSGDRFRSSKARLAAILCIQDICHADPKLLTSQWPVLLPENDVLQQRKYQATLMTCLLFDPITKVRVEAASTIATMLERQALVLTQVAEYKESSKRGSFTTLSSSLGQILMQLHTGALYLIQRETQATLLAALFRVLILLISATPYARMPKELLPTVIKVLCSRLLNKHSNKTEHYAVLVTVLSCLETAFSKVPPTLDVFAVLTEDCCAGPSHEQEESNVIAFLLHCIEEEMHYSVRHGAFQVLRSAVHNYPSCANMIWEKLRDNVLNLLQIQSFEDQKYDANFGPPGAKEESSIKGRCLVAGIKVMDECLRVSSGFTGADDIKECRLLDIQQISDCTINKTIKSAPHFEMEAAGSSQNCTLDITLGINRWIEVIETHLPQGLSHGSAMVRTASLTCFAGMTSDVFFSLPENKRDYVTSSSVHAALNDMVPSVRSAACRAIGIVACFPQILSSSSLPGKFIDAIEFNTHNSSTPVRVTAAWALANLCSCIRFRALEVHTDPYAGVGVLSKSSISLLVEVALRLAKDSEKVKSNAVRALGYLSRFIRFNYHAGTINDPSDSVFYGDPVWLERMVQALMSCVTTGNVKVQWNVCHALSNLFMNDTLRLQDMPWASSVYSILLLLIRDSNNYKIKMHAAVALSVPVSRLDYGSSFPDVVRGLVHALESLNSNNSSLPSNFKQRDNLEKQLTFTALHLLSFVSPNDDPSLKDFLTKKSSFLEDWLRSLCASFNSSERQPLPTEATNDEDGFSPNVTQKGMLSSALQSLLGVYAGRTQQVITQRFEQLARSVA

SEQ ID NO: 50805 - protein, 805 aa, Zea Mays
MSSSDSDLSDSDGYAKSGDRFRSSKARLAAILCIQDICHADPKLLTSQWPVLLPENDVLQQRKYQATLMTCLLFDPITKVRVEAASTIATMLERQALVLTQVAEYKESSKRGSFTTLSSSLGQILMQLHTGALYLIQRETQATLLAALFRVLILLISATPYARMPKELLPTVIKVLCSRLLNKHSNKTEHYAVLVTVLSCLETAFSKVPPTLDVFAVLTEDCCAGPSHEQEESNVIAFLLHCIEEEMHYSVRHGAFQVLRSAVHNYPSCANMIWEKLRDNVLNLLQIQSFEDQKYDANFGPPGAKEESSIKGRCLVAGIKVMDECLRVSSGFTGADDIKECRLLDIQQISDCTINKTIKSAPHFEMEAAGSSQNCTLDITLGINRWIEVIETHLPQGLSHGSAMVRTASLTCFAGMTSDVFFSLPENKRDYVTSSSVHAALNDMVPSVRSAACRAIGIVACFPQILSSSSLPGKFIDAIEFNTHNSSTPVRVTAAWALANLCSCIRFRALEVHTDPYAGVGVLSKSSISLLVEVALRLAKDSEKVKSNAVRALGYLSRFIRFNYHAGTINDPSNSDSVFYGDPVWLERMVQALMSCVTTGNVKVQWNVCHALSNLFMNDTLRLQDMPWASSVYSILLLLIRDSNNYKIKMHAAVALSVPVSRLDYGSSFPDVVRGLVHALESLNSNNSSLPSNFKQRDNLEKQLTFTALHLLSFVSPNDDPSLKDFLTKKSSFLEDWLRSLCASFNSSERQPLPTEATNDEDGFSPNVTQKGMLSSALQSLLGVYAGRTQQVITQRFEQLARSVA

SEQ ID NO: 50806 - protein, 177 aa, Zea Mays
MYCSSTQDVKFIQFQLTVNVAALIINVVAAVSSGNVPLNDVQLLWVNLIMDTLGALALATEPPTNHLMERPPVGRREPLIINIMWRNLIIMALFQVSFLLTLNFKGISLLQLKNDDPAHADKVKNTFIFNTFVFCQVFNEFNSCKPDELNVFKGISENHLFIGIIAITVVLQVESLE

SEQ ID NO: 50807 - protein, 190 aa, Zea Mays
MPKDEARVVESQGILEVSEHSMAKDDAEVAQPQGTAEVFEHFLSKDEGKVAQCQGTFHFPEHSRPKDDSGKTARHDMDTSETCKTADAPALSDLTENEGILSDQTESEDKPDPGNQQREIEANKFDLKNFEKNLNANDSNASDQSGSDTVNEAKTHARGDNPKLEESANTGLLGSLRSFAYGIRNFWKNM

SEQ ID NO: 50808 - protein, 357 aa, Zea Mays
MLRLINAALNDELFFSVANHSLTVVEVDAVYVKPFTVDTLPIAPGQTTNVLLAAKPFYPGANYYMSAKPYSTARPATFDNTTVAGILEYEYPDAPSSSAASFDKALPLHRPTLPQLNDTSFVGNFTAKLRSLATPQYPAAVPRTVDRAFFFTVGLGTHPCPGNATCLGPTNTTQFAAAVNNVSFVLPTRALLHSHFAGLSSGVYSSDFPVAPLTPFNYTGTPPNNTNVASGTKLMVVPYGANVELVLQGTSILGVESHPLHLHGFNFFVVGQGYGNYDPVNDPPKFNLVDPVERNTVGVPAGGWVAIRFLADNPGVWFMHCHLEVHTTWGLRMAWLVLDGSLPHQKLLPPPSDLPKC

SEQ ID NO: 50809 - protein, 266 aa, Zea Mays
MSAGFDKQILAQKLSKLNSSQQTIETLSHWCVFHHRCCQQVVETWDSEFHAAPVERRVSLLYLANDIMQNSRKEGNGYIAEFMRVIPAALNGVLTVRDDFGRNVPKRLIDIWEDRKIFDTQAQSLKDDFFRRLKDIRNQLKNTGSEQLEKVVSSYKHVLNAPMDEDTLMRKCQAALINFDELNKTYGNNSILGSSNRSGFMQELQEQHSILRNSIEQLKVSESLRATLIFHLKEALNEQELKVEHLRSQLQGKKQFTRLLMVFHYE

SEQ ID NO: 50810 - protein, 286 aa, Zea Mays
MGSFSEPEYSVQSQCLKTTYKTRVRIMSAGFDKQILAQKLSKLNSSQQTIETLSHWCVFHHRCCQQVVETWDSEFHAAPVERRVSLLYLANDIMQNSRKEGNGYIAEFMRVIPAALNGVLTVRDDFGRNVPKRLIDIWEDRKIFDTQAQSLKDDFFRRLKDIRNQLKNTGSEQLEKVVSSYKHVLNAPMDEDTLMRKCQAALINFDELNKTYGNNSILGSSNRSGFMQELQEQHSILRNSIEQLKVSESLRATLIFHLKEALNEQELKVEHLRSQLQGLKRLLIPL

SEQ ID NO: 50811 - protein, 294 aa, Zea Mays
MSAGFDKQILAQKLSKLNSSQQTIETLSHWCVFHHRCCQQVVETWDSEFHAAPVERRVSLLYLANDIMQNSRKEGNGYIAEFMRVIPAALNGVLTVRDDFGRNVPKRLIDIWEDRKIFDTQAQSLKDDFFRRLKDIRNQLKNTGSEQLEKVVSSYKHVLNAPMDEDTLMRKCQAALINFDELNKTYGNNSILGSSNRSGFMQELQEQHSILRNSIEQLKVSESLRATLIFHLKEALNEQELKVEHLRSQLQRIQTRGDASPCVVELRKLFYCCTFSQSACNSQFSELVLVLVPE

SEQ ID NO: 50812 - protein, 240 aa, Zea Mays
MERRQPSNQGLKRSSLSDPLSTVAPEAVKSLQKGQSSAVLYSQEGNGVEHSVTETKLAAGAASDDIRGGALSSRVNGGNTMLKIEEHTSGNKRQKLEDDAHISQPRSESPPPPPPPFPHPDTFQPPPPPPEYPRSPDPSPPPPRTSLPPHIIPPPPPPPPAMPLHMFSHLPPPAGTFVPFPAGPPGPMYCTYPSFTPVVNFPMTSPPGFRNLTPPPSFRGLAGTFYGPRFPTAPPPADRK

SEQ ID NO: 50813 - protein, 427 aa, Zea Mays
MASSGVRNGVGSRMSAKPDRQGAGATPKTAAGKHRLSSAAAGGGAYRRTSSGPLHAAAGGRAASDGVSSRVRVAVRLRPRNAEELVADADFGDCVELQPELKRLKLRKNNWESETYEFDELLTEFSSQKRVYEVVAKPVVESVMEGYNGTVMAYGQTGTGKTFTLGRLGEEDTAARGIMVRAMEDILADITPGTDSVSVSYLQLYMEMIQDLLDPVNDNIAIVEDPRTGDVSLPGATVVEVRDQKSFVDLLRVGEAHRVAANTKLNTESSRSHAILMVNVRRSVKGRTEMDVSISGENGHSLSMMGSLRPPVVRKSKLVVVDLAGSERIDKSGSEGHTLEEAKSINLSLSALGKCINALAESSPHVPVRDSKLTRLLKDSFGGTARTSLVVTIGPSPRHRGETTSTIMFGQRKMKGKGSILTMKLRE

SEQ ID NO: 50814 - protein, 1018 aa, Zea Mays
MWIWSLDIEQILKEAQHRWLRPAEICEILKNYRNFHIAPEPPNRPPSGSLFLFDRKVLRYFRKDGHSWRKKKDGKTVKEAHERLKSGSVDVLHCYYAHGEGNENFQRRSYWMLEEDFMHIVLVHYLEVKGGKSTSRIRGHDDMLQAARTDSPLSQLPSQTTEGGNSLSGQASEYEETESDIYSGGAGYHPFSWTQHHENGGGPVIGTSIPSSYVPALPLGNLQGFPATVTNTDIYSRQDALPVTLNEPGLAIEFNGADNQLDPSSLNGLVKPFLQMSTPQSTVPSELFPFTEEHGNESFTFHEVYSNGLSIKDAEIVGTNEESVWKLPGAISSIPSEDSFQQNDRSLEETISYPLLKTRSSNLSEMLKDSFKKSDSFTRWMSKALGEVDSQIKSSSGVYWNSEETNNIIETSSCDQLDQCTIDPVLAQEQLFSIVDFSPSWTYAGSKTRVLINGKFLNSAELKRCKWSCMFGEVEVPAEISADGILRCYSPSHKPGRVPFYVTCTNRLACSEIREFEFRPSVTQYMDAPSPHGATNKTYLQMRLDNLLSLGHNEYQATVSNPTKEMVDLSKKISSLMTDNDSWSQLLKLASDNEPVTDDDQDEFFEKHLKEKLHIWLVHKASDGGKGPNVLDDEGQGVLHLAAALGYDWVIRPAVSAGVNINFRDAHGWTALHWAAFCGRERTVVALIALGAAPGALTDPTPIFPTGSTPADLASANGYKGISGFLAESSLTSHLQTLDLKEGKGSNPPEISGLPGIGDVTERRASPLAGEGLQAGSMGDSLGAIRNAAQAAARIYQVFRVQSFQRKQAVQYEDDNGAVSDDRAISLLSVKPSKPVQLDPLHAAATRIQNKYRGWKGRKEFLLIRQRIVKIQAHVRGHQVRKHYRKIIWSVGIVEKIILRWRRKGAGLRGFRSTEGATVGSSSNLIQNKPEDDYDFLQQGRKQTEERLQKALARVKSMAQYPDARDQYQRILTVVTKIQESKAMQEKMLEESTEMDEGFFMSDFKELWDDDIPMPSWS

SEQ ID NO: 50815 - protein, 1182 aa, Zea Mays
MIKEPGELIVSPKVPVVQDADVKGVDMMEVETAPVRNAKTVPSEESAVTPGVAEGKACAAADLSSLIASEEAGSQNDIDNDRPKTSLCHADSMKIKVSDELPVKQWTYCDHMSDLHSSFTSANNDIAKEMNEVLFKSLPAGTSALDLLASSDLLSQRKIDLIVKERLGVRKTRLRLKEQILTMKFKAYRHLWKEDVRLLSAKKQRLKSNKRIDQNNRTSQIGSQRQRFSNRSRLAMPAGNLSTFSTPEMSDVARKLFSESQIKRCRNYLKMPALIIDEKEKEHLRFLTKNGLVVDPVLVEKERIMINPWTQDEKEIFMEMLAKFGKDFSKISSFITHKTTADCVEFYYKHHKSDSFREVKKLLDLHQQLPASNYLGAKSGQKWNPESNAASLDMLGVASAEAAHDLEYANKVEKISVKSLIRTAYGSNVSFVTKKSSDKECIDNVPLHERESVAADVLAGICGTPSPDGMGSCITSSADPGLKISMKRVEHVLSQENDKNVNEEESLSDQECEFDPVDWNDDEKSIFIEAMNNYGKDFSRISSCVKSKSYEQCKVFFSKARKSLGLDLIHQGAADVSMPASDTNGGRSDTDEACAVEMDSAICRKQSCSKIVQDVCPTEGAILGPDSVLISKQTEGDISNRCIVDVKIEEDDKEADKNCSNVDDKRSSDSTHQAGPININCPESTDKLQGTDDAVDQVNMHSSVLNSSNEHAMAMHSEVRSSLHSVDVLQTDKAEGTGTDPSQVEECSHHAVYTPMTAGNSGSSAFLTSDSGIKDNVHISNMSGASTVSPAFTSNYQHSLPGDMPLSKPKPLVTSLTPKDLMPVQFSSVLPDPTAFRFEGIKPNFEDSSGNKVSSALGAKDICKYPAFKDPSDNEHDTLFRNIDGYMNNHLTTELPVFSQRTASGTVSTSQTKFQNGRSSSVCLPNSSEGIQWPRKPEEVPEDSLRPCARNAKTEGGEKQKRPGDVKLFGQILSHQPTLPSSGSLCNGSQSKPPSPKIDKTSVRLTNNPRDLVVFSSRPGVSPHVGLEERSVRSYGHLDGSTIQPEPLLVMAKCQRSLASVPFYSAKNSTVGVFPDYQQPSMQPHQLDPKPLEMFSDSQKRNGLELVSGFGGAGILVSNVSDHVAALKARYGPGSKIMGSDADPWKDIGSSTIPFGSLTCQQRPSATVGSLEVITRCFVSRV

SEQ ID NO: 50816 - protein, 1688 aa, Zea Mays
MPPPPPDRRDYLYREGRRHDGGVGDSLLPPAPTPPRWRDSPYHPPPPPPLRDPARPSPRRAPPLASSGGHAPRECSDLRPPPPRRPPLVPLISSNRSAISEGYYRQGGGAYDRSYPDDPPSVYTPSRSDRYWPEDDDGGYKGFGRYGSGGRRDGRDMRGSYRKSPYRGGYGSDFSRNHSEQPPPPPPRRSPLRSVAVPICYDPPGNRINRGDRDNLPRVTPWRRRESRSEVADADGPLSVGQSTRLSASGKEASAQPLAAAGPHGTEDEAPRKKARLGWGQGLAKYEKQKVQGPSDPAEVVADVSSGDGEQKTSLAPAPSVASVFPAAPLPESAPAPPAALALSSAPMRCSSPVTAPPYCSSAPEDKSCEMTPNTVTNSTKDVLEADGKTFNNEFSIKLDQLGDDPINGLTNILVELMQHNDSCSGDSNGPTSTCKLLQLKESISKEIEKTELQIDSLEGELKSVNTEAVTTLESSPTGVTHTENLSPSGGTSKVPGSAEICDTFDMIKEPGELIVSPKVPVVQDADVKGVDMMEVETAPVRNAKTVPSEESAVTPGVAEGKACAAADLSSLIASEEAGSQNDIDNDRPKTSLCHADSMKIKVSDELPVKQWTYCDHMSDLHSSFTSANNDIAKEMNEVLFKSLPAGTSALDLLASSDLLSQRKIDLIVKERLGVRKTRLRLKEQILTMKFKAYRHLWKEDVRLLSAKKQRLKSNKRIDQNNRTSQIGSQRQRFSNRSRLAMPAGNLSTFSTPEMSDVARKLFSESQIKRCRNYLKMPALIIDEKEKEHLRFLTKNGLVVDPVLVEKERIMINPWTQDEKEIFMEMLAKFGKDFSKISSFITHKTTADCVEFYYKHHKSDSFREVKKLLDLHQQLPASNYLGAKSGQKWNPESNAASLDMLGVASAEAAHDLEYANKVEKISVKSLIRTAYGSNVSFVTKKSSDKECIDNVPLHERESVAADVLAGICGTPSPDGMGSCITSSADPGLKISMKRVEHVLSQENDKNVNEEESLSDQECEFDPVDWNDDEKSIFIEAMNNYGKDFSRISSCVKSKSYEQCKVFFSKARKSLGLDLIHQGAADVSMPASDTNGGRSDTDEACAVEMDSAICRKQSCSKIVQDVCPTEGAILGPDSVLISKQTEGDISNRCIVDVKIEEDDKEADKNCSNVDDKRSSDSTHQAGPININCPESTDKLQGTDDAVDQVNMHSSVLNSSNEHAMAMHSEVRSSLHSVDVLQTDKAEGTGTDPSQVEECSHHAVYTPMTAGNSGSSAFLTSDSGIKDNVHISNMSGASTVSPAFTSNYQHSLPGDMPLSKPKPLVTSLTPKDLMPVQFSSVLPDPTAFRFEGIKPNFEDSSGNKVSSALGAKDICKYPAFKDPSDNEHDTLFRNIDGYMNNHLTTELPVFSQRTASGTVSTSQTKFQNGRSSSVCLPNSSEGIQWPRKPEEVPEDSLRPCARNAKTEGGEKQKRPGDVKLFGQILSHQPTLPSSGSLCNGSQSKPPSPKIDKTSVRLTNNPRDLVVFSSRPGVSPHVGLEERSVRSYGHLDGSTIQPEPLLVMAKCQRSLASVPFYSAKNSTVGVFPDYQQPSMQPHQLDPKPLEMFSDSQKRNGLELVSGFGGAGILVSNVSDHVAALKARYGPGSKIMGSDADPWKDIGSSTIPFGSLTCQQRPSATVGSLEVITRCFVSRV

SEQ ID NO: 50817 - protein, 189 aa, Zea Mays
MKKLRHPNIILFMGAVASPERLCIVTEFLPRGSLFRLLQKNTAKLDPRRRVHMAIDIARGMNYLHHCSPPIVHRDLKSSNLLVDKNWTVKVADFGLSRLKLETFLRTKTGKGTPQWMAPEVLCNEPSDEKSDVYSYGVILWELVTQKIPWDNLNTMQVIGAVGFMDQRLDIPSDTDPKWASMIESCWDR

SEQ ID NO: 50818 - protein, 395 aa, Zea Mays
MRMTELRMKAHFVGTSDFSLGELPPYVHAMRVLPLDLNELWAFEVDFEYSGGILLHIETRLEVQEPELQKDIMKSNFGADANGDVDSDLLESIEQYGNQFKGSHNSASSIGENDEADASSQSKSIGWTSAYISRWKTILHSIADHVSQVPLSLAIRISSVRGILRIQMKPPPSDQIWYGFTSMPDLEWDLESSVGDRKITNSHIAALIGNRFKASLRDSLVLPNCESISMPWMLAEKDDWVPRKDAPFIWLNHEPTEMRIHATATASTQSEEGGLKDGGSEESSRVVASIDEAKQEPKAEASLHGQSSSAPGSESAHSDANDELRKPLLITEKLQEEASEAAGVSITHWRGREAKKREASSDDGFREEDGGQAGGEEADHRREREAHRGEDAREC

SEQ ID NO: 50819 - protein, 266 aa, Zea Mays
MDGEEAPLGALNLAEYAPAGARTVDCYRRIRKIGEGTYGEVFEAVDIITGERAALKKIKLDDGKEGFPRQILREIKLLKKLDHENIIRLKEIVVSPGSAHGTGGSDDHIYRGDIYMVFEYMDHDLKKVLHHSAPSQVKVYMGQLLKGLQYCHANNVLHRDIKGANLLITGGKLLKLADFGLARLFTRDGTLTNHVITLWYRPPELLLGATSYAEPVDIWSVGCIFAEFLLKKPLFPGRTEAPHKEQLHSWPHPRHFPQSIPNPSHP

SEQ ID NO: 50820 - protein, 320 aa, Zea Mays
MDGEEAPLGALNLAEYAPAGARTVDCYRRIRKIGEGTYGEVFEAVDIITGERAALKKIKLDDGKEGFPRQILREIKLLKKLDHENIIRLKEIVVSPGSAHGTGGSDDHIYRGDIYMVFEYMDHDLKKVLHHSAPSQVKVYMGQLLKGLQYCHANNVLHRDIKGANLLITGGKLLKLADFGLARLFTRDGTLTNHVITLWYRPPELLLGATSYAEPVDIWSVGCIFAEFLLKKPLFPGRTELSKIFELCGSPNEESWPGVSKLPLYKTMTIRPATPTKRSLRDILQNFDCPAVELIERMLILNPSQRISAQDALGAAYFIN

SEQ ID NO: 50821 - protein, 299 aa, Zea Mays
MDARFMAYLEPIVGGDFVEVFEAVDIITGERAALKKIKLDDGKEGFPRQILREIKLLKKLDHENIIRLKEIVVSPGSAHGTGGSDDHIYRGDIYMVFEYMDHDLKKVLHHSAPSQVKVYMGQLLKGLQYCHANNVLHRDIKGANLLITGGKLLKLADFGLARLFTRDGTLTNHVITLWYRPPELLLGATSYAEPVDIWSVGCIFAEFLLKKPLFPGRTELSKIFELCGSPNEESWPGVSKLPLYKTMTIRPATPTKRSLRDILQNFDCPAVELIERMLILNPSQRISAQDALGAAYFIN

SEQ ID NO: 50822 - protein, 613 aa, Zea Mays
MAAPGLDKVMAFLTDHGFAGAASALRDDVLERTAAGDESHDAALDPHLPPLRMPASAGGAGAGAGAGAGAGTPTPASPGSSSGSASSSAFVSLRSTPSGLLNPYGLWSPRHSQSDASSSEMEFGTARQYDTTDLFFQEDWLYDDHLFPSKLDDEDDEGKEEDKFVLDAHDGSEQVEIGKLGAGHNHRHEHIGGDRCEGCAEVYICSSPLCGCCGGGLKNDGLDVARSSSSTVYGRYKIMDDQTEILDDCAQDAFQLKQSRDIMFECGMTRDPGRGYDDSGLSVVEKELQILSSFDTVVNHGTYDFTENGELNGSCDKNLKSSIHKEYPKGHRIQPFPESGDLDEADEFRHVGSLNTDVQHSTALKAEEDAETNIDLALSDFHREYEVFELRIIHRKNRTGFEENKDFPIVLNSVVAGRYYITEYLGSAAFSKVVQAHDLRTGMDVCLKIIKNDKDFFDQSLDEIKLLKFVNKYDPLDEHHVLRLYDYFYHQEHLFIVTELLRANLYEFQKYNQESGGEVYFTLPRIQVIARQCLEALVYLHRLRIIHCDLKPENILIKSYSRCEIKVIDLGSSCFLTDNLCLYVQSRSYRAPEVILGLPYDQRIDIWSLGIIS

SEQ ID NO: 50823 - protein, 99 aa, Zea Mays
MFDPIKPALGAIVSSLKETNLSKRAQSLRMVPPADLMETICQKLKIKKKQFLRCWEILIFLSLDSQDHKSVDNFRACIYDFMKGEILGSASRTNRKRLL

SEQ ID NO: 50824 - protein, 150 aa, Zea Mays
MHIFFLNQTIFYRTKEGIWKDIKEGGILDEHIVHEKEIAISDIQQTVESVQLDIKHLLEAAAAKVAEVQLEVNQLYGFAETLNSLNIIQEHDIVFKDMLHSELTGLTNTIGESYRIQGTTVMNSYVSGFLCQGGHNLSETKTRKNPTQFL

SEQ ID NO: 50825 - protein, 547 aa, Zea Mays
MLGGHGVVLLNNRDAGTLSVTNFRLLFVSQAKKCVIELGTIPLTTIEKLNDDVKLQPLPHLSDKNHPRELLQVIGKDMRIIVFAFIPRTQQKNEVFDALRRYTKPANLWDLYAFSCDPSTIKHDSEPKWRLLREYFRLFRRSLPLQGVEEVSLCNEWWRLTRVNSSYSLCSTYPSELIVPRSISDEDLFQASPFRSGKRLPVISWCDPGSGAVLARSSQPMVGLMMNFRNNADEKLVCALSSRTIDEKGSPRKLYIIDARPRANAIANGAKGGGSESSSNYHKSEVLFLGIQNIHTMRESLSRLRDYVDAHGSISSNGSPSAVSVVGDRRNRGSTWGGGNLNSMTSFSSTLGEWLNHIQNILVGASWIAAQISEEAASVLVHCSDGWDRTTQLVSLACLLLDPYYRTFSGFQALVEKDWLAFGHPFAERMGVPTVAENGGSQYELLRQPSLGNLSSSPSRNTLGPPGPSSNSPVQSQTSNNTSPILLQWLDCISQLLRLYPSAFQFSSKFLVDFMDCVLSCRFGNFLCNSTCPNTLAPVFFEVDMPH

SEQ ID NO: 50826 - protein, 330 aa, Zea Mays
MTHETTAVSVSRCYWTALSALTSTDALIRMLGPAVAFPKAADPDDDPTKWQPENSAEHLACETKDGAPEEGKGKQPPRPRPFRSTSTRAQRSRRRMRMRMGKGPSSRAGSRHRQFRARAMTRVDDLQEVFSGLQSARKDSRSADAAVLEAQLQQMLREWRSELSDPSPASSLQGNARELSDPPSDTLRLLQLVVAEEEDDATSKMVEQQQQQPPPPLPANRSQGHAHVVCQGMKPEPREEAVDVAVDQPQLLSQGVLPNGAATASAMFHDQLYYVNQELTVEDFLYDDDYKIDLSGSNLDVINNLEGIVQLEYPDHNLPQGKRALQAQCL

SEQ ID NO: 50827 - protein, 323 aa, Zea Mays
MDRRQRAAARVFEDFDPEVEWKLAGEEQDVVEIALPGFRKDQVRVQVDNHGVLRATGERPARGGRWARFKKDLRLPDNCDSDGVRARFEGEKLIITLPIVAALSHSPTPSPSPPPPPPQQQPRRRPSPPEPSVPAPEPPPLTRQNPSPTQAPPLPPQPRRHPSRPEPSIPAPEPPPPQPPPPAAEELTEAGTEERKQSPPPHQTPGAAPGPKTPPPWSWQPPVPVSPPSPAPAPPHGAEEQPKKRQKQPQPQETNATKRAEELGGGARGTKVDSQAGASPAVPSHAQTTETVRPEPARQLLVNAAAAVAVLAGVIAAVWRTLQ

SEQ ID NO: 50828 - protein, 1004 aa, Zea Mays
MNENSAIIISDSDDDSIGSIFDDDDQPASAIARLDQNAEGRIINFEDEDWQRSAPAPPSTKPTENNNGQYRILPASLTNGRHAESSRYTFGSVDRIHPHANPYMAMRPGHSTSSRIDSVVEKHNSSTADANDNNKRVLPSSFSNGNTSKSMHPIVASETRKLPLPLSTKKSPNIGENRMGTNIANGNLQPSSSIMARGTSSTLNTHKVDDDDDVIVYGGSSSHRVLPSTFEATNSNNSEVAKGFETHSRLNPENRVLDYAERAVYQEALQNISREKSEDDLPEGVLAVPLLRHQKMALAWMVSKENSSHCAGGILADDQGLGKTVSTIALIQKQRMEQSKFMFVDSDRLKSEALNLDEDDEGEQTVSNEPKKDQGACSLSTSAGTSAELFVNQPNNVVNKMVETKAERKKKAKVSTSSASTSRSMTRPAAGTLVVCPASVLKQWSNELTDKVSESAKLSVLVYHGGARTKDPHQKNSEEPSASNKRKPSANMQNKAKKKKKKLKDSNFDLDSGPIARVRWFRVVLDEAQTIKNFRTVVARACCGLRAKRRWCLSGTPIQNAIDDLFSYFRFLKYDPYCTYNSFCTMIKHPIARDAINGYKKLQAVLKVVLLRRTKETVINGKPIINLPPKTINLNKVDFTQEERSFYLMLEERSRQQFKAFAAAGTLKQNYANILLMLLRLRQACDHPILVKGNQSEYGGDGSIEMAKKLPKEVVIDLLAKLEVGSTLCGLCNDTPEDAIVTICGHVFCYQCIHERITTDENMCPAPNCSRTLGLELLFSSGALKICISGKSSSAVASSSSDNESSSISQSSFVSSKIQAAIDILNSIIVMDPLTESYTMESSRSGLGPVKAIVFSQWTGMLDLLELSLNINCIQYRRLDGTMSLNLREKNVKDFNTDPEVRVMIMSLKAGNLGLNMVSACHVILLDLWWNPYAEDQAVDRAHRIGQTRPVTVSRLTVKDTVEDRILALQEEKRTMVNSAFGDDKAGGHATRLTVEDLRYLFRI

SEQ ID NO: 50829 - protein, 638 aa, Zea Mays
MNENSAIIISDSDDDSIGSIFDDDDQPASAIARLDQNAEGRIINFEDEDWQRSAPAPPSTKPTENNNGQYRILPASLTNGRHAESSRYTFGSVDRIHPHANPYMAMRPGHSTSSRIDSVVEKHNSSTADANDNNKRVLPSSFSNGNTSKSMHPIVASETRKLPLPLSTKKSPNIGENRMGTNIANGNLQPSSSIMARGTSSTLNTHKVDDDDDVIVYGGSSSHRVLPSTFEATNSNNSEVAKGFETHSRLNPENRVLDYAERAVYQEALQNISREKSEDDLPEGVLAVPLLRHQKMALAWMVSKENSSHCAGGILADDQGLGKTVSTIALIQKQRMEQSKFMFVDSDRLKSEALNLDEDDEGEQTVSNEPKKDQGACSLSTSAGTSAELFVNQPNNVVNKMVETKAERKKKAKVSTSSASTSRSMTRPAAGTLVVCPASVLKQWSNELTDKVSESAKLSVLVYHGGARTKDPRELAKYDVVVTTYTIVANEVPKQMADDDADQKNSEEPSASNKRKPSANMQNKAKKKKKKLKDSNFDLDSGPIARVRWFRVVLDEAQTIKNFRTVVARACCGLRAKRRWCLSGTPIQNAIDDLFSYFRFLKYDPYCTYNSFCTMIKHPIARDAINGYKKLQAVLKKL

SEQ ID NO: 50830 - protein, 945 aa, Zea Mays
MPMYMYRNGGVCSMPPGEEGSTHGNIADGDAPRRRQRRRRIFRRSTERKNPENLEFERQVAAFEARQEQQRQDQMTDAFIGSLSFKVYFPHLKILSDDVQDGDSTQPAGKGRLLKDSAKPPDDTDFLEGTFIKINSDKQKATRNKKSGKNNKKKKKGKSKGKGKGRKQSHASEMQTGSPTQQPSSTCANATGGETSASSSSRVAVRVPLLEYSSSSSSCRVTAKLVITSAVNSASSGNEKELSASSSSDDFKSFESTTSYTTAASRSSANDYYTGGNAWNCTMGDYAGSLSDARSEPSLSASDYSTDSRGFRRKTTSGEGNRPNVHHQSFSLLAVGPGCSQEALLCSGYSSNGGDFQEVVSRKAAQKMKRMQRSTPATTSSSTMAASGPIVARAHFPRAPFREVITIGHYINDDTFYARKPNQKKGKYQKARSFSNMSSKTGYTTDHGDNVSAGSNRMLLITTVHQAKPRSGHHVTLEAIEETSSPSCLPNPKAGELKAMAPVGDGIIKDTDSKTPSSSDKLSSLLGHLDNSSCVDSREGQKKAMAAPVDGDTEDARAPPSSDKTSSLDNLDNPSYVGKEEQEEVVAPVGVGTEADRDSTAPTSDKTSLLGYMVNSSCVDRDEEQQNKAKFSTDASSSELDKIIEAVNNAYGVQQAASDVYMISAGIHADIENFLHAATPVIGQTSCTKGNMSLQDLRLWNVWSWYEEPECCGIEVQMQGKTNSSWPELSTYFVPLLSAVQLFGQPAGKSQSHGSGLVFEYFESENPFSRPPIFTKIKQLRHGVNLSAGNPIFGDPKQLESVKLSDLHPASWFCVAWYPICQIPAAAGSCQASFLTYHSLGKLVPQICSTDNKADAYDRMICPIVGLLAYKDQGEKWFQLREQQLRIKPRPPSGTDHAELLNKRLRALRQCASIMSKAVVPRAPSGEAMNYHSDYEFFLSRSSLQ

SEQ ID NO: 50831 - protein, 167 aa, Zea Mays
MPPSCCGRRRCGPGPSPSSKRQRQSSSFLFFFPLGILRPCAGKEGHAAARALGEVWRWGSGQQCEARRNIGRVSSPTTALHLPHPFLLIFPPFSIPSPGFTALHGEEGVHRDGYDDGGGAAWRSQQVLTMNGLAKDVPTVNGMHKEPTTAHPRLLMLPTAHLKRRFT

SEQ ID NO: 50832 - protein, 314 aa, Zea Mays
MSILGCLMLQSIFQYPHQYIRPYVASLLAMGDDQILQISKDSGGCRVLESFLGSSATAKRKFNVFGKLQGHYGDIAMNPSGSFLVEKCFTASNFSHKEAIVAELLAVQSDLSKTRHGFHLLKKLDVDRYARRPEQWRASRTSKETTQKKFEAEFGSNSQSTGQIVKEKFSQSRTKKRKQKEKVDKITEDARSNKPDFSQKGNSKRPKSGNATSENPLSEGASASMVFLKGSVKRKSPGFLSDKPSFKKQKPHKPDSGRPDGKRFVRDSDTSAPFVKNAGKQKQSIAELADLAGKEKLTASEVRKLLKPEMSGKS

SEQ ID NO: 50833 - protein, 613 aa, Zea Mays
MIEGILNKICKVIAVDAVTVMSSCYGSHVLRTLLCLCKGVPSDSLQDFHTTKRSSVLAERLSCGTNQSSRHVPKNFENGFSGMFRSFVREMLHNAKADIATLRVDKNSSLVLQTALKLSSGDDNELHHIISILLGYDEYKTVQTRDYSEKMDEIVTLLEESAYSHLLEVIVEVAPDELRNGMLARSLKGALFAISSHHCGNYVVQAFISSTKTSDQMNQIWEELGPNMKELLELGKTGVVASMLAACQRLETYRLESSQALAAALSSDSESTKSIVARILFLENYLHERSNWKWILGAKMSILGCLMLQSIFQYPHQYIRPYVASLLAMGDDQILQISKDSGGCRVLESFLGSSATAKRKFNVFGKLQGHYGDIAMNPSGSFLVEKCFTASNFSHKEAIVAELLAVQSDLSKTRHGFHLLKKLDVDRYARRPEQWRASRTSKETTQKKFEAEFGSNSQSTGQIVKEKFSQSRTKKRKQKEKVDKITEDARSNKPDFSQKGNSKRPKSGNATSENPLSEGASASMVFLKGSVKRKSPGFLSDKPSFKKQKPHKPDSGRPDGKRFVRDSDTSAPFVKNAGKQKQSIAELADLAGKEKLTASEVRKLLKPEMSGKS

SEQ ID NO: 50834 - protein, 503 aa, Zea Mays
MGSAAEVPVVISSDEDGAQTPAAGKRQSPEDAALAWAEGILAQDDYDDNAVCEGVGYPAMMLELLDSLKDETGTVVGDKEVAVGAKNTNTMPDARCDDDGDDCVILDGDPDKPVAVAKEEGGPPRDAPEDELQIVAEKGELACRDFPHPRHLCAALPFSSSSHASHCSMCHCYVCDCPAPCALWDKHCHATDKDRKWKRLREISKNKSQPNPKRRIPQHFKRSVTTGPSSSQYSANMTGFTGRFPASGTANQIQQVDISVMVAQDMVRGISLPSAPSPTPRTKNRSYGSKGGHVSAKTFQSNPSQFCVRAPMGSHGHRYRPPSYPQPPPNTVVGTGVPLSRCASLNAEAQGTQRPQVPPAGTISKESLANLARRLGLPYYNTNQPLGQQSTSTSQFLHMHPHEMLPAQGAQNTTWQAYVKKSVATTSQIVPSSEHNSSIHAPGSTVLPSGSVQIQQPLRQFKSGTVLSSGAAQIHQQPLRQLDSQSSVTPSETVPSTLYLPQP

SEQ ID NO: 50835 - protein, 365 aa, Zea Mays
MPTPLAAALLPLPASPALHFPRPRPGPSWRARPAVVRAAALRALPRRLELCPPCLAAVESNPAPPPLAPPPPDEASAGSGLDARAGGGGGGGDGGGGADLGWLRAFPHVFTASMANFLFGYHIGVMNGPIEDIATQLGFQGNPFLQGLVVSIFIVGAFFGSLGSSALVDKFGCKRTLQIDSIPLIIGALLSAQADSLDEMLLGRFLVGIGIGVNTVLVPIYISEVAPTKYRGTLGTLCQIGTCLGIIAALSLGIPSESDPHWWRTMLYAACVPGILIVAGMQFAVESPRWLAKVGRFDDARKVVESLWEPSEVEKSMEEIKAVVLNDDSRGSWSDLLVEPHNRECMFGCAYVHAWLLDCTACTFV

SEQ ID NO: 50836 - protein, 202 aa, Zea Mays
MPTPLAAALLPLPASPALHFPRPRPGPSWRARPAVVRAAALRALPRRLELCPPCLAAVESNPAPPPLAPPPPDEASAGSGLDARAGGGGGGGDGGGGADLGWLRAFPHVFTASMANFLFGYHIGVMNGPIEDIATQLGFQGNPFLQGLVVSIFIVGAFFGSLGSSALVDKFGCKRTLQIDSIPLIIGALLRFLLPLYRVLYS

SEQ ID NO: 50837 - protein, 254 aa, Zea Mays
MRTFCYPRGAEIIRLKLPIAGACRKTARLNHGDVETLFHEFGHALHSLLSRTEYQHFSGTRVALDVAETPSNLFEYYAWDYRVLKTFALDETTGDAIPEKLVKALNASRNMFPATELQRQIFYSIMDLTLFGEQSSKPMDTISTVADLRRKHTSGKYAEGTHWHTRFTHLVTYGAGYYTYLYARCFATTIWQEVCQEDPLSRSAGSAIRDKFLRFGGSKDPSSLLKDFAGDAVIRNSGSGIIPNASSLCKEIGL

SEQ ID NO: 50838 - protein, 290 aa, Zea Mays
MTKSFAVKLGQGGFGAVYKGSLHDGRQVAVKMLKDTQGDGEEFMNEVASISRTSHVNVVTLLGFCLQGSKRALIYEYMPNGSLERYAFTGDMNSENLLTWERLFDIAIGTARGLEYLHRGCNTRIVHFDIKPHNILLDQDFCPKISDFGLAKLCLNKESAISIVGARGTIGYIAPEVYSKQFGTISSKSDVYSYGMMVLEMVGARDRNTSADSDHSSQYFPQWLYEHLDDYCVGASEINGETTELVRKMIVVGLWCIQVIPTDRPTMTRVVEMLEGSTSNLELPPRVLLS

SEQ ID NO: 50839 - protein, 653 aa, Zea Mays
MAMAAAVLEEALRWGGGSVGDDNVAARRAEEAAIRRHEAASWLRKTVGIVCAKDLPEEPSEEEFQLGLRNGIVLCNALNKVQPGAIPKIVGVQSDTAVPADGSALCAYQYFENLRNFVVVIQDFGLPTFEVSDLEKGGKSVRIVDCVLALKSFSESKKTGRQAACKYGGILKPLVSGNYFILKNCDAFMNKNARIHTEEATLNGFRGEQNLSLDCSPESYEVITSDNLSTIIRTILLDKKPEEIPLIVESLLNKVIQEYELRFANQNLMDEEKQNNLTTKEEASFAVNGSNAAQKFHLKAEINFDLQHKQIKGLRGTVSSIKSGMEQLKLHYSEEFTKLGKHLYTISNAASGYHKVLEENRKLYNQIQDLKGNIRVYCRVRPFLPGQISSLSSVAGMEERTITIMTPTKYGKDGNKSFTFNKVFGPAATQDEVFSDMQPLIRSVLDGFNVCIFAYGQTGSGKTYTMSGPKVLTEESLGVNYKALNDLFNLQAQRKGTIDYDISVQMIEIYNEQKGLAVPDASIVPVTSTSDVVELMNQGQKNRAVGSTAINDRSSRSHSCLTVHVQGRDLTSGTVLRGCMHLVDLAGSERVDKSEVVGDRLKEAQYINKSLSALGDVIASLSQKNTHVPYRNSKLTQLLQDSLAQNLTLLVRP

SEQ ID NO: 50840 - protein, 276 aa, Zea Mays
MLVPVLRNPDSLHLAVQSSVSTRTHSYHTDSSKCQLLLVDDSNTVIEKSNDAIRIPQSSLATVFFINWPKADLKKIDTHHLEYLPEVFMYAPPAKRTRGEALSLYACLDAFLREEPLVPEDMWYCPRCKEQRQASKKLDLWRLPEVLVIHLKRFSFSRSTKQKLETFVNFPIHDLDLTNYIANKKTSERQIYELYAVSNHYGNMASGHYTAHIKLVDENRWYNFDDSHVASIDEDEVKTAAAYVLFYRRVREQDIARGTSNGSQLYAKRSHGYSHR

SEQ ID NO: 50841 - protein, 730 aa, Zea Mays
MSRGERTFIRISKKVCIWDYYGRTKHSLMDSLDKTLDDANIQMDQNILVEVTTDASGSLDGLVKRNNFFESDAPKSGLPDENFAANNYASRSYSSSLTPSIYLRSPNGDLDNVHGSSGMITRGSPLGLTGLLNLGNTCYMNSAIQCLVHTPQFTKYFCEDYHREINRQNPLGNVGELALAFGELLRKLWAPGGRAPVSPRPFKMKLSRFASQFSGYNQHDSQELLAFLLDGLHEDLNRVKHRPYINSGDADGRSDEEVADEYWANHIARNNSIIVDVCQGQYKSTLVCPVCGKVSVTFDPFMYLSLPLQFASTRSVTAVVFSCDGSVPPTPFTVNVPKQGRCRDLLQALGAACSLKNGEKLLIAEIRNHKIYRFIDDPVLQLSTISDDDHLAVYKLPKLEKRVNYIQFVHRHEDLDHGNNNSLTSWKPYGVPLLAQISRNEIVTGFDIHELVHKMLVPVLRNPDSLHLAVQSSVSTRTHSYHTDSSKCQLLLVDDSNTVIEKSNDAIRIPQSSLATVFFINWPKADLKKIDTHHLEYLPEVFMYAPPAKRTRGEALSLYACLDAFLREEPLVPEDMWYCPRCKEQRQASKKLDLWRLPEVLVIHLKRFSFSRSTKQKLETFVNFPIHDLDLTNYIANKKTSERQIYELYAVSNHYGNMASGHYTAHIKLVDENRWYNFDDSHVASIDEDEVKTAAAYVLFYRRVREQDIARGTSNGSQLYAKRSHGYSHR

SEQ ID NO: 50842 - protein, 836 aa, Zea Mays
MEIEIHDNLVEGRDYILLPQQVWEKLHGWYGGGPTLPRKAINTGFSQTDLAIEVYPLRLQLILMSRGERTFIRISKKVCIWDYYGRTKHSLMDSLDKTLDDANIQMDQNILVEVTTDASGSLDGLVKRNNFFESDAPKSGLPDENFAANNYASRSYSSSLTPSIYLRSPNGDLDNVHGSSGMITRGSPLGLTGLLNLGNTCYMNSAIQCLVHTPQFTKYFCEDYHREINRQNPLGNVGELALAFGELLRKLWAPGGRAPVSPRPFKMKLSRFASQFSGYNQHDSQELLAFLLDGLHEDLNRVKHRPYINSGDADGRSDEEVADEYWANHIARNNSIIVDVCQGQYKSTLVCPVCGKVSVTFDPFMYLSLPLQFASTRSVTAVVFSCDGSVPPTPFTVNVPKQGRCRDLLQALGAACSLKNGEKLLIAEIRNHKIYRFIDDPVLQLSTISDDDHLAVYKLPKLEKRVNYIQFVHRHEDLDHGNNNSLTSWKPYGVPLLAQISRNEIVTGFDIHELVHKMLVPVLRNPDSLHLAVQSSVSTRTHSYHTDSSKCQLLLVDDSNTVIEKSNDAIRIPQSSLATVFFINWPKADLKKIDTHHLEYLPEVFMYAPPAKRTRGEALSLYACLDAFLREEPLVPEDMWYCPRCKEQRQASKKLDLWRLPEVLVIHLKRFSFSRSTKQKLETFVNFPIHDLDLTNYIANKKTSERQIYELYAVSNHYGNMASGHYTAHIKLVDENRWYNFDDSHVASIDEDEVKTAAAYVLFYRRVREQDIARGTSNGSQLYAKRSHGYSHSHCQEYMACWKKCSSRAVNAPLSSCHRRYFVQCWYKMGILYEVS

SEQ ID NO: 50843 - protein, 506 aa, Zea Mays
MEMVVAAPALPAEVERALIRDITVAADAHAKEGDTFFLITTRWWQSWIDYLIQDLTGATSNGSHHHEFGSKTPRRPGAIDNTDLIDDVPLEVSNMEIEIHDNLVEGRDYILLPQQVWEKLHGWYGGGPTLPRKAINTGFSQTDLAIEVYPLRLQLILMSRGERTFIRISKKGTVGQLHKMACKVFDLAPDEVCIWDYYGRTKHSLMDSLDKTLDDANIQMDQNILVEVTTDASGSLDGLVKRNNFFESDAPKSGLPDENFAANNYASRSYSSSLTPSIYLRSPNGDLDNVHGSSGMITRGSPLGLTGLLNLGNTCYMNSAIQCLVHTPQFTKYFCEDYHREINRQNPLGNVGELALAFGELLRKLWAPGGRAPVSPRPFKMKLSRFASQFSGYNQHDSQELLAFLLDGLHEDLNRVKHRPYINSGDADGRSDEEVADEYWANHIARNNSIIVDVCQNTGCGSRTPAAAPEHWRRLQNTSDEMSSSSQGAVQVHFGLPSLWEGFSDF

SEQ ID NO: 50844 - protein, 238 aa, Zea Mays
MTEAERRTHRFGGVSGSSLRPAHIKELEEVKLLKKLSHPNIVRYLVTVREEDTLNILLEFVPGGPINSVTFGEARFIPRAWHAQSGPISRLPLVTISYSSNLLRDVPVRQPLWHNPPPPQAQAQVDMDLPSLAVVLRAALSHVPEERKAAEESLNQFQYTPQHLVRLLQIIVDGSCDMAVRQVASIHFKNFIAKNWSPNDPDESPKVLESDKAMVRENILGFIVQVPPLLSLEKVSKQ

SEQ ID NO: 50845 - protein, 483 aa, Zea Mays
MLPEMQYFRFNPVDERCGMELDETDPAIWLKLEAATDEYIQKNFLAFKNLCELLVPRYQEEEKSSDIYKSLSFSRLTSLNQGFSESNPTLGWRRVVLLVEASFSPDFGKKINHARSLESFCSQNGIRLALMNSASGFGKPATALPTPITSPLFTGSFPSSPLLYSPDGTQRIGRIDLVPPLSLDGHPTTKSSPPTSPLKSRQPSAHVRSLYDKLQNMPQVGVIHLALQNDSTGSVLSWQNDVFVVAEPGELADRFLQSVKTSLSTLLRGRNRKGAYSLSKISCLSELVAECPSFEIGGIHHRYIGRQTQVMEDNQEIGAYMFRRTVPAVHMAPEDVRWMVGAWRERIIVCSGKYGLAHGLVKAFMDCGAKAVISSSIEPPDSQTIVYHGMDVNGSLENGKFVIGDEEADESEPEPVSPVSDWEDSDVEKGGNHDMDDEEYLAQFMCLMYDKLFREGVTVDTALQQALRSHPKLKYSCHLPHVL

SEQ ID NO: 50846 - protein, 583 aa, Zea Mays
MMTCTRYLVSLVKSRRSEISGNKNKLEPSCLGGTERLMQQMSRALEHEQFGACKLGSPNSPSTCFGSVNMAPIRSTSTESGTVQVLCSRVQTPINQFREGRNFLDLPSTTISRSSPVGITPAGLQSGHHALDEHIHSLGKMNVQNKGRMDCGFQESTAFHPHSLPDFNDRLRNGISYNCSIPPIGVKSNARAAEAMDVRHIYKGGCGHLSNQSSAHTEALGFSRTGSCPLYGHQLAWSNSNNLHQQPSSPMIWPSMGPFTNNMPSRQLMQVHGISRAPLRMLENNIPMNHQHVGSAPAVNPSIWDRRHGYAGEMMETPGFHPGSAGSMGFPGSTHLHQLETNGMFPHNGGTFMDPAMSPVHMSARSPQQRGHIFHRRSNVAPIPSSFDSAGERMRSRRNDSNVNQSDNKRLFELDIERIVRGEDSRTTLMIKNIPNKYTSKMLLAAIDESHRGTYDFIYLPIDFKTFHGKRWEKFNSEKVASLAYARIQGKSALVAHFQNSSLMNEDKRCRPILFHSDGPNAGDQEPFPVGSNVRSRPGRSRILSWEQNHQDIVSDHTKGGTPSRAGGTPGYIATDTDHTAVD

SEQ ID NO: 50847 - protein, 743 aa, Zea Mays
MELEADGNSKLLNFNGGASQTRSIVQLNGERSSRILFVGNIDSNVEDSELKFMFEQYGDMQTLNASCKHHGFVMVSYYDIRSAENAMRALQSKPLRCRKLDIRYSSPKDYPLDKDINLSMVIVNLEASITNDDLHQIFGVFGEIKEIHPTSDNDHYKSIEFFDVRAAEAAQYALNRSEISGNKNKLEPSCLGGTERLMQQMSRALEHEQFGACKLGSPNSPSTCFGSVNMAPIRSTSTESGTVQVLCSRVQTPINQFREGRNFLDLPSTTISRSSPVGITPAGLQSGHHALDEHIHSLGKMNVQNKGRMDCGFQESTAFHPHSLPDFNDRLRNGISYNCSIPPIGVKSNARAAEAMDVRHIYKGGCGHLSNQSSAHTEALGFSRTGSCPLYGHQLAWSNSNNLHQQPSSPMIWPSMGPFTNNMPSRQLMQVHGISRAPLRMLENNIPMNHQHVGSAPAVNPSIWDRRHGYAGEMMETPGFHPGSAGSMGFPGSTHLHQLETNGMFPHNGGTFMDPAMSPVHMSARSPQQRGHIFHRRSNVAPIPSSFDSAGERMRSRRNDSNVNQSDNKRLFELDIERIVRGEDSRTTLMIKNIPNKYTSKMLLAAIDESHRGTYDFIYLPIDFKTFHGKRWEKFNSEKVASLAYARIQGKSALVAHFQNSSLMNEDKRCRPILFHSDGPNAGDQEPFPVGSNVRSRPGRSRILSWEQNHQDIVSDHTKGGTPSRAGGTPGYIATDTDHTAVD

SEQ ID NO: 50848 - protein, 757 aa, Zea Mays
MELEADGNSKLLNFNGGASQTRSIVQLNGERSSRILFVGNIDSNVEDSELKFMFEQYGDMQTLNASCKHHGFVMVSYYDIRSAENAMRALQSKPLRCRKLDIRYSSPKDYPLDKDINLSMVIVNLEASITNDDLHQIFGVFGEIKEIHPTSDNDHYKSIEFFDVRAAEAAQYALNRSEISGNKNKLEPSCLGGTERLMQQMSRALEHEQFGACIMQGSVNMAPIRSTSTESGTVQVLCSRVQTPINQFREGRNFLDLPSTTISRSSPVGITPAGLQSGHHALDEHIHSLGKMNVQNKGRMDCGFQESTAFHPHSLPDFNDRLRNGISYNCSIPPIGVKSNARAAEAMDVRHIYKGGCGHLSNQSSAHTEALGFSRTGSCPLYGHQLAWSNSNNLHQQPSSPMIWPSMGPFTNNMPSRQLMQVHGISRAPLRMLENNIPMNHQHVGSAPAVNPSIWDRRHGYAGEMMETPGFHPGSAGSMGFPGSTHLHQLETNGMFPHNGGTFMDPAMSPVHMSARSPQQRGHIFHRRSNVAPIPSSFDSAGERMRSRRNDSNVNQSDNKRLFELDIERIVRGEDSRTTLMIKNIPNKYTSKMLLAAIDESHRGTYDFIYLPIDFKNKCNVGYAFINMINPDNIVPFYKTFHGKRWEKFNSEKVASLAYARIQGKSALVAHFQNSSLMNEDKRCRPILFHSDGPNAGDQEPFPVGSNVRSRPGRSRILSWEQNHQDIVSDHTKGGTPSRAGGTPGYIATDTDHTAVD

SEQ ID NO: 50849 - protein, 863 aa, Zea Mays
MLRDMKEKLGVDAPKVEVRFERLTVEADVRVGRRAVPTLLNAAINAAQELATSVHMCVTRKRPIRIINEVSGVIRPSRMTLLLGAPGSGKTTLLKALAGKLDSSLKFKGKVMYNGEEINYSTPQTQYLRTYVSQYDLHHAEMTVRETIDFSSKMLGTNNEFDMLGEAIRRKKGVINEVDQDLDSFIKATTFGEGSNLTTNYIIKILGLSECADTLVGDEMRRGISGGQKKRATVGEMLVGLARCFFMDDISTGLDSSTAFEIMKFLQQMAHLMDLTMGQIVYHGPRENATDLFETMGFKCPDRKNVADFLQEVTSKMDQKQYWTGDQNKYQYHTIENFAESFRTSYLPLLVEDKLCSPNNTGKNKEVKVNAGRRVSRWNIFKACFSRELLLLKRNSPVHIFKTIQITVMALVISTLFLRTKMSHNSVLDANKYMGALFMAVVIVNFNGMTEIAMTIKRLPTFYKQRELLALPGWALLCSVYLISIPISLVETGLWTGLTYYVIGYAPSAIRFIQHFLVLFAMHQMSMGLYRFLAAIGRTQVMANMLGTAALIAIYILGGFVISKDDLQPWLRWGYWTSPFTYAQNAIALNEFHDKRWNSEFYYNGANTVGEAILKIRGLLMEWHWYWICVTILFGYSLVFNIFSIFALEFIGSPHKHQVNIKTTKVNFVYNRQMAENGNSSNDQVILPFRPLSLVFDHIQYFVDMPKVISCSLIKILPGSFINSYHILKTRIQISHQEMTKNGATKKKLQLLQDVSGAFRPGVLTALMGITGAGKTTLLDVLAGRKTGGYIEGTIKIAGYPKKQDTFSRISGYCEQSDIHSPNLTVYESLKFSAWLRLPSNVKPHQRDASQEQLACQPSSGKD

SEQ ID NO: 50850 - protein, 617 aa, Zea Mays
MEWHWYWICVTILFGYSLVFNIFSIFALEFIGSPHKHQVNIKTTKVNFVYNRQMAENGNSSNDQVILPFRPLSLVFDHIQYFVDMPKVISCSLIKILPGSFINSYHILKTRIQISHQEMTKNGATKKKLQLLQDVSGAFRPGVLTALMGITGAGKTTLLDVLAGRKTGGYIEGTIKIAGYPKKQDTFSRISGYCEQSDIHSPNLTVYESLKFSAWLRLPSNVKPHQRDMFIKEVMNLIEITDLKNAMVGIPGATGLSAEQRKRLTIAVELVASPSIIFMDEPTTGLDARAAAIVMRTVRKTVDTGRTVVCTIHQPSIEIFESFDELLLMKRGGQLIYSGSAIPGVPKINKGQNPATWMLDISSHITEYEIGVDYAEIYCNSSLYSKDEQDVLNILGIVYGSALFLGFMNCSILQPVVAMERVVLYREKAAGMYSTMAYAIAQVSVELPYMLVQVMIFSSIVYPMIGFQVTASKFFWFFLYQVMSFMYYTLYGMMTVALTPNIEIAMGLSFLIFIFWNVFSGFIIVREMMPVWWRWVYWADPAAWTVYGLMFSQLADRTEQILVPGLGEQTVREFLEGYLGLQDRYFVLVTCLHLAIIGLFVFLFFLAIKHLNFQRSF

SEQ ID NO: 50851 - protein, 419 aa, Zea Mays
MEDEENIEGELLLVESQLHDIQGQIKTLLDRQEELYERQAQLKALLEASKLTRNTTINTSSVAPEDWSGSFPWDLEADDTRFNIFGISSYRSNQREIINAVMSGRDVLVIMAAGGGKSLCYQLPAVLRDGIALVVSPLLSLIQDQVMGLSALGIPAYMLTSTTNKEVEKFIYKTLDKGEGELKILYVTPEKISKSKRFMSKLEKCHHAGRLSLIAIDEAHCCSQWGHDFRPDYKNLGILKIQFPSVPMIALTATATSKVQMDLMEMLHIPRCIKFVSTVNRPNLFYKVSEKSPVGKVVIDEITKFISESYPNNESGIIYCFSRKECEQVAKELRERGISADYYHADMDIVNREKIHMRNATGVSTVHPLLPLGILVPFSQSLSDLLFFSVLLLFNMSANAIVVNIVLDGQNYPEWAFCV

SEQ ID NO: 50852 - protein, 363 aa, Zea Mays
MEDEENIEGELLLVESQLHDIQGQIKTLLDRQEELYERQAQLKALLEASKLTRNTTINTSSVAPEDWSGSFPWDLEADDTRFNIFGISSYRSNQREIINAVMSGRDVLVIMAAGGGKSLCYQLPAVLRDGIALVVSPLLSLIQDQVMGLSALGIPAYMLTSTTNKEVEKFIYKTLDKGEGELKILYVTPEKISKSKRFMSKLEKCHHAGRLSLIAIDEAHCCSQWGHDFRPDYKNLGILKIQFPSVPMIALTATATSKVQMDLMEMLHIPRCIKFVSTVNRPNLFYKVSEKSPVGKVVIDEITKFISESYPNNESGIIYCFSRKECEQVAKELRERGISADYYHADMDIVNREKIHMRWSGHP

SEQ ID NO: 50853 - protein, 536 aa, Zea Mays
MAAPTVLAFLPLPLLLLAAFSSASASAHPNSFRPIVPLRLQALLQQQQRRRASSDAKLVSAAADGTNSTAQPFTTHYFPQELDHFTFTPNASMLFRQKYLVNDTFWRRPRRGGGGGAGPLFVYTGNEGDIEWFATNTGFMFDIAPKFGALLVFIEHRFYGESLPFGDDSYSSAETEGYLTSTQALADFAILITGLKRNLSAETAPVVVFGGSYGGMLASWFRLKYPHVAIGALASSAPILQFDHITPWNSFSDAVSQDYKSESLNCFSVIKAAWDVLDERGSTDTGLLELSKLFRACKSVKHADSIAGWLQTAFTYTAMVDYPTPANFLMDLPAYPVKEPIQMCKIIDGFPAGADILEKVFAAANLYYNYTGDQACNQIESDSDDSSSSLGLSGWGWQACTEMIMPMSTSNASMFPPSSFSYEDTSNACFQSTGVRPRPHWITTEYGGYRIDKVLKRFGSNIIFSNGMRDPWSRGGVLKNISSSIVALVTEKGAHHLDLRFATDEDPDWVTEQRRQEVEIIEGWIDQYHRDMAQVS

SEQ ID NO: 50854 - protein, 280 aa, Zea Mays
MRLHVDGFLTAEAPLCSLFDEPDSQDDSNQISLVGNDGKLEGYIYNIEVSYVLGAIKEQYTKNPPFKLSIDYSCSDGIEEGDDGIWSIVGGKASCRRNFILEVVLTNAFGEPVKDKEVVSSLVYADDGTVVAKSRDDSEPPLLITCEGLEYAAISRPLPIIRGRALFKLKISQLSSKCDNKLFRIKFSTLHMQRYSFLEAYSKPIRCISRSRTVRPLGPTKRASSATANEIDMLSNGQGFVSTDKVNSRGHSVCLHTPMFPKIEDGMVEVVEAHKIVSQL

SEQ ID NO: 50855 - protein, 91 aa, Zea Mays
MALLRALPAAVLPRRAPHPLPHPPRLTFGSWTRSGSAPSSPPPPPPPTRRHRPWGPPSSAGSRSPGSRSAGRASPTAGRGPACAPKAHPTG

SEQ ID NO: 50856 - protein, 175 aa, Zea Mays
MEGATGISEHVLDLIFHPLSRNPRSKCRCRFAPNLCDIFRWTLGPCRAPTVAIPGCHSVILAPSSSSLAWPPDRRLHPQDPPPPPDSPTSLSTTARSTAARASPPRATCSCPETSTTTSEYTTRSWHRIISINPSVQEPDGDLFLQPDLLAGRSELPAGRVVRASTRADLGGKLA

SEQ ID NO: 50857 - protein, 181 aa, Zea Mays
MAFAPPHLLPLPPPPAAASTRAVSARNHGGRTAPELSGPTPRVVVVTSGKGGVGKTTTTANLAASLARLGLPAVAVDADAGLRNLDLLLGLENRVHLTAADVLAGDCRLDQALVRHRALHDLHLLCLSKPRSKLPLAFGSKTLTWVADALRRSTSPPAFILIDCPAGISTIQRYHYYCLIH

SEQ ID NO: 50858 - protein, 136 aa, Zea Mays
MLFQCNANQLKELCNSSVSSSVLIPHLNNLVQQTMFQQDLIMNLLSNLQQSEKVDGTQPIISSQVRTMENDKADTVNSVKERSLLVKISELQSRMIILTDELIAAKLKHVQLQQELNALYCREEIVDIRDEDNEET

SEQ ID NO: 50859 - protein, 644 aa, Zea Mays
MAGYSMAAVALAGIALALAAATTTQVASAAGGHDYREALSKSILYFEAQRSGRLPGSQRVAWRADSGLLDGKANGVDLVGGYYDAGDNVKFGLPMAFTVTMMSWSVIEYGDQMAAAGELGHATDAIKWGTDYLVKAHPEPNVLYGEVGDGDSDHDCWMRPEDMTTSRQAYRLDPQNPGSELAGETAAAMAAASLVFRSSNPGYANTLLQHSKQLFDFADKYRGRYDSSITVARQYYASSSGYGDELLWAAAWLHEATGDARYLDYLANNADALGGTGWSINQFGWDVKYPGVQVLAAMTLLRRRGDAGAGAHADVLQRYKQQADLFACSCLGRGGPNSVRRTPGGMVYHQNWNNVQFVTSAAFLLAAYADHLAAAGQGARCPAGGTAQPSELLAFARSQVDYILGSNPRATSYMVGYGATYPRQVHHRGASIVSVRANPSFVSCQAGYSSWYHRRAANPNLIVGATVGGPDEYDNFADERDNYEQTEATTYNNAPLMGVLARLAAGHGGGGGKFGHHSLAADVSSSTSINDTNRTSLPSPSPDSEHPSAWPIEIEQNATASWTKQGKTYRRYAVTVTNRSPKTVHELHIGISKLYGQVWGVDKARYGYVLPSWIPSLLAGKSAVFVYVQAAPPADVWVTGYKLI

SEQ ID NO: 50860 - protein, 202 aa, Zea Mays
MNEQEKRIDDTERGEEPRARMFRRGSPRMNLIQAAAMQRVSPRSTTNKRKKRTSPKVGRLRANWNSGLEKGLVQILQDHNNDCYKGQNGWSSEAWNRIVKLFHEKFPYVTFTKCQIQDKEKELKRDYKALKEARQQSGVSWDERLCRIEAKEPIWNNLTTSNERLKKFRTKSFPLFEALGELHDGMLSMFFFILVLSLLFLS

SEQ ID NO: 50861 - protein, 476 aa, Zea Mays
MNQDNYFEEALKMRNLLEEFSLKRGKHYPSILGVREHVFTGSVSSLASFMSNQETSFVTLGQRVLANPLKVRMHYGHPDVFDRIFHITRGGISKASRSINISEDIYAGFNSTLRQGCITHHEYIQALSGVGESIQNRADILQNAALNAALNTQFLFQIGVFTAVPMILGFILESGVLTAFVQFITMQFQMCSVFFTFSLGTRTHYFGRAILHGGAKYRATGRGFVVRHIKFAENYRIYSRSHFVKGMEVALLLVIFLAYGFNNGGAVGYILLSISSWIMALSWLFAPYLFNPSGFEWQKIVEDFRDWTNWLFYRGGIGVKGEESWEAWWEEELQHIYSIRGRILETILSLRFFIFQFGVVYHMNASGGSTALLVYWISWAVLGGLFILLLVFGLNPKAMVHFQLFLRLVKSVALLMVLAALVPGNFVYETQCERCFCFHSSICANWVGNHFDCHGMETCREEIGFVENCSCPSSPL

SEQ ID NO: 50862 - protein, 383 aa, Zea Mays
MQDLGFQWSNCGGGFLDTSPSTPPTNGQLQHDGHDDDKIEAEGTLITNSSRPSCAGTATIAASCHDVVLHGGGGGGTVLPTINISLTTTTTTHTQAQQQQRPFLAAPPPLPGDAFEILLASSRLCKTLLLSQAAASSSSSSVLLHDDGTISTVPSLRSESEHVAYGYGGGPPPPAPAAAHRPRGRRPSVDNYKQQMGAAACAAGAGRQWSAEHGGRAAACEERAAAAPARRPVVVPWKKPRLEQRSGSGSGSGSSTTILPSFEVRKEKLGDRIAALQQLVSPFGKTDTASVLMEAIGYIKFLQDQVETLSRPYLKSSRSSKKPRPTHQRGCWNASAAGEEQEQEETTTRRRRPDLRSRGLCLVPLSCTSYVTNENGAWVPSQF

SEQ ID NO: 50863 - protein, 202 aa, Zea Mays
MGAKGVSISHIKSHLQMYRASISSSSSTHHQPSLQKSTSTAASNNKRVFFTREDCASQEGNAPASDKNIYTTTVRGCGQYSSPYQIRPSLQQVFRCWEQKRGRVAWNSDVLTTEKGVIIRPSHTRKHETQQHTGCDLTLSIGLWEDASSSDDADGSSSISEELLPAPAAGGARRVAAVVKEEEESKPAALNLDLTISSSWLA

SEQ ID NO: 50864 - protein, 201 aa, Zea Mays
MGAKGVSISHIKSHLQMYRASISSSSSTHHQPSLQKSTSTAASNNKRVFFTREDCASQEGNAPASDKNIYTTTVRGCGQYSSPYQIPSLQQVFRCWEQKRGRVAWNSDVLTTEKGVIIRPSHTRKHETQQHTGCDLTLSIGLWEDASSSDDADGSSSISEELLPAPAAGGARRVAAVVKEEEESKPAALNLDLTISSSWLA

SEQ ID NO: 50865 - protein, 244 aa, Zea Mays
MVKHMLQLYLMAENSNTARHLAEFWMIEPELAFADLNDDMACATAYLQYVVKYILENCKEDMDFFNTWVEKGIIDRLNDVVEKNFVHLSYTDAVELLLGSKKKFEFPVKWGLDLQSEHERYITEVAFDGRPVIIRDYPKEIKAFYMRENDDGKTVAAMDLLVPRVGELIGGSQREERLDYLEARLDEQNLNKESYWWYLDLRRYGSVPHAGFGLGFERLVQFATGIDNIRDAIPFPRVPGSAEF

SEQ ID NO: 50866 - protein, 1176 aa, Zea Mays
MSYAAYKMMHLPTGIDHCAAGFITHSPADAAAFSTPAPAPTAAAGPDGDIDSTAARAPRRVGPTPNLVVSAANVLEVYAVRAEVATGAEDAGNSSSTGTILDGISGARLELVCHYRCKQMALASLHSLLAVNFRLHGNIESMAVLSDGTENRRDSIAVTFNDAKITCLEFDDSINGLRTSSMHCFEGPEWFHLKRGRESFAWGPIIKGDPQGRCGAVLVYGLQIIILKAAQVGQSLVGEDEPTRVLSSTAVRIESSYVIDLRDLEMNHIKDFTFVHGYIEPVLVILHEREPTWAGRISSKSQTCMLSAFSISMGLKQHPMIWSAAKLPHDAYQLLAVPPPISGILVICANSIHYHSQSTSCSLALNSFSSQPDGSPEILKTSFHVELDVAKATWLSHDIVMFSSKNGEILLLTVVYDGRAVQRLDLMKSKASVLSSGATTLGSSFIFLGSRLADSLLVQFSCGMPTSVLPDLTDEPADIESDLPFSKRLKRIPSDVLQDVTSVEELSFHNKAVPNIVDSAEKISFVVRDALINVGPLKDFAYGLRTNSDPNAAGIAKQSNYELVCCSGHGKNGTLSALQQSIRPDLITEVELPSCTGIWTVYYKSSRGNTTDNNEYHAYLIISLESRTMVLQTGDDLGEVTETVDYNVQGSTIAAGNLFGRCRVIQVYAKGARVLDGSFMTQELNFSMHTSESSLNSEPLAAASASIADPYVLLKMSDGSIRLLIGDPSTCTISINAPAIFASSSERISACTLYCDRGPEPWLRKTHTDAWLSTDVGEAIDDNDNSSHDLSDIYCIICYESGKLEIFEVPSFKRVFSVDNFVSGPAILFDVFSRNSTKDSGIGDRDASKVSVKKEEAANIKIVELAMHRWSGQFSRPFLFGLLNDGTLLCYHAYYFEGSESNVQCAPFSPHGGSPDIGNATDSRLRNLRFCRVSIDISSRDDISCLVRPRITIFNNVGGYEGLFLGGPRPTWVFVCRQRFRVHPQLCDGPIVAFTVLHNVNCCRGLIYVTSQGFLKICQLPSAYNYDNYWPVQKVPLHGTPHQVTYYGEQSLYPLIVSVPQVRPLNQVLSSMADQELGLHMENDVTSGGDLQEVYTVDEFEVRIMELGKSNGRWETRSTIPMQSFENALTVRIVTLQNTSTKENETLMAIGTAYVQGEDVAARGRVLLFSFSKSEN

SEQ ID NO: 50867 - protein, 940 aa, Zea Mays
MRDARAPQFQRRGQGGVGVVLLPLMLLLAGTASGQQQIQPPPVPPADLPDVERRLNNLTDHVATTISDKFRFCVADPKEDWNEAFNYTSDLSFVDRCLTETQGDLPQRLCGPDEVKFYFSSLYDRDGDKNINLKTNINCNMSSWGKGCDAGWACATDPVPDRPSNRGSNDIPLRTSSCQACCEGFFCPRGLTCMLRTIADWVPQLRRGALCLLLLVIYNCSDKFLSIRERRKARSRENAIRLARQQLKAQEGWKAAKQFARRHVSGMQGHLSRTFSRRRSFRQQVDADKSSHRVQEAPLMGQVQMQEMSDSAVFASESANEITEAMPSVIVDVSDGEVVATNENPAPKGKHRSTHTQVFKYAYGEIEKEKFQQRQDNKNLTFTGVIAMVKDQQKEITRPLLKVEFRDLTLMLGKKKLLRSINGELRPGRVTAVMGPSGAGKTTFLNAVTGKVNGYKMTGSVLVNGKNLNIRSYKKVIGFVPQDDIVHGNLTVEENLWFSAKCRLSASMKHRDKVLLVERVIDSLDLQGIRNSLVGTVEKRGISGGQRKRVNVGIEMVMEPSLLILDEPTSGLDSSSSQLLLRALRHEALQGVNVCAVVHQPSYTLYNMFDDLILLAKGGLMVYNGPVKTVEEYFTALGIHVPDRVNPPDHYIDILEGIVKPDSSAIKAKHLPVHWMLHNGYEVPSDMQDDVKEIGEQAPQFRSSSSTSGSPSPHCLPIRNAFAEERDRLEQRLSKPKDLSSRKTPGIFMQYKYYLGRVTKQRLREARLLMVDFLILGLAGICLGTIAKLSDKTFGMPGYIYTIIAVSLLCKIAALRSFSLERLQYFRERESGMSSLAYFLARDTIDHFSTVVKPIIYLSMFYYFNNPRSTIADNYIVLLALVYCVTGIGYTFAICFSPGSAQLEIVLLKMGIGGLHNCKCQEVSWSLAYNPLWPVVSESI

SEQ ID NO: 50868 - protein, 856 aa, Zea Mays
MSSWGKGCDAGWACATDPVPDRPSNRGSNDIPLRTSSCQACCEGFFCPRGLTCMLRTIADWVPQLRRGALCLLLLVIYNCSDKFLSIRERRKARSRENAIRLARQQLKAQEGWKAAKQFARRHVSGMQGHLSRTFSRRRSFRQQVDADKSSHRVQEAPLMGQVQMQEMSDSAVFASESANEITEAMPSVIVDVSDGEVVATNENPAPKGKHRSTHTQVFKYAYGEIEKEKFQQRQDNKNLTFTGVIAMVKDQQKEITRPLLKVEFRDLTLMLGKKKLLRSINGELRPGRVTAVMGPSGAGKTTFLNAVTGKVNGYKMTGSVLVNGKNLNIRSYKKVIGFVPQDDIVHGNLTVEENLWFSAKCRLSASMKHRDKVLLVERVIDSLDLQGIRNSLVGTVEKRGISGGQRKRVNVGIEMVMEPSLLILDEPTSGLDSSSSQLLLRALRHEALQGVNVCAVVHQPSYTLYNMFDDLILLAKGGLMVYNGPVKTVEEYFTALGIHVPDRVNPPDHYIDILEGIVKPDSSAIKAKHLPVHWMLHNGYEVPSDMQDDVKEIGEQAPQFRSSSSTSGSPSPHCLPIRNAFAEERDRLEQRLSKPKDLSSRKTPGIFMQYKYYLGRVTKQRLREARLLMVDFLILGLAGICLGTIAKLSDKTFGMPGYIYTIIAVSLLCKIAALRSFSLERLQYFRERESGMSSLAYFLARDTIDHFSTVVKPIIYLSMFYYFNNPRSTIADNYIVLLALVYCVTGIGYTFAICFSPGSAQLCSALIPVVLTLLSTQKSTPTLIRRLCYSKWALEGFIIVNAKKYPGVWLITRCGLLFQSQFDIHNYKLCILILFMYGLFFRMVAFAAMILLKKR

SEQ ID NO: 50869 - protein, 1090 aa, Zea Mays
MRDARAPQFQRRGQGGVGVVLLPLMLLLAGTASGQQQIQPPPVPPADLPDVERRLNNLTDHVATTISDKFRFCVADPKEDWNEAFNYTSDLSFVDRCLTETQGDLPQRLCGPDEVKFYFSSLYDRDGDKNINLKTNINCNMSSWGKGCDAGWACATDPVPDRPSNRGSNDIPLRTSSCQACCEGFFCPRGLTCMLPCPLGSYCPRATANHTTGLCDPYKYQIAPNSTDSCGGADMWADIQSTEEIFCPAGYYCPSTTRKDNCSSGHYCRLGSTAEEKCIIKASCEENAENEHIAILGACIVGALCLLLLVIYNCSDKFLSIRERRKARSRENAIRLARQQLKAQEGWKAAKQFARRHVSGMQGHLSRTFSRRRSFRQQVDADKSSHRVQEAPLMGQVQMQEMSDSAVFASESANEITEAMPSVIVDVSDGEVVATNENPAPKGKHRSTHTQVFKYAYGEIEKEKFQQRQDNKNLTFTGVIAMVKDQQKEITRPLLKVEFRDLTLMLGKKKLLRSINGELRPGRVTAVMGPSGAGKTTFLNAVTGKVNGYKMTGSVLVNGKNLNIRSYKKVIGFVPQDDIVHGNLTVEENLWFSAKCRLSASMKHRDKVLLVERVIDSLDLQGIRNSLVGTVEKRGISGGQRKRVNVGIEMVMEPSLLILDEPTSGLDSSSSQLLLRALRHEALQGVNVCAVVHQPSYTLYNMFDDLILLAKGGLMVYNGPVKTVEEYFTALGIHVPDRVNPPDHYIDILEGIVKPDSSAIKAKHLPVHWMLHNGYEVPSDMQDDVKEIGEQAPQFRSSSSTSGSPSPHCLPIRNAFAEERDRLEQRLSKPKDLSSRKTPGIFMQYKYYLGRVTKQRLREARLLMVDFLILGLAGICLGTIAKLSDKTFGMPGYIYTIIAVSLLCKIAALRSFSLERLQYFRERESGMSSLAYFLARDTIDHFSTVVKPIIYLSMFYYFNNPRSTIADNYIVLLALVYCVTGIGYTFAICFSPGSAQLCSALIPVVLTLLSTQKSTPTLIRRLCYSKWALEGFIIVNAKKYPGVWLITRCGLLFQSQFDIHNYKLCILILFMYGLFFRMVAFAAMILLKKR

SEQ ID NO: 50870 - protein, 730 aa, Zea Mays
MQGHLSRTFSRRRSFRQQVDADKSSHRVQEAPLMGQVQMQEMSDSAVFASESANEITEAMPSVIVDVSDGEVVATNENPAPKGKHRSTHTQVFKYAYGEIEKEKFQQRQDNKNLTFTGVIAMVKDQQKEITRPLLKVEFRDLTLMLGKKKLLRSINGELRPGRVTAVMGPSGAGKTTFLNAVTGKVNGYKMTGSVLVNGKNLNIRSYKKVIGFVPQDDIVHGNLTVEENLWFSAKCRLSASMKHRDKVLLVERVIDSLDLQGIRNSLVGTVEKRGISGGQRKRVNVGIEMVMEPSLLILDEPTSGLDSSSSQLLLRALRHEALQGVNVCAVVHQPSYTLYNMFDDLILLAKGGLMVYNGPVKTVEEYFTALGIHVPDRVNPPDHYIDILEGIVKPDSSAIKAKHLPVHWMLHNGYEVPSDMQDDVKEIGEQAPQFRSSSSTSGSPSPHCLPIRNAFAEERDRLEQRLSKPKDLSSRKTPGIFMQYKYYLGRVTKQRLREARLLMVDFLILGLAGICLGTIAKLSDKTFGMPGYIYTIIAVSLLCKIAALRSFSLERLQYFRERESGMSSLAYFLARDTIDHFSTVVKPIIYLSMFYYFNNPRSTIADNYIVLLALVYCVTGIGYTFAICFSPGSAQLCSALIPVVLTLLSTQKSTPTLIRRLCYSKWALEGFIIVNAKKYPGVWLITRCGLLFQSQFDIHNYKLCILILFMYGLFFRMVAFAAMILLKKR

SEQ ID NO: 50871 - protein, 810 aa, Zea Mays
MSDLASTSKDKLAYFRIKELKDILNQLGLPKHGKKQDLVDRVLAELSDEQGQRHHGWGRKNALTREAVAKVVDDTYSRKMQVCAPDLPSRSHSGSDFNHFRPKEEATDFYYVETKVRCLCNSTMLNDKIIKCEDGKCQLWQHFTCVLIPDTPTEGAGPDIPPHFYCELCRLNRADPFWVTTANPLLPVKFISSGVGNDGASAPQIVEKTFQLSRAERETVQRPEYDLQVWCILVNDKVQFRMQWPQYAELQVNGIPVRVMTRPGSQLLGINGRDDGPLVTTCSREGINKISLSRVDARTFCFGVRIVRRRTVPQVLSLIPKEGEGESFEDALARVRRCLGGGGATDNADSDSDLEVVTESVTVNLRCPWQCPICLNNYSLENLMIDPYFNRITSLLHNCSEDVNELDVKPDGSWRVMGDAATRDLSQWHMPDGTLCDSKEDTNPGVASVNEFKREGASDEHRTLKLGIKKNPIGLWQVSSKADDMKPVVRNHIQNNTGFSTPNIVPMISSPTGSYRDGEDVSVNQEGGGIQFDISLNQEFDSFAHNFGQTYNTEDRPQHPHHNAADVIVLSDSDEENDPTVQPPAVYENTPTNDDSFPFVTDAAGSGYPERYQEDASVGTSGLGLLRQNTGEFEINNWQMLSYPQPEQGFQFFVTDTDVGNPFVAPHNSFTIAPEDYSLGCNVGIEDPSAAHDVSICRNSNDVHGSLVDNPLALTVHPNDWRISLTLAAGGGGNEESTSVGGLKSQPKVSSKEAGVEPLLDAASALGSMNNDRCTGSNLNPKRIENIFSHPRQPRSVRPRLCLSLDTDSE

SEQ ID NO: 50872 - protein, 416 aa, Zea Mays
MNPSMPPPPPRNPNSFSSSASMPPSPLPNPSPPTARPEAASEPDLSSAEVNGRANPSTSSSMPPPPPQKPAPPAPQMEAKAAEAEGGAVPSPSVSGSSAKEAPNSSGASSGNNVMEEAAASPVERQRARAPYAIPEWSTAPSQPFFLEVLKDGTIVDQLDVSKKGAYMFGRIDLCDFVLEHPTISRFHAVLQFRNDGKVFLFDLGSTHGSFINKNLIKKKLYTEIHVGDVIRFGQSSRLYIFQGPSELMPPEKDLQKLRDARIQQDMLDREASILRAKTQAALAEGISWGMTDDAIEESAEDDADEITWQTYKGQLTDRQEKTRSKIVKRMEKIANMKKEIDAIRVKDISQGGLTQGQQTQIARNEQRMSQIMEELDNLEETLNDSIRESIGARSGKAKRGSYKASLEEEDDVLST

SEQ ID NO: 50873 - protein, 635 aa, Zea Mays
MKELLETNKAVKVSLFLITMLATAMVISDAILTPAISVLSAVGGLKEKATFLTTDEIVWITVGILVALFAIQRFGTDKVGYLFAPIILLWLLLIAAVGFYNLVKYDTGALRAFNMKYIIDYFRRNKKKGWASLGGILLCFTGTEALFADLGYFSIRSIQLSFGFGLVPSVLLAYIGQAAYLRVHPEDVANTFYRSTPISLFWPTFILALAASIIGSQAMISCAFATISHSQTLGCFPRVKILHTSRQYSGQLYIPEVNYLLCLGACLVTVGFRTTVIIGEAHGICVVLVMIVTTLLLTIVMLLVWKISVWWIVAFFLVFMSSESIYLSAILSRFAHGAYVPVAMSAVLMVVMVVWHYVHVNKYRFELEHSIPRDKVKELLERSDIQRVPGIGLFYTELVQGIPPVFRHLIEKIPSIHSVLIFVSMKHLPIPSVDMSERFLFRQVDREDYKVFQCVARYGYRDPFEEAKDFVDKLVEHLQYYIRDVNLYGLGCEPMMKQSFSYCSSRAESFGSHEKTKVKAVYAEEMLTPAESFSEHARQASGKNKLFTQFQGDKMNIVEMMKIQQEQQAVLEEMSKGVVYIFGESEVVARPHSSLIKKIAINYIYSFLRKNSRNGEKMLSIPRRQILKVGVSYEI

SEQ ID NO: 50874 - protein, 239 aa, Zea Mays
MCTRGHWRPSEDEKLKELVALYGPHNWNAIAEKLQGRSGKSCRLRWFNQLDPRINRSPFSEQEEALLLASHRVHGNRWAVIARLFPGRTDNAVKNHWHVIMARRCRERMRLSNRGGAAAGQHGAVDTGAVEDGSNPRNAKKLRPDASSVASFLDKYRREFSVVVPFAINHDRKQQDYCSTTNEDANKSVEFYDFLQVNANSSDTKCGSSIEEQEENRDDQAEGQVQFIDFLEVGVSHPQ

SEQ ID NO: 50875 - protein, 703 aa, Zea Mays
MCIEDINHEHVFDLVKEVAMELAATSAVSSVNLLKLSSLLSLSTNMELYTEAVSLENLKTRALRCESREELDLAEQMIPLVNYMHDHLLKEKQQLSINGVPIPADFCCPLSLELMSDPVIVASGQTYERVYIKLWLDEGFTICPKTLQRLGHSNLIPNYTVKALIANWCESHDIRLPDPMKSLKLNFPSAASFLEDLSAADGSPLHPIVVSRANIPGSPEVDVYLRNLNGASPPHSLVNQNSHAHANRHGHEVSTSQTSEKTNGSVPDVSRLSLASSEARESSLEGRRGGSIGQISEHSTEEAFQSSNLDRDLQDNLANSSLNGSLPNSGQLDGECDNGVTRVPSDRTNYSSDASGEVTNGGGAPVASSVPQREHLIPPRLGMGTKQFIRRQPSDRGFPRIISSSTMDARSDLSAIENQVRKLIDDLKSDSIDVQRSAASDLRLLSKHNMENRIAIANCGAVNLLVGRLHSPDAKTQEHAVTALLNLSINDNNKIAIANADAVDPLIHVLETGNPEAKENSAATLFSLSVIEENKVKIGRSGAIKPLVDLLGNGTPRGKRDAATALFNLSILHENKARIVQADAVNHLVELMDPAAGMVDKAVAVLANLATIPEGRNAIGQARGIPALVEVVELGSARGKENAAAALLQLCTNSNRFCSIVLQEGAVPPLVALSQSGTPRAREKAQALLSYFRSQRHGNSARR

SEQ ID NO: 50876 - protein, 746 aa, Zea Mays
MLSSSASRRDAARSGAELPRPHAVAGMARSGELPKGAPSATAPDAVRCEGWMVRHGRRKIGRSFFHTRYFVLDNGVLAYYKKKPRDHMIPLKSIIIDGNCRVEDRGLKTHHGQMIYLLCIYNKKEKENQITMGGYDIEDALAWKRKIELLIDQDTTTAKNHKAFASLDFDIDLGGPFSFSDHDSGPEDEEEPRPTLLRRTTIGNGPPDSVLDWTKEADSGLSNQNATSQAYSRKNWRLLRCQNGLRIFEELVEVEYLARSYSRAMRAVGVVEASCEAIFGLVMSMDASRYEWDCSFQYGSLVEEVDGHTAILYHRLQLNWFSMLVWPRDLCYVRYWRRNDDGSYVVLFRSTENQNCGPQPGFVRASIESGGFKISPLKSLNGRPRTQVQHLMQIDVRGWGVNYLPSFQYYSLLQMLNCVAGLREYFSQTDEIHTVPRIPVMHTMVNAASMKKDQNLQEPDSKTKQADNKHLDMVDEESEDDDDYQVPDADVEEEPTKSDSDAKNSDPIDLSWFSGIIRQDTNEKSRNCWAVPDSKIFKVRSKNFPHDKSKVPAGKYLMELVAVDWFKDAKRMDHVARRKGSAVQVAAEKGMFTFLVNIQIPGPSHYSLVLYFVSNSLKKGSLLQRFADGDDDFRNSRLKLIPSVPKGSWIVRQSVGSTPCLLGKAVDCSYLRGPDYLEVDVDIGSSAVANGVLGLVFGVVTTLVVDMAFLIQANTYDELPEQLLGAARLSHIEPSAAVYPVLDNIS

SEQ ID NO: 50877 - protein, 404 aa, Zea Mays
MCPELLADIPYGSKSDIWSLGCCIYEMAAFKPPFKAFDMQALINKINKSAVPPLPTMYSGAFRGLVKSMLRKSPDHRPRAAELLKHPHLQPYVFELQLKSTPRNLFSAKLPTRYVTNKAAVSDAEDNCPPKYSKSHSFKLDRHGRPGSTTRKDCPELSEQMEGLSVQVTKNVNDELIHEKYPKVTTSPAPTPRRASSTPRRRLEASKTFHARTAHKEQSQRSRSSANQASQARRESLPMRMIKTPDKRQATDILTRLKSPDVSVNSPRIDRIAEFPLASFETPLHRITKLTSPSIIDQYITKDKCTFQVLRSDSENYTDSPDVDLLGSDNSPRSSSNLRQRRFDTRSYQQRAEALEGLLEFSAQLLQQERFEELGILLKPFGPGKASPRETAIWLSRSLKETGL

SEQ ID NO: 50878 - protein, 378 aa, Zea Mays
MDSGLLELECFNAVLNMSDCLRLQSLHTNRNHAAATSRAAEPRRERTPRMQLLKPKEAATLPREALEAHIVSLVRRCPGLLALRSAHAHLTRLRLPRLTAAFALSKLLASCVSAPAPAAAQAAASSYARNLFDQIPDPTAFCYNSLIRALPAAGSAPALAVYRRMLRAGSPRPNSFTLAFALKACAAVPAPGEGRQLHAQALRQGLATSAYVQTGLLNLYAKCEQVALARTVFDGMAGDKNLVAWSAMVSGYSRVGMVNEALGLFREMQAVGVEPDEVTMVSVISACAKAGALDLGKWVHAYIDRKGITVDLELSTALIDMYAKCGLIERARGVFDAMVEKDTKAWSAMIVGFAIHGLVEDALGLFSRMLELKVRTLH

SEQ ID NO: 50879 - protein, 507 aa, Zea Mays
MGACNSCEATAVAAAPGPATAEARVVLADGALRRFPGGTRASQAVKAAAAGAASWFLCSADGLELGGAVVPVRPEEALQPGQLYFVLPAAMRRRPLQAEEMAALAIRASAALAGDHDGPLVFPEAAAAAGAGARCGKGPARFTPFGLGGRRAHAAEAPTALAALRYATLRTAFLRFSGSPLRRKLLEMAAKSGYTRRLPLTGETAPPPPSAVLYVANCGPAVGVTDADVRSTFGAFGEVAGVQAADDSGARIIVRFHEPAAAEAAMAALHGRPCDLLAGRVLHIRYSVPVKPKARPGGSVPVAHAASELGIPGIYMVQEFVTAAEEQELLSAVDSKTWKRLAKRRVQHYGYEFLYETRNVDSKQFLGELPTFVSTVLEKIASFPGVKDCATRLVDQLTVNEYPCGVGLSPHIDTHSAFEEMIFSLSLAGTCIMEFRKYTKGTWRAPSVVDGVDEDSSQEPECIRKAIFLPPRSMLLMSGEGRYAWHHYIPHHKIDAVGGQVIKRNSR

SEQ ID NO: 50880 - protein, 328 aa, Zea Mays
MAEGETSAEEKRRRTGPPEAQELEETKRRRTGPPEAQELEERLDSLRDKIAAARLVAGSRFGEEQRRSLLREWLRLASAKLDLDLSGMSELDRSAEALPWLVPPEEADKRTTHTRQEVQELEERMTCLQLLSEDAADDRILARRELGAAADEFLLRLTTRQRALAREYSRLANLKRPPDLSGMTEADRGAEAERLREEMLQKARQLQDQGDMSGARESEGLARIIDFDVKQGGEYLNSICCVGNIYTFDHTEESPVGPMRFTNRPWQDKMCVNCASINILSVKIACSDIDFPIQVYGTVVARDCIDYKCVYLFRRDNDHCQLISSNNH

SEQ ID NO: 50881 - protein, 111 aa, Zea Mays
MGGGVSVEGDVYSYGTLLLEMFTAKRPTDPLFQGGQSIRSYVAAAYPERVTAVADLSLLQHEERNLDEESLEESLVSVFRVALRCTEESPRARMLTRDAIRELAGVRDAYG

SEQ ID NO: 50882 - protein, 650 aa, Zea Mays
MIEQYSAFMSPVAAADSMTPKKFMALVSAKIQTYFCRGGSIQRAVRRMAGGGGGRRRPGALADPRTGDASSASASCSGDDTSIGSATAKREGARRCIMQRYRSQLEQEVKKLQRQLQEEIDLHLALADAITYNAALILKSSIKLPDKAHELLISISSLEIAITKLEEDLNHLHYQLYHARNERFLAENKPGYLLPTRSDCQPSTACNCTWEEPEQMLRELIFRDYHSVQEDFSTEPEDQQDDEKYVKGRERVSLNMLLEKHQDISSTGLFVHRDEEMQEACSMEKEGEEDQKIDMLPFNLPNLKKGNMSENLWNNPNQLSEEMVLSMKDIFLNLSTSSKMSPEEPFSNSSSSAEHLSGSTLTTLSDSSVIASVQPSPSMYLNHDDGNFDPYNVNGKEAQRDIGSYSSVAEVSWMYIGNEQLEYASGALRKFRFLVEQLSKVDTSCMNCDERLAFWINLYNALIMHAYLAYGVPENDIKLFALMQKACYTICGQPVSAAEIEFVILKSLMLALHKFKTSENLKKYSIDGTEPRVLFALCCGMFSSPAVRIFSAENVRAELQESMRDYIRASVGVNDKGELMVPKLLQSYAKGIVEDSLLADWICRHLTLDQLAAVQDTSSSHTQRLLGVRSFSVIPFDSRFRYLFLFDNSR

SEQ ID NO: 50883 - protein, 269 aa, Zea Mays
MIEQYSAFMSPVAAADSMTPKKFMALVSAKIQTYFCRGGSIQRAVRRMAGGGGGRRRPGALADPRTGDASSASASCSGDDTSIGSATAKREGARRCIMQRYRSQLEQEVKKLQRQLQEEIDLHLALADAITYNAALILKSSIKLPDKAHELLISISSLEIAITKLEEDLNHLHYQLYHARNERFLAENKPGYLLPTRSDCQPSTACNCTWEEPEQMLRELIFRDYHSVQEDFSTEPEDQQDDEKYVKDARGMLYGKRRRRRSEDRYVTI

SEQ ID NO: 50884 - protein, 559 aa, Zea Mays
MIEQYSAFMSPVAAADSMTPKKFMALVSAKIQTYFCRGGSIQRAVRRMAGGGGGRRRPGALADPRTGDASSASASCSGDDTSIGSATAKREGARRCIMQRYRSQLEQEVKKLQRQLQEEIDLHLALADAITYNAALILKSSIKLPDKAHELLISISSLEIAITKLEEDLNHLHYQLYHARNERFLAENKPGYLLPTRSDCQPSTACNCTWEEPEQMLRELIFRDYHSVQEDFSTEPEDQQDDEKYVKGRERVSLNMLLEKHQDISSTGLFVHRDEEMQEACSMEKEGEEDQKIDMLPFNLPNLKKGNMSENLWNNPNQLSEEMVLSMKDIFLNLSTSSKMSPEEPFSNSSSSAEHLSGSTLTTLSDSSVIASVQPSPSMYLNHDDGNFDPYNVNGKEAQRDIGSYSSVAEVSWMYIGNEQLEYASGALRKFRFLVEQLSKVDTSCMNCDERLAFWINLYNALIMHAYLAYGVPENDIKLFALMQKACYTICGQPVSAAEIEFVILKVKTPVHRPQLSLMLALHKFKTSENLKKYSIDGTEPRVLFALCCGMFSSPAVSD

SEQ ID NO: 50885 - protein, 615 aa, Zea Mays
MRFHESRELKEAGSADWWRLHEASLFALGSLSEQLCEAQDSGLTKYNVRDLLEQMLIDIMGTGVHQYPFLHARAFSSVAKFSSLISKGVSEQYLCNAAHAIASDVPPPVKVGACRALAQLLPESNQNLIQPNIMGILSSLVDLLRQASDETLHLVLETLQSAIKSGGEQSTLIEPVISPIILDVWAQHIADPFISIDAVEVLEAIKNAPGCLQPLVSRILPTIGSILVKPKVQPDGLVAGSLDLLTMVLKNAPVAVVKAVFDTCFVSTVQIVLESDDHGEMQNATECLAAFISGGRQELLVWGGEQGQTLKMLLDAASRLLDPALESSVSLFVGSFVLQLILQIPLHLSPHIPDLIAAIMRRMQTSSIAGLKSSLIVIIARLVHMSAPNVDGFINLLLSIPAQGYDNSLVYIMSEWSQLQGEIQGAYQIKVTTTALALLISTRHPELSKVEVQGHLIKTSAGITTRSKARVTPDQWTKIPLPVKIFSLLADTLTEIQEQIGAGDDDDSEEDNDWEEVQNGDASISDDIIHSASVPSMTNPSVEHLNAMAKVFDEDDDDSYDDDLTKNDPLNEVKLADFLTNIFANLWENNRPIFEYLCQGLSDSQRSAVEKVLRR

SEQ ID NO: 50886 - protein, 806 aa, Zea Mays
MEAHGDQRWLVDCLTATLDTARDVRAFAEESLRQASLLPGYGAALTKVTINKEISFGLRQLAAVLLKQFIKQHWQEDEENFVPPVVSASEKVVIRQLLLTSLDDSNGKIRTAISMAVAAIGQQDWPEDWPELLPVLLKLIGDQSNGNEVRGALRCLALLSDDLDDMCVPKLVPELFPSLYRIISSPHLYENSLRAKAFAIVHSCISMLGSMSGVYKRDTASLMTSVLDPLIEQFSIVLNYPVQSQNPDDWSMQMEVLKCLLQLVQNFPRLPEAKISGKICAAILPALWQTFVSSFKTYHLSYIQGAETLDSISYDSDGSEKSLESFEIQLFELWTTIVGNSRLAKVIGGNIKELAYYTIALQQITEEQVQNWSRDANQYVADEDDLTYSCRVSGSLLLEELVTAYEDYGIDSIVEASQMRFHESRELKEAGSADWWRLHEASLFALGSLSEQLCEAQDSGLTKYNVRDLLEQMLIDIMGTGVHQYPFLHARAFSSVAKFSSLISKGVSEQYLCNAAHAIASDVPPPVKVGACRALAQLLPESNQNLIQPNIMGILSSLVDLLRQASDETLHLVLETLQSAIKSGGEQSTLIEPVISPIILDVWAQHIADPFISIDAVEVLEAIKNAPGCLQPLVSRILPTIGSILVKPKVQPDGLVAGSLDLLTMVLKNAPVAVVKAVFDTCFVSTVQIVLESDDHGEMQNATECLAAFISGGRQELLVWGGEQGQTLKMLLDAASRLLDPALESSVSLFVGSFVLQLILQIPLHLSPHIPDLIAAIMRHYSDYLSFSKTCPQFTLPAGTYECTKC

SEQ ID NO: 50887 - protein, 338 aa, Zea Mays
MDGHVKLYRSPIWELCDEWVEVADISQLLFNYYKLINFGEDNGSHLTSLKNTNTGETEVLGSAYELQESLYFRCPGQRKLKRSRVDGFIYDVNEVDLDASKDADFSIEPCSKSKKKYLKKTVKPRHEVVAVNERNNTGNIKGSLSSNGENKSLPLITAKQYACRAAHLSSLVVSWSPVVSSSDKTSCLLRHWCIIAVGSKSGNLSFWKLPKPEYYTIDAGVVTSDPMLIGVLQAHKSCVSVIAWQVLSAGSSKSSLLLATGCSDGSVKIWLGNIEGLNQCASGEVPFALVAVVATDLSSPVSSISLAIPAQSQHEHQNLFPNIGLIEAIGLLKVGESK

SEQ ID NO: 50888 - protein, 768 aa, Zea Mays
MFIVHFLSACLLAVCTMDGHVKLYRSPIWELCDEWVEKNTNTGETEVLGSAYELQESLYFRCPGQRKLKRSRVDGFIYDVNEVDLDASKDADFSIEPCSKSKKKYLKKTVKPRHEVVAVNERNNTGNIKGSLSSNGENKSLPLITAKQYACRAAHLSSLVVSWSPVVSSSDKTSCLLRHWCIIAVGSKSGNLSFWKLPKPEYYTIDAGVVTSDPMLIGVLQAHKSCVSVIAWQVLSAGSSKSSLLLATGCSDGSVKIWLGNIEGLNQCASGEVPFALVAVVATDLSSPVSSISLAIPAQSQHEVSLAIGRVSGSLEIWIWNASSNKIEIFSAWHAHDQVVTGLQWAMDGYCLFSCSQDNSARCWISHENHLEEIFMHSNFPELRESADLSELSDRCYGLTLAPGEQMIAVVRSLDLNLLNQMYQVRTQKAVVEFIWIGGQFVGIPLDRSIDICSSQSTDLSSSNLMWWGSNILWSLKKYENVEKRLVIWDVVAVLQELKKSAPAFLETLVHSWVSVLLSGDPQCVSIDAPSRSMHDMMPYVSTRKLHLLNIMCRKVMVSIHTHHGPGAENGNEETTDFWSTLLVRSETELRERLVGFTFAAVLKRTAYLFNGTSTENCWFPVGVAQMDSWVTMNYDGQVHDQLQSIRSKIKDLGSRIDGYSDVESCPYCSSPVHFESPDVAICGERHTLPRCRASMILCSVVQPLWHCVCCGGTVNKLLPESFFTMQASTMHDEGSLDLSAASVPLCPFCGILLQRSMPAFLLSTSPA

SEQ ID NO: 50889 - protein, 572 aa, Zea Mays
MLDVLLAERRVDEALDALDEAERVAVDAKRKQTLTAAEVLALKRSISDNRQRLADQLAEAACQSSTRGIELRAAASALKRLGDGPRAHSLLLSAHNQRLQCNMQTIHPSSTSYGGAYTAALAQQVFSVIAQALSDSVDVFGDESCYASELVTWATKQVMSFALLVKRHVLSSCAAAGGLRAAAECVQISLGHCSLLEARGLSVSSVLLKQFKPSLEQALDANLRRIEESTAALAAADNWILTYPPTGIRPLTRLSAANLALQPKLSSSGHRFNSMVQDFFEDVAPLLSLQLGGSTMDGITQIFNSYVNLLINALPGSMDDEANLDGLGNKIVRMAETEEQQLALLANASLLAEELLPRAAMKLSSINQSMDDLCKRGTDKQSRVPEQREWKRKLHRMVDRLRDSFCRQHALELIFTDEGDTHLSAEMYISMDNTVEEPEWVPSPIFQELYAKLNRMASIAAEMFVGRERFATLLMMRLTETVILWLSEDQAFWEEIEQGAKPLGPLGLQQFYLDMQFVIIFGQGRFLSRHVHQVILDVIDRAMAAFSATGMNPDSLLPSVAYSNCNWQPVVT

SEQ ID NO: 50890 - protein, 117 aa, Zea Mays
MTSVVYRSVIFNQATAGRHTIILMQPSQNRSTRTFMDYDSVNHALDGICGLYERKIRNINPMVRNLTYDIGDLYNFIDGLTDISALVYDDSLHAFLPYDRQWIKQKLFQHLKRLAQQ

SEQ ID NO: 50891 - protein, 449 aa, Zea Mays
MAEPAPAPPVTAPLVGLLYDERMCAHATPNGEEHPENPERLRSIWRKLNAAGVASRCVALKAKEAEDKNKIARKFNSIYLNKGSSESAVLAAGSVIEVAEKVAAGELSSAIALVRPPGHHAEHDEAMGFCLFNNVAVAANYLLNERPDLGIKKILIVDWDVHHGNGTQKMFYDDPRVLFFSVHRFDYGSFYPSEGDASHCFIGEEAGKGYNINVPWEHGKCGDADYIAAWDHVLLPVTKVFDPDIILVSAGFDAALGDPLGGCCITPNGYALLLTKLLGFAQGRIVMALEGGYNLRSIANSVCACAKVLLGDKFTFNTPEMQPFESTWRVIQAVRNELKTCWPVLSSKLPENVSLRIKPAPSELYASDSESDSEDVDELLGTVASVSVIEATGVAISEHLSKMKLDDDSLAVKTNSSCSAAEQHPVDSVKFWIKHVETKISMLYSRREG

SEQ ID NO: 50892 - protein, 76 aa, Zea Mays
MAGASVTRARSLLLLVVVVVLVVSSASSSEEAQAPSDFAGGTRKLLNRAAPPPPAPASRTPVGASTTLPPPPAVAV

SEQ ID NO: 50893 - protein, 238 aa, Zea Mays
MGWSRFRRRHQRCRYLLPIRRPRCSPPLLPHASDARHARLPPLRSASLPFRPSVACAWKKVQQPQTPQRGHLAHLSLHAGSPPSPPSPVLGPTQSAHASTRSSRTPSAAASASRRSRTPSRSGSNHASSPSAASSHPLSHRIRDSASTVDTVSSPPPPWLHPPLAIPPCPLEGGHGSSHGSCCTTSALPRAGRRRLSGRAPRSLASRTRPSTAWRSSRARRSRAGASSECSGSCRRWG

SEQ ID NO: 50894 - protein, 114 aa, Zea Mays
MDRMVLSLIHCFVLYVDQPITMPLTVTLLFKVQSIHMASIKLQKKLFLQREYQIKYLLSLSFFIKSFLGGFKCSTIPWFGERREDEGAGTSQSILEARQTHPLLLLKVKMHKMI

SEQ ID NO: 50895 - protein, 77 aa, Zea Mays
MEHNRNKDSQCKSLTLLFMLVRLALHLPGYHLVHSEVNYNCLVNISFYFVLHVHQKVGKDCIFSTAYLVICIPQLML

SEQ ID NO: 50896 - protein, 349 aa, Zea Mays
MYQVRTQKAVVEFIWIGGQFVGIPLDGSIDICSPQSADLSSSNLMWWGSNILWSLKKYENVEKRLVLWDVVAALQELKKTAPAFLETLVHSWASALFAGDSQCVSITAQSSRSMHDMMPHVSSRKLHLLNIICRKVMLGNHARHGPGAGNNSNDGTTDFWSTLLVASETELRERLVGFTFAAVVKRTACLFNGTSTANCWFPVGVAQMDSWVSMNYEKVHGQLQSIRSKIKELGSRIDGYSDVESCPYCSSPVRFESPDVAICGERHTLSRCRTSMTLCSVAQPVWHCSCCGGTVDKLLPESFFTMPLDAVRDDKGSLDLSAASAPLCPFCGVLLQRSMPAFLLSTSPV

SEQ ID NO: 50897 - protein, 680 aa, Zea Mays
MSFIRGQRSLASYDPNTMHCLYGLDADLIMLALASHELHFSILREDGSRQSQPEKCISLSNEMLKTEDSSRKCRGWFPQVIETTPKKPYQFVNIWVLREYLELDLKIPNPVVKTDIERLIDDFIFICFLTGNDFIPRIPSVEIHEGAIDLLLEAYKQTFNKMGGYIVSTEKLKDKHAAYLKVSRLEKFFHELSLCEEKIFLKRYDLRESLQRKFLRQAAEECKETNYDTMEENTDGLNLTAKSFSTNCSISTYSQDESDVKANTLELRRNLKDALRNKQDLIKSGSCKHDMIRLGLAGWKSRYYREKFGVEKLSEVGKLKNDMVQRYMEGLCWVLQYYFTDVPSWSWYYPYYHAPFASDFKGLSQFKICFTTDKPLKPFDQLMAVLPKESSCALPKCYRELMENEESLVQKFYPSDLQIDTHGKRFLWQGIAMLPFIDEKLLVSATKTVEGKLAVHEINRNAVRQEKIFMRNSNTTVPNGSAFSKAFDCSSKKLWLDPSTSELGGWLSPVDDKDTSSGFFHSSVMRDLPDIRNDQTISFLFSNPEAVETIPRLLDDVKKPEKTITETEISKRPLWHTYPGCRLPETNPSVLEPQPMVSSFGRGRGRATAAETMLGGGGRGYGRSFHGAESSQTQSRGSRNDGNSYAGRGTYGGGFQRQQTAWRPAGDAGGRGGSEQRRGW

SEQ ID NO: 50898 - protein, 590 aa, Zea Mays
MTGAGMKLKINKACDLSSISVLPPRRTGGSGGAGSSAAAAAVAAGSQQRSQPLSQQSFSQGAVGSGGASSLLHSQSQLSQASLDENLLTLHLASPARDQGFRLHDDSSKKMTSLPVTSASCVREESQLQLAKTSSNPVHRWNPSLPDSRCVVPAEDVERKFQHMASSVHKVGMVLDSVQNDTMQLNRAMKEAALDSGSIQQKIVVLDTSMQKNLKGQGDLKVLVESNTKNIADQLAVLNSHSNKLVEISSALSVLPKQIERDLKQQQSDIFRIFRNNMEEIARAVKSLNSKIDAIQMPTEQRCTTNGRPLMNQLPVDRNERPQVNQTPEVTRVSQTTVASLVNQAPAANGRHLMSKTPAANGKSVMRQTPAENGRHLVSQTPAANGKTLKRQTSVTNGISLMSQVPAANGKPVVIQIPAPKGRPMMRQKTAESGRTEMNEIPVASGRPHTNKIPIAEVHPAPLVCPAKQVATDPKPKVDEEKLKALPQKLTSSRSRVAPKQEEAANTKVISRAAATEKVVIFIDDSDDDNDVRASCVILRPSGSGSLGERECDLMKVGAEESQEIPRRARKRRRREMQATVGVACMPLPA

SEQ ID NO: 50899 - protein, 465 aa, Zea Mays
MLTGCCLRTAMEGSGHARILPTEYMVILLDEEQDEDALLLAAQFCNYSFSSLILEESRNNVPYSFYARIEKIESLEPFRCAERMQIILEDNDNAKMKLVLWGEQTSLANLCSVGSMLALDRPFIANFIDNNHEDSQELCLEYGSATQVYMVPIAQQEEQVPFTPTQVKSQGPRLSCVLTDNVASQVTLPRDLYGSVDFSKYPFRAYVSDLHDKMVGISLFGTVTSVCKVSTSGTTFYLELEDTTGVVLMKLIFVGPWSLGRVGVGHMVYISGLTCALSSTNILEVSWREKEPGSLFVNLSLLPALLNSSCLHNLSPLSDLPRSTNRTHISHVRLDGIDCDSLKVSLFHNICGSVVNEHSGVLQCSFCKCACESVCARGFQLHLTIADDSADVLAWCVGQTAVEFLQISPDEYLELPEDERAMYLYTLQNESFVVAIANTRKRVDGCAVGDEAVPAWEITRAQKCE

SEQ ID NO: 50900 - protein, 540 aa, Zea Mays
MEVFGPVTPGQVSFLLGLFPVLISWIYSEILEYKKSLSHGKVHSDANLDNGTIKEDEKSVLLEGGQLKSPSTKFRNLSTKANLLRFITMDESFLLENRAVLRAMAEFGVVLVYFYICDRTDIFPESKKSYNRDLFLFLYILLIIASTLTSLKKHHEKSAFSGKSILYLNRHQTEEWKGWMQVLFLMYHYFAASEIYNAIRVFIACYVWMTGFGNFSYYYIKKDFSIARFAQMMWRLNFFVAFCCIVLDNDLMLYYICPMHTLFTLMVYGSLGLFNKYNEVPSIMAIKIACCFLSVILIWEIPGVFESLWAPFTFLLGYKDPSPSKAHLPLLHEWHFRSGLDRYIWIIGMIYAYFHPNVERWMEKLEESETKVRLSIKGTIVTLSLTVGFLWYEYIYKLDKVTYNKYHPYTSWIPITVYICLRNCTQQLRNASLALFAWLGKITLETYISQIHIWLRSSMPNGQPKWLLCFIPDYPMLNFMLTTAIYLLLSYRVFEITNVLKSAFIPSRDNSRLYQNLIAGIAISVCLYLCSLILLKIPGV

SEQ ID NO: 50901 - protein, 528 aa, Zea Mays
MEVFGPVTPGQVSFLLGLFPVLISWIYSEILEYKKSLSHGKVHSDANLDNGTIKEDEKSVLLEGGQLKSPSTKFITMDESFLLENRAVLRAMAEFGVVLVYFYICDRTDIFPESKKSYNRDLFLFLYILLIIASTLTSLKKHHEKSAFSGKSILYLNRHQTEEWKGWMQVLFLMYHYFAASEIYNAIRVFIACYVWMTGFGNFSYYYIKKDFSIARFAQMMWRLNFFVAFCCIVLDNDLMLYYICPMHTLFTLMVYGSLGLFNKYNEVPSIMAIKIACCFLSVILIWEIPGVFESLWAPFTFLLGYKDPSPSKAHLPLLHEWHFRSGLDRYIWIIGMIYAYFHPNVERWMEKLEESETKVRLSIKGTIVTLSLTVGFLWYEYIYKLDKVTYNKYHPYTSWIPITVYICLRNCTQQLRNASLALFAWLGKITLETYISQIHIWLRSSMPNGQPKWLLCFIPDYPMLNFMLTTAIYLLLSYRVFEITNVLKSAFIPSRDNSRLYQNLIAGIAISVCLYLCSLILLKIPGV

SEQ ID NO: 50902 - protein, 121 aa, Zea Mays
MRAPAMHRWAAAALAAFLVALPAAAFYLPGVAPNDFHKKDPLLVKVNKLTSTKTQLPYSYYSLPFCKPNMIVDSAENLGEVLRGDRIENSPYVLRWGSPRCARLFAKQKLMINKQRSSRKR

SEQ ID NO: 50903 - protein, 230 aa, Zea Mays
MKLDFFFQTDAMASCCCCIEIILLQYYRLHHLKVKRFANTYTYVSIHIYRSSILDVNETNEEPCFFHTVYLSSVSESYWQAQLGTNSSELGLVSLGQRDLEAVLHVHGERHLGRDGVALDDVDAVAAEDGGGGELHLVVGEVLAEAQARAAVEGGELVGGLAHEAAVPEPPLRPVLPAVVAPDALHPPHGVHGVDHLGALLQHRPVRKHLVLHDLPCVASVLAGISYCYQ

SEQ ID NO: 50904 - protein, 314 aa, Zea Mays
MKLQIDLKNRRFDRIIYNFPHSGFKGKEHEVHMINSHKKLVREFFCNARRLLRPYGEIHVSHKRGKWYEKWGLKHLAAEFSLVLVEKVSFQKADYPGYHQKKGAGPNCDKPFPLGTCSTFKFRIGSSKKQNGRRAGPISSIGGDTRPCRPLSLVQPWSGLQFVPRDYIVPVPMTAPSHVVDQRQPGMPLNFVGIYSHQGSTARSLLSTPGSSLTNALGAPGRIPSPMGRISSNCLFARLGQTLYENRIIAESLGNTDYFACEYQRSLLREYRMQSQLVPEATSLSYSAFLEARQWESVQRQERLRRRIAYGRSQ

SEQ ID NO: 50905 - protein, 294 aa, Zea Mays
MRGRHLLKPMPVLLNTTPSRLPAAHFRVRDAARPPAPLAEPDVGISRFASSIPGFRGALKQRYSDFIVHEVACDGALVRLTSFDLPDIEESGDNAEDGDSDATADPSRALESFRLLCGEADYHALRGFLERVSEGGDGYLSPIILSADADKAHRSEVHEFIKRNFKFLNTDTVEHNDGIQKCIRVRLGSGPRCGRGRNRRGMDTSGWRDDKPFDSRGSTFWPYHLGKFLRFHLYKENKDTHEALGVIGKLAGVQPRSFGFAGTKDKRAVTTQQVTVFKVHASRLAALNSKLTVT

SEQ ID NO: 50906 - protein, 904 aa, Zea Mays
MPFQVMDPRHHLSQFTNTTVAASSFSEEQLRLPTERLVGFWKQESLHHIGSKSVASSPIEKPQPIGTKTMGRVDPQPYKPRGQKSAFSLEHKTFGQERHVNMPPSLWRADQDPYVQSDSSLFPDGRSTNPYEAYNENGLFSSSLSEIFDRKLGLRSNDVLLHQPLEKVEPTHVDDEPFELTEEIEAQIIGNILPDDDDLLSGVDVGYTAHASNGDDVDDDIFYTGGGMELETVENKKSTEPNSGANDGLGSLNGTMNGQHPYGEHPSRTLFVQNINSNVEDSELKVLFEIRDAPQKGHHKVIEFYDVRAAEGAVRALNRSDLAGKKINLGTVGLSGVRRLTQHMSKESGQEEFGVCKLGSLSTNSPPLPSLGSSYMVAMTSSGRENGSIHGLHSGLLTSMSPFREASFPGLSSTIPQSLSSPIGIASATTHSNQAPLGELSHSLSRMNGHMNYGFQGLGALHPHSLPEVHDGANNGTPYNLNTMVPIGVNSNSRTAEAVDCRHLHKVGSSNLNGHSFDRVGEGAMGFSRSGSGPVHGHQLMWNNSNNLQRHPNSPVLWQNPGSFVNNVPSRSPAQMHGVPRAPSHMIENVLPMHHHHVGSAPAINPSLWDRRHGYAGELTEASSFHLGSVGSLGFPGSPQLHGLELNNIFSHTGGNRMDPTVSSAQISAPSPQQRGPMFHGRNPMVPLPSFDSPGERIRSMRNDSGANQSDNKRQYELDVDRIMRGVDSRTTLMIKNIPNKYTSKMLLAAIDESHKGTYDFIYLPIDFKNKCNVGYAFINMTNAQHIIPFYQTFNGKKWEKFNSEKVASLAYARIQGKTALIAHFQNSSLMNEDKRCRPILFHSDGPNAGDQEPFPMGTNIRARSGRSRTSSGEENHHDIQTVLTNGDTSSNGADTSGPTKDTE

SEQ ID NO: 50907 - protein, 990 aa, Zea Mays
MPFQVMDPRHHLSQFTNTTVAASSFSEEQLRLPTERLVGFWKQESLHHIGSKSVASSPIEKPQPIGTKTMGRVDPQPYKPRGQKSAFSLEHKTFGQERHVNMPPSLWRADQDPYVQSDSSLFPDGRSTNPYEAYNENGLFSSSLSEIFDRKLGLRSNDVLLHQPLEKVEPTHVDDEPFELTEEIEAQIIGNILPDDDDLLSGVDVGYTAHASNGDDVDDDIFYTGGGMELETVENKKSTEPNSGANDGLGSLNGTMNGQHPYGEHPSRTLFVQNINSNVEDSELKVLFEHYGEISNLYTACKHRGFVMISYYDIRSSWNAMRALQNKPLRHRKLDIHYSIPKDNPSGKDINQGMLVVFNVDPSVTNNDIHKIFSDYGEIKEIRDAPQKGHHKVIEFYDVRAAEGAVRALNRSDLAGKKINLGTVGLSGVRRLTQHMSKESGQEEFGVCKLGSLSTNSPPLPSLAMTSSGRENGSIHGLHSGLLTSMSPFREASFPGLSSTIPQSLSSPIGIASATTHSNQAPLGELSHSLSRMNGHMNYGFQGLGALHPHSLPEVHDGANNGTPYNLNTMVPIGVNSNSRTAEAVDCRHLHKVGSSNLNGHSFDRVGEGAMGFSRSGSGPVHGHQLMWNNSNNLQRHPNSPVLWQNPGSFVNNVPSRSPAQMHGVPRAPSHMIENVLPMHHHHVGSAPAINPSLWDRRHGYAGELTEASSFHLGSVGSLGFPGSPQLHGLELNNIFSHTGGNRMDPTVSSAQISAPSPQQRGPMFHGRNPMVPLPSFDSPGERIRSMRNDSGANQSDNKRQYELDVDRIMRGVDSRTTLMIKNIPNKYTSKMLLAAIDESHKGTYDFIYLPIDFKNKCNVGYAFINMTNAQHIIPFYQTFNGKKWEKFNSEKVASLAYARIQGKTALIAHFQNSSLMNEDKRCRPILFHSDGPNAGDQEPFPMGTNIRARSGRSRTSSGEENHHDIQTVLTNGDTSSNGADTSGPTKDTE

SEQ ID NO: 50908 - protein, 584 aa, Zea Mays
MAVEETAESCGSHAATAASGGGAAGPATSSSSAAAAAQARKQQQQQRHKLEVYTEVLRRLHDAGLPDARAPGFDDELWNHFNRLPARYAMDVNVERAEDVLTHKRLLEQAKDPAHRPAFAVRSVQTDSDSNTAGEEVASRLLNRQQSIYPPPAFGSSTNLEALALEASKSHDHDSTSDNGRSLYRPMHEITFSTIDKPKLLSELTSLLGELGLNIQEAHAFSTNDGYSLDVFVVVGWHDEETEDLVEAVQKEIGRIEETQAWSSSHSWSTPVEKMQIAENSAADRVEIPTDGASEWEIDVKLLKFGNKVASGSYGDLYRGTYCSQDVAIKVLKPERINADMQREFAQEVYIMRKVRHKNVVQFIGACTKPPNLCIVTEFMSGGSVYDYLHKHKGVFKLPALVGVATDVSKGMSYLHQNNIIHRDLKTANLLMDENGTVKVADFGVARVKAQSGVMTAETGTYRWMAPEVIEHKPYDHKADVFSFGILMWELLTGKIPYEYLTPLQAAVGVVQKGLRPTIPKHTHAKLSELLQKCWQQDPTQRPDFSEILETLQRIAEEVGEEHDGKHKDRTLGGFFSALRGRSH

SEQ ID NO: 50909 - protein, 380 aa, Zea Mays
MVDRARATANFRLVVIRGRAYIERIAPAFQTRDLFTIWGILQLLRRYPGRVPDLDLMFDCVDWPVVHADQYQGENATLLPPLFRYCGDNETLDVVFPDWSFWGWPEINIKPWDALQKELNGGNKRVKWLAREPYAYWKGNPDVAVTRQELVKCNVSSKHEWNARIYKQDWLKEIKAGYKQSDLASQCTHRYKIYIEGSAWSVSEKYILACDSMTLVVTPKYYDFYSRVLMPMQHYWPIWDDNKCSSIKFAVDWGNSHKQKAQRIGKQGSNFIQKELSMEYVYDYMFHLLTEYAKLLRFKPRKPPEAIEVCPESLACQAIGREKKFMEDSMVRSASDAGPCDLPPPFSPEEFKALRRRREKAMKRIETWVQKTSRPMVSKP

SEQ ID NO: 50910 - protein, 566 aa, Zea Mays
MGPWAVDLALSVGIFPYVLKLLPTNTIELRQILVFIWTKILSLDKSCQVDLVKDGGHTYFIRFLDSLDAFPEQRAMAAFVIAVIVDGHRMGQEACMNAGLIDVCLRHLQPENLHAQTEPLLLQWLCLCLGKLWEDFPEAQLLGLQTNAPETVICLLSEPRPEVRAAAVFALGNLTTLSNCPDDDSDDDEKVKAEINVVRSLLQISSDGSPLVRSEVAIALTHFALGHNKNLKSVAAEYWKPQSKSLLKSLPSLANINNPSNVYSPNNILQGSIGPVLRVGSDSGAAGRDGHISTSSPIAASSIMHGSPQSDDSSQHSDSGILLRENASNGGLSYTRSRPVDNVIYSQFISTMCSVSKDPDPRIATIGWRALTLIGVEQVAMKSTRFNSGGLHRGETSASTFGMAHSSSWRDMNSGSNSMKFMTPPVSPPQHDYLLLGLRRVCSMEFGQHPINSPDGFANLLLSSATGPSNAELKKLPESTIYNWSCGHFSRPLLTASDDNEETNARREERERIALDFITKCQRSSACKITSQIASWDTRFELGTKAALLLPFSPIVVAADENEKIR

SEQ ID NO: 50911 - protein, 565 aa, Zea Mays
MGPWAVDLALSVGIFPYVLKLLPTNTIELRQILVFIWTKILSLDKSCQVDLVKDGGHTYFIRFLDSLDAFPEQRAMAAFVIAVIVDGHRMGQEACMNAGLIDVCLRHLQPENLHAQTEPLLLQWLCLCLGKLWEDFPEAQLLGLQTNAPETVICLLSEPRPEVRAAAVFALGNLTTLSNCPDDDSDDDEKVKAEINVVRSLLQISSDGSPLVRSEVAIALTHFALGHNKNLKSVAAEYWKPQSKSLLKSLPSLANINNPSNVYSPNNILQGSIGPVLRVGSDSGAAGRDGHISTSSPIAASSIMHGSPQSDDSSQHSDSGILLRENASNGGLSYTRSRPVDNVIYSQFISTMCSVSKDPDPRIATIGWRALTLIGVEQVAMKSTRFNSGGLHRGETSASTFGMAHSSSWRDMNSGSNSMKFMTPPVSPPQHDYLLLGLRRVCSMEFGQHPINSPDGFANLLLSSATGPSNAELKKLPESTIYNWSCGHFSRPLLTASDDNEETNARREERERIALDFITKCQRSSCKITSQIASWDTRFELGTKAALLLPFSPIVVAADENEKIR

SEQ ID NO: 50912 - protein, 1056 aa, Zea Mays
MGTPVNIIVGSHVWLEDPGEAWVDGVVTEIKGGDATIATTNGKTVVASLGSVYPKDTEAPPAGVDDMTKLAYLHEPGVLHNLSCRYGLNEIYTYTGNILIAVNPFQRLPHLYDVHMMEQYKGASFGELSPHLFAIADACYRALINDQASQAILVSGESGAGKTETTKMLMRYLAFMGGRSGTEGRTVEQQVLESNPVLEAFGNAKTVKNNNSSRFGKFVEIQFDKHGKISGAAVRTYLLERSRVCQVSDPERNYHCFYMLCSAPPEDVKRFKVGDPRSFHYLNQTNCYEVANVDDAREYIETRNAMDIVGIDQEEQDAIFRVVAAILHLGNINFSKGQEIDSSKLRDDKSVHHLKTVAELLMCDEKALEDSLCQRVIVTPDGNITKPLDPGSAALSRDALAKTVYSRLFDWIVDKINNSIGQDPDATNIIGVLDIYGFESFKINSFEQLCINLTNEKLQQHFNQHVFKMEQEEYTREEIDWSYVEFVDNQDVLDLIEKKPGGIIALLDEACMFPKSTHETFAQKMYQTYKVHKRFSKPKLARTAFTINHYAGDVTYQADQFLDKNKDYVVAEHQALLNSSRCPFVANLFPPLPEETSKQSKFSSIGTRFKQQLQSLMETLNTTEPHYIRCVKPNAVLKPGIFENYNVLNQLRCGGVLEAIRISCAGYPTKRTFDEFIDRFGMLAPELVDSSDEKAACAAICDRMGLKGYQIGKTKVFLRAGQMAELDARRAEILANAARLIQRRIKTHLMRKEFIKLRKASVQSQKFWRARLAKKIFEYMRRDAASIRIQKHVRAHSARKAYLQVYESATAIQTGLRAMAARNEHRFRRETRASIIIQTRWRQHRAYTAYKQQQKASLILQCLWRARIARKELRKLRMEARETGALKEAKDKLEKRVEELTWRLDVEKRLRADLEEAKSHEIEKLQSALQKMQENLEEAHAAIVNEKEAAKLAIEQAPPKIVEVPVIDNAKLEELTTQNKELEDELSTFKQKAEDLENKLIEFQKQSDELSQETQEQASKVTELQELVERLEASLSNMESEYPFLRHILMSYEKVS

SEQ ID NO: 50913 - protein, 583 aa, Zea Mays
MAVGDALRRLCEEIGWSYAVFWKAIGAADPVHLVREDGYCGHTSCPVGSEPSESLPLPSDAGCSVPAADTICWLVNNDMASQVHVVGQGIVGRAAFSGNHQWIVHGTANGHGLSSEVAAEVNNQFRVGIKTIAIIPVLPRGVLQLGSTGLVMENTNFVMFAKKLCSQLNNRSSMAASASVKNTSSQHGQSRPDTATVSTSTPPNALLSASLLKVAQQNGHPVREHSVYAERDLRFIQQASICESQFGSNLQSGVMNSCLTSPSFASVKKQSLLMNSIGQLQFSNNVHSSADLAREIILKSLGRQDSSVCENTNMNMHRGRYVVSNDINGSRNFDFLPIGAKESRANLSIPASSQILDHMPGTLQQKQSLVPFRVTQSSEFSKKVENPESGSFQIPSVTTSDSGGQVSNSFNMVQENRLSMSNNVRQVQKIDRFSDPSANVSTQRMKNRDECEPGMPIERASSFLVEPGADNDLFDMFGSEFHQSSHNVGADLVTWSGTESQNSDRDVPESSICFNSSPLFSSLDNELHYSGILSLTDTDQLLDAVISNVNPSGKQCPDNSASCKTALMDVPSTSHLCSIDLKR

SEQ ID NO: 50914 - protein, 328 aa, Zea Mays
MADHQEMIHPPAAAATTGSTTTHGDWWTTAVSWSPDQQLPAGFGGWASSAAATAGGNRSRSGNNAAASSESPGSKSNHSLTTDQGVVSVPPHPPPAASAHAASGSWNEPSYYLDGSAGFMSSSRSDQAHHLGLSCSSSDHNSVMVQGAHDPNQQFLSNLGFELLSSPTSSSGGFRSSSPSLLRSLTEPSAAANTTPPGLLQQYQQQQQQTMDQAPAGSIREALQLTTNRTPFWNPCAEGAASLLGTARPPSSGLASFPSKGAIEGAGGSSNIIAKRTNTVPTPSLKKPRTGTPSPLPTFKVRKEKLGDRITALQQLVSPFGKVSDPRS

SEQ ID NO: 50915 - protein, 206 aa, Zea Mays
MDKIETTTRRRRKGRSSSRRRRQGARGPAGLVATALALLCACAFSTPAATALTPDGEALLELKLAFNATVHHRLTSWRRSDPNPCVWEGISCSVPDLRVQSINLPYMQLGGIISPSIGRLDKLQRLALHQNSLHGPIPAEIKNCTELRAIYLRANYLQGGIPSEIGELVHLTILDLSSNLLRGTIPASIGSLTHLRFLQTQARCVH

SEQ ID NO: 50916 - protein, 602 aa, Zea Mays
MQKVNANSFGHEDYPDAREGIIGDGSFDCTVDHEKYASIYGPTTGDKIRLGDTNLYAEIEKDFAFYGDECIFGGGKVLRDGMGQASGYPESFCLDTVITNAVVIDYTGIYKADIGIKGGLIVAIGKAGNPDVMDGVHNNMIVGVNTEVIASEGMIVTAGGIDCHVHFICPQLAEEAIASGITTLVGGGTGPAHGTCATTCTPAPSQLKLMLQSTDQLPINMGFTGKGNTSKPEGLAEIIKAGAMGLKLHEDWGTTPSAIDNCLSVAEDFDIQVNIHTDTLNESGCVEHTIAAFKGRAIHTYHSEGAGGGHAPDIIKVCGVKNVLPSSTNPTRPFTSNTVDEHLDMLMVCHHLDKNIPEDVAFAESRIRAETIAAEDILHDMGAISIISSDSQAMGRVGEVITRTWQTANKMKVQRGSLPGSGDANAAPDSDNLRIRRYIAKYTINPAIVNGFSDFVGSVEVGKLADLVLWKPSFFGAKPELVVKGGAIAWANMGDPNASIPTPEPVVMRPMFGAFGKAGSSNSIAFVSKAAKEAGVATEYRLEKRVEAVGRVRGLTKLDMKLNDALPKIEVDPETYTVTADGEVLTCQPAPTLPLSRNYFLF

SEQ ID NO: 50917 - protein, 1019 aa, Zea Mays
MSVPPAGKRQVSLRGSSAKEITRDALLQKVSEERQLRSHLRRAAAAAFSIQRIWRRYHVIRMVSEQLHEDWELLMNQPNIDLTTQWISKKMLRPFLFFITQPSSWYIGQWSKTVESILTCFKIILNSINSMDARKNFCSFAVGIPEERSIWLYQAKKLISLCSSILARYDHSCCKDGSIVDMTAIAMRLAVSLTDCKTWKSLNSENTSAADASVQSLIEFIGTCQSGMYNCVRQYIKSLGPHVTSAKKSSATATDDDFLITASAVTLALRPFDSKKAKGGVDLNGASKKYFTLILTIPDLCKRMPPLLLPALKHFSVLQPSLNILLISKDKIFEEIIKLEQSEVSASIIPCSGWALGNIVNLATNHDDLSNSGCFIQELDFCLYVDVINCISENLLESFEKSKGTSQNVGNITFHADTSVAEEEDTNDDCRMRTLFMDLLKPIYQQWHLRKLLMLAKEDFPCRRATDYDPNLKNIHFRILKLSDVICFYYHMLRIFSSLNPSIGAMPILNMLAFSPGFLVDLWEALEMPIFGPPIQNSQETGHEKQLATSSSGVQVSSMRQRRNAKDTANRWSNVLQKITGKSNDSEEGTLSDSILFSHESNDDALTSWDIEAMRHASEGIGKDLMCIMYLFCAIYGHLLLVLDDIEFYEKQVPFTLEQQRKIASALNTFVYNSFIQNSGSYSNPLVDVAVRCLNLLYERDSRHKFCPISLWLAPARNGRIPIAAAARSHEAAFGIFPGIPHRSSVLTTLPHVYPFEERVQMFREFIESDKASRRVTGEVSGPGPGSIEIVIRRGHIIDDGYRQLNCLRSKLKSCIHVSFVSECGLPEAGLDYGGLSKEFLTDLSKSAFSPEYGLFSQTSASDTSLIPSNSAKLLDNGIDMIEFLGRVVGKALYEGILLDYSFSPVFVQKLLGRYNFLDELSTLDPELYRNLMQLKHYDGDVEDLFLDFTVTEELGGKRIVHELRPGGKNISVTNENKLHYVHAMADFKLNRQHHCPCRYFHLQTHFIEDSAISFHHIG

SEQ ID NO: 50918 - protein, 573 aa, Zea Mays
MSWLRSAVHRAVEASGGHSSLLTRTVRTSLDTVVHHAGQAVAGGARLITGSRSYKSAKVAAKRLEEEALSCKGDERVQLLRRWLVALKETQRATTAVREPQFGDNPDQTAPLLDLYIDYDSGAEPMNFFHVFLYSQALECVVLSLIREAPTEEEVPLVSEVFGMCLSGGKDVHNALLSSVKDLARLFSSYSDEVLAKRDELLQFAQGAISGLKINADIARLDNEITQLQQQINSMDALHATSIVNQNKKAQTATEGFRKAVSEVRLCSRMEELLLKKKSIHPGDSLETHFEKVDKLKVLSESLANSSAKAEKRIMENRLQKEESLIFRVTKTNEVSGIEKELVAEISGLEEQRNQLEAELKKVNTKLKVATVKLKKTREERDQFDEASNQIVLHLKTKEDELSRSIASCKVEASTVSAWINFLKDTWKLQSLFEELREKQANEELDRCGLCFAKLMKYHVSASMEELSTSIDRIKTFVDNLKIFGNRSVSAEDGANGPSKQSNPRRYLEEEYLQTEKKVVAAFSLVDSIRAIYSSNQDYYKTSLCRRDDTEVKNLFTSIDNLRIEFESVPRPV

SEQ ID NO: 50919 - protein, 183 aa, Zea Mays
MARKTRVPEEGASMEIPTRCRRSHRSSNTTTGTLPQEVLAALTSAFNLDGSAKENFEDALLAMLWPFADRVATFKSGLVAPEEGLRCYGAPSMWNFLIFFVGDFHISVKIGSSLRLLLGFARVVPPVAPPRSAGTDLPLAARGSLAQDRLRRPTVLSPPASAQMVHIPLILISNAILGRRNLF

SEQ ID NO: 50920 - protein, 180 aa, Zea Mays
MARKTRVPEEGASMEIPTRCRRSHRSSNTTTGTLPQEVLAALTSAFNLDGSAKENFEDALLAMLWPFADRVATFKSGLVAPEEGLRCYGAPSMWNFLIFFVGDFHISVKIGSSLRLLLGFARVVPPVAPPRSAGTDLPLAARGSLAQDRLRRPTVLSPPASAQCGKPTTLGTPFFKEGWA

SEQ ID NO: 50921 - protein, 174 aa, Zea Mays
MFSSDLDPLPHLCVEVSVCCMCSMYVLDILSVALLSVSRQQCQNVLVSMILWFARLQLWPFADRVATFKSGLVAPEEGLRCYGAPSMWNFLIFFVGDFHISVKIGSSLRLLLGFARVVPPVAPPRSAGTDLPLAARGSLAQDRLRRPTVLSPPASAQCGKPTTLGTPFFKEGWA

SEQ ID NO: 50922 - protein, 1628 aa, Zea Mays
MQDAQGSLDRRGVFSLDTPSPSVCLLIQLEKAATEEGGVTPSVYSRKEPVHLAEKEKQKLQVWSRIMPCKESFAWAMIPLFEGNHAGGLSDAASPSSPLATSLPGSTSQDSIVDPILKLTLDGKVNHYSSGSSVIVEISNLNKVKESYIVDSLQDPKRKVHKPVKGVLRLEVEKLHGGHNDVDNTSEGGSMANDLNDAGDINNGRSNRSSFDGIHSFVNSIAIAQKDAHHNGIISNAENGDNFEAFDFRMLTRSEPFSQLFHCLYVYPLTVSLSRKRNLFVRVELRKDDSDIRKPPLEAVHPRERNMMLQKWGHTQIAVGTRMASYHDEVKISLPALLTPQHHLVFTFFHVDLQMKLEAPKPVIVGHSVLPLSTHIQLLSDVSLPILRELVPHYLQGSGKERMDYLEDGKTVFKLRLRLCSSLFPVNERIRDFFVEYDRHTLHTSPPWGSELLEAINSLKNVESTALLQFLQPILNMLLHLIGDGGETLQVAAFRAMVNILTRVQQESSDGAERNRFLINYVDFAFDDFGGRQAPVYPGLSTVWGSLARSKAKGYRVGPVYDDVLAMAWFFLELIVKSMGLEQSRLFYHNLPLGEDVPPLQLKEGVFRCIMQLFDCLLTEVHERCKKGLSLAKRLNSTLAFFCYDLLSIIEPRQVFELVSLYMDKFAGVCQAVLHDCKLTFLQIICDHDLFVEMPGRDPSDRNYLSSVLIQEIFLTLDHDDLSQRAKAARILVVLICKHEFDARYQKSEDKLYIAQLYFSLIGQILDEMPVFYNLNAIEKREVLVVILQIVRNLDDATLIKAWQQSIARTRLFFKLLEECITHFEHNKTGGSMLLGASSRSPDVERPAPPKYSERLSPSVNAYLSEASRHEIRPQGTPENGYMWNRVSPQLSSPNQPYSLREALAQAQSSRIGSTARALRESLHPVLRQKLELWEENLSTAVSLEVLRITEKFSAAAGTRSITTDYAKLDCVTSIVMGLLSRSQPLAFWKAFLPVVYNIFNLHGATLMARENDRFLKQIAFHLLRLAVFRNDSIRKRAVVGLQILVRNAFNYFKNTTRLRVMLTITLSELLSDVQVTQMKSDGSLEESGEARRLRKSLEEMADVRSKDLLKDCGLPVTALEAAPDGSSDNMWSWAEVKHLSKCLVQALDAGLEHALLDSVVTVDRYAAAEGFYKLAMAYAPVPDLHIMWLQHLCDAHQEMQSWAEAAQCAVAAAGVIMQALVGRNDAVWSKEHVTSLHKICPIVNTDVSAEASAAEVEGYGASKLTVDSAVKYLQLANKLFTQAELYHFCASIQELIIPVYKSRRAYGQLAKCHTSLTNIYESILEQEASPIPFIDATYYRVGFYGERFGKLNKKEYVFREPRDVRLGDIMEKLSHIYEVKMDGSHTLHIIPDSRQVNADELQPGVCYLQITAVDPVMEDEDLGSRRERIFSLSTGTVRARVFDRFLFDTPFTKNGKTQGGLEDQWKRRTVLQTEGSFPALVNRLPVTKSESLEFSPVENAIGMIETRTAALRNELEEPRSSEGDQLPRLQSLQRILQGSVAVQVNSGVLSVCTAFLSGEPATRLRSQELQQLIAALLEFMAVCKRAIRVHFRLIGEEDQEFHTQLVNGFQSLTAELSHYIPAILSEL

SEQ ID NO: 50923 - protein, 60 aa, Zea Mays
MRHGFAARGARPTRCHRGGRRGGGGAWCGEGNDDRSRGARWHLEAVLHIGIRRACAVRGG

SEQ ID NO: 50924 - protein, 108 aa, Zea Mays
MSPGTLALMCDEEAFEKMCDEQDTMFTTSQNAAPQQTVIVNHNQSALYAEQENVVLTEFRDCLRKFVRYGRMKEERYSMAIKSETSGHPGQIFTWGVARIKGIVFSPY

SEQ ID NO: 50925 - protein, 518 aa, Zea Mays
MFSLTHPPMAEAGGPNSCSPMAMAALELQKILETEDTHDHGSPRRFGGRRLAGRLGLELKPWMEGSHRWPPLVGLMGGVGPSKYTSVYRLGEKLRSLRARPRPSRSFRRAFVLRFFPCSSSWPGRKKRGTLAVDGSGVGVPGGAGRDPAGARGMVRGARRPVPAKAMAPAHPQAGAVPRPRRRPGDALIHLYNHFISDFETKISLLKFAHFTVVVSHQYLDKNAGINYLEGVISKLRDTRESRVEEPILYVKMQIATFLLEKGNQKDCKNLLEEGKTTLDSMVDVDPSVHGTYYWVCSQYHKARQEYSEFYKSCLLYLAYTTVSLLLQFLINLALDLSLAALLGENIYNFGELLAHPIIHSLLGTQAEWIFHMLQAFNSGNLSLYQEICKAHSNALSAQLALVQNERNLLEKINMLCLMEIIFSRSSENRTIPMRDIAEQTKLPVEDVEYLLMKSLSARLIEGIIDQVDGVVHVSRVKPRVLGIDQVKCLHDRLDTWIGKVDTILLSVEAETPDLVSS

SEQ ID NO: 50926 - protein, 168 aa, Zea Mays
MAEAGGPNSCSPMAMAALELQKILETEDTHDHGSPRRFGGRRLAGRLGLELKPWMEGSHRWPPLVGLMGGVGPSKYTSVYRLGEKLRSLRARPRPSRSFRRAFVLRFFPCSSSWPGRKKRGTLAVDGSGVGVPGGAGRDPAGARGMVRGARRPVPAKAMAPAHPGLIW

SEQ ID NO: 50927 - protein, 373 aa, Zea Mays
MAAFTVHTSAATSPYSPAGTAILLRSRSRAYPTATIRVSCSKTVVIGVAADSGCGKTTFTRRLASVLGGGAEPPRAGRNPGSNTLVSDTTTVICLDDYHSLDRVGRKAKGVTALDPRFVDFDLMYEQVRAIKEGRAVEKPVYNHVTGLLDPPELITPPNILVIKGLHPMFDERVRDLLDFSIYLDISNERDMGERGGHSLESIKASIEARKPDFEAYIEPQKQYADAVIEVLPTQLIPGDDECKVVRVKLIMKEGVEHFAPVHLFDEGSTVYWIPCGRKLSCSYPGIRFAYGFDTYFGHEVSVVEMDGQFDKLDELIYVETHLSNLSTKFYGEVTQQMLRHADVPGSNNGTGLFQTIVGLKIRDLYEQIVARR

SEQ ID NO: 50928 - protein, 162 aa, Zea Mays
MKKVRKQIVDHIYPWILECQEKGHAKVPSLGSKWMFRTAYQLGSDSVNKGQYPISTTHTAPGICTMLPVKYNFRQALPEIAQKITRLENEIPCLILLARLAHFLLHTDLAEHHKLGLDISELEKKIIYEMMRPERTLLYLVPGRLVRVRDGSTDWGWGVVWL

SEQ ID NO: 50929 - protein, 251 aa, Zea Mays
MGKKEADSSCRRLRWPLPIVRSHSSHSTGKIRSTPSHATQRPGQHASRWLIVSGDSGPLELLQPQSQLSRSSQPPLPLPHPPTTTMDPATVVVIEESYRSYYCMRNRAYEEALFSAAVCQLQVDRPLKKLTLLAIEGDSCKCSPPEDMKKVRKQIVDHIYPWILECQEKGHAKVPSLGSKWMFRTAYQLGSDSVNKGQYPISTTHTAPGICTMLPVKYNFRQALPEIAQKITRLENEIPCLILLARKSFMR

SEQ ID NO: 50930 - protein, 144 aa, Zea Mays
MGKKEADSSCRRLRWPLPIVRSHSSHSTGKIRSTPSHATQRPGQHASRWLIVSGDSGPLELLQPQSQLSRSSQPPLPLPHPPTTTMDPATVVVIEESYRSYYCMRGVRNSKQCTEDNRAKAKLQKRKGGHLTVERWSKVPISVA

SEQ ID NO: 50931 - protein, 449 aa, Zea Mays
MMGCLFACFRASGGDGEVKGTGGQLAHPSQPPATTTTTSHQDGAGRRARPPSRNALSAVFQREDEGSRTAQVASSWADESGERKEMDQELVHQAIIQRSCGALLQTTNNIQGALIKYADSVHQKETHSGCLPVVSDDLHFMEAPKVEKCETPSRSHQSFTVPDATSSSKTNDELQTSATSLANNVKDSMNENNMEALVQDEEQHQALDLEECGVSKEESFHPEKTEEPKCAKNHHVVSMEISISDECSLFQSSEGSVPSSYKIRESMNTTSVEKSPKTEATIHATRKKLPKSDNSELELPSLAQWLKPPNPKKTFRDEAMAGDRSHSGKSSDEDRPIIGMVAAHWKDKVPLPANFTSKLRDGNGIPNSTNKYKEDQKVSWHATPFEERLEKALSEEKLLSERSCSSGKTSQFLGVEGEESDMAESNRLYTTAYACQFSSASHEPQKLSV

SEQ ID NO: 50932 - protein, 701 aa, Zea Mays
MTIKITASTKYVVTEFVADHNHDLETPLVDIQILKSEKLLAKVQQPPDPPKVVLIPNEYKNYTRTKRTKNMQLGDTQAICEYLQRMKGENPSFFYAIQVDEDDMFTNVFWADAKSIMDYNYFGDVVCVDTRYCTSDYGRPLLLFTGVNHHNQLIIFGSALIYDDSAQSFRWLFETFKSAMSGKQPKTVLTDQSAALSDAVSSWPGTIHRFSLLHLYLNATKISRDTLQGLETFASDFSRWLYEYEEDNFYSSWEILSEKYNIKDNEWFCKLYEDRERWALPYGRDTFCADIATTLRRDNTNTILTDLIKPEIDLQNFFNNYDKFLEEKRLAEQQADYLGAQITQRVAPLHLLWQAANLYTPTLFEMFRMEYEQISKCVVYSCGEIGPISEYQVTVKDRPQGQFVRFDSTECMVVCSCKKFEFMGLLCCHVLKILDLRNIKELPRHYILKRWRKDAQSESPENYGFAAIDEDPKFSLSKRYNALYRNLYKIAAKASESVEAYAFLENQYEQLVEQVEVLLQAKLHDKSSLSTVLKGNQPNMLNSEVNSSEHRRATGKKIKNVEVRRQQQSLDPNKKKKGRQVLLEPEIEIPLRVEPPTVSNDIQNHLRTTNQFLAPSHMMQAPYVAQQFGLGSLQGFPGMSPFGQIQEPTPLQQPHLQPPSFHSGPQITQQSSAWPPDHGSRPVHHSSLGFPVTYSILLFGC

SEQ ID NO: 50933 - protein, 1179 aa, Zea Mays
MVDRAAARAQAVSSDPPPPALLEPDPRLSQPGAADGQEVASAGATAGPPSLPQASDAEEDALASPAGQPGERCRAMMEVVAKDGAWKVTKLVVEHCHELQVAPGHVAVTVPALGMEFDSVDDAKGFYYGYGEQVGFKARMGSNRRSVGDGEKILQRFLCWKGNYANRSRCKDSDAGKETDEVLEGLSAAAGKRKREPYKTRSRNPGRSTEVIEVEKGVGLGGAGNGLELDNGRRSRRGRSKKAEVEHGEDSVVGFEAEEVAKAVSDADEEEDEGDEDQEAAEQEVEVEVKEQRARGRPRKAVMEDNALQARVLRELGVRALQYNNEERKKILNKYRSKRQSRSVSSRPTKISSRQALAERRKRGNGGRFLSSEEQPAESKEDETMEAEPDPEIDVVPGPGGEPKVGMVFLNEDKAYEFYANYAETAGFSVRKGWLDKTAKNVTKSRAYVCSKEGFRPRSASIESKKPSLEARTGCQAHMTIKITASTKYVVTEFVADHNHDLETPLVDIQILKSEKLLAKVQQPPDPPKVVLIPNEYKNYTRTKRTKNMQLGDTQAICEYLQRMKGENPSFFYAIQVDEDDMFTNVFWADAKSIMDYNYFGDVVCVDTRYCTSDYGRPLLLFTGVNHHNQLIIFGSALIYDDSAQSFRWLFETFKSAMSGKQPKTVLTDQSAALSDAVSSWPGTIHRFSLLHLYLNATKISRDTLQGLETFASDFSRWLYEYEEDNFYSSWEILSEKYNIKDNEWFCKLYEDRERWALPYGRDTFCADIATTLRRDNTNTILTDLIKPEIDLQNFFNNYDKFLEEKRLAEQQADYLGAQITQRVAPLHLLWQAANLYTPTLFEMFRMEYEQISKCVVYSCGEIGPISEYQVTVKDRPQGQFVRFDSTECMVVCSCKKFEFMGLLCCHVLKILDLRNIKELPRHYILKRWRKDAQSESPENYGFAAIDEDPKFSLSKRYNALYRNLYKIAAKASESVEAYAFLENQYEQLVEQVEVLLQAKLHDKSSLSTVLKGNQPNMLNSEVNSSEHRRATGKKIKNVEVRRQQQSLDPNKKKKGRQVLLEPEIEIPLRVEPPTVSNDIQNHLRTTNQFLAPSHMMQAPYVAQQFGLGSLQGFPGMSPFGQIQEPTPLQQPHLQPPSFHSGPQITQQSSAWPPDHGSRPVHHSSLGFPVTYSILLFGC

SEQ ID NO: 50934 - protein, 355 aa, Zea Mays
METISSCPICNIQVLTAELEWHANSHFDDDQLQMDMELAHQMSVAESSTDAMNDPKHYSGSFTSDSNALGALSSHSGYSHHYSELLDEQISCLVRAQIRSKVQEVEGGILSLLRSCLESEAGSSTSMISCYIDHHQSLSSEDKGWGCGWRNIQMLSSHLLKQRPEAREVLFGGSGFVPDIPSLQRWLEIAWDKKFDTIGSSHFHNKIYGAKKWIGTTECAALFRSFGLRARIVDFDSTESSDLHSNNGSRAASQVRGPMDKFLIKNKPPKSSSELCREDAESTRGQQALVDWVWNYFASERSDRLATQRVTVSNKTPLYFQHQGHSRTIVGIQKKPDRRGSQEQYSLLILDPGHI

SEQ ID NO: 50935 - protein, 362 aa, Zea Mays
METISSCPICNIQVLTAELEWHANSHFDDDQLQMDMELAHQMSVAESSTDAMNDPKHYSGSFTSDSNALGALSSHSGYSHHYSELLDEQISCLVRAQIRSKVQEVEGGILSLLRSCLESEAGSSTSMISCYIDHHQSLSSEDKGWGCGWRNIQMLSSHLLKQRPEAREVLFGGSGFVPDIPSLQRWLEIAWDKKFDTIGSSHFHNKIYGAKKWIGTTECAALFRSFGLRARIVDFDSTESSDLHSNNGSRAASQVRGPMDKFLIKNKPPKSSSELCREDAESTRGQQALVDWVWNYFASERSDRLATQRVTVSNKTPLYFQHQGHSRTIVGIQKKPDRRGSQEQYSLLILDPGHYGHPNVSP

SEQ ID NO: 50936 - protein, 867 aa, Zea Mays
MSKLKHLENLILKNNKLVGVIPSTLSQLPNLKILDLAQNKLSGEIPNLIYWNEVLQYLGLRSNSLEGSLSPDMCQLTGLWYFDVKNNSLTGAIPETIGNCTSFQVLDLSNNHLTGEIPFNIGFLQVATLSLQGNKFSGPIPSVIGLMQALAVLDLSFNELSGPIPSILGNLTYTEKLYLQGNRLTGLIPPELGNMSTLHYLELNDNLLTGFIPPDLGKLTELFELNLANNNLIGPIPENLSSCANLISFNAYGNKLNGTIPRSFHKLESLTYLNLSSNHLSGALPIEVARMRNLDTLDLSCNMITGSIPSAIGKLEHLLRLNLSKNNVAGHIPAEFGNLRSIMEIDLSYNHLSGLIPQEVGMLQNLILLKLESNNITGDVSSLIYCLSLNILNVSYNHLYGTVPTDNNFSRFSPDSFLGNPGLCGYWLHSASCTQLSNAEQMKRSSSAKASMFAAIGVGAVLLVIMLVILVVICWPHNSPVLKDVSVNKPDNLASASNNIHPKLVILHMNMALYVYDDIMRMTENLSEKYIIGYGASSTVYRCDLKNCKPIAIKKLYAHYPQSLKEFETELETVGSIKHRNLVSLQGYSLSPSGNLLFYDYMENGSLWDILHASSKKKKLDWEARLKIALGAAQGLAYLHHECSPRIIHRDVKSKNILLDKDYEAHLADFGIAKSLCVSKTHTSTYVMGTIGYIDPEYARTSRINEKSDVYSYGIVLLELLTGKKPVDDECNLHHLILSKAAENTVMETVDQDITDTCKDLGEVKKVFQLALLCSKRQPSDRPTMHEVARVLDSLVCPAGPPPKQAQAQAQAQASEKPSTTAPSYVSEYVGLRGGGGGSALSCTNSSSASDAELFMKFGEVISRSTE

SEQ ID NO: 50937 - protein, 134 aa, Zea Mays
MAGMASLQGAMASLSISALGAATASSSSFWGNRLATYSAPQPGVRFMVKICPIEMRLKRWERKKCKPNSLPVLHKMHVRIGDTVQVIAGREKGKVGEVTRLFKHNSTVIVKDLNLKSKHKKGTDDEPGEIVMIE

SEQ ID NO: 50938 - protein, 356 aa, Zea Mays
MSTPNENSNTQFQPPSSQASVEGGSGLPENVINVEQDGDEDDDEVEENGRKRKLKSVVWSEFKRVNVGDIWKAKCNYCSKKLSGVTKNGTSHLKAHLETYIYRKRNPTDKVQSSLWFTSSSEQGQVSVKEYVFDQDVARKARPEMVVLHEYPLSIVDHVGFRSRAMLEIENVRKLFDELIKEYNNKCIKPVTSGGQNASSSCVSNASTYTDELFSAMEEELDDMCSDEEKAKSELDLYVDEGRIPKSKEFDILGYWKIYGIRYPTIRMIARDIFDIPVTTVASESAFSTSGRVLSDHRSRLTPKTLEVLMCAQNWLRVGQAKGKEDYMGLWTCLEDIQEELVELSFGFSTMPNEEI

SEQ ID NO: 50939 - protein, 235 aa, Zea Mays
MLPTRTQHHASLALDPGCRRCPRRHPSGSPVVDSSSPSSGRRGWRRSSGTPPFRMRHPRQEQHGRRRPRCQQQHTASATGQRPEAPASPRGDADADARTSWIWCTCPISPARSASATCPRRPCTGRSSAWRTRASRAATPFPAATLFGVPSRPSSSGSLTASCSPWRTPSAAASTATTTSSSGTASTSSGRSSSPSTTASSRLRGMWRPWCGGLRPLPRAAGCCNGRVEISCIYA

SEQ ID NO: 50940 - protein, 2282 aa, Zea Mays
MGERDALPPLPLALGPPHLIPPAPTRDPRAIAFLPDLVGFHWVAYAAGSFLVVSHLPSPCRDDNNNDSCSPFFRQVIDLRAPVSAVAWCRRGSGEVAAATDNSIHIFQPAPASSPGSFGWLLRWSITETFAIVAVSWTGCGNGIVAVGAGVSMWARLESSWQLAWRSTPQVPQALVSTTCSMQGPVATVAALAPAEGSVPVLVFLNDARRGLEQAELVHPQPVCMIQWRSCSLYPHDLSEIRREILMTCCFDGTVRLWSKDEVSRSKKQRGLLISFSVIAVIEVNNTLNGVLGVDIIVRWSMESGSVVSRDEQGRFKLFSGDLRESQVGKCEWLVSLGPGPCISFWAIHCLDDVFPPRYPRITLWKQSKLQGWGDSYVKSGPLKSMEQSIFVEAVISRRLCSGPPATCFLLHLLVDDSFAWSTVSTKLLADSGNHALSDSAKNILCCLTKPVKQDGHKGSIRQVSVHPYSCEIELAVSMDSNRMIFFWSLSTFSTLIPTMHAPMYPLWKLLCKFDLRNISEDFEYSCLCWAPSVTRDNRFLVLGWESGVDCFVVRIQKEEVLSCQKIFTIPFLAESNTEGPPDSIHTIPLASKCSSSLSTTNQGAHACFSNEMFSAVVYEGSSVFPSGLEGEYTTCISVMPLNNTVLPIQQHDPYRTVPGYHIATGCSDGTVKLWKMTCAEDSLQTKKERHIWELVGMFGAHQGPIDIVSLSGCGRVITVGRNLKKNSTSIHIWEATKIRGDGNFLLGDTLMLQDHIVGLDGLSLGDGRFLLAVYLANELRIYSHKHPSFQNVLHTKNSKEEHLWSCIVLSHSHHDIVGFLWGPKATVVLVHENHLSLFSSWLVTGDNEYMTQIHSCPVVHEMLPCTNNFNEATFGKLKLPENFNSGNIDSNNVLLTDQHSHYSHGLWSLLHIAHRLSGPLASYHPRALIQYLYSGEWKRADAALHHLVRSMKVSETSKGVSNYSTCHSIPELPLSEYFAATVSNNISTKGFMWGENRSNTTFNLLSPSTSFLYEDGNLGINTTTSASEKPDIVELLDKSFSKYGISDSEKNQILAISDLMAGITDQSHSSPYKNLDEAGRRFWVAVQFEQFHALRRSADSSSNEGCRVDSASIAWAFQSDCQDDLLNSVLPAEPTWPEMRKLGIGLWYTNVSQLRTRMEKLARLQYLKSKDPKDCALLYIALNRIKVLVGLFKISRDEKDKRLYEFLSRNFQEERHKAAALKNAYVLMGRHQWELAIAFFLLGDDTSSAVNVCAKNLQDEQLAIVICRLIEGSGGPLERNLISNVLLPDAVERGDNWLSSLLEWMLGNYCQSVNRIFGCHPKLLIDQNVLADPELGHYCAILSAKSSFRNSVGEAVSAKLSKLSFAVAACALNKCGLPLEALECLSTNSSIDGKDSIIAHGDGDHKIFYGILSPVSASKNWLSSSVISGIESNLKLTMASKYLSSLLRKHSLCSQLNAPLSEEKVLNEYNNHQIEKLTCDITTVISIFDKRFSLKFADIAEKILIFCSHDGLLFLALLLKHDKSGNYILDDRSAMLAVMDLFEYIIEFSFSWLYYDIKSLLIMINPVLATSVNGDSFQVLLDQLMHAICHKNHDISSSTGGMPHAALSKTQLKKSVNSNLLADEKWHLIGASVWVRLISVLEHRLREFFEKEGLEHEAGVSGSEFRGLITSVAAKFVMDSIHFVSSSLVPLHASFLRKNLPMNSSSSLLFWLESKLPQQLPVSDSYDHLSRISQLSNSENMEALFNILWEISVNPVDVCNAFVSEGVNCFSLSNTNVTRSWKDIRCPVVECDKIITERSGEEHEHRLGSKRLGQGFAEKASYNGEVLYETKRRELIIQKEFQSPREILRRSGELLEAVCLNSVNEKQAAIATNRKGLVFFNWSDKQHNKSFSEYVWSGSDWPLDGWAGCQSTPTPTSISPGVDLGRKKGSQLGSVGATTGLSSLAKPGRDLTGGGAFGIPGYAGIGASGFGWGEPEEFEDFIDPPATLENIHSRALSRHPSLPLFLVGSSNTHVYLWEFGKASAMATYGVLPAANIPPPYALASISSVQFDCYGQRDVAYVSASRSVIASAGYSSNGSNVVIWDTLSPPATSQTSIMCHEGGARSISVFDSDRGYGSISPLVVTGGKNGDIALHDCRFLSTGKSKHHRVTTEHGVEASSMHDIKSSTFGGTDSGMVWHIPKAHLGSVTKVTTIPNTSLFLTGSKDGDVKLWDAKNSQLVFHWTKMHERHTFFQPTSRGFGGVVRAAVTDLQVLPNGFVSCGGDGSVKLVQIKDDLAAAYQR

SEQ ID NO: 50941 - protein, 1107 aa, Zea Mays
MGERDALPPLPLALGPPHLIPPAPTRDPRAIAFLPDLVGFHWVAYAAGSFLVVSHLPSPCRDDNNNDSCSPFFRQVIDLRAPVSAVAWCRRGSGEVAAATDNSIHIFQPAPASSPGSFGWLLRWSITETFAIVAVSWTGCGNGIVAVGAGVSMWARLESSWQLAWRSTPQVPQALVSTTCSMQGPVATVAALAPAEGSVPVLVFLNDARRGLEQAELVHPQPVCMIQWRSCSLYPHDLSEIRREILMTCCFDGTVRLWSKDEVSRSKKQRGLLISFSVIAVIEVNNTLNGVLGVDIIVRWSMESGSVVSRDEQGRFKLFSGDLRESQVGKCEWLVSLGPGPCISFWAIHCLDDVFPPRYPRITLWKQSKLQGWGDSYVKSGPLKSMEQSIFVEAVISRRLCSGPPATCFLLHLLVDDSFAWSTVSTKLLADSGNHALSDSAKNILCCLTKPVKQDGHKGSIRQVSVHPYSCEIELAVSMDSNRMIFFWSLSTFSTLIPTMHAPMYPLWKLLCKFDLRNISEDFEYSCLCWAPSVTRDNRFLVLGWESGVDCFVVRIQKEEVLSCQKIFTIPFLAESNTEGPPDSIHTIPLASKCSSSLSTTNQGAHACFSNEMFSAVVYEGSSVFPSGLEGEYTTCISVMPLNNTVLPIQQHDPYRTVPGYHIATGCSDGTVKLWKMTCAEDSLQTKKERHIWELVGMFGAHQGPIDIVSLSGCGRVITVGRNLKKNSTSIHIWEATKIRGDGNFLLGDTLMLQDHIVGLDGLSLGDGRFLLAVYLANELRIYSHKHPSFQNVLHTKNSKEEHLWSCIVLSHSHHDIVGFLWGPKATVVLVHENHLSLFSSWLVTGDNEYMTQIHSCPVVHEMLPCTNNFNEATFGKLKLPENFNSGNIDSNNVLLTDQHSHYSHGLWSLLHIAHRLSGPLASYHPRALIQYLYSGEWKRADAALHHLVRSMKVSETSKGVSNYSTCHSIPELPLSEYFAATVSNNISTKGFMWGENRSNTTFNLLSPSTSFLYEDGNLGINTTTSASEKPDIVELLDKSFSKYGISDSEKNQILAISDLMAGITDQSHSSPYKNLDEAGRSSNNSMLLEDLQIHPVMKGAVLILLP

SEQ ID NO: 50942 - protein, 1204 aa, Zea Mays
MGERDALPPLPLALGPPHLIPPAPTRDPRAIAFLPDLVGFHWVAYAAGSFLVVSHLPSPCRDDNNNDSCSPFFRQVIDLRAPVSAVAWCRRGSGEVAAATDNSIHIFQPAPASSPGSFGWLLRWSITETFAIVAVSWTGCGNGIVAVGAGVSMWARLESSWQLAWRSTPQVPQALVSTTCSMQGPVATVAALAPAEGSVPVLVFLNDARRGLEQAELVHPQPVCMIQWRSCSLYPHDLSEIRREILMTCCFDGTVRLWSKDEVSRSKKQRGLLISFSVIAVIEVNNTLNGVLGVDIIVRWSMESGSVVSRDEQGRFKLFSGDLRESQVGKCEWLVSLGPGPCISFWAIHCLDDVFPPRYPRITLWKQSKLQGWGDSYVKSGPLKSMEQSIFVEAVISRRLCSGPPATCFLLHLLVDDSFAWSTVSTKLLADSGNHALSDSAKNILCCLTKPVKQDGHKGSIRQVSVHPYSCEIELAVSMDSNRMIFFWSLSTFSTLIPTMHAPMYPLWKLLCKFDLRNISEDFEYSCLCWAPSVTRDNRFLVLGWESGVDCFVVRIQKEEVLSCQKIFTIPFLAESNTEGPPDSIHTIPLASKCSRCFVNNSFLVVCIWKKTFKGFSWKVVLHSENQYVNGRCLCGFAPSSLSTTNQGAHACFSNEMFSAVVYEGSSVFPSGLEGEYTTCISVMPLNNTVLPIQQHDPYRTVPGYHIATGCSDGTVKLWKMTCAEDSLQTKKERHIWELVGMFGAHQGPIDIVSLSGCGRVITVGRNLKKNSTSIHIWEATKIRGDGNFLLGDTLMLQDHIVGLDGLSLGDGRFLLAVYLANELRIYSHKHPSFQNVLHTKNSKEEHLWSCIVLSHSHHDIVGFLWGPKATVVLVHENHLSLFSSWLVTGDNEYMTQIHSCPVVHEMLPCTNNFNEATFGKLKLPENFNSGNIDSNNVLLTDQHSHYSHGLWSLLHIAHRLSGPLASYHPRALIQYLYSAIVKVVLTASTIYHAIALELPKWVIKVTDKWRKPFGKFKRVPVDGVGGWGGGLGEWKRADAALHHLVRSMKVSETSKGVSNYSTCHSIPELPLSEYFAATVSNNISTKGFMWGENRSNTTFNLLSPSTSFLYEDGNLGINTTTSASEKPDIVELLDKSFSKYGISDSEKNQILAISDLMAGITDQSHSSPYKNLDEAGRSSNNSMLLEDLQIHPVMKGAVLILLP

SEQ ID NO: 50943 - protein, 2455 aa, Zea Mays
MGERDALPPLPLALGPPHLIPPAPTRDPRAIAFLPDLVGFHWVAYAAGSFLVVSHLPSPCRDDNNNDSCSPFFRQVIDLRAPVSAVAWCRRGSGEVAAATDNSIHIFQPAPASSPGSFGWLLRWSITETFAIVAVSWTGCGNGIVAVGAGVSMWARLESSWQLAWRSTPQVPQALVSTTCSMQGPVATVAALAPAEGSVPVLVFLNDARRGLEQAELVHPQPVCMIQWRSCSLYPHDLSEIRREILMTCCFDGTVRLWSKDEVSRSKKQRGLLISFSVIAVIEVNNTLNGVLGVDIIVRWSMESGSVVSRDEQGRFKLFSGDLRESQVGKCEWLVSLGPGPCISFWAIHCLDDVFPPRYPRITLWKQSKLQGWGDSYVKSGPLKSMEQSIFVEAVISRRLCSGPPATCFLLHLLVDDSFAWSTVSTKLLADSGNHALSDSAKNILCCLTKPVKQDGHKGSIRQVSVHPYSCEIELAVSMDSNRMIFFWSLSTFSTLIPTMHAPMYPLWKLLCKFDLRNISEDFEYSCLCWAPSVTRDNRFLVLGWESGVDCFVVRIQKEEVLSCQKIFTIPFLAESNTEGPPDSIHTIPLASKCSSSLSTTNQGAHACFSNEMFSAVVYEGSSVFPSGLEGEYTTCISVMPLNNTVLPIQQHDPYRTVPGYHIATGCSDGTVKLWKMTCAEDSLQTKKERHIWELVGMFGAHQGPIDIVSLSGCGRVITVGRNLKKNSTSIHIWEATKIRGDGNFLLGDTLMLQDHIVGLDGLSLGDGRFLLAVYLANELRIYSHKHPSFQNVLHTKNSKEEHLWSCIVLSHSHHDIVGFLWGPKATVVLVHENHLSLFSSWLVTGDNEYMTQIHSCPVVHEMLPCTNNFNEATFGKLKLPENFNSGNIDSNNVLLTDQHSHYSHGLWSLLHIAHRLSGPLASYHPRALIQYLYSGEWKRADAALHHLVRSMKVSETSKGVSNYSTCHSIPELPLSEYFAATVSNNISTKGFMWGENRSNTTFNLLSPSTSFLYEDGNLGINTTTSASEKPDIVELLDKSFSKYGISDSEKNQILAISDLMAGITDQSHSSPYKNLDEAGRRFWVAVQFEQFHALRRSADSSSNEGCRVDSASIAWAFQSDCQDDLLNSVLPAEPTWPEMRKLGIGLWYTNVSQLRTRMEKLARLQYLKSKDPKDCALLYIALNRIKVLVGLFKISRDEKDKRLYEFLSRNFQEERHKAAALKNAYVLMGRHQWELAIAFFLLGDDTSSAVNVCAKNLQDEQLAIVICRLIEGSGGPLERNLISNVLLPDAVERGDNWLSSLLEWMLGNYCQSVNRIFGCHPKLLIDQNVLADPELGHYCAILSAKSSFRNSVGEAVSAKLSKLSFAVAACALNKCGLPLEALECLSTNSSIDGKDSIIAHGDGDHKIFYGILSPVSASKNWLSSSVISGIESNLKLTMASKYLSSLLRKHSLCSQLNAPLSEEKVLNEYNNHQIEKLTCDITTVISIFDKRFSLKFADIAEKILIFCSHDGLLFLAYVLLWGTRSPDVATDNYILECHPLCPIDYLLLFSFKESCKFFSRYVVLSSMCSVLNMEDTNSTAWALKERHKYIVISLSNYLNVSRLLLKHDKSGNYILDDRSAMLAVMDLFEYIIEFSFSWLYYDIKSLLIMINPVLATSVNGDSFQVLLDQLMHAICHKNHDISSSTGGMPHAALSKTQLKKSVNSNLLADEKWHLIGASVWVRLISVLEHRLREFFEKEGLEHEAGVSGSEFRGLITSVAAKFVMDSIHFVSSSLVPLHASFLRKNLPMNSSSSLLFWLESKLPQQLPVSDSYDHLSRISQLSNSENMEALFNILWEISVNPVDVCNAFVSEGVNCFSLSNTNVTRSWKDIRCPVVECDKIITERSGEEHEHRLGSKRLGQGFAEKASYNGEVLYETKRRELIIQKEFQSPREILRRSGELLEAVCLNSVNEKQAAIATNRKGLVFFNWSDKQHNKSFSEYVWSGSDWPLDGWAGCQSTPTPTSISPGVDLGRKKGSQLGSVGATTGLSSLAKPGRDLTGGGAFGIPGYAGIGASGFGWGEPEEFEDFIDPPATLENIHSRALSRHPSLPLFLVGSSNTHVYLWEFGKASAMATYGVLPAANIPPPYALASISSVQFDCYGQRFATAALDGTICTWQVEVGGRSNVYPTESSICFDSHASDVAYVSASRSVIASAGYSSNGSNVVIWDTLSPPATSQTSIMCHEVVMEFNSELLNRKGPVLAYSSLTRVVAERFLGGEFESYPGGFCHISTISSGGARSISVFDSDRGYGSISPLVVTGGKNGDIALHDCRFLSTGKSKHHRVTTEHGVEASSMHDIKSSTFGGTDSGMVWHIPKAHLGSVTKVTTIPNTSLFLTGSKDGDVKLWDAKNSQLVFHWTKMHERHTFFQPTSRGFGGVVRAAVTDLQVLPNGFVSCGGDGSVKLVQIKDDLAAAYQR

SEQ ID NO: 50944 - protein, 289 aa, Zea Mays
MASAAGAALCPCSFSTVLSSSPSTPFRPARTTPRPSLRPLPRRARLPLRPGHSVLRCLPKCDSGKPDGGGDAGLSGRKAARPAGQGGPRRPAQFGASSCGLAFTTVAGVIMLQASQQALAATQFAGLQPADVLGDLGDVSTGFASAFLLIFFSELGDRTFFIAALLAARSSGAVIFLGTFGALAVMTIISVVLGRAFHYVDGIIPFSFGGTDFPVDDIAAACLLVYYGVTTLLDAASGDDEKINEEQEEGDHGHVKLVLNLSYVMARLVRKNSTDFMGQYNVCKCSRFV

SEQ ID NO: 50945 - protein, 170 aa, Zea Mays
MTIISVVLGRAFHYVDGIIPFSFGGTDFPVDDIAAACLLVYYGVTTLLDAASGDDEKINEEQEEAELAVSKFSGNGAGVMSAAGTIASTFVLVFVAEWGDKSFFSTIALAAASSPLGVIAGSLAGHAIATLIAVLGGSLLGTFLSEKIIAYIGGSLFLAFAAITIVEIVT

SEQ ID NO: 50946 - protein, 888 aa, Zea Mays
MGFDNECILSIQSLPGEYFCPVCRTLVYPNEALQTQCTHLYCKSCLAYVVATTQACPYDGYLVTEADSKPLVESNKTLAETIGKVAVYCLYNKSGCQWHGELSACVTHGTACAYGNSPVVCNRCGTQIVHRQVQEHAQVCHGLQSQTQQADGSQVQLATATTQPVIQDSSLASAGSAAAAATTLTKPSSTTATAVTDSAAATGGAAGATTAAVPSSASSISASQTPTAEQWYQQQQQLQYSQYYQQQHPGSNPYMQQHQQYDQYQQAYQQYMQPPMQVPSQNVVQGSAQPASYVQPQVQSSQVMMQAQSQPQVHPLTSQPQLQQHPVQPRPQSHPHISHVQAPSGQSQLHQPIQSAQVPQVQPSQVPLQPSGLQVQSAAHPSAPTQVGNQQFATQAMAYQVQPHVQAQPPQQQHIVAHQQHPHMQALPLQQNIQPKMQLNSQVQLQPPHVQQQAYPQSQVYPQQTHHMHSQNTTYAQQQTQGALMQPVHVSHQQTHVSHHPAPMRPPSSGHQPALQHPQAQGIQHTSQHEKHIGFHAQWPTMYSNIPSQAPPQGLSVHSSVSSQSVQSYQQGMSSSQQMHSQPGQPYTQQHVTGNTGQHVQTSAGRPMAHLAPTQQFQQQHPAMLRTESPAAGHSIGQGPLDLEKHTSKSGKLDNATIAAVGENKNSGPESVVMRPTKSQLGDENMNSEHNGFVGVRKDAVQTGIVSHNLDGSIRRDGNTDQAGNSHGPLVQGGKDHKASDASTDHEKGRLFQQASLQNAGAPGSYVPPGVVPHPSGPDKMLPQHMTNHGHMHGFSENIRPPLQQPYGVFHSGTITRPFGENQIQMPMPQPGGIRPGDGMIRPCLVGPLPGHHGAVLPSFDLERLGQPRPLGNTLGHRPILLLLLQVC

SEQ ID NO: 50947 - protein, 1046 aa, Zea Mays
MDPTADFFAEPTRAKNETEQHGHVIRRRRASKTNFVEVRTFLHMFRSFDRMWAFFILGFQAMVIIAWSPSGSLSSIFEPNVFKNVLTIFITAAFLNFLQATLELILNWKAWKSLECSQRIRYILKFAVAVAWLIILPTTYSSSIQNPTGLVKFLSNWIQNLQNESIYNYAVALYMLPNIFSALFFMFLPIRRALERSNSRIIRFLLWWTQPKLYVARGMYEDTCSLLKYTTFWILLLICKLAFSYYVEIAPLVEPTRIIMSLERPPYEWHEFFPNLRHNLGVVVTVWAPIVMVYFMDTQIWYAIFSTICGGVYGAFSRLGEIRTLGMLRSRFEAIPRAFGKKLVPDHGSHLKGDEEDKNPPFDKFADIWNAFINSLREEDLLNNREKDLLVVPSSGGQTSVFQWPPFLLASKIPIALDMAKSVKKKDDELMKRIKQDPYTEYAVIECYDTLLDILYSIIVVQSDKKVVDRIRESIKDSIHRKSLVKEFRLDELPQLSAKFDKLLNLLKEYDENDPVNRNTHIANLLQDIMEIITQDIMKNGKGILKDEGQKQQLFAKLNLDSLKHVAWREKCIRLQLLLTTKESAIYVPTNLEARRRITFFANSLFMRMPRAPPVRSMMSFSVLTPYFKEEVLFSPEDLHRKNEDGISILFYLRKIYPDEFRNFLQRIDFEVKDEEELKDKMDEICNWASYRGQTLTRTVRGMMYYRKALEIQCLQDMTDPAKVDRDRSIGSYQELQYDIEMAQAIADIKFTYVVSCQVYGMQKKSKDLNEKRRYQNILNLMIMNPSLRVAFIEEIEGLTRNGATEKTYCSVLVKGGEKYDEEIYRIKLPGNPTDIGEGKPENQNHAIIFTRGEALQAIDMNQDNYIEEAFKMRNVLEEFESRKYGKSKPTILGLREHIFTGSVSSLAWFMSNQETSFVTIGQRVLANPLKVRFHYGHPDIFDRLFHITRGGISKASKTINLSEDIFSGFNSTMRGGNVTHHEYMQVGKGRDVGMNQISSFEAKVANDLTSTECYLSILLQLGSILVAWLLYLLSMCFYMGGFIWL

SEQ ID NO: 50948 - protein, 786 aa, Zea Mays
MAAAGARLPLALLLPLFVTFFASPASATDTITANSSLSDGQTLVSAGGVFQLGFFTPASSTARFLGIWYMGLAPQTVVWVANREAPITGTTASLAINATGSLVLADPSGRVFWSSPQSNMSSTGSPVGAQLLDSGNFVLQGGGGAVLWQSFDYPSDTLLPGMKLGWDLTTGLDRHLTTWRSTGDPSPGDYTFGFDLRGVPEGFIRRDGTVPVYRNGPWNGLQFSGEPEMEPNNSNFQFEFVDNASDVYYTFLVDGGGGSGNGGVVSRFVLNQSSVQRYVWPPGGQGWSLYWSLPRDQCDNYAHCGAFGACDTSGGSAACACVHGFTPASPRDWELRDSSAGCRRLTRLNCTGDGFLPLRGVKLPDTTNATEDATITVDQCRQRCLANCSCLAYAASSIKGGDSGCIIWSSPLIDIRHFPSGGQDLFVRLAASDLLQLQDRSKEDEAGQSSDLNVTLFDMDAIALSTDNFAAWNKLGEGGFGAVYKGQLEGGQAVAVKRLSKYSTQGLGEFKNEVMLIAKLQHVNLVRLLGCCVHGEERMLVYEYMENKSLDNFIFDKNRSAQLHWSKRFDIILGIARGLLYLHQDSRYKVIHRDLKAGNILLDKDMNPKISDFGVARIFGDDTDSHTRKVVGTYGYMSPEYAMDGVFSVKSDVFSFGVLVLEIVSGRKNRGMYSSGEQTSLLSQAWRLWREGNALALLDEAVVRAGTHRSSEVLRCVQVALLCVQERPDDRPHMAAVFLALGNPSAVLPQPRHPGYCTDRGSASTDGEWSSTCTVNDVTVTIVEGR

SEQ ID NO: 50949 - protein, 362 aa, Zea Mays
MGYIGHHGVATLRRYKYSGVDHSLVAKYILQPFWSRFVNIFPLWFPPNMITLTGFMFLLTSAFLGFLYSPHLDTAPPRWVHLAHGLLLFLYQTFDAVDGKQARRTNSSSPLGELFDHGCDALACAFESLAFGSTAMCGKATFWFWFISAVPFYFATWEHFFTNTLILPIVNGPTEGLMLIYLCHFFTFFTGAEWWAQDFQKSMPLLGWVPLISEIPVYDIVLCLMIAFAVIPTIGSNIHNVYKVVEARKGSMLLALAMLFPFGLLLAGVLVWSYLSPSDIMRTQPHLLIIGTGFAFGFLVGRMILAHLCDEPKGLKTGMCMSLAYFPFAIANALTARLDDGNPLVDEQLVLLMYCLFTVFLA

SEQ ID NO: 50950 - protein, 82 aa, Zea Mays
MEEGGDPQLPSISARTTSEGAGGVDLDLLEQLLSDDNGWLEVVSRSPNSVAFPPLSAFFSADVTATTVTTTATAAPAANASW

SEQ ID NO: 50951 - protein, 641 aa, Zea Mays
MGRVGLGVAAGCAAATCAIAAALVARRASARARWRRAVALLREFEDGCATPPPRLRQVVDAMVVEMHAGLASDGGSKLKMLLTFVDALPAGNEEGTYYSIDLGGTNFRVLRVEVGAGSVVTRRKVELPIPEELTKGTIEELFNFVAMTLKEFVETEDGNDEQRALGFTFSFPVRQTSVSSGSLIRWNKGFLIEDAVGKDVAQCLNEALARNGLNVRVTALVNDTVGTLALGHYHDEDTVAAVIIGAGTNACYIERTDAIIKCQGLLTNSGGMVVNMEWGSFWSSHLPRTPYDISLDDETQNRNDQGFEKMVSGIYLGEIARLVLHRMALESDFFGDAADNLCTPFTLSTPLLAAIRKDDSPDLSEVRKILQEHLKIPDTPLKTRRLVVKVCDIVTRRAARLAAAGIVGILKKLGRDGSGVASSGRTGGQMRRTVVAIEGGLYEGYPVFREYLDEALVEILGEEVARTVALRVTVDGSGAGAALLAAVHSSNRQQVHREYQAVMGWADRGQGSFSNKKPDMRTAHTITEVRSWATSHKGRKRAPFEKRDGFFQKAPRLQPHVGSSDSARVSRRSAGTVHDGSPIRLIGSVAVGSSFACTVTTRITRIVRRMMHGRRIVRYKQGTPEWDEMLVTSEITGSVIC

SEQ ID NO: 50952 - protein, 107 aa, Zea Mays
MVLDTVAVDVCDLCDDRLPTTATASWETPPPRRSRATAVAAAGGQGYTSVNRGRGSGVRSGCRSRQRRRRRGRRHGRAAVWSQSQWSECDWLEIERDAGLPFGLGGP

SEQ ID NO: 50953 - protein, 323 aa, Zea Mays
MTHHVIVKLLCFCKEHHIQTNHGSVSVAIYGEHDKPALITYPDIALNHMSCFQGLLFCPEAASLLLHNFCIYHISPPGHELGAAPILPSTPVASPDDLADQIADILDFFGLDSVMCLGVTAGAYILTLFATKYRERVLGLILVSPLCKAPSWSEWFYNKVMSNLLYYYGMCNVVKDILLQRYFGKGVRGGSAEPESDIVQACRSFLDQRQCVNVWRFIQTINERKDLTENLKQLQCRTLIFVGENSQFHAEAVHMTAKLDRRYSALVEYKACGSVVTEEQPHAMLIPMEYFLMGYGLYRPSQINCSPRSPLNPFCISPELPLS

SEQ ID NO: 50954 - protein, 968 aa, Zea Mays
MKTRIVYSREFLLSLGELEHCKKLPPDFDAALLSELQELSAGVLERNKGYYNTSQGRPDGSVGYTYSSRGGNTGGRWDTRSSGSSDRDGEPDRRGANQYRRNWQNTEHDGLLGRGGFPRPSGYTGQLSSKDHGNAPQLNRTSERYQPPRPYKAAPFSRKDIDSINDETFGSSELSNEDRAEEERKRRASFELMRKEQHKAVLGKKSGPDILKENPSDDIFSKLQTSTAKANAKTKNEKLDGSVVSSYQEDTTKPSSVLLAPAARPLVPPGFANAFADKKLQSQSSNITHEPKLEDDQSATGFTSESKEKGVSGNDATMGPKHTLPPGSVTSSAELASSVLKGSEDWDADVMDKYSIGKEGKSKNIDPVRKDDSVAILEQFFGNVLSKSGSNLPTYVENQPLKTDDDMITSVPESSKFAHWFLDEDLKPAEDLSSKSLLSMIVKNENPGLENLNHTPLSDAAAQNLSPRAPIDKLDSASELISFTSSTPANGVLEQCIHSDVPEAVPIMTCEDLEQTMLAQVSNSSSTQINATKEQLTVMDEPVAMQKVTVDNHASQHLLSLLQKGTDNKGAPSLGFQRESTDEPLSVDTNLMANGGISGSDPVNSVENVPTSGKDLTLEALFGAAFMNELHSKDAPVSIRGATTGGPTEFAEMGKTLLSSSHEGYYPVEQTVHFNNTKDAAVRREPGIEHSAVPGLSQGSASFDKKGMEIHLPEEDNLFTMSDSLLGQNSDILASVGSSRVEGLLPEKALDNLSYRFQSLVPGDAEHIQVYGPDALGSHPRDSQNMYHLLQGRPPMIAPHPMMDHIVNRKQPAPFDMAQSIHHDSHRSFPSNVNHMQHNLHGPGVPHLDPAGHIMRQHMSMPGRFPPEGLPRGVPPSQPVHHMAGYRPEMGNVNNFHMHPRQPNYGEFGLMMPGPEVRGNHPEAFERLIQMEMSARSKQQQVHHPAMAAGRVPSGMYGHELDAKLRYR

SEQ ID NO: 50955 - protein, 969 aa, Zea Mays
MKTRIVYSREFLLSLGELEHCKKLPPDFDAALLSELQELSAGVLERNKGYYNTSQGRPDGSVGYTYSSRGGNTGGRWDTRSSGSSDRDGEPDPGRGANQYRRNWQNTEHDGLLGRGGFPRPSGYTGQLSSKDHGNAPQLNRTSERYQPPRPYKAAPFSRKDIDSINDETFGSSELSNEDRAEEERKRRASFELMRKEQHKAVLGKKSGPDILKENPSDDIFSKLQTSTAKANAKTKNEKLDGSVVSSYQEDTTKPSSVLLAPAARPLVPPGFANAFADKKLQSQSSNITHEPKLEDDQSATGFTSESKEKGVSGNDATMGPKHTLPPGSVTSSAELASSVLKGSEDWDADVMDKYSIGKEGKSKNIDPVRKDDSVAILEQFFGNVLSKSGSNLPTYVENQPLKTDDDMITSVPESSKFAHWFLDEDLKPAEDLSSKSLLSMIVKNENPGLENLNHTPLSDAAAQNLSPRAPIDKLDSASELISFTSSTPANGVLEQCIHSDVPEAVPIMTCEDLEQTMLAQVSNSSSTQINATKEQLTVMDEPVAMQKVTVDNHASQHLLSLLQKGTDNKGAPSLGFQRESTDEPLSVDTNLMANGGISGSDPVNSVENVPTSGKDLTLEALFGAAFMNELHSKDAPVSIRGATTGGPTEFAEMGKTLLSSSHEGYYPVEQTVHFNNTKDAAVRREPGIEHSAVPGLSQGSASFDKKGMEIHLPEEDNLFTMSDSLLGQNSDILASVGSSRVEGLLPEKALDNLSYRFQSLVPGDAEHIQVYGPDALGSHPRDSQNMYHLLQGRPPMIAPHPMMDHIVNRKQPAPFDMAQSIHHDSHRSFPSNVNHMQHNLHGPGVPHLDPAGHIMRQHMSMPGRFPPEGLPRGVPPSQPVHHMAGYRPEMGNVNNFHMHPRQPNYGEFGLMMPGPEVRGNHPEAFERLIQMEMSARSKQQQVHHPAMAAGRVPSGMYGHELDAKLRYR

SEQ ID NO: 50956 - protein, 510 aa, Zea Mays
MMMMKVRTNIINTITNPSESLLKELQVVEEMKDQCDQKRVEYEAMRAAYGEKGGRLRHLKNESFSLGQLQTSFLEYQEEAALFIFRLKSLKQGQFLSILTQAARHHASQLSFFRKGLKHLEALEPCVKAVAEKQHIDYHFSGLDNNSDIDDYSSYQDNHSDGSELSFNYEINDRDKDLPTFRSPMDMDQAHPVSSPRPLKEQEQENAEEIKATLGVPHMKPEIGTQSAPIFAENVPDPSMRFRKMNLLTRTVHSYKLPTPADDKNPASVIANKSPHSDQPESKSHVAVNLWHSSPLAKDFMPNSMHSGPVKMPSSNEGVSLAYSYSTTDFKKVKREAFSGPIPSKVGLSTPLISATDRKPSGKRPSYVLPTRPPGPGWQSSVPPKATPRVTSLPTTTPRISELHELPRPPANAGLVGYSGPLVSRRPMPTAVSTTRVSPPSHTASPLPRPPAAMTRSYSIPSNSQRTPIITVNKLLEARHSRESSEVSSPPVTPISLADVSRRPTTEAAV

SEQ ID NO: 50957 - protein, 450 aa, Zea Mays
MDSSSATAATVAPVVTSAPPLEDCLRLLRGERDEQKLAGLLVAANVCRAGDADAVANVYRAVGPRFLRRLLNTGLGKVEGGKEEEREAYMRLAVTVLAGLARVPEVAADEGVVSTVPLVAEVVAKSTDPAITEECFELLSLIAIASEDGAYEFCEPGVIDMIFLQILSLTDGSKCVELAINLLQLLVHKLKVDTMSSEKLQGMTRMVTCLARIFAVLHTAVKFDALHMLTFLLSQKESPLHDFLRSIPASIWESHIRVGITAILQNRVVSSEKLHALLLAECMMSILGEDWLSEDFEVQDNQNVLSVDKFVLLVLESARVEVAVLLNELAYLKYESSKISQTDEAISQKQRNLAILFSLIERIIKMISNASSGEGAPIHTIRESTIMQAITGLNETINLVLDFLQDAKDHGQWKGDDLLAAARIVGRSTICLQGEDWESIGIYLFYRRSR

SEQ ID NO: 50958 - protein, 2653 aa, Zea Mays
MSSTTIHKTRSSHLNNLEELWALLNFLLPNIFNSSEDFSQWFNKPFESNGDNSPDEALLSEEENLLIINRLHQVLRPFVLRRLKHKVENELPEKIERLVRCEASAYQKLLMTRVEENLGGIGAVKVRSVHNSVMELRNICNHPYLSQLHVEEIEGYLPKHYLPSILRLCGKLEMLDRLLPKLKATGHRVLLFSTMTRLLDVMEDYLVWKKYKYLRLDGHTSGHERGALIDKFNDPNSQAFIFLLSIRAGGVGVNLQAADTVIIFDTDWNPQVDLQAQARAHRIGQKKEVLVLRLETVRTVEEQVRASAEHKLGVANQSITAGFFDNNTSAEDRREYLESLLRESKKEEAAPVLDDDALNDILARSEAEIDIFESIDKQRREEEMAAWQKVVQDGSTSGLDPGVLPSRLVTDDDLKPFCHAMKLYEPSNVKTVNVNVRKKGELGGLDTQHYGRGKRAREVRSYEDQWTEEEFEKLCQADSPESSQPGGMSKDLDILNKGIKTEILVESSKEPEQTKMEASPTVGDSPPAKRRRGRPKRSDVFVSPTAGLTDAVKQDTGTTQDGSSATPASTIHSDAPATAINSAVSDVNIHSIPPADTKKQEFSTDTKVSSSVSVLEGSVPNEIGTPLQSVHNVAVSAPPHQSARGRKCQAGETPRRRGRKPKSLSSSGVDDVSLNPTFSTVSGVADTSYVPSYSQVSSQGTAVALAGIQKDFVTVKLDTLLPDSGKGAPPVNEGDKGATVTTPVAKDICAGTVTTSDNTVTLTPNTLKENIGLVQVASAPSMLVASEELMKIAHVAVADKPVEKQTASRRRRKKTSSSEDTGVSTRQRSAMKRSYYNTSVAVDDIGSAVIPNEKSGITKERDVSSIQSTSNELPNINSPLYEKSGYDSQPSTPIAVPINEDTLPSGFDTCTNSMITLATSANSAEDDKPVDLHLNAPVSVDSQNQEQHMTGKDHLAVCSRIFATQLQTDTANPAIDHKPGTAQFEPSASLPQNSGKDATALPSEVDSAAPNRASSRRRKGSTREPRTRSNSASAASERRARLTGLKQAEDIKKLEMSATPTTTVCISSVEQQGAASLSAKITNASVSEGQKNPGNYMPSAISIPVGSHVLGLGATSIEETTATMITQAPAVSKSERRKLPGGSQQGIQFESSASKTKMVSAVEPAPANVECMQGTEVNSSEQTIVSATEPAPANDEHMQEQPTNIVSSVESEPSNDEEHTKHEVFLATTGDNMLASSAGTEILRDTVEHAACQPEAVCTDGTARQSELSQLDRKAFHDASYKYTHGSTKDDGILPSEGTSVDVTGSKQDDVNIVGTQTDDVSRGSSHFPVILQSTESDRPPGQVKNLESRMEQVKTEEALVNSSGGNQTHSLGDEPSHNTSLARNSPSEHSNERCSDQVIGENFKSKENIVEVHSGINTDGPDEALNALHTQSKEASMTDIGVPTDGDRCEGKGTSVEVCADMNTDGPVATQDASSTKSDKESCMMECGVSTDGCPTVCKTHNDLQGHVSCEETFVRTGGDDTTHITNANYGSNNESEATIASPVETTQKLMEGSTVIVSENSDLNKQCHTLHTRNDPPANTLLIVESNKVTCDAEIVCASRLESSGIEAETVGIQESALTDFEGTKGTGDLGDRTNSQLHDDVHGTSCSTIALVSEKEPSEDLTTGSHSEASNLLAAVEQTQETTVENQEIIDAVVFMDACKAEPVGDFTIAKGAEQTVEMVHYVDKQSAVLDYVETQTKRTSVCGSTLNESPQAAGLEEDCSVLKHGDPTSSELLTVAPNPIGETSVIQVEPEARNSDGYCTTEAGSALSETVMGLEPNKETAVPMQENIGEANDNFNNCEAHNNSEIHAFEVSMETQSSEVKEVSSIQSGAANLSTQTTALPDVTGQTSMASTGELVSTNEHIHMQGTEINSEQQTKMVSPAESAPANDEHVQDIVILSSEQQTKMVLAAEIDALCVQETAIIDLGGARGTVDLNDIRTQVPALPGRDVLDVEAHILEQKKTSSPGDEIKGSEQAKIESIAEIETVGVKENVIADHKETGNNSGVSIHAPLLVESGQKASPGVELRGIEVDAHVLEQAKMVSALEPDSTPEVCADKLEPSGADDVGMIVVQEAASVDDHNRAQGGEAHCSEQIKMASIAQAVSSMALVGYSSSEDSMVDAAARVTDADFVDSKAAGVYRQETMPTQTTSTLPENMDSPATAATMVESKFAASSEHVAGPEPIDETSVMQVELATSTGDGCAADGHNLVSSETVVEVKLAQEIVVPSPGGSIEANNTSTISEVYKDTQSRASGEACNDGQSHGDENMKLGEAYTELQLAPSSGEEAMTCMCSELPSQEVEAPSSDPLENNEETKNEAAAQGSVNEDSAPRAENAKIDEADTEQELLPSGEATVDESSELLSQDEKVARKDAKMEESAAAAAAQRQLTTEVAHASENAKLGEDGTELQLPPPSMVDISREQLSQEVEVASSGPSGTDETAEMKRLNTEHSPGDETSKLVGTDLGLQLSPSGDAMVDISNKPPSCQDVKEAPSSDILGNDENSDTEKTPAALHGRLNTELAPSGRNTEFSEADTGKQETPVSAEAMVESSSEPRSHEAKEAPTPDLSGDDEKAKSARAAVVAELFGDATEGGSDQPLPSPREQGKEAEADGGF

SEQ ID NO: 50959 - protein, 3772 aa, Zea Mays
MASSQHVEMEAAKLLHKLIQESKDEPAKLATKLYVICQHMKLSGKEQSLPYQVISRAMETVVNQHGIDMDALRSSRIPFAGGPQAGDSSGVMSKDKEVIGNQSPMVGSDASQSSGQAGLWQLPSGSTDMIRHGASISGRVPTGPNRGDFSAADIHQGSMSQKSGRSSGIESPASLQMEDTRSMNSHDSLKSDEKTSKKTSSKRKRMDSKGAGDLRSEDNSKSDVISTGQNTRKGKQVGKAGRQGQPSMGIEHEQQPHKLQGGTGQVPPIHGGAPFLRTRSEGPSGRTMDKTKPSNPFSMGQIPNFPEGLASTGAPIELQKSIQGGASLFNPGFGWNQNPQVQTLKNSQGSIHNLVRSGVTVEGKVNVGAQGAFNSASAPQMEFPTVPPYNPSSFGASSQFLDKGKELVSSIISTEPHSSKVASQPGISHGSPMQERQGMIRVPQRGEASFQERRPSSLPSRSTGPSPMSHISSNTPFKEQQLKQLRAQCLVFLAFRNNLQPRKVHLEIALGRGPPAESDSAGQRGSEGRVSDALGKENGSSRENSGVFCRQTDISRLPATSAGSIAEDDSLSKDPENATKKIKLAEQEKSLMEVENVQQASVMQGTSSEMRSQETASQNPYRPQQSYYQGDTRRIASDIHRTDAEILNQNLSWGGQGSTALGGTRQLLNQETKESLAPSKSHHMPVDGYNSNIQGIDRTPEIAGAGNDVENCSHVADIVPEQAADEGDEDLSEHEDLLSSPKHTMTEKWILDYQKRIYNEKQKRTLEQHKVHSRMSATYEELKESVNSSEDLSAKTKSVIELKKLQLLPLQRRVRSEFLLDFFKPNTSDLERIKSLKKHRHGRRVKQLEKIEQKMKEERQKRIRERQKEFFADIEAYREKLEDNFKVKRERLKGFNRYIKEFHKRKERIHREKLDRIQREKINLLKNNDVEGYLRMVKDAKSDRVKQLLRETEKYLQKLGNKLQSAKSTDGRSSFVTDKSDTANDIEDESYQPQHYLESNEKYYQLAHSVKETVNDQPSYLQGGKLREYQMNGLRWLVSLYNNNLNGILADEMGLGKTVQVISLICYLMETKNDRGPFLVVVPSSVLPGWESELSFWAPSINKIAYAGPPEERRRMFKEMIVHQKFNVLLTTYEYLMNKHDRPKLSKIQWHYIIIDEGHRIKNASCKLNADLKLYRSSHRILLTGTPLQNNLEELWALLNFLLPNIFNSSEDFSQWFNKPFESNGDNSPDEALLSEEENLLIINRLHQVLRPFVLRRLKHKVENELPEKIERLVRCEASAYQKLLMTRVEENLGGIGAVKVRSVHNSVMELRNICNHPYLSQLHVEEIEGYLPKHYLPSILRLCGKLEMLDRLLPKLKATGHRVLLFSTMTRLLDVMEDYLVWKKYKYLRLDGHTSGHERGALIDKFNDPNSQAFIFLLSIRAGGVGVNLQAADTVIIFDTDWNPQVDLQAQARAHRIGQKKEVLVLRLETVRTVEEQVRASAEHKLGVANQSITAGFFDNNTSAEDRREYLESLLRESKKEEAAPVLDDDALNDILARSEAEIDIFESIDKQRREEEMAAWQKVVQDGSTSGLDPGVLPSRLVTDDDLKPFCHAMKLYEPSNVKTVNVNVRKKGELGGLDTQHYGRGKRAREVRSYEDQWTEEEFEKLCQADSPESSQPGGMSKDLDILNKGIKTEILVESSKEPEQTKMEASPTVGDSPPAKRRRGRPKRSDVFVSPTAGLTDAVKQDTGTTQDGSSATPASTIHSDAPATAINSAVSDVNIHSIPPADTKKQEFSTDTKVSSSVSVLEGSVPNEIGTPLQSVHNVAVSAPPHQSARGRKCQAGETPRRRGRKPKSLSSSGVDDVSLNPTFSTVSGVADTSYVPSYSQVSSQGTAVALAGIQKDFVTVKLDTLLPDSGKGAPPVNEGDKGATVTTPVAKDICAGTVTTSDNTVTLTPNTLKENIGLVQVASAPSMLVASEELMKIAHVAVADKPVEKQTASRRRRKKTSSSEDTGVSTRQRSAMKRSYYNTSVAVDDIGSAVIPNEKSGITKERDVSSIQSTSNELPNINSPLYEKSGYDSQPSTPIAVPINEDTLPSGFDTCTNSMITLATSANSAEDDKPVDLHLNAPVSVDSQNQEQHMTGKDHLAVCSRIFATQLQTDTANPAIDHKPGTAQFEPSASLPQNSGKDATALPSEVDSAAPNRASSRRRKGSTREPRTRSNSASAASERRARLTGLKQAEDIKKLEMSATPTTTVCISSVEQQGAASLSAKITNASVSEGQKNPGNYMPSAISIPVGSHVLGLGATSIEETTATMITQAPAVSKSERRKLPGGSQQGIQFESSASKTKMVSAVEPAPANVECMQGTEVNSSEQTIVSATEPAPANDEHMQGTEILRDTVEHAACQPEAVCTDGTARQSELSQLDRKAFHDASYKYTHGSTKDDGILPSEGTSVDVTGSKQDDVNIVGTQTDDVSRGSSHFPVILQSTESDRPPGQVKNLESRMEQVKTEEALVNSSGGNQTHSLGDEPSHNTSLARNSPSEHSNERCSDQVIGENFKSKENIVEVHSGINTDGPDEALNALHTQSKEASMTDIGVPTDGDRCEGKGTSVEVCADMNTDGPVATQDASSTKSDKESCMMECGVSTDGCPTVCKTHNDLQGHVSCEETFVRTGGDDTTHITNANYGSNNESEATIASPVETTQKLMEGSTVIVSENSDLNKQCHTLHTRNDPPANTLLIVESNKVTCDAEIVCASRLESSGIEAETVGIQESALTDFEGTKGTGDLGDRTNSQLHDDVHGTSCSTIALVSEKEPSEDLTTGSHSEASNLLAAVEQTQETTVENQEIIDAVVFMDACKAEPVGDFTIAKGAEQTVEMVHYVDKQSAVLDYVETQTKRTSVCGSTLNESPQAAGLEEDCSVLKHGDPTSSELLTVAPNPIGETSVIQVEPEARNSDGYCTTEAGSALSETVMGLEPNKETAVPMQENIGEANDNFNNCEAHNNSEIHAFEVSMETQSSEVKEVSSIQSGAANLSTQTTALPDVTGQTSMASTGELVSTNEHIHMQGTEINSEQQTKMVSPAESAPANDEHVQEIDALCVQETAIIDLGGARGTVDLNDIRTQVPALPGRDVLDVEAHILEQKKTSSPGDEIKGSEQAKIESIAEIETVGVKENVIADHKETGNNSGVSIHAPLLVESGQKASPGVELRGIEVDAHVLEQAKMVSALEPDSTPEVCADKLEPSGADDVGMIVVQEAASVDDHNRAQGGEAHCSEQIKMASIAQAVSSMALVGYSSSEDSMVDAAARVTDADFVDSKAAGVYRQETMPTQTTSTLPENMDSPATAATMVESKFAASSEHVAGPEPIDETSVMQVELATSTGDGCAADGHNLVSSETVVEVKLAQEIVVPSPGGSIEANNTSTISEVYKDTQSRASGEACNDGQSHGDENMKLGEAYTELQLAPSSGEEAMTCMCSELPSQEVEAPSSDPLENNEETKNEAAAQGSVNEDSAPRAENAKIDEADTEQELLPSGEATVDESSELLSQDEKVARKDAKMEESAAAAAAQRQLTTEVAHASENAKLGEDGTELQLPPPSMVDISREQLSQEVEVASSGPSGTDETAEMKRLNTEHSPGDETSKLVGTDLGLQLSPSGDAMVDISNKPPSCQDVKEAPSSDILGNDENSDTEKTPAALHGRLNTELAPSGRNTEFSEADTGKQETPVSAEAMVESSSEPRSHEAKEAPTPDLSGDDEKAKSARAAVVAELFGDATEGGSDQPLPSPREQGKEAEADGGF

SEQ ID NO: 50960 - protein, 3805 aa, Zea Mays
MASSQHVEMEAAKLLHKLIQESKDEPAKLATKLYVICQHMKLSGKEQSLPYQVISRAMETVVNQHGIDMDALRSSRIPFAGGPQAGDSSGVMSKDKEVIGNQSPMVGSDASQSSGQAGLWQLPSGSTDMIRHGASISGRVPTGPNRGDFSAADIHQGSMSQKSGRSSGIESPASLQMEDTRSMNSHDSLKSDEKTSKKTSSKRKRMDSKGAGDLRSEDNSKSDVISTGQNTRKGKQVGKAGRQGQPSMGIEHEQQPHKLQGGTGQVPPIHGGAPFLRTRSEGPSGRTMDKTKPSNPFSMGQIPNFPEGLASTGAPIELQKSIQGGASLFNPGFGWNQNPQVQTLKNSQGSIHNLVRSGVTVEGKVNVGAQGAFNSASAPQMEFPTVPPYNPSSFGASSQFLDKGKELVSSIISTEPHSSKVASQPGISHGSPMQERQGMIRVPQRGEASFQERRPSSLPSRSTGPSPMSHISSNTPFKEQQLKQLRAQCLVFLAFRNNLQPRKVHLEIALGRGPPAESDSAGQRGSEGRVSDALGKENGSSRENSGVFCRQTDISRLPATSAGSIAEDDSLSKDPENATKKIKLAEQEKSLMEVENVQQASVMQGTSSEMRSQETASQNPYRPQQSYYQGDTRRIASDIHRTDAEILNQNLSWGGQGSTALGGTRQLLNQETKESLAPSKSHHMPVDGYNSNIQGIDRTPEIAGAGNDVENCSHVADIVPEQAADEGDEDLSEHEDLLSSPKHTMTEKWILDYQKRIYNEKQKRTLEQHKVHSRMSATYEELKESVNSSEDLSAKTKSVIELKKLQLLPLQRRVRSEFLLDFFKPNTSDLERIKSLKKHRHGRRVKQLEKIEQKMKEERQKRIRERQKEFFADIEAYREKLEDNFKVKRERLKGFNRYIKEFHKRKERIHREKLDRIQREKINLLKNNDVEGYLRMVKDAKSDRVKQLLRETEKYLQKLGNKLQSAKSTDGRSSFVTDKSDTANDIEDESYQPQHYLESNEKYYQLAHSVKETVNDQPSYLQGGKLREYQMNGLRWLVSLYNNNLNGILADEMGLGKTVQVISLICYLMETKNDRGPFLVVVPSSVLPGWESELSFWAPSINKIAYAGPPEERRRMFKEMIVHQKFNVLLTTYEYLMNKHDRPKLSKIQWHYIIIDEGHRIKNASCKLNADLKLYRSSHRILLTGTPLQNNLEELWALLNFLLPNIFNSSEDFSQWFNKPFESNGDNSPDEALLSEEENLLIINRLHQVLRPFVLRRLKHKVENELPEKIERLVRCEASAYQKLLMTRVEENLGGIGAVKVRSVHNSVMELRNICNHPYLSQLHVEEIEGYLPKHYLPSILRLCGKLEMLDRLLPKLKATGHRVLLFSTMTRLLDVMEDYLVWKKYKYLRLDGHTSGHERGALIDKFNDPNSQAFIFLLSIRAGGVGVNLQAADTVIIFDTDWNPQVDLQAQARAHRIGQKKEVLVLRLETVRTVEEQVRASAEHKLGVANQSITAGFFDNNTSAEDRREYLESLLRESKKEEAAPVLDDDALNDILARSEAEIDIFESIDKQRREEEMAAWQKVVQDGSTSGLDPGVLPSRLVTDDDLKPFCHAMKLYEPSNVKTVNVNVRKKGELGGLDTQHYGRGKRAREVRSYEDQWTEEEFEKLCQADSPESSQPGGMSKDLDILNKGIKTEILVESSKEPEQTKMEASPTVGDSPPAKRRRGRPKRSDVFVSPTAGLTDAVKQDTGTTQDGSSATPASTIHSDAPATAINSAVSDVNIHSIPPADTKKQEFSTDTKVSSSVSVLEGSVPNEIGTPLQSVHNVAVSAPPHQSARGRKCQAGETPRRRGRKPKSLSSSGVDDVSLNPTFSTVSGVADTSYVPSYSQVSSQGTAVALAGIQKDFVTVKLDTLLPDSGKGAPPVNEGDKGATVTTPVAKDICAGTVTTSDNTVTLTPNTLKENIGLVQVASAPSMLVASEELMKIAHVAVADKPVEKQTASRRRRKKTSSSEDTGVSTRQRSAMKRSYYNTSVAVDDIGSAVIPNEKSGITKERDVSSIQSTSNELPNINSPLYEKSGYDSQPSTPIAVPINEDTLPSGFDTCTNSMITLATSANSAEDDKPVDLHLNAPVSVDSQNQEQHMTGKDHLAVCSRIFATQLQTDTANPAIDHKPGTAQFEPSASLPQNSGKDATALPSEVDSAAPNRASSRRRKGSTREPRTRSNSASAASERRARLTGLKQAEDIKKLEMSATPTTTVCISSVEQQGAASLSAKITNASVSEGQKNPGNYMPSAISIPVGSHVLGLGATSIEETTATMITQAPAVSKSERRKLPGGSQQGIQFESSASKTKMVSAVEPAPANVECMQGTEVNSSEQTIVSATEPAPANDEHMQEQPTNIVSSVESEPSNDEEHTKHEVFLATTGDNMLASSAGTEILRDTVEHAACQPEAVCTDGTARQSELSQLDRKAFHDASYKYTHGSTKDDGILPSEGTSVDVTGSKQDDVNIVGTQTDDVSRGSSHFPVILQSTESDRPPGQVKNLESRMEQVKTEEALVNSSGGNQTHSLGDEPSHNTSLARNSPSEHSNERCSDQVIGENFKSKENIVEVHSGINTDGPDEALNALHTQSKEASMTDIGVPTDGDRCEGKGTSVEVCADMNTDGPVATQDASSTKSDKESCMMECGVSTDGCPTVCKTHNDLQGHVSCEETFVRTGGDDTTHITNANYGSNNESEATIASPVETTQKLMEGSTVIVSENSDLNKQCHTLHTRNDPPANTLLIVESNKVTCDAEIVCASRLESSGIEAETVGIQESALTDFEGTKGTGDLGDRTNSQLHDDVHGTSCSTIALVSEKEPSEDLTTGSHSEASNLLAAVEQTQETTVENQEIIDAVVFMDACKAEPVGDFTIAKGAEQTVEMVHYVDKQSAVLDYVETQTKRTSVCGSTLNESPQAAGLEEDCSVLKHGDPTSSELLTVAPNPIGETSVIQVEPEARNSDGYCTTEAGSALSETVMGLEPNKETAVPMQENIGEANDNFNNCEAHNNSEIHAFEVSMETQSSEVKEVSSIQSGAANLSTQTTALPDVTGQTSMASTGELVSTNEHIHMQGTEINSEQQTKMVSPAESAPANDEHVQDIVILSSEQQTKMVLAAEIDALCVQETAIIDLGGARGTVDLNDIRTQVPALPGRDVLDVEAHILEQKKTSSPGDEIKGSEQAKIESIAEIETVGVKENVIADHKETGNNSGVSIHAPLLVESGQKASPGVELRGIEVDAHVLEQAKMVSALEPDSTPEVCADKLEPSGGEAHCSEQIKMASIAQAVSSMALVGYSSSEDSMVDAAARVTDADFVDSKAAGVYRQETMPTQTTSTLPENMDSPATAATMVESKFAASSEHVAGPEPIDETSVMQVELATSTGDGCAADGHNLVSSETVVEVKLAQEIVVPSPGGSIEANNTSTISEVYKDTQSRASGEACNDGQSHGDENMKLGEAYTELQLAPSSGEEAMTCMCSELPSQEVEAPSSDPLENNEETKNEAAAQGSVNEDSAPRAENAKIDEADTEQELLPSGEATVDESSELLSQDEKVARKDAKMEESAAAAAAQRQLTTEVAHASENAKLGEDGTELQLPPPSMVDISREQLSQEVEVASSGPSGTDETAEMKRLNTEHSPGDETSKLVGTDLGLQLSPSGDAMVDISNKPPSCQDVKEAPSSDILGNDENSDTEKTPAALHGRLNTELAPSGRNTEFSEADTGKQETPVSAEAMVESSSEPRSHEAKEAPTPDLSGDDEKAKSARAAVVAELFGDATEGGSDQPLPSPREQGKEAEADGGF

SEQ ID NO: 50961 - protein, 3828 aa, Zea Mays
MASSQHVEMEAAKLLHKLIQESKDEPAKLATKLYVICQHMKLSGKEQSLPYQVISRAMETVVNQHGIDMDALRSSRIPFAGGPQAGDSSGVMSKDKEVIGNQSPMVGSDASQSSGQAGLWQLPSGSTDMIRHGASISGRVPTGPNRGDFSAADIHQGSMSQKSGRSSGIESPASLQMEDTRSMNSHDSLKSDEKTSKKTSSKRKRMDSKGAGDLRSEDNSKSDVISTGQNTRKGKQVGKAGRQGQPSMGIEHEQQPHKLQGGTGQVPPIHGGAPFLRTRSEGPSGRTMDKTKPSNPFSMGQIPNFPEGLASTGAPIELQKSIQGGASLFNPGFGWNQNPQVQTLKNSQGSIHNLVRSGVTVEGKVNVGAQGAFNSASAPQMEFPTVPPYNPSSFGASSQFLDKGKELVSSIISTEPHSSKVASQPGISHGSPMQERQGMIRVPQRGEASFQERRPSSLPSRSTGPSPMSHISSNTPFKEQQLKQLRAQCLVFLAFRNNLQPRKVHLEIALGRGPPAESDSAGQRGSEGRVSDALGKENGSSRENSGVFCRQTDISRLPATSAGSIAEDDSLSKDPENATKKIKLAEQEKSLMEVENVQQASVMQGTSSEMRSQETASQNPYRPQQSYYQGDTRRIASDIHRTDAEILNQNLSWGGQGSTALGGTRQLLNQETKESLAPSKSHHMPVDGYNSNIQGIDRTPEIAGAGNDVENCSHVADIVPEQAADEGDEDLSEHEDLLSSPKHTMTEKWILDYQKRIYNEKQKRTLEQHKVHSRMSATYEELKESVNSSEDLSAKTKSVIELKKLQLLPLQRRVRSEFLLDFFKPNTSDLERIKSLKKHRHGRRVKQLEKIEQKMKEERQKRIRERQKEFFADIEAYREKLEDNFKVKRERLKGFNRYIKEFHKRKERIHREKLDRIQREKINLLKNNDVEGYLRMVKDAKSDRVKQLLRETEKYLQKLGNKLQSAKSTDGRSSFVTDKSDTANDIEDESYQPQHYLESNEKYYQLAHSVKETVNDQPSYLQGGKLREYQMNGLRWLVSLYNNNLNGILADEMGLGKTVQVISLICYLMETKNDRGPFLVVVPSSVLPGWESELSFWAPSINKIAYAGPPEERRRMFKEMIVHQKFNVLLTTYEYLMNKHDRPKLSKIQWHYIIIDEGHRIKNASCKLNADLKLYRSSHRILLTGTPLQNNLEELWALLNFLLPNIFNSSEDFSQWFNKPFESNGDNSPDEALLSEEENLLIINRLHQVLRPFVLRRLKHKVENELPEKIERLVRCEASAYQKLLMTRVEENLGGIGAVKVRSVHNSVMELRNICNHPYLSQLHVEEIEGYLPKHYLPSILRLCGKLEMLDRLLPKLKATGHRVLLFSTMTRLLDVMEDYLVWKKYKYLRLDGHTSGHERGALIDKFNDPNSQAFIFLLSIRAGGVGVNLQAADTVIIFDTDWNPQVDLQAQARAHRIGQKKEVLVLRLETVRTVEEQVRASAEHKLGVANQSITAGFFDNNTSAEDRREYLESLLRESKKEEAAPVLDDDALNDILARSEAEIDIFESIDKQRREEEMAAWQKVVQDGSTSGLDPGVLPSRLVTDDDLKPFCHAMKLYEPSNVKTVNVNVRKKGELGGLDTQHYGRGKRAREVRSYEDQWTEEEFEKLCQADSPESSQPGGMSKDLDILNKGIKTEILVESSKEPEQTKMEASPTVGDSPPAKRRRGRPKRSDVFVSPTAGLTDAVKQDTGTTQDGSSATPASTIHSDAPATAINSAVSDVNIHSIPPADTKKQEFSTDTKVSSSVSVLEGSVPNEIGTPLQSVHNVAVSAPPHQSARGRKCQAGETPRRRGRKPKSLSSSGVDDVSLNPTFSTVSGVADTSYVPSYSQVSSQGTAVALAGIQKDFVTVKLDTLLPDSGKGAPPVNEGDKGATVTTPVAKDICAGTVTTSDNTVTLTPNTLKENIGLVQVASAPSMLVASEELMKIAHVAVADKPVEKQTASRRRRKKTSSSEDTGVSTRQRSAMKRSYYNTSVAVDDIGSAVIPNEKSGITKERDVSSIQSTSNELPNINSPLYEKSGYDSQPSTPIAVPINEDTLPSGFDTCTNSMITLATSANSAEDDKPVDLHLNAPVSVDSQNQEQHMTGKDHLAVCSRIFATQLQTDTANPAIDHKPGTAQFEPSASLPQNSGKDATALPSEVDSAAPNRASSRRRKGSTREPRTRSNSASAASERRARLTGLKQAEDIKKLEMSATPTTTVCISSVEQQGAASLSAKITNASVSEGQKNPGNYMPSAISIPVGSHVLGLGATSIEETTATMITQAPAVSKSERRKLPGGSQQGIQFESSASKTKMVSAVEPAPANVECMQGTEVNSSEQTIVSATEPAPANDEHMQEQPTNIVSSVESEPSNDEEHTKHEVFLATTGDNMLASSAGTEILRDTVEHAACQPEAVCTDGTARQSELSQLDRKAFHDASYKYTHGSTKDDGILPSEGTSVDVTGSKQDDVNIVGTQTDDVSRGSSHFPVILQSTESDRPPGQVKNLESRMEQVKTEEALVNSSGGNQTHSLGDEPSHNTSLARNSPSEHSNERCSDQVIGENFKSKENIVEVHSGINTDGPDEALNALHTQSKEASMTDIGVPTDGDRCEGKGTSVEVCADMNTDGPVATQDASSTKSDKESCMMECGVSTDGCPTVCKTHNDLQGHVSCEETFVRTGGDDTTHITNANYGSNNESEATIASPVETTQKLMEGSTVIVSENSDLNKQCHTLHTRNDPPANTLLIVESNKVTCDAEIVCASRLESSGIEAETVGIQESALTDFEGTKGTGDLGDRTNSQLHDDVHGTSCSTIALVSEKEPSEDLTTGSHSEASNLLAAVEQTQETTVENQEIIDAVVFMDACKAEPVGDFTIAKGAEQTVEMVHYVDKQSAVLDYVETQTKRTSVCGSTLNESPQAAGLEEDCSVLKHGDPTSSELLTVAPNPIGETSVIQVEPEARNSDGYCTTEAGSALSETVMGLEPNKETAVPMQENIGEANDNFNNCEAHNNSEIHAFEVSMETQSSEVKEVSSIQSGAANLSTQTTALPDVTGQTSMASTGELVSTNEHIHMQGTEINSEQQTKMVSPAESAPANDEHVQDIVILSSEQQTKMVLAAEIDALCVQETAIIDLGGARGTVDLNDIRTQVPALPGRDVLDVEAHILEQKKTSSPGDEIKGSEQAKIESIAEIETVGVKENVIADHKETGNNSGVSIHAPLLVESGQKASPGVELRGIEVDAHVLEQAKMVSALEPDSTPEVCADKLEPSGADDVGMIVVQEAASVDDHNRAQGGEAHCSEQIKMASIAQAVSSMALVGYSSSEDSMVDAAARVTDADFVDSKAAGVYRQETMPTQTTSTLPENMDSPATAATMVESKFAASSEHVAGPEPIDETSVMQVELATSTGDGCAADGHNLVSSETVVEVKLAQEIVVPSPGGSIEANNTSTISEVYKDTQSRASGEACNDGQSHGDENMKLGEAYTELQLAPSSGEEAMTCMCSELPSQEVEAPSSDPLENNEETKNEAAAQGSVNEDSAPRAENAKIDEADTEQELLPSGEATVDESSELLSQDEKVARKDAKMEESAAAAAAQRQLTTEVAHASENAKLGEDGTELQLPPPSMVDISREQLSQEVEVASSGPSGTDETAEMKRLNTEHSPGDETSKLVGTDLGLQLSPSGDAMVDISNKPPSCQDVKEAPSSDILGNDENSDTEKTPAALHGRLNTELAPSGRNTEFSEADTGKQETPVSAEAMVESSSEPRSHEAKEAPTPDLSGDDEKAKSARAAVVAELFGDATEGGSDQPLPSPREQGKEAEADGGF

SEQ ID NO: 50962 - protein, 66 aa, Zea Mays
MSFFFFATPSLQTLRRLAVISVCNCMIYAIIIIVSKYMCAAHWNVWVRVPNFVRHDSGVCLLEMEL

SEQ ID NO: 50963 - protein, 952 aa, Zea Mays
MVVLISGQTGCGKTTQVPQYILDHMWGKGESCKIICTQPRRISAISVAERISAERGEAVGDTVGYKIRLESKGGKNSSVLFCTNGVLLRLLIGRGTNASKARNQKRSLDDAVLGITHIIVDEIHERDRFSDFMLTILRDLLPLYPHLRMVLMSATIDAERFSQYFNGCSVIQVPGFTYPVKTFYLEDVLSILQSAEQNTEVYNYQHSETGITPLMVFAMKGQLGDVCMLLSFGVDCSAQDHDGKSALDWAQQENQQEVCEVIKKHMECSSEKSTEDNELLNKYLASINPEHIDTLLIERLLRKICVDSNEGAILVFLPGWEDISQTRERLFASPFFQDSSRFLVLSLHSMIPSSEQKKVFKRPPVGVRKIILSTNIAETAVTIDDVVFVIDSGRMKEKSYDPYNNVSTLHASWVSKASARQREGRAGRCQPGTCYHLYSRFRASSLPDYQIPEIKRMPIEELCLQVKLLDSNCRIADFLKKTLDPPIPETVRNAIAVLQDLGALTQDEQLTELGEKLGSLPVHPSTTKMLLFAILMNCLDPALTLACAADYRDPFVLPVAPDERKRAAAAKVELASLYGGFSDQLAVVAAFDFWRHAKDRGQDSQFCAKYFVSSNIMNMLSSMRKQLQNELSQRGFVPADASACSLNSKDPGIMRAVLMAGAYPMVGKMLPPRKNARKSVLETASGAKVRLHPHSCNFNLSFSKSSGNPLLIYDEITRGDGGMYIKNSSVVGSYPLLLIAAEMVVAPPDDDSDEDEEDSSEDEAEESTLVQHKEEIMSSPDSIVSVVVDRWLRFDATALDVAQIYCLRERLASAILFKVKHPQDVLPPALGASMYAITCILSFDGLPSMVPPNDLSANRGSGQDLAEASKFSQGRRAGYIPPSGFLMSLLADRTHNAPSFQNSSNHPGGGSAHTRPSRAPVGRFDRSRRPFRNSGPGTSAPRSFKRQRDAPR

SEQ ID NO: 50964 - protein, 328 aa, Zea Mays
MGVSHASAMHNPARLFLSVRALGAPAVVVSLAIQGVFRGLKDTKTPLLYSGLGNISAVVLLPFFVYSLNLGLTGAALATIASQYIGMFLLLWSLSKRAVLLPPKMKDLEFVGYIKSGGMLLGRTLSVLITMTLGTAMAARQGTVAMAAHQICLQVWLAVSLLSDALAVSAQALIASSFAKLDYEKVEEVTFYVLKAGVFVGIALALLLFVSFGRLAEIFSKDPMVIQIVRSGVLFVSASQPINALAFIFDGLHFGVSDFSYSASSMMVVGAISSLFLLCAPRFFGLLGVWAGLALFMSLRMTAGFMRLGWRAGPWWFLHRKEPKYRLQ

SEQ ID NO: 50965 - protein, 327 aa, Zea Mays
MEGAAGIRTRPAVCVTGAGGFVASWLVERLLAGGRYMVHGTVRDPGDAKNAHLAAMDGAADRLRLFRAELLDYGSVAAAIAGCDGVFHVASPVPMTYPIGDPEVELLAPAVTGTKNVLKACSEAKVKRVVVVSSVAAVMVNPGWPQNEAMDEACWSDVEFCRTTQNWYCLSKTLAELEALDYAKRSGLDVVSVCPSLVIGPLLQSTVNASSSVIVDCLKGDREVKLKLRNFVDVRDVADALLLVYETPEASGRYICDANARQMSEVVALLKDWYPAYSHAATKFVQVSDEPLFSSKKLQALGWKFRTLEESLRDSVESFKAAGVLVD

SEQ ID NO: 50966 - protein, 323 aa, Zea Mays
MGPAKGSRTINKTIVKGYEDQQQHDDPSSSSKAKQKKRKISDLDPKWSKDELTRFYEAYRQHGKDWKKISIAIGGKSSDMVRSLYSAHRTFLSLPEHQATAMGFIALVTGHHNASEKTTSHRGYDHIARASGKARKHGEQQKSIDGPDLHNCHEGEITGFSASFKKRYYGELVRNSRNHAVQRRTPLIPVIAPADRSTIDEPTPGIENVINFNSTKRKYEAANHGCAVAPTNKYSSDRVSGFAETCKADQGHSYLDTMEIGDIAMCQQHFKKTRIQQTVEESQTGIVEHETTMASKEGNKLVSSVNNNQILIDSISEGHVLEC

SEQ ID NO: 50967 - protein, 92 aa, Zea Mays
MMYMQTNFCLRCMAFVLLYTAQVLLMRLLELYPRASRVVVGQSYIYLSFSVLLELITFRVCRRMNHRKLMCASMVVVLTRRSGPRSGSCCSR

SEQ ID NO: 50968 - protein, 565 aa, Zea Mays
MTTKMKIWMTTTKSDIAHYLMGRHDDTPMIDKETHRLAVVNMDWDHIKAVDLYMVMTSCLPKGGRVLSVSIYPSEFGLKCMEIESTQGPAALVNANVDKKDSDEDEDDTDDDEESTDDDVDEEEEEVDSDKENNKLRAYELNRLRYYYAVVVCDSSATANHLYMTLDGTEFLKTANVFDLQFIPDSREFKHPARDAATEAPPSYKEPDFETRALQHSRVKLTWDDDEPERKKVLRRKFNDDQLDELNMYLASDDSASDNEGVDDSEDESLPNGGSKRKLTKEERLALLLQGDKSDEEQTDDQDMEITFNTELEDLSKRILERKNNEEKTIWEKHQEKMKEKRKGRKRGLKDEDDDNHYISDDEPENDDDFFADEQSDEEPKPSKSKKHKAKAKGEAKRKGNDGTTDEHLEQEATKDELELLVAGDQDTANGAKGYNLKRKKGKKGKEESADDKLPDIDLSKDERFSAMFTSHLFALDPTDPQYKRSAAFMRKQAGKPGVHGGKSSREPPLEGSSLGGTVPPDDAVTNNDGQKPDGSATEKLQILSAVKSLKRNLGAFKNSKTGDR

SEQ ID NO: 50969 - protein, 404 aa, Zea Mays
MVNGTDDSMLVNKTKILEYLHDAWAIDRKAEWSIWTVHSKIEIPHRYLRSMNDESSHRHSLLRVSGSRKFHDDPAQNSASRAELHRKSIAQMKNNMSWLFHSIVPARIWLRMLLNKRILLCYLNYKESLWYPKVVLGHHLDLRLVRNQWLLLDPGADCLMSEANEDKTSGDFKEMGSRLAGEVIAFLKKKMDKLSRYGGCKELKLSFVGHSIGNIIIRSALAEPALQPYLKNLYTYMSISGPHLGYWYSSNSLFNSGLWLLKKLKNAQCIHQLTFSDDQDPHNTYFYKLCKLKTLENFKNIILLSSPQDGYVPYHSARMELCPAASSDTSKKGQVFTEMLNNCLDQIRAPSSDTRTFMRCDVNFDQSNHGRSLNTMIGRAAHIEFLETDIYAKFIMWSFPDLFR

SEQ ID NO: 50970 - protein, 362 aa, Zea Mays
MNDESSHRHSLLRVSGSRKFHDDPAQNSASRAELHRKSIAQMKNNMSWLFHSIVPARIWLRMLLNKRILLCYLNYKESLWYPKVVLVKKVGASCELSFLCMVFRNQWLLLDPGADCLMSEANEDKTSGDFKEMGSRLAGEVIAFLKKKMDKLSRYGGCKELKLSFVGHSIGNIIIRSALAEPALQPYLKNLYTYMSISGPHLGYWYSSNSLFNSGLWLLKKLKNAQCIHQLTFSDDQDPHNTYFYKLCKLKTLENFKNIILLSSPQDGYVPYHSARMELCPAASSDTSKKGQVFTEMLNNCLDQIRAPSSDTRTFMRCDVNFDQSNHGRSLNTMIGRAAHIEFLETDIYAKFIMWSFPDLFR

SEQ ID NO: 50971 - protein, 325 aa, Zea Mays
MVVPQHSSSKDLASNASEQKDTIVLPKLQGEPLVPKSSVGKKSGRILRAVIFVHGFQGHHLDLRLVRNQWLLLDPGADCLMSEANEDKTSGDFKEMGSRLAGEVIAFLKKKMDKLSRYGGCKELKLSFVGHSIGNIIIRSALAEPALQPYLKNLYTYMSISGPHLGYWYSSNSLFNSGLWLLKKLKNAQCIHQLTFSDDQDPHNTYFYKLCKLKTLENFKNIILLSSPQDGYVPYHSARMELCPAASSDTSKKGQVFTEMLNNCLDQIRAPSSDTRTFMRCDVNFDQSNHGRSLNTMIGRAAHIEFLETDIYAKFIMWSFPDLFR

SEQ ID NO: 50972 - protein, 713 aa, Zea Mays
MDPRRAPPRGGGGLSYSTLFNLEPLQNLRVPVPENLARYGNSSSNGSPSSEGQGSLLDQYNGVHDASHGLHRKRKKHPDGAGDDDHADAYSNKMMEDHYRAMLSEHVQKYRRSKFKEGAFISDPSQVAIPQIKHKNGGKKVMKHISNFRDIAALNGIEASHEYNWIECIETHGGFNKLVASVDSTYLDMGDNIHYLVPEGYDKLALSLNLPISSDIRVEEHFLKGALDLCTLSAMLGTDQRFEASSHGGLSEPLPQFESLKERVKVQKFSLQVTEDPFAIPEGAAGRIRRSIISETGNLQVHYVKVLEKGDTYEIIERSLPKKQIVKKEPFVIVKEESEKTYKLWQYLATKSIPKHHRNFTSLMKKRQVDAKRFSDSCQREVKFKVRRSLKLMRCAAIRTRQLARDMLIFWKRVDKEQYELRKKEEREAAEALKREEELREAKRQQQRLNFLLSQTELYSHFMQNKAGGSAPPDEEDVPDEDEEEDPEEAQLKREALRAAQHAVSQQKMRTNAFDSETVRLRQTSESVLPTDDSSSMDPSKIDLLHPSTMPEKSSVQTPELFKGVLKEYQLKGLQWLVNCYEQGLNGILADEMGLGKTVQAMAFLSHLAEDKNIWGPFLVVAPASVVNNWAEELIRFCPDLKILPYWGPERMILRKNINPKRLYRRDASFHILITNYQILVNEEKLLRRVKWQYMVLDEAQAIKSSSSAGRHY

SEQ ID NO: 50973 - protein, 936 aa, Zea Mays
MDPRRAPPRGGGGLSYSTLFNLEPLQNLRVPVPENLARYGNSSSNGSPSSEGQGSLLDQYNGVHDASHGLHRKRKKHPDGAGDDDHADAYSNKMMEDHYRAMLSEHVQKYRRSKFKEGAFISDPSQVAIPQIKHKNGGKKVMKHISNFRDIAALNGIEASHEYNWIECIETHGGFNKLVASVDSTYLDMGDNIHYLVPEGYDKLALSLNLPISSDIRVEEHFLKGALDLCTLSAMLGTDQRFEASSHGGLSEPLPQFESLKERVKVQKFSLQVTEDPFAIPEGAAGRIRRSIISETGNLQVHYVKVLEKGDTYEIIERSLPKKQIVKKEPFVIVKEESEKTYKLWQYLATKSIPKHHRNFTSLMKKRQVDAKRFSDSCQREVKFKVRRSLKLMRCAAIRTRQLARDMLIFWKRVDKEQYELRKKEEREAAEALKREEELREAKRQQQRLNFLLSQTELYSHFMQNKAGGSAPPDEEDVPDEDEEEDPEEAQLKREALRAAQHAVSQQKMRTNAFDSETVRLRQTSESVLPTDDSSSMDPSKIDLLHPSTMPEKSSVQTPELFKGVLKEYQLKGLQWLVNCYEQGLNGILADEMGLGKTVQAMAFLSHLAEDKNIWGPFLVVAPASVVNNWAEELIRFCPDLKILPYWGPERMILRKNINPKRLYRRDASFHILITNYQILVNEEKLLRRVKWQYMVLDEAQAIKSSSSQRWKTLLSFSCRNRLLLTGTPIQNNMAELWALLHFIMPTLFDSHEQFNEWFSKGIEGHAEHGGALNEHQLSRLHAILKPFMLRRVKIDVIAEMTKKKEEIVPCKLSSRQQIFYQAIKNKISLNELLDGSRGNLNDKKLLSLMNIVMQLRKVCNHPELFERNEGSSYFYFADIPNSLLSPPFGALQDVHYAGKRNPIIFEIPKLVYDGIICNTENSGSICGFQNGYLNS

SEQ ID NO: 50974 - protein, 390 aa, Zea Mays
MFQSSVLQSRHEDLYGAAPSGFRTVVRLVPVATLHLPLRVPVQVLEKRLNDQFVMRRALEKALGYKPCAIHASSENCIPKPTEELIKEIAVLELEVICLEQHLLTLYRKAFEQQFSPASSACDMESNKQPARSFSGILSEAPELSFSTPRKHHQLNQSSRMVLARKSTPTASTSETSNEKINIGRSHSSLLHRSVRVSPSANNLARALKPCHTSPLSFVEEGKCMDPGVVSLADILGTRVADHVPQTPNKISEDMIKCITAVYMRLRDVPAVQHAFFPSPCSSFSSASGLSSKYTADIWSPRCRKESFVEEWQDNGLGNGESRELALPYDSVVEVSALCKGDQRSADVKDMLRKYMSLVQLLESVDLSGMKHEEKLAFWINVHNAMMMPI

SEQ ID NO: 50975 - protein, 250 aa, Zea Mays
MFENGVVQSFIYARTLSPADMKEPKIAAEIAKELRKFHQVDIPGSKEPQLWNDIFKFLKKAAALKFEDNEQQKRYVKISFTEIQDEVKELKDLLDILHAPVVYAHNDLLSGNLMLNDLEGKLYFIDFEYGSYSYRGYDIANHFNEYAGFDCDFNLYPDKDAQYHFFRNYLHPDRPSEVQAQDMEVLYVETNTFRLASHIYWALWALIQAKVSPIDFDYLGYFFLRYGEYKKQRDSCFALAQSFLSGLRNG

SEQ ID NO: 50976 - protein, 354 aa, Zea Mays
MGSEGRVWNGAGVAAGSGYGGSVEAKATTAAPADVPTSAASVDISLPLPEMSPHIIGLCKELVKGWSSIDSSRFSIETVSGGITNLLLKVSVKGNNGNDSSVTVRLYGPNTDLVIDRKRELQAIPYLSAAGFGARLLGMFENGVVQSFIYARTLSPADMKEPKIAAEIAKELRKFHQVDIPGSKEPQLWNDIFKFLKKALKFEDNEQQKRYVKISFTEIQDEVKELKDLLDILHAPVVYAHNDLLSGNLMLNDLEGKLYFIDFEYGSYSYRGYDIANHFNEYAGFDCDFNLYPDKDAQYHFFRNYLHPDRPSEVQAQDMEVLYVETNTFRLASHIYWALWALIQHLNAGKGIPN

SEQ ID NO: 50977 - protein, 304 aa, Zea Mays
MACGDGAEEKFREPLRLASDTTPGAADFLNPMRPTPALVAGGRMVTSFLSATEWMLPSPATQVHTISVLPSRRDFAFSNLTMLLRNSGGNEGESGSTKFHVVRDDLLHPLANGNKARKLDALLPILRRCGVTDIVTCGGCQSAHAAAIAVHCAEWGIRPHILLRGEQLDVPTGYNLISLMFGNVTYVSRSLYAQRDEMLYEHAIKVAGYSGTVMWADEVIGKGLGVDEDTTDGNGSRRVMIVKEGAGSVQALLGVMRLLKYLSGLTLFRKDEKVHIVVDSGTGTTAVGLALGATPVEGYCCYAC

SEQ ID NO: 50978 - protein, 409 aa, Zea Mays
MQPDGGGAIRVLNVAEKPSVAKAVAEILSRRSAQSRAGRSQYNRIFEFNYAINGRACHMLVTSVTGHLMELEFDDRFRRWHSCDPAELFHAPVRKSVPQDKQAIKQTLEEEARRCQWLVLWLDCDREGENIAYEVIDVCTRANSHLNIWRARFSALIDREIHESVQHLGRPNKLFADAVDARQEIDLRIGASFTRFQTMLLKDAFVIDVTGDERSLVLSYGPCQFPTLGFIVERFWEIQAHEPEEFWTINCTHTSDEGTASFGWIRGHLFDYSCAISIYEMCVSEPMATVQNVRNQEKLKYPPYPLSTVELQKRASRYFRMSSEHTMKVAEELYQAGFISYPRTETDNFSPNTDLHAIVREQVNHPVWGAYAQRLLNPEARLWRNPSNGGHDDKAHPPIHPTKFSEEIV

SEQ ID NO: 50979 - protein, 1717 aa, Zea Mays
MNVGHAAHLSGQTAHMNQVPGSGVGIGVGGSDGLPQHQPMQEMAALSGMDQQFVMLRTAMRDKISDYIGRKQSPGDWRKRLPELAKRLEEILYRKFPNKHEYYNMMKGPVEPQLQFAIKTLSAQNQHNQQNPQMTRQISSSSSYGAMIPTPGMTQGTSAGSRTPYVTETNALSSSGACMVPQNANMGTSMQGPMSNGYQHLNTNISQNSTTNNVESTMGSVGVQRQLSHMIPTPGFSNQQNVPSNPDYSNGTGYFNGESAVAPHMQHQKQFPSNHNSNQIQHIGGHNNSGIHSSLLDNSSAYGLSDGHMNGGIGVHGSNMQLTNRTTAPEAYMNISSYGNSPKPMQQQFNQHPQQRIPIDMAGSGSFYAIGSTPLTTANSQSMNVANLQSRSSMNQMLVSNQLNIQSVQQQSQIKNGPLDQTEKVNFQSTQLTHDQLLHQHPMSQHQVQPNSQFIQNQYHINQQQPNSQHQQAMLRNNSLKQSQMASNHSMQLPEQGTLPHTELVSSQASDPADLPNFQGQYQQRNALDNVKGGQMLGHLSSSQNFLPSASHGSQQLLPSNPQLDNGSNAVSYVLKGSQTEQMLLSQWQPQTMEKAPVATNSSLEKQVQEDCCQRIMSQDGVQQPFSSDWCLSNGTLASVDPAVPKPTAGGFGQVKRNIHYLRQIKWLLLLFHAKTCTYPVGSCKFNGCVQVQELLNHFQNCQRKDCSYRSCTKSKAMSHHYKTCVDEQCPVCSVVRKFLRQSTEQASKQKTLESRKLAQQNVPQRIMNGIEGDRMDVDPMSAEAFEDQPSVPKRLKMHLPSLSGPENDISVVSNHHVNPGFLLQEAQPEQLEHNNRTTYLKREVDAKADIRAPQKPIKISYDIDENVTTSRHNVIPGVPSEMDSHIKQENLSVNKETSETALEVKNETNDLTDATVTKSGKPKIKGVSMIELFYPDEVDVHIDSLKLWVGQSKAKAEKNQAIGHSENENSCQLCRVEKLTFEPPPMYCSPCGARIKRNAPYYAVGTGDTRHYLCIPCYNESRGETIEVEGQTFPKAKLEKKRNEEETEEWWVQCDKCQCWQHQICALFNGRRNGGGQAEYTCPHCYVEEVKCGLRKPLPQSAVLGAKDLPRTVLSDHIEDRLFKRLKQEKQDRAAAAGKSIDEIPGAEGLVVRVVSSVDKKLEVKPRFLEIFQEDNYPTEFPYKSKAVLLFQRIEGVEVCLFGMYVQEFGAECSSPNQRRVYLSYLDSVKYFRPEIKTVSGEALRTYVYHEILIGYLEYCKLRGFTSCYIWACPPLKGEDYILYCHPEIQKTPKSDKLREWYLSMLRKASKEEIVVELTNLYDHFFITMGGCKAKVTASRLPYFDGDYWPGAAEDMINQLRQEEDDRKLQKKSKTKKIITKRALKAAGHTDLSGNASKDAMLMQKLGETIYPMKEDFIMVHLQYSCSHCCTLMVSGRRWVCHQCRSFYICDKCYDAEQQLEDRERHPCNSRDTHMLHPVDIVGVPKDTKDRDDILESEFFDTRQAFLSLCQGNHYQYDTLRRAKHSSIMVLYHLHNPTAPAFVTTCNACCHDIETGQSWRCEICPDFDVCNACFQKGAVTHPHKLTNHPSAADRDAQNAEARQMRVQQLRKMLDLLVHASMCRSGSCQYPHCRKVKGLFRHGMQCKTRASGGCVLCKKMWYMLQLHARACKDSECKVPRCRDLKEHLRRLQQQSDSRRRAAVNEMMRQRAAEVAAN

SEQ ID NO: 50980 - protein, 214 aa, Zea Mays
MTLRVILSRLRLTPLIHDGHHLRRSLSAAAAKLPDELPPGAPAPTSDSRLFVAGLSWSVDERSLTDAFSSFGTVTEDGAQCRSSAKCRGGREPLHRPQACSLFDEIPVRDVVTCSAAIYRHARSGLFHESAELFVGMMRAVRIMYDKNSGRSRGFGFVHFSNDNEAKCAKDAMDGKHGPVLILQVMLGRPLRISFALGRVRGASVIVPRLSTVK

SEQ ID NO: 50981 - protein, 512 aa, Zea Mays
MRHLALLALLLAPVLGSTGTTLSPSPAATDSPANQGQASSPPQSAFALGPVAVPTAPTTPSASPSPEKAAAVSPAAPTEPRIAPAPVAPPKVPPYPPPASPPPANGIPPYPPSGRFPAIPPATSVPPPATSPVIAQAPQRRADPPSRDYKNGNAVPPANTYPPTNLKKHHVPHASPPKGSTGQTVPGHKSPVTGSAPATSPLPQNTNMPSIPKNASSVPHAHPSPPSIAPELAPTGRSHAQGWKSSNPNNKTNRLHAPSYPPPRAQGPEVSRTPRQTGTKNYTHHAPPPFPQGHPSFPVHSPSPSPASSRGPANAKKRNHISPTLPSIPPLPEPKAPSAHPIWTLPPPPPNSDCNSLSCPEPLTDPPAGAPCACVLPIRVGIRLSVDLYSFFPLVSDFAEEVASGVNMAQRQVRVMGANVAGDQPDKTMVLVDLVPVQVKFDNATAFSAFESLWSKKVSLKPSVFGNYEILYVVYPGLPPSPPSGQGVGDGAFGNNRNARAVKPLGVDLFDS

SEQ ID NO: 50982 - protein, 605 aa, Zea Mays
MRHLALLALLLAPVLGSTGTTLSPSPAATDSPANQGQASSPPQSAFALGPVAVPTAPTTPSASPSPEKAAAVSPAAPTEPRIAPAPVAPPKEYSAPPPVEVAPTDPTDEVPPPVAPPQAAVGNPTPILPGTPALLPYVQAPAPSVVLKPNPPVVVSPPPANNQPSRPVGSVPPYPPPASPPPANGIPPYPPSGRFPAIPPATSGNAVPPANTYPPTNLKKHHVPHASPPKGSTGQTVPGHKSPVTGSAPATSPLPQNTNMPSIPKNASSVPHAHPSPPSIAPELAPTGRSHAQGWKSSNPNNKTNRLHAPSYPPPRAQGPEVSRTPRQTGTKNYTHHAPPPFPQELLDSTGNHISPTLPSIPPLPEPKAPSAHPIWTLPPPPPNSDCNSLSCPEPLTDPPAGAPCACVLPIRVGIRLSVDLYSFFPLVSDFAEEVASGVNMAQRQVRVMGANVAGDQPDKTMVLVDLVPVQVKFDNATAFSAFESLWSKKVSLKPSVFGNYEILYVVYPGLPPSPPSGQGVGDGAFGNNRNARAVKPLGVDVRSPKRKVNGSLIAIVVLSTVIALIICCLAAWSLILRFRGPSHTARGFPHTALPKFSRSSGTCN

SEQ ID NO: 50983 - protein, 504 aa, Zea Mays
METVFKWRARTGGGVSLIHLLVRCFAVSAAILLLADGRHADAVDPAAPVEIQQTGSSSEVADEQQWRMVRTRGNQFVVGDDDDHRPFYVNGFNTYWLMILAVDPSTRGKVTEVFQQAAAAGLTVCRTWAFNDGGWRALQKSPSVYDQDVFKALDFVVSEARKYRIRLILSLINNWDSYGGKAQYVKWAGDDAAADGGRLNITASVDDDFFSDQTVKVYFKNHVKNMLTRVNTYTSVMYKDDPTIFAWELMNEPRCTSDPAGNKLQEWIQEMAFHVKSIDPDHLLEVGGLAQRASTGPRRRHGFRPTRTPMLARSAPTSSATTASWASTSPPSTSTQTPGCRARLWRHGSGSWTRGWRRTSPTPTARWACRWCSRSSGRPPPRPGAAASTRPRETSSSRRCTRGSSTPRGVAAPERGLCSGRCSRWGPTTWTMATASCFPGRRPLPGSSRRTPGTWPFSTRGAPGAAAGGAGGGGTSRRILMLMMTCRSSRINNEKHRINTTNER

SEQ ID NO: 50984 - protein, 185 aa, Zea Mays
MVWKGKKLHLRMDSNIYDKKKWASLLYCSVKSTIERYKKANSDTSNSGTVAEVNAQHYQQESSKLRQAIDSLQNANRTIVGDSIHTMGLRELKQMEGKLEKAINKIRARKEMDLQTDNMYLRSKIAENNNETGQPAMNMIGVPSTSEYDHMASFVDSRNFLQVNMQQQQPQHYSHQLQPTTLQLG

SEQ ID NO: 50985 - protein, 262 aa, Zea Mays
MLNMMTDLSCGPSSKAKGGQPAAAPGSGGDRQGRGKIEIKRIENTTNRQVTFCKRRNGLLKKAYELSVLCDAEVALVVFSSRGRLYEYANNSVKSTIERYKKANSDTSNSGTVAEVNAQHYQQESSKLRQAIDSLQNANRTIVGDSIHTMGLRELKQMEGKLEKAINKIRARKNELLYAEVEYMQRREMDLQTDNMYLRSKIAENNNETGQPAMNMIGVPSTSEYDHMASFVDSRNFLQVNMQQQQPQHYSHQLQPTTLQLG

SEQ ID NO: 50986 - protein, 301 aa, Zea Mays
MSLRQQLQDPGKKPVSYQHFVNRDKDKDKDPSQGGAASSRSTCVAWVPEREGIFVVSHADGNLYVYDKCKDGNTDWTFPTVKDQSQVLISHAKSSKSNPIARWHICQGAINDISFSPDGAYLATVGRDGHLRVFDFAKEQLIFGGKSYYGALLCCSWSADGKYLLSGGEDDLVQVWSMDDRKIVAWGEGHNSWVSAVSFDPYWSPPNSDETEENVMYRFGSIGQDTQLLLWDLALEEIAVPLRHPSGGSPTFSSGSPSAQWDNACPPAGVLQPSPRMRDVPKLSPLVAHRVHVDPLSGLEF

SEQ ID NO: 50987 - protein, 493 aa, Zea Mays
MASAAGSAGGAGAGSGGLKTYFKTPEGRHKLQYEKTHSPAVVHYSHSGKTVSQMTVAYLKEKPAGQGSTPSTPSAGSGMRSAAARLLGTGNGSRALSFGSNGTSRAVSGSSRMGGGIGVSTSASGSQGMANYDGKGAYIIFNTADTLFISDLNSHDKSIHFSSSNPLCHAFDPEAKDGHDLLVGVFSGDVYSMSLRQQLQDPGKKPVSYQHFVNRDKDKDKDPSQGGAASSRSTCVAWVPEREGIFVVSHADGNLYVYDKCKDGNTDWTFPTVKDQSQVLISHAKSSKSNPIARWHICQGAINDISFSPDGAYLATVGRDGHLRVFDFAKEQLIFGGKSYYGALLCCSWSADGKYLLSGGEDDLVQVWSMDDRKIVAWGEGHNSWVSAVSFDPYWSPPNSDETEENVMYRFGSIGQDTQLLLWDLALEEIAVPLRHPSGGSPTFSSGSPSAQWDNACPPAGVLQPSPRMRDVPKLSPLVAHRVHVDPLSGLEF

SEQ ID NO: 50988 - protein, 476 aa, Zea Mays
MADGSGESESTALEFTPTWIVAAVCSLIVVISLAAERCLHYLGKTFKGKNQKALFEALLKVKEELMLLGFISLLLTVFQGVMQRTCIPPGWTIYMLPCRSAKEQAELSPTEAHGHAAGILGLTRRRLLAEGGPRTQRCQKKGEVPLLSVEALHQLHIFIFILAIAHVIFCVLTMLLGSVRIRQWKHWEDEIQKGATDNGPRKVTYVHQSEFIREHSKGIGRDTTMLSWLHSFLKQFYGSVTKSDYTTMRLGFITTHCRSNPKFDFHRYMMRALEADFKKVVGISWYLWIFVVVFMLLNINGWHTYFWISFIPLLLLLAVGTKLEHVITQLAQEVAEKHSAVEGDLVVNPSDDHFWFGRPKIVLYLIHFILFQNAFEIAFFFWILTTYGFNSCIMDHVPFIVPRLVVGAIIQLLCSYSTLPLWGLSSRRRSSMSTCSRAFWAGRRRPRRGKRSGTMAMAAMAPRPGRHIHLRLRGSN

SEQ ID NO: 50989 - protein, 585 aa, Zea Mays
MNKSLLTLGRVINALVEHSVHVPYRDSKLTRLLRESLGGKAKTCIIATVSPSAHSLEETLVTLDYAARAKSIRNKPEANKKTCKTVVLKELYQEMERMKQDVKAAREKNGIYISHERFAQDETKRKTMKEKIEHLELSLEKQNKVNLESLKGKFIDLEEAHCRAHMSLREKDFIISNLLHSEHLIIERAKDMRNTLENATEDISVLLNKQERQSKTEAENKRLLSGFRAELDRSLGVLHATVVGSVCEQSKILESINEQTKLYFLARNESENQLERRIARAKDMYVSGVQCMKELANTMRQQSIIDSEQMRQNISTNANAIGNFLEVMFSEAEQVLNDVLKSTSDLKELLAFSAELQNTGLRRNLASVQAMSKQSIDFFEDIRIHVSQLMTLMEQNQMERSSKLVKFENEFKETCVKDEQAALNKIAAILSELTAKKTTMVSSYMGQLNERYSEDQKNLKLEISNLQQVSDNGKNESVACVGVIESQFQEDMSSHTKSNDQMEGILKQYSEKGSHFVSYWSHIQSSLHDLVKSSIMETDDFIEESRNKNENIFQEGLLFSSQNDAEFHGITSDVLTVSKSNTLPL

SEQ ID NO: 50990 - protein, 967 aa, Zea Mays
MAQTPNPSRRSWVGPAPMPFLTPRPERRHLEMRWADGVSQSAARRSGVGAVARDGCERDQEVNVQVMLRCRPLSEEEQRVNAQSAISCNESKREVTVLHSLFKQADKTFTFDKTGTGKTYTMEGEMRQKVSELPDTAGVIPRAVCHIFEILTARKADYSMKVTFLELYNEDITDLLSLEDQSRFPEGRQKRPITLMEDGKGGAVIRGLEEIVVYSPSDIYSLLEHGSARRRTADTALNKQSSRSHAVFSINIQVKETTVGNEELIKYGRLNLVDLAGSENIARSGAREGRARETGEMNKSLLTLGRVINALVEHSVHVPYRDSKLTRLLRESLGGKAKTCIIATVSPSAHSLEETLVTLDYAARAKSIRNKPEANKKTCKTVVLKELYQEMERMKQDVKAAREKNGIYISHERFAQDETKRKTMKEKIEHLELSLEKQNKEVQKFKALYLAEQECHWDFESQNNDLKVNLESLKGKFIDLEEAHCRAHMSLREKDFIISNLLHSEHLIIERAKDMRNTLENATEDISVLLNKQERQSKTEAENKRLLSGFRAELDRSLGVLHATVVGSVCEQSKILESINEQTKLYFLARNEFLEVMFSEAEQVLNDVLKSTSDLKELLAFSAELQNTGLRRNLASVQAMSKQSIDFFEDIRIHVSQLMTLMEQNQMERSSKLVKFENEFKETCVKDEQAALNKIAAILSELTAKKTTMVSSYMGQLNERYSEDQKNLKLEISNLQQVSDNGKNESVACVGVIESQFQEDMSSHTKSNDQMEGILKQYSEKGSHFVSYWSHIQSSLHDLVKSSIMETDDFIEESRNKNENIFQEGLLFSSQNDAEFHGITSDVLTVSKNSLLLDHETCKMVETNTTIFSDHLELLNEKHSEGVESTRNMMSDCLEKDYMANSPVRNHPRELLTSANSLESIDKLRASLPDLVAKFRLENKLNEMDKGKQYSDQRTRTPRSPLTPVNQ

SEQ ID NO: 50991 - protein, 1270 aa, Zea Mays
MAQTPNPSRRSWVGPAPMPFLTPRPERRHLEMRWADGVSQSAARRSGVGAVARDGCERDQEVNVQVMLRCRPLSEEEQRVNAQSAISCNESKREVTVLHSLFKQADKTFTFDKVFGPQSQQRSIYNHAVAPLVTEVLEGYNCTVFVFGQTGTGKTYTMEGEMRQKVSELPDTAGVIPRAVCHIFEILTARKADYSMKVTFLELYNEDITDLLSLEDQSRFPEGRQKRPITLMEDGKGGAVIRGLEEIVVYSPSDIYSLLEHGSARRRTADTALNKQSSRSHAVFSINIQVKETTVGNEELIKYGRLNLVDLAGSENIARSGAREGRARETGEMNKSLLTLGRVINALVEHSVHVPYRDSKLTRLLRESLGGKAKTCIIATVSPSAHSLEETLVTLDYAARAKSIRNKPEANKKTCKTVVLKELYQEMERMKQDVKAAREKNGIYISHERFAQDETKRKTMKEKIEHLELSLEKQNKEVQKFKALYLAEQECHWDFESQNNDLKVNLESLKGKFIDLEEAHCRAHMSLREKDFIISNLLHSEHLIIERAKDMRNTLENATEDISVLLNKQERQSKTEAENKRLLSGFRAELDRSLGVLHATVVGSVCEQSKILESINEQTKLYFLARNESENQLERRIARAKDMYVSGVQCMKELANTMRQQSIIDSEQMRQNISTNANAIGNFLEVMFSEAEQVLNDVLKSTSDLKELLAFSAELQNTGLRRNLASVQAMSKQSIDFFEDIRIHVSQLMTLMEQNQMERSSKLVKFENEFKETCVKDEQAALNKIAAILSELTAKKTTMVSSYMGQLNERYSEDQKNLKLEISNLQQVSDNGKNESVACVGVIESQFQEDMSSHTKSNDQMEGILKQYSEKGSHFVSYWSHIQSSLHDLVKSSIMETDDFIEESRNKNENIFQEGLLFSSQNDAEFHGITSDVLTVSKNSLLLDHETCKMVETNTTIFSDHLELLNEKHSEGVESTRNMMSDCLEKDYMANSPVRNHPRELLTSANSLESIDKLRASLPDLVAKFRLENKLNEMDKGKQYSDQRTRVHGKFKTIISAIERRVLEEQLGWARLERQKILALSAEADDAIWHLATLARRRMQERDEARNQARMLLADLQARNARMKAAVPGASCSRVARPDAFAATGYEHIQAQAQAQAQALAPAAFGPRGQRARAGTGYYCVASSSGFGHRSIDSSLDTCAVQPSLLGFASSSSSQEHFDPDMFLVDVAESPQDVVPVPATADSSQGRSSGSGSGTYGHSLASKRPCSERK

SEQ ID NO: 50992 - protein, 571 aa, Zea Mays
MMKTIDHYDSLMDLFGKNREKRQDVENSKGTSKKKARTEPPKEILQRTPLNRKGSALAESSDKTVDKCEIHDEIKTNVELDLSESCRTDNGIVAIPVRAYSYGKGLPYAPENWPRHGDIWHWKVGSRASGAGHWADRYIMPPSRFRGAAPKKLGFASRGFASRLQVEEFVKREFPDVDPSTFFSMFIWKIPAEGYRIQKGTRQVRIHEPEPVVADPGGLCKARNSLCNLQREGFVESSPARVCNICCKEPGFCRECCCLLCNRTVDYSLGSYSCIKCEAVVEENLICGHFAHLECALRCYMAGTVGGSFGLDVQYLCRLCDNKTNLMTHVEKLMETCQSLESRDQIKPMLNLGLCLLRGSKQMRARNLENHMRSAMEKLECGFDFVEVWKLEGDEGRTTLNAGENSPTTNGVTVLGARQVPEAGALTGHPDLIDPLVDNDFETVIENLPVFITGDQNAASAKFEDEIDLALQELKKSQEAEYSVAEQKLYAQKDHILCLYRQLDAERAELADPMPLSDASNYGAMLANVLSRVDQVKREEEKFRSMLKVAGGFAKAPQSVTREMFGLPADK

SEQ ID NO: 50993 - protein, 110 aa, Zea Mays
MSDEARRGPAGAAQVVLRASSEDRKPVGSGSPPPAATATAVAHKIQLKSADMKEEMRQEAFEIARIAFEKHSMEKDIAEYIKKEFDKNHGPTWHCIVGRNFGRVRHMLTI

SEQ ID NO: 50994 - protein, 616 aa, Zea Mays
MATTLHKPLGAITVDDLAAAAPGSDATALHAALRRALDSHGPTEVWGELCRSVLCPSVPFAVHRMLYYGCFAGFPSPTPPAWTPDPKESVLTNVGRVLEARGRNLIGDAYKDPITSFPDLHKFSNENPEAYWKMVFEDMGIQFSVEPSCIWRENTAYPGGEWLPGAELNAAVNCLTAKPGRSSDGPAIVWRDEGKDSDPLNFMSLEDLRKKVCLVANAIDALELPKGSAIAIDMPMDVNAVVIYLAIVLAGYVVVSIADSFAAPAISMRLKLSEAKAIFTQDYILRDDKELPLYSRVVEAKAPMAIVIPVRGSLLIKGLRVDDLSWQDFLGRVNYTEAENYTAVNQPAYAFTNILFSSGTTGEPKAIPWTHITPLKAAADGWCHMDIRKGDVVAWPTNLGWMMGPWLVYASLLNGASMALYNGSPNSSGFAKFVQDAKVTMLGLVPSIVRTWKNTDCTAGLDWSSIRCFSSSGEASSVDDYLWLMGRAGYKPVIEYCGGTEIGGGFVTGSMLQPQALSAFSTPAMGCNLFILDSSGNPLPQDSVGIGELALDPTLFGSSTTLLNADHQEVYFNGMPEWHGKILRRHGDEFERTSDGYYRAHGRADDTMNLGGIKFH

SEQ ID NO: 50995 - protein, 259 aa, Zea Mays
MTQLLSGPYDKEGAVINISAGAGGTDAQDWADMLLRMYVRWGEKQRYKTRVVEKSPGEEAGIKSATVELEGRYAYGYLSGEKGTHRIVRQSPFNAKGLRQTSFAGVEVMPLLPEESMAVDIPEEDLEISFTRAGGKGGQNVNKVETAVRMVHIPTGIAVRCSEERSQLANKIKALSRLKAKLLVIALEQRASEIKQIRGDIVKAEWGQQIRNYVFHPYKLVKDVRTGCETSDITGVMDGELDPFIRAYLKYKLTAAATS

SEQ ID NO: 50996 - protein, 1072 aa, Zea Mays
MDLRLICDADDLSTGRTPHIHTGCGDDKVARFNQLFCMSIVARKHVRRLSLSSVHGDFLGQTSQSHSCSEKYEWRNLIFHQSDKATRDQCDHVATRHLPLHMPRRLGPSPGHGHSSEIYGPGDGVGGCHLSCCSYGGHRGKYHACHNHSSEWARHNISPEPGPIRSYWITKRTSSDHVSHCAKGSDRQIRPAGGYRKNYSANQGSGSQNRPYHDDRYLPTKFLDDRFPEIDAAKHQSYLCDFQSSSKHIPVHPSHGQSCQRDEVAKAHPKRPVNRFRPIHHKQLERCPNEDFHDCFDSSQKFRNAYNDKVVKRKFIKQDFLGNTYNGACVGKYDRNSCRKRNADHFGGEKTRKNDANKDRSKRLRCPLEQDQRQQVECNEMRNDSREGNVEMTRLVCQDGAKRNFNQKKNATAPASSDSTKCDGKNILSPKCSKTIASSHTPNLSEGSNDMDPKSDNYVDGCTERGILQHIPVTHTERNIQLKISDNFTQSEAFRRDCLILWRERQLRKDSAAKADNIVKTDQQQTAQRSKMSTGRRVGSGGSAASSCSKSDNKDDSAPECSDQFSGATSSDKLQKFGEGRANKKLEQTIKFPSNSKCNKRPQDATAEKVLKCSLKLLSEADPLEIAQPKGKEKLVDRRQVSTEHQDAKTHSSLNGCSDTCKVDQAAISHCHNSAHQNIFQQEKNSAVSDARREEKPGVKCEKKAAGHGAKLAEQSTGLYSDPISLDKETVVSCSKHGTSKVNALKVPDHEIESTSLDGSMLPRGTVVDMCLRKSINRSSESYCIDFKDCLDGNDCRDSQQETTHDNVLRKKQECSLLPETKDELNGKARKEDCEPQARRVEIESNQRITTEDCASDTILSGSAKQDDRIRCSSIPDLNCLPSMSSDEDFMAPPEEPVCQVSVDSFKPQSISKSLSASLTGHTPKRELFKQVEGKQCDRAEETNQIAREVCKDGTSEAATQLQISESNTGPPQLRTAEESSTPMNALKSALYEFVKGCVRPLWEDGLLSREVHKFVVKKAVDKVLDVWAHSTEINVPRILSDEAEGIRTLVKDYLKIYVGSEALRKSIPTSS

SEQ ID NO: 50997 - protein, 328 aa, Zea Mays
MAVKSSRSSDESYIEPLLCWKKEFRSSVIKIVDSSLNSSLMSADSICSIPASEYGFYFNKRMKMDEEYDHLLTNGNMKDSSTANFTTTGYVSSPERNMDGQSCMVSSTTEFLAGSHSNVNTGQPSSSSSAPSYISQSIKEAWECSLPDTNTPKPLTELISARDLCISILKRKICSAKDSELSRTSSTIDRDDNLNNPLFECTKCGLMEDPSKMLICDCCEGAFHLLCCNPHVKKIPEEEWYCLACKRKKPKRQRGKFANPKVESSKGIQRPRRGLGPIRDMLLDSESYESGVRIGTKFQAEVPKWSGPISSSRIRKPVSVTGSSAGKF

SEQ ID NO: 50998 - protein, 417 aa, Zea Mays
MAVKSSRSSDESYIEPLLCWKKEFRSSVIKIVDSSLNSSLMSADSICSIPASEYGFYFNKRMKMDEEYDHLLTNGNMKDSSTANFTTTGYVSSPERNMDGQSCMVSSTTEFLAGSHSNVNTGQPSSSSSAPSYISQSIKEAWECSLPDTNTPKPLTELISARDLCISILKRKICSAKDSELSRTSSTIDRDDNLNNPLFECTKCGLMEDPSKMLICDCCEGAFHLLCCNPHVKKIPEEEWYCLACKRKKPKRQRGKFANPKVESSKGIQRPRRGLGPIRDMLLDSESYESGVRIGTKFQAEVPKWSGPISREDEFAEPTELDRSKTTMLSFEDKKTSIGNWIQCREVLDTGVVCGKWRRAPLFVVQSSDWDCSCSVVWDPIHADCAVPQELETVKVHEQLKYINKLKNRLGDSNQKR

SEQ ID NO: 50999 - protein, 418 aa, Zea Mays
MAVKSSRSSDESYIEPLLCWKKEFRSSVIKIVDSSLNSSLMSADSICSIPASEYGFYFNKRMKMDEEYDHLLTNGNMKDSSTANFTTTGYVSSPERNMDGQSCMVSSTTEFLAGSHSNVNTGQPSSSSSAPSYISQSIKEAWECSLPDTNTPKPLTELISARDLCISILKRKICSAKDSELSRTSSTIDRDDNLNNPLFECTKCGLMEDPSKMLICDCCEGAFHLLCCNPHVKKIPEEEWYCLACKRKKPKRQRGKFANPKVESSKGIQRPRRGLGPIRDMLLDSESYESGVRIGTKFQAEVPKWSGPISSREDEFAEPTELDRSKTTMLSFEDKKTSIGNWIQCREVLDTGVVCGKWRRAPLFVVQSSDWDCSCSVVWDPIHADCAVPQELETVKVHEQLKYINKLKNRLGDSNQKR

SEQ ID NO: 51000 - protein, 968 aa, Zea Mays
MDHDDTDFQSQNFQLAGVGSSKFPSGLRPFALPKLDIEDQLQGHLRFDNLIDSEAFFSVQGHENSWIEVLSTGSSVVDFSSSAAESCSISKTNNVWSEATSTESVEMLLKSVGGNETTGNMDSNAHLQLIGMDSQTDQSSVHPKSSTSPTDSTVVPTEKDQSWSTHSRMTADLSNTESQLEHFVPFLLDKKAAQAADSVAEKCLTGEKLSSSNNTPGSCPTVGNYFGAGHDDNSLDKFNVPSAEVDSKKLNNESFPELAPLQNIYTDSYHFKKDIKESEAVVTPQDSKFCHINENKVEGGLQELQNLSCAGQSLGAVNLSSPPSNETLLSKSSDGLLEAITNPVKMLHRSDDTCHKVNITLQPSFLAVQHGTEGLKSSVHRSNELVVKEFSIGSNSLISHQSEADPRNSNPHPVSSVSPKSKITDATCVPEETNNTETNSTNTCYTYDESKHVVLEYNQGSVDKLKSGDMGEKATGEEIPAVSGSIEQMIENYHEENATGTSNNKVGLSDSIAPENCAADTLNASEEPNSPSLNHERSFEEHELPALGEEPKSTNLLLSTSGFQEKISASVISSSSGVMPTIVTDNVATSEDNNGCSIGVSSVDSSVLLDEKDLRTSTVNNEEPFKEGTKSALGDQENDGISPGSEQGGEMPAVPMDSNIAVYSDTVSATEKEKYKDHPNSLGSLTTGGTQDKSGNHPDALSLKCQTGRSSIHTDLIDPTTAPMLGIPTGKVAEKIVKTPLNASDDLNAHMQDIVLNHGTDCSPGTVTSQGKEGSSLLEPGNGICTGVTCGSPSVISCAESFPQGGGNGSNDLLDHTLCGQSEDPKDRGASADATQRSKQCCTRNMKSAPGSEETSAAGGDRSFSFETVTENLQAGSSLKDTSDDSKKTSTIDACKEQLSERKVAESSGGSPPDNSNIGGSIKSRSSPPQQHPIPECSVSSADLVNFPFTEAQHLQLRAQIFVYGALM

SEQ ID NO: 51001 - protein, 833 aa, Zea Mays
MDANVVQRCLEAGGRDFLFHHTSSPPSPTSASAAASSSILQSLPLHVSFDRGYYLLVKAIQELRARKDGHVVTVGIGGPTGSGKTSLAEKVASVLGCVVIVSMEDYRTAPGVDDGISDVNAVDFDALARNLQDLVKGKDTMVPLVDFQEKKRTGWRELRISSSGVVIVDGAYALHSTLRSLLDIRVAVVGGVHFSLLSKVQHDIGDSCSLDYLIDSIFPLFRKHIEPDLHHAQIRIDNSFVCSFREPYYKLKCKNESSDGKKLYSFEQNKVETENFIEMYLRPPFASEEMKIDDWIKVRQCGIRYYLSLGDQRIVDKYFIIRPKAEFEVGRTTLGGLLALGYNVVVSFKRTCTSVNIDQLLIAAETIDTLNETFLVLKGPSRKIVAAEASKLGIKGPWITKSYLEMILESKGVPRLNTPPPVSSKLLTESQEKKIAAPKPIRVSAENITNLDDLMQPWTRSPPKKLEQEHVLAKWQFISDSSSRSNIQLAPLPDSYDLDRGLLLSVQAIQALLENRGYPIIVGIGGPSGSGKTSLAQKMANIIGCEVVSLESYYKPEQVRDYKYDDYSSLDIALLTEVIFEGVYTLHPAIRKFLDLWIAVVGGVHSHLIARIQRDKNRAGFSISQTEIMTTVFPLFQQYIEPHLVHAHLKIQNDFDPVLSPESSLFVLKSKKQVSCQDILKVLDASKVCSSVQNFTDVYLRLPGIPSNAQLTEGECIRVRICEGRFALLIREPIREGNFIIQPKVDFDISASTVAGLLKLGYQAVAYIEASAVIYQDGKVIMFLNQCSSFFYLEKRMHTCLPLNGQSLFYFCKSLPTPVLLCHYCLLVQRFIL

SEQ ID NO: 51002 - protein, 108 aa, Zea Mays
MNLLAMATMSAASHRCCASSLRALTVLFVLAAPVSDVEGRHHRHVCPYFSCGGLSNISYPFRRQGDPSGCGVQSCELVCTDTDATIRIGSGTYKSAAFMRLPSHDSFG

SEQ ID NO: 51003 - protein, 538 aa, Zea Mays
MATMSAASHRCCASSLRALTVLFVLAAPVSDVEGRHHRHVCPYFSCGGLSNISYPFRRQGDPSGCGVQSCELVCTDTDATIRIGSGTYKPIENNDIYEPVSCLSSSSFIYMVTDFLYDGYVPADSLQPSCGYLAMTPLGSPGMPVPKNTSYPDVVKFMRNGFALGFTVSIPDPNIRECFAEFMRFVLMPLAVFIFLVYKYWKTRITVDAVEKFLQMQQMLVPMRYAYTNIIAITGHFRDKLGQGGYGSVYKGVLQPGEVHVAIKMLGNSNCNGDEFISEVATIGKIHHVNIVRLIGFCSEENSRALIYEFMPHGSLDKYIFSSEKSFSWDKLNEIALGIARGLNYLHHGCDMQIVHFDIKPHNILLDNNFVPKVADFGLAKLFPKDDNFVPLSAMRGTIGYIAPEMVSRSFGVISSKSDVYSFGMLLLEMTGGRRNADPHAGSSSQAYYPSLVYSQLSQGDANEISEGVDMHELEKKLCIIGLWCIQMKPQDRPTMSEVIEMFEAGVDGIQMPPRPFFCDDEGDSSYSAISKLDTIEE

SEQ ID NO: 51004 - protein, 351 aa, Zea Mays
MPLAVFIFLVYKYWKTRITVDAVEKFLQMQQMLVPMRYAYTNIIAITGHFRDKLGQGGYGSVYKGVLQPGEVHVAIKMLGNSNCNGDEFISEVATIGKIHHVNIVRLIGFCSEENSRALIYEFMPHGSLDKYIFSSEKSFSWDKLNEIALGIARGLNYLHHGCDMQIVHFDIKPHNILLDNNFVPKVADFGLAKLFPKDDNFVPLSAMRGTIGYIAPEMVSRSFGVISSKSDVYSFGMLLLEMTGGRRNADPHAGSSSQAYYPSLVYSQLSQGDANEISEGVDMHELEKKLCIIGLWCIQMKPQDRPTMSEVIEMFEAGVDGIQMPPRPFFCDDEGDSSYSAISKLDTIEE

SEQ ID NO: 51005 - protein, 68 aa, Zea Mays
MTVPHSLFCQPTKRQNRFEALWAYSSWWSCRPCRGRKGGNPAKTPAASSFLPLPSSRPLSASLAKCKP

SEQ ID NO: 51006 - protein, 101 aa, Zea Mays
MAHRMDNEYDYLFKIVLIGDSGVGKSNILSRFTRNEFCLESKSTIGVEFATRTLQLIPHAKAGAGLLWQSHLSREGAGVSGEGGRLICMVRRPSIGWPRSA

SEQ ID NO: 51007 - protein, 95 aa, Zea Mays
MMVGNKSDLNHLRSVAEEDGQALAEKEGLSFLETSALEALNVEKAFQTVLSDIHQIISKKALAAQEAAGSGPPGQGTTINIADPSANTKRGCCSS

SEQ ID NO: 51008 - protein, 388 aa, Zea Mays
MRASVEEAGALLARSDSAGRRRRSPPPVQTASPRPGSLRRQSSSFREDVGHAASETYLVSRLTFTLLQYLGLGYRWMSQLLSLTIYAIVLMPGFIQVGYYYFFSSQVRRSVVYGDQPRNRLDLYIPEDNSRPCPVVAFVTGGAWIIGYKAWGALLGRRLAERGIIVACIDYRNFPQGTIGDMVHDASQGISFVCNNIASHGGDPNQIYLIGQSAGAHIAACALMEQAVKESGGNPVSWSLTQIKAYFGLSGGYNMHNLVDHFHERGLNRSIFLSIMEGEESLSRYSPEIVAKTSSAETIALLPLVVLMHGTEDYSIPSSSRLMFFFWMDNLLIDPSCNKYSLLNSCYQLLYLLCAVKLLLTSSNKLVLKQGYYCTKGKHIQISLYRTL

SEQ ID NO: 51009 - protein, 565 aa, Zea Mays
MPLSTNSMALTNLCSCPSSRAHQLQLLCFCLALSLHVPYHANSLSFSYSFFNPDDFRPEDDAQVVDGRIELLGDEFRGRARGRVWHKQPVQLWDGTTGEAASFTANFSFSIESVAGKGAASAGHGMTFFLAPYTPNLPQESYDGCLGLFDESQALNYSKFNASGDSRFVAVEFDIRKDIWDPSSQHIGIDINSMDSRGDYTVLPDGSLVDAGVMSATVVYDNRTRSLRVTLMVGSVTYTSVATVDLRSLLPEKVAVGFSAATGDEYNANHTVLSFSFASTLATKNSTSMPVTVTSSTKKATLQLGAGAAAAALLVFLLVATVALLLVRRSSRRGKKPYDDEQLTTDGDDSLDAVDDSHFESSTGPKPIPYAQLAAATKDFAAEGKLGQGGSGSVYRGHLKESGLDVAIKVFSRGASMEGRKEYRAEVTVISRLRHRNLVQLIGWCHGRRRLQLVYELVSNGSLDDHLYSTEIPDNSWIVFRRAVPSPRVGPVCRPWRHQTEQHHAGRVLQRQARRLRAGTAHRPRNEPADHDCRRWHARVPGPGVRHHRQGLPRVRRVQLRHRAA

SEQ ID NO: 51010 - protein, 359 aa, Zea Mays
MPPPPFSHYTRKWIESHFSLLKEEISSPIAAHILNFYDGGLGDDLFEAATTASGPFHATDDDVSSSTTTTPPICGYSDDAPAAAGATAYSPLPSLDATLTALLEQEQHHGLDTGDLPQINGLSEVAYYPTATDEASIGQFNQMGLPDTLAEQMLPMQMNSSASALMPLTSDYDECFTAALAEGFMGLDGAMYHPQTGAILPGCDAEASQQGFFNSASSNGLVMIGEYQKMMEGEGLTTTYDDTDSMKGAFNTNAEMQVGGNDQHLVNGCNGNPELSGLEDSTFKVVRLSPEEKKEKIHRYRKKRNERNFNKKIKYACRKTLADSRPRVRGRFAKNDELCEAAAQSGSLNYGHYEQTVSF

SEQ ID NO: 51011 - protein, 292 aa, Zea Mays
MQMIRAHITKLENKKTHLQSKLTEEEKENTVLQANLEKRKEALHKRRVALEKEVENLRDQLLKERSLRASLESGLMNMRRGQVSFPSTIDTKTKADLEEVAAVEADIMNLKQKVSDLRGQLNNQVQLSSTSLCESCNNKRSINADKLVEGEQNAALSPQIASVEAPPIVGSYSVPDMFWATNQMVQKMLYSKGEIAKDGQDGSLTSRWNFAQRPHSNSPVMSRVQGSDAYSSTKTEESGGAPSSALAKLTTRLNFLKERRALLASEMQNLDLGRSQAQRHTAPPKAETPTEK

SEQ ID NO: 51012 - protein, 297 aa, Zea Mays
MSAPEFRTSYQQSPENVGQLKVCQCGSGDSNFQITNKSDGGENSPTTCPNCQVLKSGNLLLSSKGIGWTVWKKRWFILTRTSLVFFRSDPNVPPPRGSEPIVTLGGIDLNNTASMIVKEERKLITVVFPDGRDGRTFTLKAETTEDLNEWRSALENALAQAPSVVNTAGQLPVVSTDITEPVEAAVEQSENKSVIGRPAEFALVDADGTTAFLQKALKFIEDYGVKVEGILRQSADVEEVKRRVQDYEKGKNEFSPEEDAHVIGDCIKCILREMPSSPIPAPCCTALELTRQKDSML

SEQ ID NO: 51013 - protein, 370 aa, Zea Mays
MDRKPAGKNSFRQQEKQKKNERLDWNDLVLAGPFVLHSHSQTAPSLYTAVSSRARGVRVPPLGGAGQKSLLDGWLRKPDASQVRRLIFTWVPMVRFHSANHLPAFSQYSLLEPMEVQLATEQPGDPFLPLRWESTGDQWWYATPIDWAAANGHYDLVRELLRLDPNLLVKLTSLRRIRRLESVWDDDARLDAAARNRAAVARRLLLDCEPDNDKQPPSRGGGGDAANRLLRAGYGGWLLYTAAAAGDERFARELLAAQPLLVFGEGEYGVTDILYAGARSGRPEVFRLLFDAVLSAAPACPVGGDDGEFRREMMNRAVHAAARGGSLAVLRDLLRGCSDAAAYRDAQGSTILHAAAAKGQVESWLELHGI

SEQ ID NO: 51014 - protein, 78 aa, Zea Mays
MTELIEVISEENKSGPLIVLLKDVEKSFIGVTESLSSSRSKFESLPSGVLIIGSHTQMDSRKEKRGRIRTQRKEVKRG

SEQ ID NO: 51015 - protein, 108 aa, Zea Mays
MSAPPHVSYTALPPPPPAPTATSFSQLPPLPDVVGGCRVKAGAKPPGPGANPPDPFAALIVPTLVRVARTSFPPLEIRCLIHFSSYPCPQHAVPKTSLQSSTCKSSRR

SEQ ID NO: 51016 - protein, 937 aa, Zea Mays
MWEVRVVSAGGLRWLLLNCSAFGFWRAWGGTCTRPLHVIVAEPELTSNVHELKARVATFQFWENVAIELCSMGGIAECGVSIDTKASPRRAAIEKAQEELRQEYDVREERRRELEFLEKGGNPLDFKLGHVASLSVQSTSVTEQIAEQNVISEAKGSSAFATSSHGDSVESNDKPGNSLCREGNTADNLTLLDGDASNLGVDKIVKHGTKRTNSAQAEQFLHCDGQNNAKEEDSGLFRLGPKSQAYARRRSKPIRENAYSLSVMYPPIPPLSSQQKDVTGLIPETKTEDNGVSSIGDSKPTSPNSKNMVTNASLLNDKVEMETENVQAIPEGNQAPKNELSNSNNGSPAMEISPNSVPDNSRLTVSDQMATAFVSVESPDAISKVAASRIVCSLPYISNEILKEAQTLEKAGNNPSMVSVVDVHAYGMDNNGAAPYSAVKSASLNENEVDPIHAYAAKAVTEHPDQNENLVPVNADEMADEGLNEILPDDKDDKKDCQLEVSSGPVILNDSSTPVYPEFSNFFYAKDGTEVSNNAVDSKNNAEQHASSNQGKGNMEECKDSDGNNASESSVAQKLVSVIVLPASDTGDVSNFVENDVEKSSRDQEKVAKKEYEDSVVAKKDHEDAILRRARYIEANIKRAGEWSLCNISLEKKQKSHWDFVLEEMVWMANDFTQERLWKNTVAAQMSHWISSRGRAAFEEASIQRKQKSVARVLANGIMNFWCSVHTLRASGGIPKPMQIQQPNELEENKLGGVKTRKADEECLEQEKSRQSPIQSFALRLLEYNINASEFLPLAEAPSTPDRLNDFGILKVPDQLSEANLFYGVAPGAMQAYRESMERLLIYNNKMPAGHSGPGSPWSSFEDQALVVLVHDMGENWELVSDALNSIIQLKCIYRRPNECKERHKLLTDKSCGDGADSADDSGSSQHYPSALPGIPK

SEQ ID NO: 51017 - protein, 85 aa, Zea Mays
MTPSHSARCFDVNEHTFPLLDDSQLVPTLCCHQECGCLLVHTVARINSFASNPACILMWDILIISDQGPVCFLPGLLVIKALFDK

SEQ ID NO: 51018 - protein, 919 aa, Zea Mays
MQLLFIFSDSFKLGCYVCSSEKPTAAVDALVFDPPSLRESSNARPAPCCTGNSSIVHVELSVKLRLLVALYSGCRIALCTIGKKGLRQPGSTRVERWLDTDDAMCTSVASEQQILAVGCSRGVVELYDLAENTRHIRTISLYDWGYSVEDTGPVACISWTPDNCALAVGWKFRGLTVWSVSGCRLMCTIRQTGSNSASSPMVKPSALKFEPLMGGTSHIQWDDNGYKLFAVEESLSERVLAFSFAKCCPNRGLSGTTYSHQVLYGEDRILLVQPDDADELKILHLNVPNWPVLHVVASNDGMYLAVAGSHGLVLYDLRNKRWRFFGDVTQEQKIQCKGLLWMRKIVIVCNYVESSNTYELLFFPRYHLDYSSLLYRKQLLGRPIVMDVFQDYILVTYSPFDVHIYHVVVSGELSPASNPVLKLSTLRELSIMSPKSPPVSMRFIPEQNDKGALTEDTHGFSDLLSQQPSRCLILRTNGELSVLDMDDGHEHTLTNSIELFWVTCSQFEEKGSLIKEVSWLDYGHRGMQVWYPSHGADRFKQEDFLQLDPELEFDREVYPLGLLPNVGVVVGVSQRMSFSTAEFPCFEPSPQAQTILHCLLRHLLQRDKIEEALLLANLSAEKPHFSHCLEWLLFTVFDADISRPSASKNQASQKVDSPKKSLLEKTCDLLRNFPEYMDVVVSVARKTDGRHWADLFSAAGRSTEMFEECFQQRWYRTAACYILVIAKLEGPAVSQYCALRLLQATLDESLYELAGELVRFLLRSGRDFENATSDSEKLSPRFLGYFLFRSPYKRQSSDLKSNSTKELSPHIASVMNILERHASYLMSGKELSKLVAFVKGTQFDLVEYLQRERQGSARLENFASALELIGQKLQMDTLQSRLDAEFLLAHMCSVKFKEWIVVLATLLRRTEVSLTWSQS

SEQ ID NO: 51019 - protein, 751 aa, Zea Mays
MYLAYGWPQSIPLDPDDSDRVVLLRVLGRLLLAVCPASLHLWSAAQHRVRLARSDRSPESLATHGHNAHAAWSPDARTVAVLTSSFYLYVYKVQHSGKQLIVGGKQVPGLCLASISLIITEKVPLANGVAITSNFVCDSKSMLLGLSNGHVQVVSWNAEFSDSFKLGCYVCSSEKPTAAVDALVFDPPSLRESSNARPAPCCTGNSSIVHVELSVKLRLLVALYSGCRIALCTIGKKGLRQPGSTRVERWLDTDDAMCTSVASEQQILAVGCSRGVVELYDLAENTRHIRTISLYDWGYSVEDTGPVACISWTPDNCALAVGWKFRGLTVWSVSGCRLMCTIRQTGSNSASSPMVKPSALKFEPLMGGTSHIQWDDNGYKLFAVEESLSERVLAFSFAKCCPNRGLSGTTYSHQVLYGEDRILLVQPDDADELKILHLNVPISYISQNWPVLHVVASNDGMYLAVAGSHGLVLYDLRNKRWRFFGDVTQEQKIQCKGLLWMRKIVIVCNYVESSNTYELLFFPRYHLDYSSLLYRKQLLGRPIVMDVFQDYILVTYSPFDVHIYHVVVSGELSPASNPVLKLSTLRELSIMSPKSPPVSMRFIPEQNDKGALTEDTHGFSDLLSQQPSSLKRRVVLSRRFHGLITVIGVCRCGTHHMEQIVLSKRIFCSWTRSLSLIVRCILLVFFQMLVWLLVFLRECPSQLRSFHALSLHLKPKQYCIVYYDISFRGTRLKRLCSWQICPQKNLISLTV

SEQ ID NO: 51020 - protein, 601 aa, Zea Mays
MMSSGSSGISSEPKRHLLTTGWSVFVSAKRLVAGDSVLFIWNEKNQLLLGIRRASRPQTVMPSSVLSSDSMHIGLLAAAAHAAATNSRFTIFFNPRASPSEFVIPLSKYIKAVFHTRISVGMRFRMLFETEESSVRRYMGTITEVSDADPVRWPSSYWRSVKVGWDESTAGERPPRVSLWEIEPLTTFPMYPSLFPLRVKHPWYSGVAALHDDSNALMWLRGVAGEGGFQSLNFQSPGVGSWGQQRLHPSLLSNDHDQYQAVVAAAAASQSDGYLKQQFLHLQQPMQSPQEQCNLNPLLQQQILQQGSQQQMVSPDAQNIQSVLNPNAIQQQLQQFQQMQHAHNDQKQKIQPDQPYQVPSSAVLSSPTSLPSHLREKFGFSDPNVNSSSFISSSSNENMLESNFLQGSSKSVDLSRFNQPVVSEQQQQQAWKQKFICSQSMSFGGSVSLNSPTTKDGPVDNKIGRDVQNQTLFSPQVDSSSLLYNMVPNLTSNVADNNISTIPSGSTYLQSPMYGCLDDSSGLLQNTGENDPTTRTFVKDRWGDPWTSPGSLIMLNFERNWVRCSALRVSWMTLIDQAGSLYLSTGRTMCFSLETTRGSHL

SEQ ID NO: 51021 - protein, 430 aa, Zea Mays
MVFRSCCSSCNALMWLRGVAGEGGFQSLNFQSPGVGSWGQQRLHPSLLSNDHDQYQAVVAAAAASQSDGYLKQQFLHLQQPMQSPQEQCNLNPLLQQQILQQGSQQQMVSPDAQNIQSVLNPNAIQQQLQQFQQMQHAHNDQKQKIQPDQPYQVPSSAVLSSPTSLPSHLREKFGFSDPNVNSSSFISSSSNENMLESNFLQGSSKSVDLSRFNQPVVSEQQQQQAWKQKFICSQSMSFGGSVSLNSPTTKDGPVDNKIGRDVQNQTLFSPQVDSSSLLYNMVPNLTSNVADNNISTIPSGSTYLQSPMYGCLDDSSGLLQNTGENDPTTRTFVKVYKSGSVGRSLDITRFSNYAELREELGQMFGIKGQLDDPDRSGWQLVFVDRENDVLLLGDDPWESFVNSVWYIKILSPEDVHKMGKPGNDPRYLS

SEQ ID NO: 51022 - protein, 204 aa, Zea Mays
MAASLGLAHETSYAAYHPPSAPASSYFPPLPPPDLLVADLPPPAAATMADDYFQFGFDGQEMVGAPAPACGGYDCSAPVFANSSSDAAAAVGNGMSLLSYGVDGDGDGRRPMSGPPYGTGGNGGGRPPSSSRIGFRTRSEVDVLDDGFKWRKYGKKTVKSSPNPRYKSEYNTPTLARRRRRSLRHFKFPHSMELLPVLGGGLRR

SEQ ID NO: 51023 - protein, 301 aa, Zea Mays
MGRMMLVLAGQLRIVWSSCHSSRFGRHAFQGTVKLLFQPAEESGCGAKRMIEDGALEGVEAIFAVHVSHQHPTSVVGSRTGALLAGCGFFKAVIRGGGGGGDRASDPVVLAAASTVISLQGIVSREADPLDSQVVSVAVVNGGSEQAQPQEQELVLGGTFRAFSNASFYQLRRRIEEVVTPPSPRGSSPNTTPSWAWPPPTTRTPRPSAVGTAWGVWPRRSVGTAGMVAECGLGLLFRFCGRWALGGPTCPRADVPTVQVFFPSVFRLGEQGKEPCCAGAVMLMQIVGCSTYVFLSLFGMS

SEQ ID NO: 51024 - protein, 725 aa, Zea Mays
MRLPPVRFLPSSSTPAVVDANARIARLARTGNMEGARATFEAMPLRTTASYNALLAGYFRNHLPDAALRVFHRMPTRDLASYNALISGLSLRRHTLPDAAAALATIPYPPSVVSFTSLLRGYVRHGLLADAIQLFRQMPERNHISYTVLLGGFLDAGRVDEARKLFDEMPAKDVVAWTAMLSGYCQVGRVDEARTLFDEMPKRNVVSWTAMVSGYAQNGQVNLARKLFEVMPERNEVSWTAMLFGYIQAGRIEDAEELFNAMPDHPLAACNGMIVGFGQQGMVDAAKSVFDRMCERDDGTWSAIIKAYEQNEFLMEALSTFREMLHIGIRPNYPSVISILTVCAALAVLDYGREVHGAMLRRSFDMDIYAVSALITMYIKCGNLDKAKRVFHMFEPKDVVMWNSMITGYAQHGLGEEALHIFDDMRLAGMVPDGITYIGALTACSYTGKVKEGRDIFNSMRTKSGIKPGLEHYACMVDLLGRAGLVDEALYLIKTMPVEPDAVIWGALMGACRMHKNAEIAEISAKKLLELEPGNAGPYVLLSHIYTSSGRWEDASNMRKFISSRHLNKSLGCSWIEYDKRVHLFKSGDVLAHQEHASILKMLEKLDGLLMESGYSADGSFVLHDIDDEQKTHSLRYHSERQAVAYGLLKIPEELPIRVMKNLRVCGTIGEVNAVVNSLLHIISLMSLSFGDTWRIIFPLKMRYIQDQHMVNCKSCCNTEPLIST

SEQ ID NO: 51025 - protein, 551 aa, Zea Mays
MVVTLNAYNVLAARCAAEYLEMSETVEKGNLVYKIDVFLSASIFRAWKDSIIVLQSTRPLQRWTDSLKVVNHCVDAIASRASTDPSEVDWSYTYSRRKLPSETDGDARGWNGVRKRQAVPRDWWVEDLCDLEVCLYRKVILAIKAKGRTGGAVVGEALRAYACRRLFGSLDHAVSDGLDCTKHRAALEAVADLLPAEKGSVSCGLLLKLLRASCLLESGQAYRGELIRRIGAQLERASVPDLLIPADSGDGDGDATYNVGMVAAMLEEFLLHHKVNGAEAEKREDGEDDVDVAADDPVTSSKLAAVAKLVDGYLSEIAKDPCLPLETFVALAESMPPLSRPVHDALYRAIDVYLKEHPGLSKGEKKRLCALMDCRKLTADASEHAVQNERLPLRVVVQVLFFEQVRQSAAAAAASAAPARSLILPRDDGASYGSSRSATTTATEDEQWGSGAVVGAPVTTSTSGGAGDAGSLRSMSQLSANENGRSGGGGDRKKAKGGAVAPAPVKRVLGKLWSGKASSGGSDDTSASPVGSLNLEETKSMSSQITRHSVS

SEQ ID NO: 51026 - protein, 69 aa, Zea Mays
MSRDRETGKGACIVETDSQVMQVEEEQIEPLREQVAALCNFLRLPREYSQLACSYAYYFLNIVSSMRHA

SEQ ID NO: 51027 - protein, 266 aa, Zea Mays
MPGDAYDLLCAEDDAAGSALLCTTDDDDGCCSAVEDDSAAAAAASIAELIGGEAQYSPRPDYPDRLRSRSIDPAARAESVAWILKVQEYYGFLPLTAYLAVNYMDRFLSLHRLPEDGWAMQLLAVTCLSLAAKMEETLVPSLLDLQVEGTSRYDCFEPGTVGQMELLVLMALNWRLRSVTPFTFVDFFACKVDPGGRHTRCLIARATQVILAAMHDVEFLDHCPSSMAAAAVLCAIGETPSLESVSPGAAVSWCIGLAEGSAAATD

SEQ ID NO: 51028 - protein, 1180 aa, Zea Mays
MAATLKIVVGSHIWLEDKDLVWIDGEVFRTEGQNVHVHTTNGKTVTVSISDIHPKDTEVPSDGIDDMTRLSYLHEPGVLNNLAVRYAKNIIYTYTGNILIAINPFQSLPHLSEPRTMEKYKGANFGELDPHVFAIADVSYRQMMNEGKSNSILVSGESGAGKTETTKMLMRYLAFLGGRSKTGGRTVEQQVLESNPVLEAFGNAKTVRNNNSSRFGKFVEIQFDKSGKISGAAIRTYLLERSRVCQINSPERNYHCFYFLCAAPLEDIKSYKLGDPSSFHYLNQSTCIKLDEISDAKEYLATRSAMNTVGITEQEQEAIFRVVAAVLHLGNISFVKGREADSSVIKDEKARFHLNATAELLMCDCGNLENALIKRKINTPEGVITTTVDPNSATVSRDGLAKQIYSQLFDWLVNRLNASIGHDTSSDRLIGVLDIYGFESFKTNSFEQLCINFTNEKLQQHFNQNVFKMEQEEYNREQIDWSYIEFVDNQDVLDLIEKKPGGIIALLDEACMFPKCTHESFSQKLYEKFRNNKRFCKPKLSRTAFTIQHYAGEVTYQSDQFLDKNRDYVVVEHQELLNASKCSFVSGLFPSVLENTKASKSSIATRFKWQLQELMETLSSTEPHYIRCIKPNNHLKPATFENINVLQQLRCSGVLEAIRISCAGYPTRKIFHDFLCRFCILAPEVFTERNNEKLICQKILDNIGLHGYQIGRTKVFLRAGQMAELDARRTEVRNKAAITVQSRFRTHVAREQFLALRMTSISFQSFVRVILASITLQTGLRAFGAYNEYIIRKQNKASICVQACWRCHRDHLNYLKMKRSVLIYQCAWRRRIAREELRKLKMAARDTEALKVEKEKLEEHVEELTSRLSFEKNLRIDLEKSKAREICKLQATLREMEQRVEEAIEMHERELAKKAIEEALAQEREKITVLTNEVDELKVLLSREREENSATKSALVVVREENDVLNKKIVVADASMEQLRDTVTRLEETAATLETSLLSEKQQSTAIISQLTEAQQDIQVLQKKFADANKTIELLQDSLKRCEDSTTTRDALYVAERQEHGQTKQALSKAQERNLELLRKVDDSEKTLNKMLENAQRLEKHATARESLLLKTKQNLDCTTKALTEARGRNRDLLTSFEDSAKKINMLEDSLNRERLFVGSRKKTKQNDQRRTGQCPENNR

SEQ ID NO: 51029 - protein, 1241 aa, Zea Mays
MAATLKIVVGSHIWLEDKDLVWIDGEVFRTEGQNVHVHTTNGKTVTVSISDIHPKDTEVPSDGIDDMTRLSYLHEPGVLNNLAVRYAKNIIYTYTGNILIAINPFQSLPHLSEPRTMEKYKGANFGELDPHVFAIADVSYRQMMNEGKSNSILVSGESGAGKTETTKMLMRYLAFLGGRSKTGGRTVEQQVLESNPVLEAFGNAKTVRNNNSSRFGKFVEIQFDKSGKISGAAIRTYLLERSRVCQINSPERNYHCFYFLCAAPLEDIKSYKLGDPSSFHYLNQSTCIKLDEISDAKEYLATRSAMNTVGITEQEQEAIFRVVAAVLHLGNISFVKGREADSSVIKDEKARFHLNATAELLMCDCGNLENALIKRKINTPEGVITTTVDPNSATVSRDGLAKQIYSQLFDWLVNRLNASIGHDTSSDRLIGVLDIYGFESFKTNSFEQLCINFTNEKLQQHFNQNVFKMEQEEYNREQIDWSYIEFVDNQDVLDLIEKKPGGIIALLDEACMFPKCTHESFSQKLYEKFRNNKRFCKPKLSRTAFTIQHYAGEVTYQSDQFLDKNRDYVVVEHQELLNASKCSFVSGLFPSVLENTKASKSSIATRFKWQLQELMETLSSTEPHYIRCIKPNNHLKPATFENINVLQQLRCSGVLEAIRISCAGYPTRKIFHDFLCRFCILAPEVFTERNNEKLICQKILDNIGLHGYQIGRTKVFLRAGQMAELDARRTEVRNKAAITVQSRFRTHVAREQFLALRMTSISFQSFVRVILASITLQTGLRAFGAYNEYIIRKQNKASICVQACWRCHRDHLNYLKMKRSVLIYQCAWRRRIAREELRKLKMAARDTEALKVEKEKLEEHVEELTSRLSFEKNLRIDLEKSKAREICKLQATLREMEQRVEEAIEMHERELAKKAIEEALAQEREKITVLTNEVDELKVLLSREREENSATKSALVVVREENDVLNKKIVVADASMEQLRDTVTRLQESLIEGEATLLAERKESDAAKKSLTEAHVKNEELFNKIEVAEHNVSIFQDDIQRLEETAATLETSLLSEKQQSTAIISQLTEAQQDIQVLQKKFADANKTIELLQDSLKRCEDSTTTRDALYVAERQEHGQTKQALSKAQERNLELLRKVDDSEKTLNKMLENAQRLEKHATARESLLLKTKQNLDCTTKALTEARGRNRDLLTSFEDSAKKINMLEDSLNRRMHSRERLFVGSRKKTKQNDQRRTGQCPENNR

SEQ ID NO: 51030 - protein, 1632 aa, Zea Mays
MAATLKIVVGSHIWLEDKDLVWIDGEVFRTEGQNVHVHTTNGKTVTVSISDIHPKDTEVPSDGIDDMTRLSYLHEPGVLNNLAVRYAKNIIYTYTGNILIAINPFQSLPHLSEPRTMEKYKGANFGELDPHVFAIADVSYRQMMNEGKSNSILVSGESGAGKTETTKMLMRYLAFLGGRSKTGGRTVEQQVLESNPVLEAFGNAKTVRNNNSSRFGKFVEIQFDKSGKISGAAIRTYLLERSRVCQINSPERNYHCFYFLCAAPLEDIKSYKLGDPSSFHYLNQSTCIKLDEISDAKEYLATRSAMNTVGITEQEQEAIFRVVAAVLHLGNISFVKGREADSSVIKDEKARFHLNATAELLMCDCGNLENALIKRKINTPEGVITTTVDPNSATVSRDGLAKQIYSQLFDWLVNRLNASIGHDTSSDRLIGVLDIYGFESFKTNSFEQLCINFTNEKLQQHFNQNVFKMEQEEYNREQIDWSYIEFVDNQDVLDLIEKKPGGIIALLDEACMFPKCTHESFSQKLYEKFRNNKRFCKPKLSRTAFTIQHYAGEVTYQSDQFLDKNRDYVVVEHQELLNASKCSFVSGLFPSVLENTKASKSSIATRFKWQLQELMETLSSTEPHYIRCIKPNNHLKPATFENINVLQQLRCSGVLEAIRISCAGYPTRKIFHDFLCRFCILAPEVFTERNNEKLICQKILDNIGLHGYQIGRTKVFLRAGQMAELDARRTEVRNKAAITVQSRFRTHVAREQFLALRMTSISFQSFVRVILASITLQTGLRAFGAYNEYIIRKQNKASICVQACWRCHRDHLNYLKMKRSVLIYQCAWRRRIAREELRKLKMAARDTEALKVEKEKLEEHVEELTSRLSFEKNLRIDLEKSKAREICKLQATLREMEQRVEEAIEMHERELAKKAIEEALAQEREKITVLTNEVDELKVLLSREREENSATKSALVVVREENDVLNKKIVVADASMEQLRDTVTRVEELMRQIANAKGKSTELQIAVQRLQESLIEGEATLLAERKESDAAKKSLTEAHVKNEELFNKIEVAEHNVSIFQDDIQRLEETAATLETSLLSEKQQSTAIISQLTEAQQDIQVLQKKFADANKTIELLQDSLKRCEDSTTTRDALYVAERQEHGQTKQALSKAQERNLELLRKVDDSEKTLNKMLENAQRLEKHATARESLLLKTKQNLDCTTKALTEARGRNRDLLTSFEDSAKKINMLEDSLNRLEECTAEKDSLLAVERKQNKTTKEELANAQKTIDELVHESQQSQEIRNQLEDTIKRFKAESTARDTILLSEKQAHETTKKVLTEIQSRNEELIKKIQDCDKNILELQLTVERLQENTSTTEALLLREREQNNATMKAQAETQEINLQLLNKLEDVETKIGLLQGSVQRLGDNTAKDTLLLSEKREKDALKEALTESEYKNEELLIKTEEANKKVEHLQNTINSLKENMAASLEAERQENEAIKRSLVEAQERNDALFKKVRDSEYRAHQLQDTVQKLQVDAISRLSSFVMERQDGDGVKNAHTEVHGTNEDLMRRNENLLKRNDDLVKKIEDSAILVTELRGNLERLEGKAANLEAENQLLRQQAIATPPSTAKSSQAACSKIKMSRKWSYFKWQRSIC

SEQ ID NO: 51031 - protein, 335 aa, Zea Mays
MFYLQGVVLFPEASLHLRVFQPRLVEAIDKAINHVDAPCMIGVVYVYRHTNDGHYTIASVGTMAEILKIQQLYDGSSCIFSHGQQRFRLLRHWLDVDGVPWGEVQIIEEDTPQRTPRDAFAQLAAPNSFRQCASSIMPSLHVYCSTQLDHVDSDMDRDSLSPTSTSSDHSITDKRIYLLGSRSSGLVRCGIADESSNEGQNSVHEQSCQSHDSVKEIDGYGQPDKNTNTGDEDNLCFISSKSFQRTRKKDTKQQKHYFTTKNASQAPLSFWPHWAYEMYDSYSLSRRAADLWRQVILNPSMDDHVRKPNYLSYCIGSKLPISESLRQELLEIDGV

SEQ ID NO: 51032 - protein, 369 aa, Zea Mays
MAERDRVLERERRQMEQILELDMEELQVEEVDDDGSSSSSDVDTFLRNTHGDGGINTYEELSIDTSTVSLQDHTYLGAKVDGARGKFAFLHGDRVLNLPMFYLQGVVLFPEASLHLRVFQPRLVEAIDKAINHVDAPCMIGVVYVYRHTNDGHYTIASVGTMAEILKIQQLYDGSSCIFSHGQQRFRLLRHWLDVDGVPWGEVQIIEEDTPQRTPRDAFAQLAAPNSFRDSLSPTSTSSDHSITDKRIYLLGSRSSGLVRCGIADESSNEGQNSVHEQSCQSHDSVKEIDGYGQPDKNTNTGDEDNLCFISSKSFQRTRKKDTKQQKHYFTTKNASQAPLSFWPHWAYEMYDSYSLSRRAAGKLYIFIL

SEQ ID NO: 51033 - protein, 592 aa, Zea Mays
MVQCTQPPPQLKLPESKITEPTDDENQDLPPKPEKRTRMHHIERHRSCVVTLSDIELNGLQPRHLHQPIEISPGGSQCSLHEETPTDTNASHRHAIADAAWEALKRSMVYFRGQPIGTVAAIDKSQGAALNYDQVFMRDFIPSALAFLMKGEHLIVKNFLVETARLQSREKMVDLFKLGQGVMPASFKVHHRNPTQKTESLLADFGETAIGRVAPVDSGLWWIILLRAYTKWTGDNSLAESTNCQRAMHLILRLCLSEGCDTSPALLCADGCSMIDRRMGIYGYPIEIQALFFMAMRCALSLLKQESDADFVNHITKRIQALSYHLHSYYWLDFQRLNDIYRYKTEEYSQTALNKFNVMPESIPDWIFDFMPSRGGYFIGNVSPARMDFRWFCLGNFIAILSSLATGEQAEAILDLVEERWQELIGEMPLKICYPAMENQEWQIVTGCDPKNTRWSYHNGGSWPEARRRKWLEDYPEATSTDDAVVFDTSIIPWWAWMKRFHLPEAEKLNGRAAMVGFFMAYFVDSLTGVGLVDQMGNFFCKTLLFVAVAGVLLVRKNEDVESLKKLIDETTFYDRQWQATWQDDPTEGPKN

SEQ ID NO: 51034 - protein, 118 aa, Zea Mays
MIILGFHKNNVLFPNLLPIYRFCFVKNHPEKCLLCDQAAETFFLERAGELHIIILREERSKVDRNTTPRGQKRKNEKTDQDQTLKLQKLWTIFLWLAPSQESSGISFSGNLGCTPLPL

SEQ ID NO: 51035 - protein, 373 aa, Zea Mays
MLLLESTSLLLCVDLLFIEAIPSHSTRRAIFDHYVRTRAEEERKEKRAALKAAVEAYKELLEEASEDINQKTDYQEFKRKWGADTRFEALDRKEREILFSEKVKAVQEKVQSMRKAVIANFKSMLRESKDITSTSRWAKVKENFRSDPRYKAMKHEERETIFNEYIVELKSAEQEAEQAAKAKVDEQAKLKERERETRKRKEREEQEMERVKMKIRRKEAVSSYQALLVEMIKDPKASWTESKPKLEKDPQGRARNPDLGQGDAEKLFRDHVKDLYERCVRDFRALLSEVITPEVAARTTAEGKTAINSWSEAKGHLRSDLRYNKLPSKDKESIWRRYADDLTRKLRQSDTKEKDKSDTDGKQPRSSDPPRRR

SEQ ID NO: 51036 - protein, 360 aa, Zea Mays
MRKLIIAVILCIIFMTVEVVGGIKANSLAILTDAAHLLSDVAAFAISLFSLWAAGWEATPQQSYGFFRIEILGALVSIQLIWLLAGILVYEAIVRLINESGDVQGSLMFAVSAFGLFVNIIMAVLLGHDHGHGHGHSHGHPHDHGHGDSDDGHSHHEEPEQGHVHHHEHSHGSSITVTTHHHHHSGTGQHHDAEEPLIKHEADCEGTQSAAKKPRRNINVHSAYLHVLGDSIQSIGVMIGGAIIWYKPEWKIIDLICTLIFSVVVLFTTIRMLRNILEVLMESTPREIDATRLERGLCEMEGVVAVHELHIWAITVGKVLLACHVTVAREADADEILDKVIGYIKTEYNISHVTIQVERE

SEQ ID NO: 51037 - protein, 390 aa, Zea Mays
MWAPPAASPTGAFPSLRPSRTAVVRVLVTLPAAARPQDQPRRRLCLAVPRPAPEMASAAAEGEGEEEDVVVVEGDTGKKTAVEMDATVRRELAIRRLREEAEEEANEAGTRRRSSRRDFAVFETARGDALFTQSWTPAADDRLNGRYSHFAKLLNDQGLKVYAMDWIGHGGSDGVHGYVSSLDHAVGDLKEFLEDVVLEENHGLPCFLFGHSTGGAIVLKAALDPSVELHVEGVVLTSPAIHVQPSHPIIKVVAPIFSMLAPKYRVSALHKRGPPVSRDPEALKMKYSDPLVYTGPIRVRTGNEILRISSFLQRNLSRVTVPFLVLHGTADTITDPRASERLYQTSMSTNKSIKLYDGYLHDLLFEPERDDIANDIINWLSARLSVLQRW

SEQ ID NO: 51038 - protein, 562 aa, Zea Mays
MGCAQGKSSRGSPARSDGRGVDRLKRDNDYRPGSSVSRLSDPLPATAESVPAPAAPPTKEHARRAAAVVPGGKTPDDGNGDAAAQQATTAATPATPPLLPPHPPRREDELRLDHPNVMKLEGIATSRMHRSIYLVFDFMYSDLGRLVLRSQQRLTEPQIKCYMQQLLAGLQHCHERGILHRDIKGSNLLIDRHGVLKIGDFGLANYYGAGRRHPLTSRVVTLWYRAPELLLGSTSYGVGIDLWSAGCLLAEMFFGKPLMPGSGEVDQLLKIFRLCGSPPDDYWRKMKLSPSFKPPKPYKATTGERFRDLPPSSLGLLATLLALDPAARGTAGQALQSSFFTTPPMPCDLSSLPVVYKEEEEVDSRKPRTRQRSHRRKDGNGKRSETNSGSPPEKEAQPMQPLDITISLSGPGFQRLGLGASPLRAPLNLFQEDDELTGTANSVTDTTREHDIGQGSAAAVMTAAKASSGVHDSSSSEKTIVNGSSSTVAKQLPTARHSGSDDDDHGNIHLVPAPDEEEADGEPASGSGVNRVGPESKSSAFVSDFEAAAAALRASEELPSSN

SEQ ID NO: 51039 - protein, 673 aa, Zea Mays
MLFNAGEMLVGLARCFFMDDISTGLDSSTTFEIMKFLQQMAHLMDLTMVISLLQPPPETLELFDDIILLCEGQIVYHGPRENATDFFESMGFKCPDRKNVADFLQEVTSKMDQKQYWAGDQNKYQYHTIENFAQSFRTSYLPLLVEDKQCSSNNTGKKKVVKVNASRRISRWNIFKACFSREVLLLKRNSPVHIFKTIQITVMALVISTLFLRTKMSHDSVLDANKYMGALFMAVVIVNFNGMTEIAMTIKRLPTFYKQRELLALPGWALLCSVYLISIPISLLETGLWTCLTYYVIGYAPSIIRYSSLGTYMLNDLWCFNRRKFFQHFLVLFSMHQMSMGLYRFLAAIGRTQVMANMLGTAALIAIYILGGFVISKDDLQPWLRWGYWTSPFTYAQNAIALNEFHDKRWATEFYYNNANTVGEAILMIRGLLTEWHWYWICVAILFGYSLVFNIFSIFALEFMNSPHKHQLNIKTTKANFVNHRQMAENGNSSNDQAILPFRPLSLVFDHIHYFVDMPKKRKRMSHQEIANNGATEKKLQLLQDVSGAFRPGVLTALMGITGAGKTTLLDVLAGRKTGGYIEGTIKIAGYPKKQETFSRISGYCEQSDIHSPNLTVHESLKFSAWLRLPSNVKPHQRDVCVSTLPLFIIGVWSLVPDTIYFQMHFRCSLKKS

SEQ ID NO: 51040 - protein, 347 aa, Zea Mays
MAATAMIRITTLRCRHDPLSSLPRTTSAACSCTLPPRCRQCRLLPPHSSGCSPSSSIFPRRVRVRPTAALKRIGGGNTSFMGPANNGATTLQRSSSPDLRRSLIVLKSTAGTGGGNASSGLLPTILGVAHLLVSLGIVLATDKFLKQAFVAASIKFPSALFGMFCVFSVLVVFDTFVPALAKAFMDFFEPATLFIQRWLPLFYVPSLVVLPLAVRDVPAASGVKIFAITFGGWFATLAVAGYTALAVRKLVKTQLIPAEPMSKASPFSTVETWAWAAVFVASFGVACFNPRALGTTARTCLPFLLAATVLGYMVTIWCQESVTSNHHLRTFCRFGGSSVWVPLRVWT

SEQ ID NO: 51041 - protein, 1035 aa, Zea Mays
MEAASCCRVFSTQRCRFPLRRLSAPPWPQPFCTESSGGLVTPSASKRRSRGPVMAAKKAAEGEKQEDGKYKHTVDLPKTTFGLRANSVQREPELQKLWDDNQVLKRVSERNTGTAFVLHDGPPYANGDLHMGHALNKILKDFINRYKLLQNHKVSFVPGWDCHGLPIELKVLKSMDKETLSALTPIKLRQKAAKFAKATVDAQMKSFKRYGVWADWDNPYLTLSPEYEAAQLEVFGQMVMKGYIYRGRKPVHWSPSSRTALAEAELEYSENHISRSIYAAFKITNPSKSGMLDDFFPNVSLVIWTTTPWTIPANAAVAVNPKLIYAVAEVQSVFESESTSGGKQRKVGNILSSEKGKLFVIVASDLITTLESKWGVKLVVHKSFPGSALEHCRYAHPVNSNECSVILGGDYITTESGTGLVHTAPGHGQEDYITGLKYGLPIISPVDDEGNFTAEAGQFGGLSVLGAGNAAVVKYLDEQYSLILEEPYKHKYPYDWRSKEPTIFRATEQWFASVDGFRDAAMDAIRRVTWVPSQAQNRIVAMTSSRSDWCISRQRTWGVPIPVFYHVDSQEPLITEETIEHIKAIVLKKGSDAWWYMTTEELLPDRYRDKASEYRKGTDTMDVWFDSGSDQHRGWFQSSLLTSIATTGKAPYSSVITHGFVLDEKGFKMSKSIGNVVDPEKIIVGGKNHREEPGYGADVLRLWVSSVDYTTDVLIGPQILRQMSDMYRKLRGTMRFLLSNLHDWKPDNSVPYNDLPKIDKYALFHLETVMTSMKDSYESYQFYKVYQILQRFATVGLSNFYLDVAKDRLYVGGRVSFTRKSCQTVLMAHLLYLVRAISPIMPHLAEDVWQNLPFQYTLQDGSLANFVFDLKWPEKNEEWLSAPKDDVDFLGVILELRSEVNKILENARTGKLIGSSLDAKVYLHTESSDTVLKLKELSSASNDADALHRLFITSQVDILPILNEEITSSVPYTGKFSNPRTGVIWIGVTRADGAKCERCWNYTQDVGSFHDHPTLCVRCYGVIELQTQPAAAAVS

SEQ ID NO: 51042 - protein, 735 aa, Zea Mays
MEAASCCRVFSTQRCRFPLRRLSAPPWPQPFCTESSGGLVTPSASKRRSRGPVMAAKKAAEGEKQEDGKYKHTVDLPKTTFGLRANSVQREPELQKLWDDNQVLKRVSERNTGTAFVLHDGPPYANGDLHMGHALNKILKDFINRYKLLQNHKVSFVPGWDCHGLPIELKVLKSMDKETLSALTPIKLRQKAAKFAKATVDAQMKSFKRYGVWADWDNPYLTLSPEYEAAQLEVFGQMVMKGYIYRGRKPVHWSPSSRTALAEAELEYSENHISRSIYAAFKITNPSKSGMLDDFFPNVSLVIWTTTPWTIPANAAVAVNPKLIYAVAEVQSVFESESTSGGKQRKVGNILSSEKGKLFVIVASDLITTLESKWGVKLVVHKSFPGSALEHCRYAHPVNSNECSVILGGDYITTESGTGLVHTAPGHGQEDYITGLKYGLPIISPVDDEGNFTAEAGQFGGLSVLGAGNAAVVKYLDEQYSLILEEPYKHKYPYDWRSKEPTIFRATEQWFASVDGFRDAAMDAIRRVTWVPSQAQNRIVAMTSSRSDWCISRQRTWGVPIPVFYHVDSQEPLITEETIEHIKAIVLKKGSDAWWYMTTEELLPDRYRDKASEYRKGTDTMDVWFDSGSSWAAVLAKRDGLNFPADIYLEGSDQHRGWFQSSLLTSIATTGKAPYSSVITHGFVLDEKGFKMSKSIGNVVDPEKIIVGGKNHRNLAMEQMFSVYGFLVLITLQMC

SEQ ID NO: 51043 - protein, 149 aa, Zea Mays
MVLAKPEVWPWLIRAHPKVSKFRNKPFPLFYSLEGLYEGSVAIGELNFTSTAFDLPPPSAPSRSVSGQSPNPLSTNSLDLDGQETTSVFNLSTNAHSVPVSTNEPTEAQFVPSNQESSQREGASGRKRKQSHVGLALKVMWSLKRSIFY

SEQ ID NO: 51044 - protein, 203 aa, Zea Mays
MKGTLSHNVMVACDFDLNFTFVSCGWEGSASDAGVLRSAISKGFSVPEGKFYVVDGGYANTSSFIAPYRGVRYHLNEFRRRRSSQSGYANYKELFNHRHAILCNHIERAIDVLKKRFPILKVGTFRPIENQIKIATATIAFHNIIRGQNGDKRWLDNQPDYISPSQYVDVPEGDTNYLNDTESSDGSSLRDQITLQMWAAYNS

SEQ ID NO: 51045 - protein, 204 aa, Zea Mays
MAYDGIYRFYIQVQSLSTKYDERCKIVGDVASNLTMDEATFRDSQEHRLEIYYTIIRPQKIVYIFREVQQCTLLSKTECSEECSYALSHQDTTLDRTLKNDGSAKKGTIIVWEIFALKHKARHLVQSRLLQSPVAVVAVASATTAYAVITTTDEKPRDIVVTDDFDIKRTQPTSNSKKIVAETDVLTGQNGKLATRLAEVLDEN

SEQ ID NO: 51046 - protein, 82 aa, Zea Mays
MGSRVGLLRNARRWCMHDEAAVHYIDMIDQTTLGHRMIKKQFNKTPRAGWQIDCLEQSLASILCILQESITKIRKGVKLAKA

SEQ ID NO: 51047 - protein, 1394 aa, Zea Mays
MSRREPDTSPFCDLSNLRTPRPNPKTVPPSPQFFTASKSALQAPTPTSLRRRRPGDGVPTPTPLGRRLHALEVDQSRSARRAESGRERALRTFSASASSWLSLLLRDPSACGCFPGFTGSAAAAQPWATGKRGALDGDRARGGRSPKRCRGGGDRGGERSKEMTPAMVAALRESLKDACSLEDVTERMEKHMSKGACEEVLFMMFQICKNIDEGRLKMKARCPLVTDLRLKEKATRVFMSYNPYWLRIGLHIVLGGDSLLQTGQGKRDKEVHFLKLILEKHMLSQIMTAKSCGNKKLVEEHHVQGYSDVLGNIILKRIFLLVVALDRTKIESTLPLEAGIDGLDGGSPLLFCHQSQIKSSRQIIQESLRETMHGEGDILVHLTTMGYKLNYQQPALSEYDFTMRNLFEDLQDGIILCRVVQLLLADASIISKVIVPSDTDKKRRSNCTTAIQYIKQARVPLSDSDGVTISAEDIAAGDKELILSLLWNMFIHMQLPLLASATSLARELTKLNVHVTEQQISENKPHMGLLYNWVQAICSKIGMTVESSSQLDRRALNCFINYYLNIDISPFKETPTGCRKELFTCHQLDTISDIAGWPSSEMGKDIPASGILADGVLFDERSTILLLAFLSSHLTNDERLDQLKNLINMRLYKSADTKIAARRISRGKIDIKYHPSQTDKNDGACTNQEWAATIIQTQARSLIAKNKYCERKKAIFILQGALRAWSAIISNRNRSCLSIAASIPWQAQGNNRYFIFIMERHRFVQMRKSAIMIQLAVRIWIRGRKKFKNSDSFKSCEFLEGKTPPKISSIAPSPQEHCSGGDKTIASPTACKHCEHVLTVRASAAAPILYFDGMDSLDSTTPLQFSGNQSNFITSTTQLCKSEHDCRSCVVEKSNSVSVSKLVSADDIQCSSSICFPVCKELVAAQTIQSAYRRFLNNRNRITGAIKIQSHWRCYSVRKCFMKEIQAIVGIQTSIRVFLCYQAFQRHRLAAVLIQRVVRGWLARKRLLGSSSLRTYTRLCVVDQSQKRKCYQSLELNIVLDSVIRLQRCWRKFLLRQSVKTYVISIQSFVRGWLARKQLNQTFRCINIIQRWWRKVLQTRKRAVIVIQTRFRGWVARQDAIRTRNSICNIQRWWRKVLFLKLRKQAALVIQAHFRGWIARQVAFRTRKSITIIQSYVKAYLVRKASKQEVAHIRSRLQKSSSQVDDSMRLINRLVSALSQLHRCRSIHSIRQTCATLSTATEYSKKCCEKLVAAGAVDILLKQIYLLNRGIADQEVLKQVFLTLRNIARYSNLRQVLASTAESVEIIFQELLRNKADGFFIASDILKSLCESKEGRETVQALSHLIKRLRNLVHDLEKKVELDKRNGRTGAVKATNLRRLREAATLYHILTSGT

SEQ ID NO: 51048 - protein, 1369 aa, Zea Mays
MSRREPDTSPFCDLSNLRTPRPNPKTVPPSPQFFTASKSALQAPTPTSLRRRRPGDGVPTPTPLGRRLHALEVDQSRSARRAESGRERALRTFSASASSWLSLLLRDPSACGCFPGFTGSAAAAQPWATGKRGALDGDRARGGRSPKRCRGGGDRGGERSKEMTPAMVAALRESLKDACSLEDVTERMEKHMSKGACEEVLFMMFQICKNIDEGRLKMKARCPLVTDLRLKEKATRVFMSYNPYWLRIGLHIVLGGDSLLQTGQGKRDKEVHFLKLILEKHMLSQIMTAKSCGNKKLVEEHHVQGYSDVLGNIILKRIFLLVVALDRTKIESTLPLEAGIDGLDGGSPLLFCHQSQIKSSRQIIQESLRETMHGEGDILVHLTTMGYKLNYQQPALSEYDFTMRNLFEDLQDGIILCRVVQLLLADASIISKVIVPSDTDKKRRSNCTTAIQYIKQARVPLSDSDGVTISAEDIAAGDKELILSLLWNMFIHMQLPLLASATSLARELTKLNVHVTEQQISENKPHMGLLYNWVQAICSKIGMTVESSSQLDRRALNCFINYYLNIDISPFKETPTGCRKELFTCHQLDTISDIAGWPSSEMGKVLSDVLQAVDIPASGILADGVLFDERSTILLLAFLSSHLTNDERLDQLKNLINMRLYKSADTKIAARRISRGKIDIKYHPSQTDKNDGACTNQEWAATIIQTQARSLIAKNKYCERKKAIFILQGALRAWSAIISNRNRSCLSIAASIPWQAQGNNRYFIFIMERHRFVQMRKSAIMIQLAVRIWIRGRKKFKNSDSFKSCEFLEGKTPPKISSIAPSPQEHCSGGDKTIASPTACKHCEHVLTVRASAAAPILYFDGMDSLDSTTPLQFSGNQSNFITSTTQLCKSEHDCRSCVVEKSNSVSVSKLVSADDIQCSSSICFPVCKELVAAQTIQSAYRRFLNNRNRITGAIKIQSHWRCYSVRKCFMKEIQAIVGIQTSIRVFLCYQAFQRHRLAAVLIQRVVRGWLARKRLLGSSSLRTYTRLCVVDQSQKRKCYQSLELNIVLDSVIRLQRCWRKFLLRQSVKTYVISIQSFVRGWLARKQLNQTFRCINIIQVLQTRKRAVIVIQTRFRGWVARQDAIRTRNSICNIQRWWRKVLFLKLRKQAALVIQAHFRGWIARQVAFRTRKSITIIQSYVKAYLVRKASKQEVAHIRSRLQKSSSQVDDSMRLINRLVSALSQLHRCRSIHSIRQTCATLSTATEYSKKCCEKLVAAGAVDILLKQIYLLNRGIADQEVLKQVFLTLRNIARYSNLRQVLASTAESVEIIFQELLRNKADGFFIASDILKSLCESKEGRETVQALSHLIKRLRNLVHDLEKKVELDKR

SEQ ID NO: 51049 - protein, 286 aa, Zea Mays
MSSACLLEQWIMSSPEDDETMLSLAEEVDECVFMMDYERPPPAIAMHHQNPYHVLEAIVEPSTQVEIEVHERAMKHLREIGEERRTRSLLKRRLMMRLRKDGYDASLCRSSWVATAEHPGGDYEYIDVVVAGEHGGGAASSSSTSSSSSRIVVDIDFSSQFQLARPAPWYAQLWARLPPVFVGPRARLRKAVSLLCEAAQRSLRESGLHVPPWRRSGYMQAKWLPGGTSEVVAAAAQRSVAIARGAGGGTRRPGAGAGAGGLSMALLSSSGAEANGCQGQAGSMWA

SEQ ID NO: 51050 - protein, 490 aa, Zea Mays
MGGSADPEAPSPSPTKPSPSSADGKPPRRCVQSKLSWGLVKPAGGGREGGGKGGGGEAGRGDAEAVPPVPAAGEAAATEVREGLEKGKKKRKPRKSEDGKKGSSSKQKQWQDQSNKDGVILVDESPQKKQRKGRKQDAILKEPNASRKRCKTSEAPDGPGSCQQLHISQIEASSPAAAPVIIDVDLMSTPSKAGHANSIDQDISPLKVDLRSEAKIAAEEIRRLSSGKKIHPFFHSRKLNKCASQDQDVINIENMHGLCDSERDPPFYPIHVVYQSEASMPIHWSNWIITDMSSFDTDTAVPLKKSVSYFEGLVKPLTIETNCKRHSNQLSDPILAECTTSGMPFPSFSGKQSEHSCFSDAINVDTQNLLRPGASCQASLLDLNVEPEDPQNGCQPACYLWTDKYRPETVAQVCGNSEHVKFLAEWLKSWDEKGHKIGVANGDTNDNSYQDISDSDYSESASDCENTLLITGPVGIYDLDTLSFLSMLLL

SEQ ID NO: 51051 - protein, 1038 aa, Zea Mays
MSSILKTCMGFVILKGIHHFILFMLCTNQSMPIHWSNWIITDMSSFDTDTAVPLKKSVSYFEGLVKPLTIETNCKRHSNQLSDPILAECTTSGMPFPSFSGKQSEHSCFSDAINVDTQNLLRPGASCQASLLDLNVEPEDPQNGCQPACYLWTDKYRPETVAQVCGNSEHVKFLAEWLKSWDEKGHKIGVANGDTNDNSYQDISDSDYSESASDCENTLLITGPVGCGKSAAVFACAREQGFNVIEVNTSDMRNGAYVRQKFEEATKSHGLEKWSQEEVINPLRDDSLDPDSGTPDRTEYQCLMSCATRVMIDCDQQKSPVGYYSGLKACDEPPKQVANKTLILFEDVDTVFDEDRGFISTILKMAETTKWPIILTSNKKDPSLPNLLDQLVLDFKYPSTSELLSHVAMICKSEGVNVTVPQLKHVIDVCLGDIRRVVMFLQFWYQGHQFTERPKECLCGPFSLDLDAVHSTVPKMLPWEFPCKLSETLCMEVDKTILLAEEKKKQMEISDLEGLQLHVTAPLIKGRTSKTRRAKKSKLKRAHSTEHNDISPCKNELDDFHDLPDISLPSDKQIKRNRHRSLLLSESDDDPADVGTEKHNIFTVTEVGFFPQPSEVPPMHGQGISDQFHFPVESRETCEIADSFQNPPESNMYGSISQVCDTFMSQDVSCVPESSLILDGTSASISGDEFLSRAVSNGFSAFCEGTYTTSRMVLEDSDCVKNLMAERQKDVEDVVGETSETYMESFRRNEQASCSAAGFQLMDECSRAESIWLLSGKKSNDSCKVELVQDTWNRLRSCRLEFTSEANHNRATSGALKLVSEVSDLISESDLMLFRCYPLTKDTLDPSLTPCDEPVDSSWYSNQVEMGSVYAQHALRILSRNSQKIDGGSVDLSQELFASTAAVSFGKITCSGFRNDYGSTDLSHMKNPTTCIFKRRERHVHLCETLSPVVPPKLLQSLRGPAFVDYLSSISQISKLENLRLSENKVINKRRRSRQARHYLSSGALQLSHEDVVLLEESGCFSSRRERVEVVEQAPVST

SEQ ID NO: 51052 - protein, 712 aa, Zea Mays
MGGSADPEAPSPSPTKPSPSSADGKPPRRCVQSKLSWGLVKPAGGGREGGGKGGGGEAGRGDAEAVPPVPAAGEAAATEVREGLEKGKKKRKPRKSEDGKKGSSSKQKQWQDQSNKDGVILVDESPQKKQRKGRKQDAILKEPNASRKRCKTSEAPDGPGSCQQLHISQIEASSPAAAPVIIDVDLMSTPSKAGHANSIDQDISPLKVDLRSEAKIAAEEIRRLSSGKKIHPFFHSRKLNKCASQDQDVINIENMHGLCDSERDPPFYPIHVVYQSEASMPIHWSNWIITDMSSFDTDTAVPLKKSVSYFEGLVKPLTIETNCKRHSNQLSDPILAECTTSGMPFPSFSGKQSEHSCFSDAINVDTQNLLRPGASCQASLLDLNVEPEDPQNGCQPACYLWTDKYRPETVAQVCGNSEHVKFLAEWLKSWDEKGHKIGVANGDTNDNSYQDISDSDYSESASDCENTLLITGPVGCGKSAAVFACAREQGFNVIEVNTSDMRNGAYVRQKFEEATKSHGLEKWSQEEVINPLRDDSLDPDSGTPDRTEYQCLMSCATRVMIDCDQQKSPVGYYSGLKACDEPPKQVANKTLILFEDVDTVFDEDRGFISTILKMAETTKWPIILTSNKKDPSLPNLLDQLVLDFKYPSTSELLSHVAMICKSEGVNVTVPQLKHVIDVCLGDIRRVVMFLQFWYQGHQFTDLSACKTYYDGT

SEQ ID NO: 51053 - protein, 187 aa, Zea Mays
MDLDAAAEEEERRLEDYNEAQDARYFLGFGDTHGDPIEVDTVAGSQIGTGTESTSPSEAVPNPDQAANASGSNMKKRSKCWDDFDELTKIVNGKKVRSHVVPAASPDTSRCCLHPSSELTASPPPPNPRPPTITRKGRTAEEDAPQGRGGRSRMTLLLVAEHLRALSAAKEPSLSLMASQPLADRRR

SEQ ID NO: 51054 - protein, 221 aa, Zea Mays
MPHIGQTTVEVDLLNYGVIEGDESCKHFSELKVLHPWMIKDGMNLTKEQRLEKIESQKLEKYEAKGDKRHDLKDDQSVQEEYINAYYEALRKSWKRKKQKAECSMKARFLSLMLKGNAKLTINTSRMMMKKALNNYTSHYHVFTFGSVVSNEVASHATLLISKQYVLAMGFALLEHLTEIFSFPEVKAFWFVSNIGLLMVYALSRVFQLSYMDSRNPRFAV

SEQ ID NO: 51055 - protein, 261 aa, Zea Mays
MDLDAAAEEEERRLEDYNEAQDARYFLGFGDTHGDPIEVDTVAGSQIGTGTESTSPSEAVPNPDQAANASGSNMKKRSKCWDDFDELTKIVNGKKVRSHVVPAASPDTSRCCLHPSSELTASPPPPNPRPPTITRKGRTAEEDAPQGRGGRSRMTLLLVAEHLRALSAAKEPSLSLMASQPLVISPPRPWALQPSIQSLLFDLRPIVGDDDPASLSTSLLPNSYRCCGALLSTPLSILLFDVYFLRRSGCGTIGAPPPRAR

SEQ ID NO: 51056 - protein, 200 aa, Zea Mays
MNRNPGGAKHNAGRTPAGLLFIRPWNNLQYVSGAAFLLTVYSDVLASLGQPLRCGSGDDGGEPAAGDAGDVLAFAKSQADYILGTNPMRTSYLVGYGAAYPRRVHHRAASSASYRHDRDFIGCLQGFDSWYSARQENPHDLVGAVVGGPNGEDVFNDHRGAYMQTEACTYNTAPMVGVFSRLMQLEGQSPRPAPAPAEDL

SEQ ID NO: 51057 - protein, 475 aa, Zea Mays
MSSSMESSYLPATTESLAQAQEAKDASESISILYRVIQDPSSSADALRTKEVAITNLTNYLTKENRAEELRNLLTQLRPFFAVIPKAKTAKIVRGIIDAVAKIPGTSDLQISLCKEMVEWTRAEKRTFLRQRVEARLAALLLENQEYTEALTLLTSLIKEVRRLDDKLLLVDIDLLESKLHFSLRNLPKAKASLTAARTAANAIYVPPAQQGTIDLQSGILHAEEKDYKTAYSYFFEAFEAFSALEDPKAIFSLKYMLLCKIMVNQADDVAGIISSKAGLKYLGPDVDAMKAVADAYSKRSLKYFETALRDYKSQLEEDPIVHRHLSSLYDTLLEQNLCRLIEPYSRVEIAHIAEMIELPIDHVEKKLSQMIVDKKFAGTLDQGAGCLIIFEDSKTEEIFPATLETISNVGKVVDSLYVRSAKKKFAGTLDQGAGCLIIFEDSKTEEIFPATLETISNVGKVVDSLYVRSAKIMA

SEQ ID NO: 51058 - protein, 302 aa, Zea Mays
MSWRWAFARHVAQAQRLLPTSSAGGGTGLLGRHHHHMPLASQIRSKVPKLASTAEYFFKVGVEGKRFQPTVLLLMASAVKFSLSESTEGKVLSILADKLRSRQQNIAEITEMIHVASLMHDDVLDNADTRCGVRSLNLIKGNKLSVLAGDFLLSRACVALAALGNTEVASLMATTVEHLVTGETMQISTSTEQQRSMEYYLQKTYYKTSSLISNSCKAVAILAGHTAEVSVLAYEYGRNLGLAFQLIDDVLNFTGTSASLGNGSLSHIRHGIITAPMLYAMEEFPQLLEVVDRGFGNPANVE

SEQ ID NO: 51059 - protein, 338 aa, Zea Mays
MESSEAGWHSFDPSVAVEDSEAMAQLLGVQYSGNEQKQPTTPTAMAMCWPGQEADDQHYSSAAAYPYCTQMQQPDPGASASCYDYDYYYGSNTFTITGDFFVPEEQVADPSFMLDLNLDFEYHQEGEGIGHGGGGNGETAPVCKRRQLEDQKKGENTTCTVVPKKKSRSTAVPAQKKGKKAHKGACSRGNQEESNGGDDGNNNVAQPQQCSDNYYLSDDDSLEMTAACSNVSSASKKSSSSAAGGKARAGRGAATDPQSLYARKRRERINERLKVLQTLVPNGTKVDISTMLEEAAQYVKFLQLQIKLLSSDDMWMFAPIAYNGVNVGLDLKISPPQQ

SEQ ID NO: 51060 - protein, 274 aa, Zea Mays
MGSSSNTNTSGGASDKEEKKKEDKIKGKDSSGPSFKENERVLAYHGPLLYEAKVQRIENHEDEWRYFVHYLGWNKNWDEWVANDRLLELTEENVRKQQELDKNQVVDKTMKSGRSTQHKPKVSNADAKADKDDTKSLISVKGKKRKSQLGTEFPLPLKKQLVDDWEFVTQMGKLVKLPRSPTVDDILKKYLEHRAKKDGKINDSYAEILKGLRCYFDKALPAMLLYKKERDQYAEEVKGDVSPSTVYGAEHLLRLFDLLWCEVAPPARRHGHHL

SEQ ID NO: 51061 - protein, 191 aa, Zea Mays
MFGRGSPRMNLIQAAAMQRVSPRSTTNKRKKRTSPKVGRLRANWNSGLEKGLVEILQDHNNDCYKGQNGWSSEAWNRIVKLFHEKFPYVTFTKCQIQDKEKELKRDYKALKEARQQSGVSWDERLCRIEAEEPIWNNLTISNERLKKFRTKSFPLFEALGELHDGNIAEGTMNFTSIEPYRPPVTQPCQEY

SEQ ID NO: 51062 - protein, 225 aa, Zea Mays
MANGGLQEHLYPNRGSCGGISKLDWDTRMRIALEAAKGLEYLHEHVNPPVIHRDFKSSNILLDKDFHARISDFGLAKLGSDRAGGHVSTRVLGTQGYVAPEYALAGHLTTKSDVYSYGVVLLELLTGRVPVDMKRSPGEGVLVNWALPMLTDRDKVVRILDPASEGQYSLKDAVQVAAIAAMCVQPEADYRPLMADVVQSLVPLVKNRYNQKSCNPNVQPSKPLD

SEQ ID NO: 51063 - protein, 154 aa, Zea Mays
MELTSSSRSVLSSCNRPVARALCRTAYPGARRKEKGIVCILSEEKEVVQRTIRRRAAFSLLLASPVLSVAFSAYGKSKTMNPYDERRLLQQNKKIQEANRAPEDFPNFIREGFQVKVVTPDNYITRASGLMYEDIKVGTGDSPKDDYIPLCGLQ

SEQ ID NO: 51064 - protein, 359 aa, Zea Mays
MSQGNTTKASECSTPAILNMSDDNGPSEMGVGQPMVVGRKLLPPIVPGGEPIFVCEKQYAAILRLRERRLRAKEARERRLLQAKKNRPRGPNGRFVMIKDNQEEPNGGSMVECNPAPGDSHQHLITTSGYQQVTTGGSEAQSSIPLGFYWYVFTTSEGGQSSTPAGMGFYYPFNTTNGGENVGGVASGSEVPSSNAPSGFFWPLIMASSEENNGEVTYGSMVPISNPAGYFCWPVAVTNEHGEDTGESADGGEAPISNPAGDFCSWPVVATNDDEENVGEVAYNSVLNLESPDHTDLLRIMMGNRYSTDEASEQFQNVARLQAPGFTALLTVMNNAGYGPAADCGPHDAHKVMTRLEGW

SEQ ID NO: 51065 - protein, 240 aa, Zea Mays
MGRGKIVIRRIDNSTSRQVTFSKRRNGIFKKAKELAILCDAEVGLVIFSSTGRLYEYSSTSMKSVIDRYGKAKEEQQVVANPNSELKFWQREAASLRQQLHNLQENYRQLTGDDLSGLNVKELQSLENQLETSLRGVRAKKDHLLIDEIHDLNRKASLFHQENTDLYNKINLIRQENDELHKKIYETEGPSGVNRESPTPFNFAVVETRDVPVQLELSTLPQQNNIEPSTAPKLGLQLIP

SEQ ID NO: 51066 - protein, 316 aa, Zea Mays
MPLPIDGRRERAVCVRGAGAGAMEINIVDKYEKLEKVGEGTYGKVYKAQDKATGQLVALKKTRLEMDEEGIPPTALREISLLNLLSHSIYIVRLLAVEQAAKNGKPVLYLVFEFLDTDLKKYLDVYRRGPSARPLPATLIKNFLYQLCKGVAHCHSHGVLHRDLKPQNLLVDKEKGILKIADLGLGRAFTVPMKSYTHEIVTLWYRAPEVLLGATHYSTGVDMWSVGCIFAEMARRQALFPGDSELQQLLHIFRLLGTPTEEQWPGVSDLRDWHEFPQWKPQGLARVVPTLEPEGVDLLSFKQALSKSSNQAEIHK

SEQ ID NO: 51067 - protein, 140 aa, Zea Mays
MSCLVVRRIVSNFVLLEGSCVGEKFKKAYEGRIEQLGDKSFWPKVEMANEVGAPLGRRGVGRQRKNRIKGCLEGGRGKKACANETVKQWKAKEAATLLKNGFLATTDLHKNLEHRISTKLYKTLVHHMNSHRLRSHFQGY

SEQ ID NO: 51068 - protein, 401 aa, Zea Mays
MENETTETSTSGCGSLILEMGVLSRLTGDSRYEAAALRALRKLWSMRSSLNLVGTTLDVFTGKWIQYSSGIGAGVDSFYEYLIKAYILFGSDEYWDMFHSAYLAVQKYFRHGPWYHEADMRTGEATHWQLTSLQAFWPGLQTLLGDVTAANLSHREFYNIWQRFGVLPERYLLDYGMLHPTEKYYPLRPEFAESTFYLYQATKDPWYLEVGETIVRSLNYYTKVDGGFASIRDVSTMKLEDHQHSFFLSETCKYLFLLYDDSFLRNQNYIFTTEGHPLPIRSTWHEKFPAAYVPSNWTSVKDEIQPIRASALSSQVCPETIFGRSVGTPWESACHVPDAHASHRCRTDDDCGIEAITCKKRTCSMAGYCGLFFYNGNKSSGFSMIMRTANTSRLLQLRTAA

SEQ ID NO: 51069 - protein, 231 aa, Zea Mays
MENETTETSTSGCGSLILEMGVLSRLTGDSRYEAAALRALRKLWSMRSSLNLVGTTLDVFTGKWIQYSSGIGAGVDSFYEYLIKAYILFGSDEYWDMFHSAYLAVQKYFRHGPWYHEADMRTGEATHWQLTSLQAFWPGLQFYCTEQTLLGDVTAANLSHREFYNIWQRFGVLPERYLLDYGMLHPTEKYYPLRPEFAESTFYLYQATKGAPNTHQKDIFVLSSSSSHVFI

SEQ ID NO: 51070 - protein, 144 aa, Zea Mays
METTSVLLTSLVVLSMHPEWQEGASEEVLSHFGRTRPDFDSLSRKCKTKVTMILHEALRLYPPATFLTRRTYKKMELIGIKYLAGVDLFLPVIFIHSDPNIWGKIQKGLTMASPTQPGIRLLSFRSEGGPKICMARALRCWKPR

SEQ ID NO: 51071 - protein, 74 aa, Zea Mays
MDNRFLFISLSLRRLLLRCGSSMRMECGVWCNSGGFCDLRVISLIPIWYLLVWVNCHGFVILHCSGECICFSDC

SEQ ID NO: 51072 - protein, 143 aa, Zea Mays
MQAVLQSFKIRSSDIMGRCSAIEHETLSAQVLQPVHLQLALVCGELSEPACLQWLPGVECLERGCPCLVSWLMGGQNEYYSSNRADHQKSRIINNYLTSASRTRITTPVCHDHENLQQSRSMFYTNFLLPSQRTGTHLVILYE

SEQ ID NO: 51073 - protein, 144 aa, Zea Mays
MSESDVIKMFSPFGKITAEDFLWHTRGPKRGEPRGYAFVQYTTKEEAQLAKEKMNGKLICGRPMVVHLASERSSLGSSSSHRAVKDKKLAGGSGAKSQYTDTAAKIAAIKNKLKSLEDGGCSTKKPRLNPDNLTEIREQSHKKF

SEQ ID NO: 51074 - protein, 130 aa, Zea Mays
MSLGLPLIATVNCAGNTGAKNLYIISVKGIKGALTGVLLPVLVTMENGKPNLRKKKQDKYKDAEPSAIDLFKEMHCSKKKGFSKNVQKAIVDMEEMVATSVQDGQQPKYPTEVVYSVQLGSSVFLCNLGL

SEQ ID NO: 51075 - protein, 168 aa, Zea Mays
MSLSAMGVGALNLNPLCLHWRCARDTLIVAVAPKPPVNHLLDDDVEDEEEDELKFRIPQTTTLWKRKFFMFLRDKLRLPDIILMALFSLSMKAWIIIAMWFLLAPIAQKYDIGPLYIIGTGFLIILINLGRRQQGDVSAYSIFNEDFRELPGTLNADRIDADIRAGQF

SEQ ID NO: 51076 - protein, 91 aa, Zea Mays
MGIISFHSKQARHVFLLLCQFVNYLEVVRLPVYYPSEQEKDDPKLYANNVRKLMAVEGNLILSDLGLAEKRVYHAALNGNSLARALHQKDD

SEQ ID NO: 51077 - protein, 100 aa, Zea Mays
MPPGSPSSPTDPTSSKVVPPPSYCSHGSPAIILSFLYCLLPPDREAALVQVLPGEVEPNRIPWRTTLQWIQDVRHQINGAAQVVPARWSPVASHGGQPSN

SEQ ID NO: 51078 - protein, 173 aa, Zea Mays
MDPCDPCPPITPESSRSVPPKSSPLPRSSNLNKMENLAHPISSGFVTSKLVLHASLPTPRRGLSPPPRNNGLLFGEHSGGGGVQGHRRRTRSPLVGQKSNGKYQENGNGEVEKDDDEEDIDEKIGDEEDNDLDLSWKMLDIARTIVEKSQENTIEKVKKYSGLAEVATERGHA

SEQ ID NO: 51079 - protein, 76 aa, Zea Mays
MQFYYASWVCYCMSERKTLGPASRRGTPHQSPITSTATLSARAWHPRLWILWRACASTYFKYGCALLYKAQEETDF

SEQ ID NO: 51080 - protein, 92 aa, Zea Mays
MSSSPSSVNRRPPGPLALGLESLGKKISIGWSPSRAASSPSRVAPTRPHWAMASFPVTPLSGSRGMRSTRSSVKRAQGSTFQGPCLSTWSPL

SEQ ID NO: 51081 - protein, 74 aa, Zea Mays
MPSGEADTRSPPKGALGRLLIHVDVAFTGVDVCCKKKVERANKALLWMHQDNSMMAPNLRSALGKGNYQSRETK

SEQ ID NO: 51082 - protein, 249 aa, Zea Mays
MEFDPWGLTIRHLLTHVVIAPSDSSGPLYSLHLTSTSPTRVASSPALTTTTTSHALATTTTSSTIWHRRLRHPGPDVMSQLSSRSDISYTRGSSERLCHACQLGRHSRLPFSTFTSRAVQAFDLVHCDLWTSLVLSLSGYKYYLVILDDYSHFLWTFPLRLKSDTFTTLTHFFTWVSTRFRLPVRALQCDNGSEFDNNASRSFFLTHGVQLRLSCPYTSPQNARAEQIIRTTTNMIRCLLFQTSLPASY

SEQ ID NO: 51083 - protein, 840 aa, Zea Mays
MVNKLGPKKWSTIAQALPGRIGKQCRERWHNHLNPGINKDAWTQDEEIRLIHAHQTYGNKWAELTKFLPGRTDNAIKNHWHSSVKKKVDSYRSSGLLAQSQGFTPVEYTAGGLNVDSSSAITNQISEGSGFNVFREAEDSMELSQSSFAKGSCSQEEQNDVTLGSHLHVHESLCPDGSTNDGNGASGLPDIHHRLCTSDMDQDKHLQEGMDLDKHLQHEFSQGTDLHLDVDEVPNNFVIKGSQSSNELAVQFHDTEIMNSSKNDGVSLVPHAITPCVPILPSVSGCVHNINVIYEMGIKNDNCFQSEKCQDISIQSGAYSSEAAGSFLAPLYPLQTSEPAIMMGGPVYYQSSVMSLPPGFISSDGASNASGVKSETSYYPVSRQNLEIKTCHNASGDPEQNSYISSEDDRNKTSEPMGRISESEKKQQVDVEQSCLEPAACIGKEALSSHGDTILSKKEDAGALCYEPPCFRSFEFPFVSCELVNSSDLPEYSPLGIRELMRTSLNFPTPVRLWGSPTRDGSPDAVLKNAAKRFMCTPSIMKKRHRDLLSPVSDIRTDKKPNTERDFMSSGISSTRVGKSCMDSADDSADLVSPKESAFQKKLKLCHENKENLNEIADQGENEANAKHSSGILTPSSVDNHNTHKHGPNFRIQELNTTVQALSNSKDIIFSRSKPSEHVEKSAACIDADYEYLNILADTPGIKRGLESPSAWKSPVFTPFQDAYFMSPASRAFDALGLVKQINEQSASAVEEAHEVLANGSPWKQHNKENSDKENIENTALKHEHVTSKPPSILMVEARVLDFNECSTPVRKKDDKKVEIVLGGPATSPVTSSHLWINMR

SEQ ID NO: 51084 - protein, 60 aa, Zea Mays
MNIACLILFLYMKGACFFKYMVWYSLRSKFKVTLTFLVHRFCYVMSRYIAKFMYQKKESK

SEQ ID NO: 51085 - protein, 56 aa, Zea Mays
MNTRFLMVYVQYERSLETIIGHDQIIWLGGLNYRIMLSHQLVKALVEMRNSRERLG

SEQ ID NO: 51086 - protein, 69 aa, Zea Mays
MNTRFLMVYVQYERSLETIIGHDQIIWLGGLNYRIMLSHQLVKALVEMRNSRERLGESLVTLRFLLVTQ

SEQ ID NO: 51087 - protein, 104 aa, Zea Mays
MSNISFLYFLVFDIFLSFIFGLSLECKETPCGCPIEPLPLYVKYLFPMRAASPIIFARGTEKSPFILDTIFGNSMLDYIVHNIMVSVSRMEPLIICQLDQLKKN

SEQ ID NO: 51088 - protein, 151 aa, Zea Mays
MNTRFLMVYVQYERSLETIIGHDQIIWLGGLNYRIMLSHQLVKALVEMRNSRERLGLEKSGTALTLTFSRLRGVHSPSRHPHHAAADPARGMTPSSPTWPRATQPQRPNPHVVADLASRLAATMPSWKLEGMMSLPSLFFDGLLFVVPVHY

SEQ ID NO: 51089 - protein, 93 aa, Zea Mays
MIFASAVLTELCPRIVDHRAHHLFDETLPRTAYVFDRSTRATGQPPAAARFVLIRELHPLGTEMTRALSTANCHAAMEMTHGRTSGLCADGST

SEQ ID NO: 51090 - protein, 320 aa, Zea Mays
MAFSAKPHCSCSTTTKPPTPVAHLSPPPSLSVRAAACAPRSAYGLSAAGVGGGKASPSTVRLRARAQRIRASQQQPRRRPEYVPNRIDDPNYVRIFDTTLRDGEQSPGATMTSAEKLVVARQLARLGVDIIEAGFPASSPDDLDAVRSIAIEVGNPPTAGAGTAHVPVICGLSRCNRKDIDAAWEAVRHARRPRIHTFIATSEIHMQHKLRKTPEQVVAIAREMVAYARSLGCPDVEFSPEDAGRSNREFLYHILEEVIKAGATTLNIPDTVGYTLPYEFGKLIADIKANTSGIENAIISTHCQNDLGLATANTLAEQDS

SEQ ID NO: 51091 - protein, 267 aa, Zea Mays
MRWLPRLLSHSIEVGRASAAGRSNPSLVKAGSHGFASGGWDGSPAVPREWLRKLWVDVLKKQKEDARRWGIGASPGNAGSGAEPSLCAFANSVEAAGATREAPSRSYQYEYRGLAGLVVQMSKSNPLLFMFQLLRTRRPFVAEITDAMGNEIFKVRRPFWWINSSIYAEVDGKEIGVVHRRWHLWQRIYDLYLGNRQFAVVENPGFWNWTFSLVDEDDKLLAQIDRNWRGIGFEPFIQYWALPLPDDTAMMVLSHKSQQIHVAVRFI

SEQ ID NO: 51092 - protein, 163 aa, Zea Mays
MAAAAAGGENSGAGAGAGEGEFYLRYYVGHKGKFGHEFLEFEFRPDGKLRYANNSNYKNDTMIRKEVFVSPSVLREARRIIQESDIMKEDDSNWPEPDRIGRQELEIVMGNEHISFTTSKIGSLVDVQSSKDPEGLRIFYYLVQVQPNDRLGCQSMISFVVSS

SEQ ID NO: 51093 - protein, 159 aa, Zea Mays
MSHRSRSRSPNRIQPSHLNDSASFQLPPFLGVQVPSRWRQVEERDSVSFNPSGTTDNVSPWPSSILLAKGGVSQVVASRPAIHSRMFLVSSTTAVGIRDGGGDNGDGGVQLADNLKIFKTDNFDLDVYVQSKCQTMNEKHCHYDVYACVRTGDPKVLHR

SEQ ID NO: 51094 - protein, 181 aa, Zea Mays
MYQIFTFFNGSGHWSLLVLCHFGDANCSDIKKGPRMMVLDSLNTTDPTRLRSAIRKFIIDIYKTEEREESKQFINKICLEFPKVPQQNGDECGIYVLYFIRCFLLNKKLTEVLENKKLEEKFTQLFDDGWFNPEELENFRKDIHSFQALLSFIFLCGSFRGHLKAVEDMLYFRFIHGRGST

SEQ ID NO: 51095 - protein, 370 aa, Zea Mays
MPPPSLVSILPAASISPRRRQAKHPKTPTASHPFFSRRLVSQPPRHASISPSAAGGSGSDELHLLEKPLPAVAEDNEAEEELESAPVSSTEEALAPFLKFFQVKSTDPDVGADTADGEVPEEASRRDVLSAAGERGIKQLNVPIKIKIYEWNASGLLSRIEGLRAFLPKPEMMTRPRNFTDLKNKVDQEMHVCITRIDEETNELIISEKEAWAVTCLREGTLLQGTVRKLFPYGAQIRIGETNRGGLLHISNMTHGKLRSVADVLKVGETVKALVIKSTPDRIALSTKDLESEPGLLITNKEKVFSEAEEMARRYREQIAEPQPPGSIAAEDSCDDAVPFNDESRSYANWKWLKFSKSDDVANPKSGVES

SEQ ID NO: 51096 - protein, 189 aa, Zea Mays
MFLRGCLPFVDIEVVELDPLVAELAKKYFGFSMDEQLKVHLGDGIKFIEDSVAANQSVNGSTRNAFKILILDVDSSDLSSGLSCPPENFVEDPFLLIAKEFLLEGGLFVINLVSRSTSVRETVVSRLKAVFEHLYSLQLEEDINEVLFASPSGRYLEINDISAGASKLQDLLKIPVDVESDIQKLQKLQ

SEQ ID NO: 51097 - protein, 213 aa, Zea Mays
MEHLHSSLPLSLRLVLGASAFLLLDSVAVICYVAEGQARADPLAVLSASSAAVPVQQRASPRGKLRTTTTIALGTIISDYFFLRLELVPVRHPTSQGSGSEKMRINCCSIWRNKALRRMCFSERGAVSSTQCVLTSDAGPDTLVVRTSFRRNYADPNEVTAVILGGAGEDDRGRKSQQEGHKEHHQHKLTLPTISNYTIHDATDGTDNGKQEG

SEQ ID NO: 51098 - protein, 400 aa, Zea Mays
MQGQFAMTHQAALASVTAQAQMHLQSPTPSACSEVPSSPFYMTPRSLVPLQHSPSVTEGNICTPIADKSFSSDSKSHHVVNMVADGFNWRKYGQKQVKSSDNSRSYYRCTNSGCLAKKKVEHFPDGRVVEIIYRGAHNHEPPQKTRFAKERVTPISVPSGGETLRLVNTEIVESSTPTCELERSAISETSEQHLFCSSDCEGDAGNKSEDEHPSAEALPKRRTLEATAPNLTPVRRTVREQKIIVQAGKMSDGYRWRKYGQKIVKGNPNPRSYYRCTHGGCPVRKHVEKAPDDVNNIVVTYEGKHNHDEPFRSSSIPVSVISPSATATEQPNTSSTSDERPPTITQKDANSESDKETTLKFGGEKALESAQTLLSIKTNSDDMKNSVLKETSAAVPVQNN

SEQ ID NO: 51099 - protein, 1128 aa, Zea Mays
MSSLSRELVFLILQFLDEEKFKETVHKLEQESGFYFNMKYFEDEVVNGNWDEVERYLGGFTKVDDNRYSMKIFFEIRKQKYLEALDKHDRSKAVEILVKDLKVFASFNEELFKEITQLLTLENFRENEQLSKYGDTKSARAIMFVELKKLIEANPLFRDKLQFPSLKNSRLRTLINQSLNWQHQLCKNPRPNPDIKTLFVDHSCGQPNGARAPSPANNPLLGSMPKPGGFPPLGAHGPFQPSPTPVPPLAGWMSNPPAVTHPAVSGGAIGFGTPTNPAALLKHPRTPTTANPGMDYPSGDSDHISKRTRPVGMSEEVNLPVNMLPVTYPQSHNYQQDDFHKTVARTLSQGSTPMSMDFHPLQQTLLLVGTNVGDIGLWDVGTKDRLVVRNFKVWDLSKCTMILQASLVKDPAVSVNRIIWSPDGTLFGVAYSRHIVQIYSYNGGDDIRQHLEIDAHIGGVNDIAFAHPNKQLCIITCGDDKTIKVWEATSGAKQFTFEGHEAPVYSVCPHYKENIQFIFSTALDGKIKAWLYDNMGSRVDYDAPGHWCTTMAYSADGSRLFSCGTSKDGESHLVEWNESEGAVKRTYQGFRKRSMGVVQFDTTRNRFLAAGDEFMIKIWDMDSTGLLTTIDADGGLIASPRIRFNKEGTLLAVSTVDNGIKILANADGLRLLRTLENRSFDASRNASEAVTKPLINPLTAAANAAAASSSGAGAPSAVTAMNGDTRSLVDVKPRIADESLDKSKAWKLMEITESTQCRSIKLADNMRTSKISRLIYTNSGLAILALTSSAVHLLWKWPRSDRNSGKASASVSPTLWQPPSGILMTNDTTDNNPEEAVHCFALSKNDSYVMSASGGKISLFNMMTFKTMTTFMPAPPAATFLAFHPQDNNIIAIGMDDSTIQIYNVRIDEVKSKLRGHSKRITGLAFSNVLNVLVSSGADAQLCVWNTDGWEKQKNRFLQIPSGRQSNILDTRVQFHQDQMHFLVVHETQIAIYETTKLEPVKQWPVRENSPPITHAAFSCDSQLIYASFMDATVGIFNASSLRLQCRILPASYLPPNISPSVHPVVVAAHPSEASQFALGLTDGGVFVLEPLESDRKWGNPPPVENGSASNLSAPPPNGASSSDQPER

SEQ ID NO: 51100 - protein, 567 aa, Zea Mays
MWWSQPRLFVGRGMHEGAFSLFKYTMFWVLLLATKLVVSFYVEIKPLVQPTKDIMKEPIRTFKWHEFFPHANNNIGVVIALWAPIILVYFMDTQIWYAIFSTLIGGVYGACRRLGETSEDTREQEKIAARFAQIWNLIITSFREEDLIDDREKDLLLVPYCKDRDMDIIQWPPFLLASKIPIALDMAADSGGKDRDLKKRMKSDPYFTYAIKECYASFKNIIYELVIDSRERGYIQKIFDAVDEHIAEETLIKELNMSNLPTLSKKFIELLDLLESNNKEDHDQIIILFQDMLEVVTRDIMVDQLSELLELIHGANNKRSEGMTSLDQQDQLFTKAIDFPVKKTQAWNEKIKRLRLLLTVKESAMDVPTNLDARRRISFFANSLFMSMPDAPKVRQMLPFSVLTPYYKEDVLFSSQALAEQNEDGVSILFYLQKIYPDEWKNFLERVHCESEDQLHETEHSEEQLRLWASYRGQTLTRTVRGMMYYRQALVLQASLDMARDDDLMEGFRAADLLSESDESPLLTQCKAIADMKFTYVVSCQQYGIQKRSGDPHAQDILRLMTTIYIG

SEQ ID NO: 51101 - protein, 707 aa, Zea Mays
MSLVVKLRYILKLLSAASWVVILPVTYAYTWKNPTGLARAIKSWLGDGQNQPSLYILAVVIYLAPNLLSATLFLFPVIRRALERSNLKVVTFIMWWSQPRLFVGRGMHEGAFSLFKYTMFWVLLLATKLVVSFYVEIKPLVQPTKDIMKEPIRTFKWHEFFPHANNNIGVVIALWAPIILVYFMDTQIWYAIFSTLIGGVYGACRRLGETSEDTREQEKIAARFAQIWNLIITSFREEDLIDDREKDLLLVPYCKDRDMDIIQWPPFLLASKIPIALDMAADSGGKDRDLKKRMKSDPYFTYAIKECYASFKNIIYELVIDSRERGYIQKIFDAVDEHIAEETLIKELNMSNLPTLSKKFIELLDLLESNNKEDHDQIIILFQDMLEVVTRDIMVDQLSELLELIHGANNKRSEGMTSLDQQDQLFTKAIDFPVKKTQAWNEKIKRLRLLLTVKESAMDVPTNLDARRRISFFANSLFMSMPDAPKVRQMLPFSVLTPYYKEDVLFSSQALAEQNEDGVSILFYLQKIYPDEWKNFLERVHCESEDQLHETEHSEEQLRLWASYRGQTLTRTVRGMMYYRQALVLQASLDMARDDDLMEGFRAADLLSESDESPLLTQCKAIADMKFTYVVSCQQYGIQKRSGDPHAQDILRLMTTYPSLRVAYIDEVEEPSKDKNKKIEKVYYSALVKAAVTKPDDPGQKLDQGYI

SEQ ID NO: 51102 - protein, 714 aa, Zea Mays
MSLVVKLRYILKLLSAASWVVILPVTYAYTWKNPTGLARAIKSWLGDGQNQPSLYILAVVIYLAPNLLSATLFLFPVIRRALERSNLKVVTFIMWWSQPRLFVGRGMHEGAFSLFKYTMFWVLLLATKLVVSFYVEIKPLVQPTKDIMKEPIRTFKWHEFFPHANNNIGVVIALWAPIILVYFMDTQIWYAIFSTLIGGVYGACRRLGETSEDTREQEKIAARFAQIWNLIITSFREEDLIDDREKDLLLVPYCKDRDMDIIQWPPFLLASKIPIALDMAADSGGKDRDLKKRMKSDPYFTYAIKECYASFKNIIYELVIDSRERGYIQKIFDAVDEHIAEETLIKELNMSNLPTLSKKFIELLDLLESNNKEDHDQIIILFQDMLEVVTRDIMVDQLSELLELIHGANNKRSEGMTSLDQQDQLFTKAIDFPVKKTQAWNEKIKRLRLLLTVKESAMDVPTNLDARRRISFFANSLFMSMPDAPKVRQMLPFSVLTPYYKEDVLFSSQALAEQNEDGVSILFYLQKIYPDEWKNFLERVHCESEDQLHETEHSEEQLRLWASYRGQTLTRTVRGMMYYRQALVLQASLDMARDDDLMEGFRAADLLSESDESPLLTQCKAIADMKFTYVVSCQQYGIQKRSGDPHAQDILRLMTTYPSLRVAYIDEVEEPSKDKNKKIEKVYYSALVKAAVTKPDDPGQKLDQDKASRKCNAR

SEQ ID NO: 51103 - protein, 717 aa, Zea Mays
MSLVVKLRYILKLLSAASWVVILPVTYAYTWKNPTGLARAIKSWLGDGQNQPSLYILAVVIYLAPNLLSATLFLFPVIRRALERSNLKVVTFIMWWSQVVLINLKLIQPRLFVGRGMHEGAFSLFKYTMFWVLLLATKLVVSFYVEIKPLVQPTKDIMKEPIRTFKWHEFFPHANNNIGVVIALWAPIILVYFMDTQIWYAIFSTLIGGVYGACRRLGETSEDTREQEKIAARFAQIWNLIITSFREEDLIDDREKDLLLVPYCKDRDMDIIQWPPFLLASKIPIALDMAADSGGKDRDLKKRMKSDPYFTYAIKECYASFKNIIYELVIDSRERGYIQKIFDAVDEHIAEETLIKELNMSNLPTLSKKFIELLDLLESNNKEDHDQIIILFQDMLEVVTRDIMVDQLSELLELIHGANNKRSEGMTSLDQQDQLFTKAIDFPVKKTQAWNEKIKRLRLLLTVKESAMDVPTNLDARRRISFFANSLFMSMPDAPKVRQMLPFSVLTPYYKEDVLFSSQALAEQNEDGVSILFYLQKIYPDEWKNFLERVHCESEDQLHETEHSEEQLRLWASYRGQTLTRTVRGMMYYRQALVLQASLDMARDDDLMEGFRAADLLSESDESPLLTQCKAIADMKFTYVVSCQQYGIQKRSGDPHAQDILRLMTTYPSLRVAYIDEVEEPSKDKNKKIEKVYYSALVKAAVTKPDDPGQKLDQGYI

SEQ ID NO: 51104 - protein, 1071 aa, Zea Mays
MAAALAWRFNGTNGGAHGSADLERHTDKVQDSEPQTPMSIVKMGKNRVNVEDEETLSSVAQCIEQLRQSSSSSQEKESSLKQLLDLVQTRDTAFGAVGSHSQAVPILVSLLRSGPSGVKMLAATVLGSLCKEEELRVKVLLGGCIPPLLALLRSKSAESQTAAAKTIYAVSQGGIRDHVGSKIFSTENVVPVLWEQLKISLKNESLVDGLLTGALKNLSKNTEGFWSATVQCGGVDILIKLVSSGQTNTLANTCYLLGSLMMEDSSVCSKVLSGETTKQLLKLLGPGNETSIRAEAAGALKFLSAQSKEARRQIANSNGIPSLINATIAPSKEFMQGESAQALQENAMCALANISGGLSYVISSLGESLESCSSPAQIADTLGALASALMIYDTNAESISASNPVDIEKTLLKQFKPKVPFLVQERIIEALASLYGNPVLCKTLADSDAKRLLVGLITMAATEVQDDLTKSLFALCKKDCDLWQALQGREGVQLLISLLGLSSEQQQECAVALLALLSKENDESKWAITAAGGIPPLVQILETGSSKAKEDSATILGNLCNHSEDIRACVQSADAVPALLWLLKNGSDNGKEIASKTLNHLIHKSDTGTISQLSALLTSDQPESKVYVLDALKSLLSVAPLNDILHEGSAANDAVETMIKILSSPKEETQATSATALAGLFHCRKDLRETHIAVKTLWSVMKLLDMQSNKILTGASCCLAAVFLSIKENKEVAAIGRDALNPLVSLANSSVIEVAEQATRALANLFLDQELSLQVPFEEILFRVTRVLREGTIDGRTHAAAAIARLLQCRTINQPLSDTVNRSGSVLALAGLLEAANGEAAATSEVLDALVLLSRSKASSGHTKAPWAILAENPHTILPLVSCIADAAASLQDKAIEVVSRLCSDLHDVVGGLVSETPGCMSSITRRIIGSNILKVKVGGCALLVCAAKEYCQKQIEVLNDASLYIQLIHSLIGMIHMANTQAENVSSESISDIRISRHSKENNSDGETLCCTAVISGNMIPLWLLAIFSRHDSKTRAELLEMGAVEMLIEKISQNAFQYVGEEDNTSWVR

SEQ ID NO: 51105 - protein, 304 aa, Zea Mays
MILGSLVFPRRDSQTAPPPPLVSLRSNRRAGDMPPKELPGFYYDPEKNRYFPIRGPIPGAAARRGTPAPPPAVDTTGCSRKRARRPELLNAREMYGGGVMFSNKAARSTFKQQCHYAQASQPMVWKYQATTSVADKALEQLDAMVQTPQGLKESRLLVSGSMNGSIRLYGLGTALSNFENEAEFLPQPACTLVGKHKPGPLPSIWSPGTGFIAFSSSISCIKKLGRHVPDASNTNSSVQRAWWLLLDLENLVPLYILWIFLKLLTWQSDHGLPTEFIHLIEQCGQLIVVLMAHMQLSVRTLVLV

SEQ ID NO: 51106 - protein, 529 aa, Zea Mays
MILGSLVFPRRDSQTAPPPPLVSLRSNRRAGDMPPKELPGFYYDPEKNRYFPIRGPIPGAAARRGTPAPPPAVDTTGCSRKRARRPELLNAREMYGGGVMFSNKAARSTFKQQCHYAQASQPMVWKYQATTSVADKALEQLDAMVQTPQGLKESRLLVSGSMNGSIRLYGLGTALSNFENEAEFLPQPACTLVGKHKPGPLPSIWSPGTGFIAFSSSISCIKKLGRHVPDASNTNSSVQRALVATLGSGESRASLYIMDLSEAVDLAIGPWTTYRVHSLDRTMWTADCSSDGTHAAFGSDLGAGLIDLETRGSSWLCRSKSDILSLKFVHSGKVVLCGLRNGSIAPVDVRQKQHNQPTGVASSSNARRTVPMLPTRHGGKQRNQASKDKFSRVISMSSAVCSLVSLSSDENYFLGSSMDGSIKLFDLRLIQKGGIQSYEGHVNSHTLLPLAVDPSETLLMSGGEDCTVRIWSIKTGELIFARSMGDSPFTSSCWPESSHGLCSPWLFDVNHSWGAWLGSRAGLFYMHGT

SEQ ID NO: 51107 - protein, 187 aa, Zea Mays
MFEGVVSQVLYGLLRRYVKGIQKEQLKIGIWKEEILLENVELILEAFDYLQLPFALKNGRIGKLSIRIPWKKLGWDPIIIVIEDVYVCACPREDSEWSSDSLDKRELAGKLAKLNAIELAKFSRRVTDNQTGQSFLSYISAKILDSIQVSMRNVHIVYMDTHNGQVTMKVVKSFSSSFFIDVTMTGI

SEQ ID NO: 51108 - protein, 80 aa, Zea Mays
MPSGMMMAREMTGTGAPSEVPYDRCRGSAYMRSPSPRYRQEYSPNCDRRGRYPGYDRRDGAMYERRSPVYDRYDSLLNQY

SEQ ID NO: 51109 - protein, 658 aa, Zea Mays
MALALQWPLQFPLQLQARPPAVTAGHHRRRHRVLAVCRSPPLPARCCASAAAAADTGKAQTAARRAYPFDEIEPRWQRHWEEHRTFRTLDIGEGLDTSKPKCYILDMFPYPSGAGLHVGHPLGYTATDILSRFKRMKGFNVLHPMGWDAFGLPAEQYAIQTGTHPKITTERNIERFRTQLKSLGFSYDWDREISTTEPGYYKWTQWIFLQLLKRGLAYQAEVPVNWCPALGTVLANEEVVDGVSERGGYPVIRKPMRQWMLRITSYADRLLEDLNDLDWPESIKEMQRNWIGRSKGAELIFSAVDQEGHDLGATLLVYTTRPDTIFGATYLVVAPEHVLLSSLTSEEQRAHVEEYRELSARKSELERTELQKEKTGVFSGSYAKNPATGEIIPIWVADYVLGSYGTGAIMAVPAHDSRDHEFAVKYELPIIKVVSPPNGNCDPVEAYEDDGIMINSSSSSSGLNINGMLSQDAAKKVTEWIENNGFGKKKVNYKLRDWLFARQRYWGEPFPVSYLDDTNEMVPLTEDDLPLTLPELDDFTPTGTGEPPLTKATNWVRTIDPSSGKPARRETSTMPQWAGSCWYYLRFMDPKNCSILVDKAKERYWGPVDIYVGGAEHSVLHLLYARFWHKVLYDMGVVSTKEPFKCLINQGLILGERQ

SEQ ID NO: 51110 - protein, 945 aa, Zea Mays
MALALQWPLQFPLQLQARPPAVTAGHHRRRHRVLAVCRSPPLPARCCASAAAAADTGKAQTAARRAYPFDEIEPRWQRHWEEHRTFRTLDIGEGLDTSKPKCYILDMFPYPSGAGLHVGHPLGYTATDILSRFKRMKGFNVLHPMGWDAFGLPAEQYAIQTGTHPKITTERNIERFRTQLKSLGFSYDWDREISTTEPGYYKWTQWIFLQLLKRGLAYQAEVPVNWCPALGTVLANEEVVDGVSERGGYPVIRKPMRQWMLRITSYADRLLEDLNDLDWPESIKEMQRNWIGRSKGAELIFSAVDQEGHDLGATLLVYTTRPDTIFGATYLVVAPEHVLLSSLTSEEQRAHVEEYRELSARKSELERTELQKEKTGVFSGSYAKNPATGEIIPIWVADYVLGSYGTGAIMAVPAHDSRDHEFAVKYELPIIKVVSPPNGNCDPVEAYEDDGIMINSSSSSSGLNINGMLSQDAAKKVTEWIENNGFGKKKVNYKLRDWLFARQRYWGEPFPVSYLDDTNEMVPLTEDDLPLTLPELDDFTPTGTGEPPLTKATNWVRTIDPSSGKPARRETSTMPQWAGSCWYYLRFMDPKNCSILVDKAKERYWGPVDIYVGGAEHSVLHLLYARFWHKVLYDMGVVSTKEPFKCLINQGLILGEIEYTAYRDNEGRWVSADSDSSLIDCYQEKVAPDKVTKVGDHYVLKDNPNIRLNARAYKMSKSRGNVINPDDVVSEYGADSLRLDSKTWSTGGIEGVHRFLGRTWRLIVGPQLSDGSYNDGTMTTEDEPTLDQLRVLHRCIARVTEEIQETRFNTAISAMMEFVNAAYKWETQPKSVIESFVLLLSPFAPHLAEELWFRLGHPQSLAYEQFPEAKSEYLEESKLVLPVQINGKTRGTILVDKACSEDDVFQIAASDEKLSKYLDGKGIRKKIYVPGRILNVILDQQKSRT

SEQ ID NO: 51111 - protein, 53 aa, Zea Mays
MCATISSFAILILANFPCRFSATTSSAPARRARLVFGSSTRILRKRKLQCIGR

SEQ ID NO: 51112 - protein, 67 aa, Zea Mays
MRDFNILYFFVIIIMFIWQKNCKREKEKRNELHRHGHQDIWSLSLLDPRCCPEASARPCCMQLLVLL

SEQ ID NO: 51113 - protein, 53 aa, Zea Mays
MCLTDKFANVIEHVGATGEQAKHKQKCKIVRSPSRGCSTPSKCTSSQQFKLAH

SEQ ID NO: 51114 - protein, 72 aa, Zea Mays
MSAGSPSVAALARRLLTRRRSLLTRPTPDQRHYSSSRRQSRVPVPAVARGPLHQHAGITLGHGLRPPATLRR

SEQ ID NO: 51115 - protein, 73 aa, Zea Mays
MERSRWTEVLLSVTPFDSGLGSCVINLCGVVLYAKLLMRARASFAYCWAGFRPSMVLGFAFSFTRELRNCRKI

SEQ ID NO: 51116 - protein, 507 aa, Zea Mays
MEIERRISTQAEHIRNQNSLIRAREEKYKSRIRVLEALASGTGGQMQINSSAANGKINIAEDHVLQMMINKSKIGERRLVDKDMSSLMAQKEDVARLTKDKEDMVRLLKDKEDIIRLMKEKEEMVLLIKEKDDMVTSRKEKIDGRDQSANAYANKSTTYNDETIRMIKEKEDSNITIMKLKSKLEAVKSLFEESHNQLESAKEEVLKLQKDKENSANIISKLRQELSLAHESYKTHIQELESSALQASKFFEHRIKEVDLMLEDSIKKRTDLEEVLKSRMDTWKKKEIMDLRLSSVSIRHEIQNCQRRWSEELNGLGQSLNILINDSENYHAALEENRKLYNEIQELKGNIRVYCRIRPFIPGEDQKSTTIKYVGDNGDLIIANPTRHGKEGSKSFKFNKVFGPTTSQDDVFKDIEPLIRSVLDGYNVCIFAYGQTGSGKTYTMTGPENATENEWGVNYRALNDLFHISHNRGDTIMYEINVQMIEIYNEQIRDLLCSNGSEKKYPF

SEQ ID NO: 51117 - protein, 413 aa, Zea Mays
MKFGDPISALYYLDPAGTTPSHVMMDRNSIWFCQGPAAKKLNIDLPETEIVETHRNHSARITCLRLFPLIDTPLFRSDTQKNEKALVTSSTDRTIRLCWKGYSRCYKGHSAPVTALADRLLMDGESKLLASGGEDCTIRLWSMSTRAKNHPLIATFHGHEKALSFLSVAWHKSSLLVSCSKDSKVKVWDTVSPSSGSSSCVGSAHLNSNGPPIAMKCHESLCYIAAGAEVTAIDLRTMKKASVLALQNHRILSCEMMPSEWLICTGTKDRALLWDIRKAQELPNTVAEMQSSGPVTLLHLDQYKVVTGVPSDGQVHVWETRTGHSLNTLGCGEPSRLGVRSRVSAMAVDGCRIAMAGSSPEGCMLHYRDFATASAPVVSLPGKEKEVSRFWRPQEFDDSEEEDSKASWNNQTR

SEQ ID NO: 51118 - protein, 512 aa, Zea Mays
MECNREEALKAREIAVKKLESRDFVGAKRIALKAQRIFPEIENIPQLLTVCEVHCAAEAKVNGMLDFYGILQVEGTADEVTIKKQYRKLVLSLHPDKNSYAGAESAFKFVAEAYSTLSDRTKRYAYDVKWRAAPKVAPKQATQPMWTTEPINKNSTNSSAAGYGPWTFWTVCIHCKTKYKYHGDILNRQIRCQNCRQNFFAHQTSTEDVPSAFSSKTANSAAQQGCSTNIFSRENKEGPVMEGVKFSAKNSTVPDFGDRKNLGGGVDTSAGPGSAEIPTPRRSSRRKACADANNILNSPKKKSRTLKDWFSNATSSSNKVVDDNVAHADGHVSEPHVSSKTDNQDSCVVNEGNKRNTKTTCDPPAEKPWNTGSFTYPDPEFFDFDKCRDVKLFAVDQIWALYDEFDAMPRFYARIRHVNTTNFRVKYTWLEHSTVNDDEEKWIDNKLPVACGNFTLGNTEESQDPLMFSHMVSWVKGRKRGSYVIYPNIGEVWALYKGWSMQWVSDADSHRS

SEQ ID NO: 51119 - protein, 501 aa, Zea Mays
MKSSLSRGGGLSGTFIGEGSGSTRAALLLAAAEKRAAMHQLVVVLAPAAVRMPAAAPTPQRKEVVAAASKAGDTAAATWRKGGRVVFVVEKPDGACYFASIATQIGEELGDIYDYVAPCFPSRYEIFQLMVNLYTERFIQMLRLLSDRANDIQNINILKVTSWVVQYQEDLIGLGVDESLAQVCSESGALDPLMNMYVERMQATTKKWYNNILEADKTQPPKSREDGKLYTPAAVDLFRILTEQVQIVRDNSTYVMLYRIALAVIQVFIYLPYEIMAAAGSGRAAVAVEDREGSAVERPKAGKKRARWRKGSTQAEWQRRATTRGSTRERGVADRGREQSGCWRGQQDRRSAVKEGVGVEGVYGKASELARCRGRRRHAKHRRRRTEVVGGDGAAPRRHAQGSGRTGWRRRATARGGTRDRGGRRQGKGAARLRERVMLDFQAAERQRLEEPIFYVGLACLCALINNNMHCYELSSELSSSTLEALPQNYAEQAASGNTIR

SEQ ID NO: 51120 - protein, 266 aa, Zea Mays
MWESVIEVLEIVHQDERNPSGAGGFVGKMECFSFVFMMKLMLQILRITNELSLLLQRKDQNVVQAMSLVVDVRTCLINLRNDGWEPLLEEATTFCLANDIPIPNMSDVVPRFGRSRKGGRNNITTEHFYRVDTFYVVIDSITTEFDHRFNELSQELLGCFSCLDPRDSFSKFDVDKLARLADIYSDDFSFDDCKTIKDQLRTFIIHVRRIEEFKACCDIASLSKTMVQLERHIVFPLVYRLIELALLLPVATTTVERAFSAMKIIK

SEQ ID NO: 51121 - protein, 125 aa, Zea Mays
MGELVLRSMHQHLLQEPKVVGVQCRLDRGWWGRPGDVSQIAFGLLQQRCEDEVLEVAQRDHELVTEPAQQPRALDLAPTGDPHCGLLSRITPHLELHRRLNLPGQGHVPCGGYKNVGGLYNSIAW

SEQ ID NO: 51122 - protein, 560 aa, Zea Mays
MLYLQKGPNPSPTTEKKTTLGGLSCKFRGRRSTRASTSAVAAAASMSGSNGNGGGASSALYGLYGPNVKPDVVFKEAALNSTLNLQDVQGLVTWVIGDGMLPSWVFVKNKPLIPKVVLLYVPGLDAALYMSQTRLLSSLKELCGNPKPVLASSCIPDDRHTIDALLTCRVKRKLDVKTSNQSSKPDRDGKLSSLDDLGDIPFPVTYYTLSEKDLEDNGYPFNLPGFVPTVSAPSGSLPHKVLALDCEMCITEAGFELTRVTLIDIKGSVVLDRLVKPANPIIDYNTRFSGITAEMLADVSTSLHEIQEEFVGLVYTETILVGHSLENDLMALQISHGLIIDTAVLYKYNRGSRCKIALRVLTKRFLGREIQNTGSGHDSVEDARAALELAILKIRHDRYSDTSCNSIAVFSDDDALSRSMKEVKNDKVAFIWTQFSGLISYFRRRAEDPEKLKSCVAEAIALKTCDTKTASKKAKSQICPELKEILCELDKKIKQLYGALPDNSMLIVCTGHGDTPLVRRLRKMLHHEEETIDSRENIVQALGDLQAQAEVALCFCCVKH

SEQ ID NO: 51123 - protein, 595 aa, Zea Mays
MLYLQKGPNPSPTTEKKTTLGGLSCKFRGRRSTRASTSAVAAAASMSGSNGNGGGASSALYGLYGPNVKPDVVFKEAALNSTLNLQDVQGLVTWVIGDGMLPSWVFVKNKPLIPKVVLLYVPGLDAALYMSQTRLLSSLKELCGNPKPVLASSCIPDDRHTIDALLTCRVKRKLDVKTSNQSSKPDRDGKLSSLDDLGDIPFPVTYYTLSEKDLEDNGYPFNLPGFVPTVSAPSGSLPHKVLALDCEMCITEAGFELTRVTLIDIKGSVVLDRLVKPANPIIDYNTRFSGITAEMLADVSTSLHEIQEEFVGLVYTETILVGHSLENDLMALQISHGLIIDTAVLYKYNRGSRCKIALRVLTKRFLGREIQNTGSGHDSVEDARAALELAILKIRHGPDFGSQPSLSRRKLTSILHESGKKCSLIDDMSILDRYSDTSCNSIAVFSDDDALSRSMKEVKNDKVAFIWTQFSGLISYFRRRAEDPEKLKSCVAEAIALKTCDTKTASKKAKSQICPELKEILCELDKKIKQLYGALPDNSMLIVCTGHGDTPLVRRLRKMLHHEEETIDSRENIVQALGDLQAQAEVALCFCCVKH

SEQ ID NO: 51124 - protein, 372 aa, Zea Mays
MTNRKDLLDEALLRPGRLEVHIEINLPDENGRFQILQIHTNKMKENSFLSPDINLLELAARTKNYSGAELEGVVKSAVSYALNRQITMDDLTKPLDEESIKVTMDDFVNALHEITPAFGASTDDLERCRLRGIVDCGKAHKHIYQRAMLLVEQVKVSKGSPLVTCLLEGPAGSGKTAMAASVGIDSDFAYVKIISAETMIGFSESSKCAQICKVFEDAYKSQFSIIVLDDIERLLEYVAIGPRFSNLISQTLLVLLKRVPPKGKNLLVIGTTSEVGFLESVGMCDVFSVTYHVPKLKKEDAKKVLHHLDVFDDGDLDAAAEALDDMPIKKLYTLVEMAAQGPTGGSAEAIYAGEDKIDINHFFSILSDIIRY

SEQ ID NO: 51125 - protein, 583 aa, Zea Mays
MLKEQRPSAKMCSILDEAGYERREQFNCYLPDSSKSLNADLYVEDEDMFYEPQAEKDWQSKHSRSDGNLADENYDGLWRMDEFNSEDHLFTQRDKHVDISGYGFKDGYSPERRNSTRPVTVFENTGIQSSHDLFSDHSLMDDEDTELFKWESHPPSKKKSNSNSNFGPSAWPYDMVDGSEKRSPISEESCSSAAAMKDRTCKKQSPSMKNDMNENDEFHIRLDKLDIPNMDAPLHGRSLFNNPEKLDRKETAPRKKLETNWLQSVTGQPRTQEPSCRLSLNEKFSNWDSPTFRSKSTTGLTDKSSCTMLHKDKSSFDAAPDLDMYQTVESTQKRPVSKVHSIYQRPEKPIFEDEIHMQHTVSDMFHDKIELSNPYQNKNLQSDIDMSTFIGQKVEKQEDEFPCFSSSSADTFRAEKAARSVRQTVDRHSTCSQPSGRDSFRHGFSPGFNFQESEPNTFWADSYVCNGTFQAGLEFSGVVARKDSDKNEVKIEASEKPDTKILTGTCWLSADNRNVINGTETCSDGSEAFNCSEAQKETSAVVTQIPANLSSLRETSAELFQVRNHVIPVKREKISTMLEIILN

SEQ ID NO: 51126 - protein, 215 aa, Zea Mays
MDRGERLGRALDAFGGNLWALVDAALDAAARDRPDELRARRDSIVERLYAAAAGCSNCAGRPPSVAALAAAGLEEEDGEEAAPASPWAEADAQAGGAEAQTEPENELVSLLQNLADMDVTYNALQETDIGRQVNGLRKHPSAEVRRLVKQLIRKWKEIVDDWVRLDNSGGDGSASVMTADGDSPHKIQGRSHQSPRVSGFQYSPSPQRWFNFRDG

SEQ ID NO: 51127 - protein, 770 aa, Zea Mays
MQKGAEGVPPFENLYMIKRELKHGKRVYSMEYHFMKSAKGQNSYWDDDTHSMQLSFGVDEFLIIAPLSASGVILDDPESTKLLSSVAIALSNCGSNWPAFVPVHDPSRKAYIGIQNLGTVFTRRFEADRIGSQVPIRLMHLEGLHELFLSKFVLSSSDFPARVKVHFSMKLSYKTPEYDHDNETLDSEATEPLTENEVVNHPRKLWDDDCPWAEWYSAEDPVKGFELTAIWGERTFEETLEMAEVENASSFDADSWFLHPVVSRYMVDDSIGKFVGFASQLHLLVADTSGQDNAKSTATVPPPSVIDRVMKDLFSDETGNYMEAENKYSRAMRGAPADSLFGQFCLHALCLLVEVMEELKYQCREQLTICIERKRSLNREKGTGYKDETSNSTAVNKSRKGSAGVVPKMMLLNTFQEMHAPYTQDAPLMTEDMHEERLHAAEAFGNAIGLSGQLERDILCSDMSAFKAANPDAVFEDFIRWHSPGEWLSEDKTDGNAGWPPKGKLSHRMSQHGNVWRKIWNDALPLPVSEQKSLLDPVREGEKVLHYLETLRPQQLLEQMVCTAFKSSADILNKTMYGGFKEMKTKMDRLYVTMASTLKSFLGNSDVNDLVGGLKRLCQVFEHIEKLLILAASINRKLIDAPRLAQAIFYDYYNFYLPKMGTSLESICYEKEFTTKEKVGMYERDAVSNLFPPPTANQSWRKVLSMGNLLNGHEPMQREIIFSVQERISNGHYSSPTPLCTNNEKIQTHRMYISGTSNDLWVALSVTSWD

SEQ ID NO: 51128 - protein, 412 aa, Zea Mays
MALSGMRGLSVFISDVRNCHNKEQERLRVDKELGNIRTRFKNEKGLSPYEKKKYVWKMLYIYMLGYDVDFGHMETVSLISAPKYPEKQVGYIVTSCLLNENNDFLRMVINTVRNDIIGRNETFQCLALTMVGNIGGKEFSESLAPDVQKLLISSSCRPVVRKKAALCLLRLYRKNPDVVNIDGWADRMAQLLDERDLGVLTSVMSLFVSLVSNNSEAYWNCLPKCVRILERLARNQDIPQEYTYYGIPSPWLQVKTMRALQYFPTIEDPNARRALFEVLQRILMGTDVVKNVNKNNASHAVLFEALALVMHLDAEKEMMSQCVALLGKFIAVREPNIRYLGLENMTRMLLVTDVQDIIRRHQAQIITSLKDPDISIRRRALDLLYGMCDVTNAKEIVEELLQLNLQCVKSCL

SEQ ID NO: 51129 - protein, 119 aa, Zea Mays
MLYPSRVGQLQMLAFDPCASRISATDAGGGKKPKELKQKKGKKPNPFSLEYNDSAPASAPRLVVLREPTGRDIAERYELGAELRRGEFEVTSTSWRVSGGCLQSSGRRTSYIRVSRLHL

SEQ ID NO: 51130 - protein, 78 aa, Zea Mays
MHCTPASSTPSLSSSLFLDRDSDGDKPTSTTPLCLATCGLLHRLVWSFPILDGPVRTPINYPPDRIMATTQERDVAQP

SEQ ID NO: 51131 - protein, 156 aa, Zea Mays
MARLLVMILLALFLLAVAPAQAARFTRGLRARIGEAPALEAAQVSAERTTQEGQIWRSLLRIVGVDASVFFRMPVKKTGMGAAGEFTYASLEKTDVGLEGGIARSVGGRGGGHGGGMGGVRVRFAGEAGARGQGWGCGCGAGASGGTELWTTSLAS

SEQ ID NO: 51132 - protein, 575 aa, Zea Mays
MSKQPMNPSEAFRSRAKNAAAGTVGSPANGGDSSKQTSGPVSSFEEKQRDDAVHEKDDDDPRAGVAALPPLSSDIMQESGGGLEDLELQVQNAIAAAAAAAPPKESNSVSSNDPGSSSSEIFPSGPGPADQVPVPATSPEIEPLFANQIPAASSEVKAAPPFHLDPPVADAEAKQTAPLREWKPLCDLTSNRRIDWCELEGDVRVVGGSNGSVTLVAAPGADERSFHEESWSIKPYPRKADPNAMRSVRALAVRSVATAPPVACTDWHGVPALVFSARGYTGNYFHAYTDVILPLFLTARQYAGEVLLLVTGFQAWWVGKYLPVFRSLSNYEPVDLDRDRDPRVRCFRRVQVGLTSHDDFSIDPRRAPNGYSMLDFTRFMRATYGLPRDAVPRRGRGRPRPRLLVIARARTRRFLNAEDIVRGARKVGFEVVVSEVAQEVAAFAELVNTCDAVVGVHGAGLTNMVFLPPGGVVIQVLPLGPLEFVASYFRGPARDMGLSYLEYRISPEESTLLDQYPRDHPVLTDPMSVQAKDWVSFMGVYLFKQDVRLDMKRFRPVLKKALARLRAKPRNNNNK

SEQ ID NO: 51133 - protein, 1144 aa, Zea Mays
MATSLSTPSQLRTSHCHARRYGRLLGLHPRVSCARCPAPRRAAALSVRANAASTDGDAAVTVRRFPAAPTKAGRLAGVKKIMILGAGPIVIGQACEFDYSGTQACKALAEEGYEVVLVNSNPATIMTDPGLAHRTYIGPMTPPLVERIIDAERPDALLPTMGGQTALNLAVSLADSGALDRLGVRLIGASLPAIRAAEDRQLFKQAMDRIGLKTPPSGIGTTLEECLAIAEDIGELPLIVRPAFTLGGTGGGIAYNKAEFEDICRAGLAASHTQQVLVEKSLLGWKEYELEVMRDMADNVVIICSIENIDPMGVHTGDSITVAPAQTLTDKEYQRLRDYSVAIIREIGVECGGSNVQFAVNPADGEVMVIEMNPRVSRSSALASKATGFPIAKMAAKLSVGYTLDQIPNDITKKTPASFEPSIDYVVTKIPRFAFEKFPGSEPILTTQMKSVGEAMALGRTFQESFQKAVRSLETGFAGWGCGPIKELDWDWEKIKYSLRVPNPDRIHAIYAAFKKGMRVEDIHEISFIDKWFLTELKGLVDVEQFLLSKSLDQLSKDDFYQVKKRGFSDKQIAFATSSSESDVRSRRLTLGVTPTYKRVDTCAAEFEANTPYMYSSYEYECESSPTNRKKAGYETIMMNSNPETVSTDYDTSDRLYFEPLTVEDVSNVLDLERPDGIIVQFGGQTPLKLALPIQQYIEENKMVSASGTGNVKIWGTSPDSIDASEDRKRFNAILEELQIEQPKGGIARSESDALAIASEVGYPVVVRPSYVLGGRAMEIVYNDEKLIKYLATAVQVDPERPVLVDKYLIDAVEIDVDALADTAGNVVIGGIMEHIEQAGIHSGDSACSLPTRTVSAQCLEVIRSWTTKLAKRLNVCGLMNCQYAISTSGDVFLLEANPRASRTVPFVSKAIGHPLAKYASLIMSGVTLPELGFTKEVIPKHVSVKEAVLPFEKFQGCDILLGPEMRSTGEVMGIDYEFSGAFAKAQIAAGQKLPLSGTVFLSLNDLTKRHLAEIGSGFRELGFSIIATSGTAKVLQLEGVPVEPVLKIHEGRPNARDMLKNGQIQIMVITSSGDALDSKDGLQLRRLALAYKVPIITTVDGARASIDAIKSLKDKSIEILALQDYFQTADASADLQAAAQTTP

SEQ ID NO: 51134 - protein, 88 aa, Zea Mays
MASPAPTSPPAPRSPPRISPASAARRELVNKITRPINCLLQPPCVPKRRPKAQRPRSMPRRSRTAGGWPALAPVPRDQWCLRRKRSNS

SEQ ID NO: 51135 - protein, 150 aa, Zea Mays
MAILLRRASLRRVIAFAAASSSSSSLHSEIYKQGVCGSMFHCREFASKAKKKKSSGTDSDEESMSKKDLALHQAIDQITSAFGKGAIMWLGRSQGLRDVPVVSTGSFALDMALGTGGLPKRSMVQRLQARQHLLYMSLQKHKRMGVTVPL

SEQ ID NO: 51136 - protein, 178 aa, Zea Mays
MCLLRNYNWSVSKVHDEWFADEERVRKVVGLPEKHIEMPNDRENMHQGYPKETLVHFLKAREWNVAKAHKMIVECLNWRIQNEIDSVLERPIAPVDLYRSICDSQLIGLSGYTKEGLPIFGIGVGHSTYDKASVITLMLAICLVGYNYSQNHKSVWFEAISTKPNKGFRLSSSDSPSR

SEQ ID NO: 51137 - protein, 94 aa, Zea Mays
MSFLVLPSLFCDSDSHSYSLLCDSHSRLCGVRCSLLPSPRDAATRRLFSPPSLALSSLPHGVFASPIDPSHHGFFQIHPRRARSATDFSDRSEP

SEQ ID NO: 51138 - protein, 532 aa, Zea Mays
MLHRLAHTRVCHFFIIPTPRAFSNAPAATPPAAPPLSAADLEQLLRRCHYSASSHRFHSLLPLLSHPSVLLSCALHLSHRAHPSLPVPPQPPPITIAAAAAAFSSPSSHLRLLLPSRIKGQPLPVPTLPLRLALRCAASVLDAVFAPRAATFAYRGRHTAVRYLKSIPSASWFFRVAIPRQPFAPRHVCRLLGAISSKVDDPGFLEFLNELFVSDAVAFELGGCELGRGLPQESELTSTLVNIFFNRVDGEIMALREEVHKKHPRMKDDSVRHTPVRVYAIRYLDDILVVTSGSKMLTIEIRNRIIAVLERDLEVRVDRLGSSIHSAVSEKIEFLGIEFQAVPPSVLHPPMSEKAKRARKKYLKMKAEKAQELKNARETRRKKLGLKILNHLSKRMRRGEEFEFDFRIEKEVQQVFRDWAEETVAEYFESREHCRYWHRLLASGDFLSLNRVRDQLPPALVDSYDKFQETIDKFLMPMKGHDLTEEEEILAEEEEEEQYEKRIVEDLTELKMRANVPIDLVRKEISSNGMLA

SEQ ID NO: 51139 - protein, 398 aa, Zea Mays
MGFIGAHGVETLKRYRYSGEDRSVVAKYVLQPFWSRCVTLFPLWMPTWLCFPTFQITLTGFSFLVLSALLGYICSPHLDTAPPRWVHLAHGLLLFLYQTFDAVDGKQARRTSSSSPLGELFDHGCDALACAFEALALGSTLMCGGWTLCFWVVAAVPFYLATWEQGLGGMEPKNWIHLASTHTHGPTVPRCQDFRKSLPFFGWIPLPFLSEIEIPLYVLVLILMIVCAVIPTVRSNVSNVQEVVEARKGSMALALAMFGFATLLLETILPFIVLLAGVAIWCYLSPSSIMRNQPHLLVIGTGFNFGYLVGRMILAHLCDEPKGLKSGMFMSLVFLCFPIANALIAKINDGSPLVDELVLLLLYCAYTVGLYLHLAVSVVHEIKDALGIYCFRITRKEA

SEQ ID NO: 51140 - protein, 310 aa, Zea Mays
MRHSLPALDAITLTGFSFLVLSALLGYICSPHLDTAPPRWVHLAHGLLLFLYQFEALALGSTLMCGGWTLCFWVVAAVPFYLATWEQGLGGMEPKNWIHLASTHTHGPTVPRCQDFRKSLPFFGWIPLPFLSEIEIPLYVLVLILMIVCAVIPTVRSNVSNVQEVVEARKGSMALALAMILPFIVLLAGVAIWCYLSPSSIMRNQPHLLVIGTGFNFGYLVGRMILAHLCDEPKGLKSGMFMSLVFLCFPIANALIAKINDGSPLVDELVLLLLYCAYTVGLYLHLAVSVVHEIKDALGIYCFRITRKEA

SEQ ID NO: 51141 - protein, 258 aa, Zea Mays
MCGGWTLCFWVVAAVPFYLATWEHFFTNTLILPTINGPTEGLMLIYVSHLFTFFTGAEWWAQDFRKSLPFFGWIPLPFLSEIEIPLYVLVLILMIVCAVIPTVRSNVSNVQEVVEARKGSMALALAMILPFIVLLAGVAIWCYLSPSSIMRNQPHLLVIGTGFNFGYLVGRMILAHLCDEPKGLKSGMFMSLVFLCFPIANALIAKINDGSPLVDELVLLLLYCAYTVGLYLHLAVSVVHEIKDALGIYCFRITRKEA

SEQ ID NO: 51142 - protein, 316 aa, Zea Mays
MPLNIDIDLFKLDIDELIADYSKENCTSLFEFKRVWMGKKFSYIYEGRPKTNSGLFMQSLFLHCIGYLTSQSSLHQRLAGLYCLYCLYECQPYKPQFKIYLSLEECRQLKDIVVMAKQNGLQLVPALVKRMLDKDMFLFGYMNLIDDNGDKQVEELTALQNKRVKFACDKLFANTQAERYLHMDLGAEFELDSIKKLSKEYAEAKELALAGACPLPLSDMCIFLLLYSERLLGDKIDEVVKEWDVQKEGFYERTGLSSSPGDQLMAIDNDESGAQCHEDGSRGDQLMAVDNDESGVQDHEDLDDDDGFAELELLLE

SEQ ID NO: 51143 - protein, 1245 aa, Zea Mays
MIIDAIDWLVLSTTEKVRNIYDDLFEVPSKVMQTAITPRDATSSINFYWNSKGSSLGYIPVFHFSEVLQAGAGVVRQFNININGKRFTSHDYYTPRHLESGYVYGTRPYTNQIRYNVSIVKTDTSTLPPIINADEIFIVISTTNVGTDSEDVSAMKAIKAKYQVKKNWMGDPCVAGTFRWDGLTCSYAISDPPKITALNMSFSGLTGDISSAFANLKAVQSFYADNPDLCTNAGDSCQTAPQGKSKLVIYYVAVPMALIVVALAVLLCCLLRRRKTRGLADVSVKPRDKTPTSLASMAADEHRLSSLRLENRRFTYEDLEMITDSFKRVIGRGGFGYVYEGFLEDGTQVAVKMRSQSSNQGAKEFLTEAQILTRIHHKNLVSMVGYCKDGVYMALVYEYMSEGSLQEHIAGKRLTWGQRLRIALESAQGLEYLHRGCNPPLIHRDVKTSNILLNAKLEAKVADFGMSKALDRDTYASTNTLVGTPGYVDPEYLETMQPSTKSDVYSFGVVLLELVTGRPPILHSPQPTSVIQWARQHLARGDIEVVVDASMGGNHDVNSVWKAAEVALQCTEQASAQRPTMGDVVAQLLECLDLEKGRSANESFCDGDDSGSATASLSHSSAFVTGRIFGTVPMVETGPATRRALVCVSLSPLSPLPRARLPSAPPWDESAFLAMAASHLPPAATLVKKYPTLLHPFGAKPHAQRLIFRCRATSSEGADDGWASFVDELKRSLQVDPSDAVISNAGAGLTSNNDLVTALPLEPSAGPAAGDATTAAAGAVSELLGVDASGAVATPDRLLSSLLHLDASNPVASVAGGALSRLDALTSGLSDAQRWALFGFLAATWLYLTARPGVLSGAVDMYVLAPLQLALDSVLGRRSLKMSDFVVGERIGEGSFGVVYAGAVVPKNGAVVEERSGKAKTSLQNDDRYKEKVILKKIKVMTVGAKECGDYEEWFNYRVSRAAPESCADFLGSFVADKNKAEFVKGGKWLVWKFEGDRTLANYLSERGFPSNLERLMFGRVLQGLGPLEREALVVKQVMRQLITSLKRIHATGIVHRDIKPSNLVVTRRGQVKLIDFGAATDLRIGKNYVPDRALLDPDYCPPELYVLPEETPEPPPEPIAAILSPILWQLNSPDLFDMYSAGIVLMQMAIPTLRTQSGLKNFNAELRSAGYDLNRWRQSARRRPDLQILDLDSGRGWDLATKLISERGANGGGRLSAAAALRHPYFLLGGDQAAAVLSKFSLSK

SEQ ID NO: 51144 - protein, 1552 aa, Zea Mays
MRQSKLRAVSARPWLLLLCLALAATAGVMQARAQPNSIGNLMGRAGDRARFISIDCGFPGTTSYVDDATTLPYAPDAAFTDAGENHNVSSEHVTPELPRIYRDVRSFVDGARNCYTLPSTLAVGLNKYLFRAAFMYGNYDGLNRPPVFDLYIGVNLWKTVNLSSSDPAAPVIAEAIVVVPDDFVQVCLVNTGTGTPFISGLELRPLKNSIYPQVNATQGLVLQSRRNFGPTDMTDIIRYPDDQYDRLWTPMIIDAIDWLVLSTTEKVRNIYDDLFEVPSKVMQTAITPRDATSSINFYWNSKGSSLGYIPVFHFSEVLQAGAGVVRQFNININGKRFTSHDYYTPRHLESGYVYGTRPYTNQIRYNVSIVKTDTSTLPPIINADEIFIVISTTNVGTDSEDVSAMKAIKAKYQVKKNWMGDPCVAGTFRWDGLTCSYAISDPPKITALNMSFSGLTGDISSAFANLKAVQSLDLSHNNLTGSIPSSLSQLPSLTTLDLTGNQLSGPIPSSLLKRIQDGSLNLIYADNPDLCTNAGDSCQTAPQGKSKLVIYYVAVPMALIVVALAVLLCCLLRRRKTRGLADVSVKPRDKTPTSLASMAADEHRLSSLRLENRRFTYEDLEMITDSFKRVIGRGGFGYVYEGFLEDGTQVAVKMRSQSSNQGAKEFLTEAQILTRIHHKNLVSMVGYCKDGVYMALVYEYMSEGSLQEHIAGKRLTWGQRLRIALESAQGLEYLHRGCNPPLIHRDVKTSNILLNAKLEAKVADFGMSKALDRDTYASTNTLVGTPGYVDPEYLETMQPSTKSDVYSFGVVLLELVTGRPPILHSPQPTSVIQWARQHLARGDIEVVVDASMGGNHDVNSVWKAAEVALQCTEQASAQRPTMGDVVAQLLECLDLEKGRSANESFCDGDDSGSATASLSHSSAFVTGRIFGTVPMVETGPATRRALVCVSLSPLSPLPRARLPSAPPWDESAFLAMAASHLPPAATLVKKYPTLLHPFGAKPHAQRLIFRCRATSSEGADDGWASFVDELKRSLQVDPSDAVISNAGAGLTSNNDLVTALPLEPSAGPAAGDATTAAAGAVSELLGVDASGAVATPDRLLSSLLHLDASNPVASVAGGALSRLDALTSGLSDAQRWALFGFLAATWLYLTARPGVLSGAVDMYVLAPLQLALDSVLGRRSLKMSDFVVGERIGEGSFGVVYAGAVVPKNGAVVEERSGKAKTSLQNDDRYKEKVILKKIKVMTVGAKECGDYEEWFNYRVSRAAPESCADFLGSFVADKNKAEFVKGGKWLVWKFEGDRTLANYLSERGFPSNLERLMFGRVLQGLGPLEREALVVKQVMRQLITSLKRIHATGIVHRDIKPSNLVVTRRGQVKLIDFGAATDLRIGKNYVPDRALLDPDYCPPELYVLPEETPEPPPEPIAAILSPILWQQQPSLQLNSPDLFDMYSAGIVLMQMAIPTLRTQSGLKNFNAELRSAGYDLNRWRQSARRRPDLQILDLDSGRGWDLATKLISERGANGGGRLSAAAALRHPYFLLGGDQAAAVLSKFSLSK

SEQ ID NO: 51145 - protein, 158 aa, Zea Mays
MPPAFAAAPSSSICGVRIPTVRRFEAQSTVSTPRFMRNRVAAKTRSTSAWSLKAGLWDSLRSGLLKNNSSTETVEPPPAPLEVEEPLPVEIVLLERTLPDGSTEQILFSSAGDVDVYDLQALCNKKLFDRGRREETAHWDGTSNLRPCLQCNDLGCPC

SEQ ID NO: 51146 - protein, 161 aa, Zea Mays
MPPAFAAAPSSSICGVRIPTVRRFEAQSTVSTPRFMRNRVAAKTRSTSAWSLKAGLWDSLRSGLLKNNSSTETVEPPPAPLEVEEPLPVEIVLLERTLPDGSTEQILFSSAGDVDVYDLQALCNKVGWPRRPLSKIAASLRNSYLVATLYSIIRSSETEVI

SEQ ID NO: 51147 - protein, 738 aa, Zea Mays
MAEYENELSTSDPAKAHKLFNSKAKDFSFQKRKIDSVKNLYYAMRKRVRNDPRNSGDLGFLVPCSCTAIGSECICGGLPNNIEPELNSVSRYGQVGSRYTIGHSYSEMNEHAFHTKHTESMTRDGDGTSNVVYGYSDVGQLYEHHAYTANNHGNREGNNLSLKSITNFQDSMQFQQLDNNQCGNGVVDSKALVIPNHFSGSVQEPMPLQMIGQPEGSEAPGGAILSLQRSDRLALADDKDVKSEDRDPLTFEAHLDGGISGLDHATEFMDFPYFTNSEDLDILNSENLLNSPSEGIQEDLDDTALVVHGVRSTMQNLVHADEANMSCDQIDLGDVKNNVDASGIILFPTSLVVPCPGLYVECKLNTEDTEIPCNDDVSTPTEYPLECCTSTFGQKSENTIYSVSPAISPPSIAEQPNPSTSEQKEDSVAHDEGGVLGAKPSEGALTVGGLLPGNIDTNDANTCMLALPSFSTAGFGEGSPCSLGPHESFDNSHGLTLQNSVQAPDQMQHNSLDGKPELGDKAALQNCMPSNALPDLDIQNTIANAPTPAQAEECPDYEKDVPNYYDLEALILDQDLIPWDQDSDFMHPEVTGFPHPESRKALIRLEQGARSCMNRAIMSHGAFAVIYGLHLRCYIKDPEVTLGRETEDIKVDIDLGKEGRANKISRRQAVIKMDESGYFHIKNTGKCPIFVNSKEIPSCKRINLSSDSLIEIKDMRFIFHVNQEAVRQYIDRDLKPER

SEQ ID NO: 51148 - protein, 165 aa, Zea Mays
MAPPHFQPPSSAQQPSAQLLPSAAMASSPSSRPLLSTASYSREPSSKLPRRSSSTPPCSSSTQVGALSLAVLSVAPLLAVPLTLAHRRPGKLPHGARLPVPWSPVVAPFFPLWLRSSAPSMAPRQASPWRSTPCSMVPCGRPLLPLVAALLCSLHGAPCSFLDAL

SEQ ID NO: 51149 - protein, 196 aa, Zea Mays
METDISSCGGGGAQQRGIGPVEVQAATAALRRSEVFHVLKELVGFVLYMHHQIPSVLPSLENEFASLKEEMTEMALQPAELKPSDRRKYNTRKTEVRRRIKKHEKLMNGISTLLCSLQHALDEVSSIEGVVLILGGSLVRPLFVYDITISHGIFGPGSAKEHALTKLAQSVSRKAIRALVSRGAGSLSYTASCFCW

SEQ ID NO: 51150 - protein, 204 aa, Zea Mays
METDISSCGGGGAQQRGIGPVEVQAATAALRRSEVFHVLKELVGFVLYMHHQIPSVLPSLENEFASLKEEMTEMALQPAELKPSDRRKYNTRKTEVRRRIKKHEKLMNGISTLLCSLQHALDEVSSIEGVVLILGGSLVRPLFVYDITISHGIFGPGSAKEHALTKLAQSVSRKNLYISRLSVLLYHVELGVCPTQDLASCFCW

SEQ ID NO: 51151 - protein, 672 aa, Zea Mays
MIRCKDIVPENCNITCQLNEASIDSSDHTSSSTGQLTQSIKDAAGSMESDKDQCAGGKIDLTMSQECTGLEGMNLDESSPDRMDSSHSGIVVHENQLSEQNNDEPAAYNGVYMITHQSSSDMLTLAVPSGTEAQPMNDTQKADNPYPCESLLDVQSSGNCTQNSVHEPHLYWNGAVEGAAVAYTPQALPGALQSQLMPCNKLNEPKDYMPTEQNALSQHLRGMRRRSLFNEKAGLSNKGVDKASDHHPVNSTTPKCKTISGDNSKTLRTPPCALPGIGLHLNALAATATPKEKIVPQDIQSTINESSNLIGPAGSSPAPSEQNIINDDFTQTTDVATAEASSQGSPKKKRHKFDSGDGTSCKRCSCKKSKCLKLYCECFAAGVYCSEPCSCIGCMNNQSHTETVLSTRQQIESRNPLAFAPKVIHTSEPGLELRDFSNKTPASARHKRGCNCKKSSCLKKYCECFQGGVGCSISCRCEGCKNAFGKREGAAVLSIEEPKQGLEEKDVCVKEEKSEIEKQLVVYQTPDDAPAENVLTTPSMVQCRPLACRPPPSSKKSSKKPRSSTKLTGHPSRLCNLQAPPKTDTMLSPFENYAEMVLGDSTSDILKGNSSPQTSVKVVSPNKKRISPLRMGTGLSPICRSGRKLILKSIPSFPSLGGDVNNEDPETKLPAP

SEQ ID NO: 51152 - protein, 144 aa, Zea Mays
METAASAARLVNYPLVAALLAFAVAQSSKFFTTWYKDGRWDARQFIASGGMPSSHSATVTALAVAVAIQEGFHSATFATALVFACVVMHDAFGVRLHAGKQAEVLNQIVYELPEEHPLSETKPLREILGHTVPQVELNALNYLP

SEQ ID NO: 51153 - protein, 396 aa, Zea Mays
MGAELGEAGVPARDMVDALEGVRSILLKPSERLDDKRFTRIAGADFDDAGLGLAGLLGSLASTGFQASNLGDAIDVVNQMLDWRLSHEKPSDDCAEAELDPAYRESVKCKIFLGFTSNLVSSGVREIIRFLVQHRMVDVIVTTAGGIEEDLIKCLAPTYRGDFTLPGALLRSRGLNRIGNLLVPNDNYCKFEHWIMPILDKMLLEQSTQNVWTPSKVIARLGKEINDESSYLYWAYKKTHGNISKTDSSKKLEQNNIPVFCPALTDGSIGDMLFCHSVHSPGLVVDIVQDVRLMNAETIHASPRKTGIILLGGGLPKHHICNANMLRDGADYAVYVNTAQEFDGSDSGARPDEAVSWGKIKSSARTVKVHCDATIAFPLLVAATFARKVHGTKSTN

SEQ ID NO: 51154 - protein, 243 aa, Zea Mays
MSDNEKLVGEGTTRRGADWEVVTLTASAYEAAPGPVGTEVKPVNEDQERSSSDALLMSDHFVFPPSEHENLPIQTSFDEIHAEKDVQKPSTSVEDYSIKNDVGSERVQFDDEGKHLSDDDVEMKDDTPGYGSSHAEDDAHGFVAHGDGIESGEDFDEKSGHPLELSDSKSCDTGASCKCWLKKHMTCLYNQTKETNAIWSVVVAAALVGIVILGRWHKDKFHLNQLKWCSGSAVRCARTAGKG

SEQ ID NO: 51155 - protein, 220 aa, Zea Mays
MAQQKNAHVPKFGNWDSDGNVPYTLFFENARKGKGAGAAGGRMINPNDPAENPEAFSVAAPSPPPGRHERRPSDAPPPPMSPNPYYAAGSPYHRHAAGEPPRRAAGYSVDQSPAHPYSSESAGYGLVASSVDRSRAKGASRGNETPTRGSAVPKFGDWDANPASADGYTHIFNKVREEKQTTQAGKPAAYGKDGMRTNGPKQHDDDGYVSSTLVPLGLGM

SEQ ID NO: 51156 - protein, 1667 aa, Zea Mays
MDRGTGPGAEVLSPGEAEWPPELRLPPPPPPVPEPPGPHPPAPDSASMRMPAPHLHLQLPPAAAARKDPSPPRHGEGFDDQLFLGSLMGAAAPLQHQHHHQQQPAAAAPVKRKRGRPPKNRDGAAPVPAPVKPVSKKDEEVVCFICFDGGNLVVCDRRGCPKVYHPACIKRDESFFRCRVKWDCGWHICSSCEKAVQYMCYTCTYSVCKGCVKQGKFFGVRGSKGFCDTCYGTILLIESKDDGAKVGVDFDDKNSWEYLFKLYWLDLKGKHLLTIEELKSAKNYWTVPTTAGRREKEESSDELYDASNDQDATFDISSKKQRQNNSSGKRGQKRKKDGGITSRKRGISINSAGSLPNGSTGEGMSLAGDTKWASSELLEFIGHMRNGDSSYISQFDVQVLLLEYIKQNNLSDPRRKSQIICDARLSNLFRKPRVGHFEMLKLLEMHYLVKQVPTLNADSERAFDSYSAQVNHGGYNELSDKLGSDKRRKAHMKIERESTINPEDYAAIDMHNINLIYLRRSVMEDLIDEVAVFSDKIAGAFVRIRISGLGNKQDMYRLVKVLGTHKVAERYTVGKKTTDYALEISNLEKKEIITMDTISNQDFTEEECKRLRQSMKFGLTARLKVRDVYDKAKIFQSLQFKDRLSRLRDRASETGRRKELRECVEKLQLLNTPEETERMINEAPEVHVDPQMDPSYESAEEPDYKKAVDWTMHRNGPDLLFPGRKGTKLNSVENHTQNSLDASGHISSLPTEDVDHRLGAGSNINLNNMAPEPASLGVLSNDTEPEKVWHYKDPNGNVQGPFTLLQLSNWASFFPRDLRIWLTFESEENSLLLTEVLPKQQKDFIQPSTVTTSDKSIWAGSGQDRINSNANNSSSPSLSAECYDPTKYLKPLGGTSPSRSLKDSHALHEVQNQVNDSSTILSSAGSYVPTSSHDERVSRDRVDEWNSSQDNGGIWNPTMNHSRKSNAQQHPDGFTGKDQMLTESKCSSHMVSVLTPQQSERDPATSLSTTSRPECKTMCRQEGSSWSSATNAGVHDLQLTIALTKPETCSPTNPVEDRDSSSASAVSCQSGAPACIPQPDPTSTCNSSKIEATMDLHKTCQPDTSNESFGRLPEPQSGSLFSLKTLNLESEHPSSTPKLEGKETSMNQSGSTSVAHENLATKTRVRPPTSKIDSLQPLKERSCPTERDSITQLEHLFEENVVKRNNEVVNPVSDAEGIAVSDVLESLTEQDCEKYSTHGADCEKYSTHGAAPLQNLVPASAEEEQPQCSSPIALSPWGEPSYYQGEAVDSALWGVQDGNDMWSMPSPTPGLQPSSEEARADHGDGAFVETLPRQGDEKTEHANSSVSGSGVPEQVKPKASTASGPSLDGSTKALGWQLLGSSLEGSAKASGWKPPALSIEGIANASGSQALYPTQGSTKSSGCQRSSSSPDGSRKASGWQQSSTSPVGSGKAHGWQRSGSFTQGGTKAAGWQPSGSSTDRSAKVDGWQRTSSSPEGNRKASGWHSSGRESSKITYGASENRKSFSSHQATTPTGRHSLARRQGSSDKGAAGWEESLGNTWEASKRQQRNSDKNAGCGEALGSNRTWHPSSGNPSRSSQGNHQHDRHSHGSDSRRGSSNYPRRSDHRHDHGSGGSSRPSSRGQPQRGVCKYYENGHCWKGSKCQYLHR

SEQ ID NO: 51157 - protein, 189 aa, Zea Mays
MLLSAYKEMVCQLSYLVEASHSMRCFSKAAPNCSITQFSDRQDNLNDSGDGGGAPVFKWFSVLEFESLAQELVQMFVSEQKLKRLLLLEFLSIALKEGVELQTSLNWGDELYDGESNKLQSIGLQSGDAYSPPENWCAERLGSQRPGNLPLHEVLQVYLTTWHANMNINRSRIGEIFELVEEEMKIKLS

SEQ ID NO: 51158 - protein, 131 aa, Zea Mays
MFPLITSESLAQELVQMFVSEQKLKRLLLLEFLSIALKEGVELQTSLNWGDELYDGESNKLQSIGLQSGDAYSPPENWCAERLGSQRPGNLPLHEVLQVYLTTWHANMNINRSRIGEIFELVEEEMKIKLS

SEQ ID NO: 51159 - protein, 238 aa, Zea Mays
MAISTWSARLLLTPASSRATLSPPRPPTTNPLSSFFPRNRLHFVRPRPRPPCAYISAPAPGPEAAYAPPSLDATAAAADVAAAISSSDAVTWAGVWALLSRHRARIAVCIAALVACTTCTLSMPLFSGRFFETLIGRGNEPLWRLLSKIAILYTLEPIFTIIFVINITIIWEQVMARLRSQIFRRILIQKMLFFDRHKVGELTGLLTSDLGSLKSVVSDNISRDRGLRALSEARNFTL

SEQ ID NO: 51160 - protein, 335 aa, Zea Mays
MEEAAAAAAAWASNAATPVPSEPMRSPPDAEASVDPTAVGDDEHDSKEVVLRRYFLQEWELVSAILHRVVAGGGVAESADVHRIRSIMDKYQEEGQLLEPYLENIVSPLMSLVRSKTMELGASTDELLDIIKPLCIIIYTLVTVCGYKSVIRFFPHQVSDLELAVALLEKCHTMSSATALRQESTGEMETKCVVLLWLYILVLIPFDISTVDTSIATADNVDGPEVVPLVTRILDICKDYLSSSGPMRRMSGLLLARLLTRPDMAKAFSSFMDWAHKMLLSVSDDFVDQFRSIGIVEALASIFKELFAHTIIFCGYQQGMGCEHLVSQLHTANLV

SEQ ID NO: 51161 - protein, 545 aa, Zea Mays
MSYQLALKFFQLAKDEGMMGQGFVWITAYGLTDIFNVVGYPALDVMEGVVGIEPYVQETAKLNKFRQRWCEKYRSENPGTSINESITSGLYAYDTVWAIALAAEKAGYVNSDFVLSETNNGSTDFNKISTSRAAKKFHAAFLEVNFTGITGQFVIQDMQFQLVSTTYKIINVVGHERRAVGFWTPGLNISRILEKKDDISTIVWPGGSEKTPRGWLLPVNKVLKIGVPGKSGFSSFIRSEDGIPKGFCIDIFEEVISKLPYKVPKHYVEFGNGKGESNGTYDELVYKVYLKEFDAVVGDITILANRSLYVDYTLPYTESGVRMLVPVWDRRQKTAWTFLEPLTADLWLRTGAFIVFTGFVVWFIEHRTNQEFRGPPATQIGSLFYFSFSTFVFAHRERIVNNLSRITVVVWLFVVLILQQSYTASLSSILTVEQLQPTVTNLDEVIRRGDYVGYLSDSFMPELLKRLKINETKMIAFSSPEEYNDALSTRKVAVIVDEIPYLKVFLSKYCHNYTMVGPTYKFDGFGYVSNISLTSLQLSVFSRAR

SEQ ID NO: 51162 - protein, 81 aa, Zea Mays
MLAATVLGSLCKEEELRVKVLLGGCIPPLLALLRSKSAESQTAAAKTIYAVSQGGIRDHVGSKIFFTENVVPVLWEQLKIS

SEQ ID NO: 51163 - protein, 227 aa, Zea Mays
MGTVVDAPAVVAEEVTENMLGGKKVTAVFVLGGPGSGKGTQCANIVEHFGFTHLSAGDLLRAEIKSGSENGTMIENMIKEGKIVPSEVTIKLLQEAMIKNENDKFLIDGFPRNEENRAAFENVTKISPAFVLFFDCSEKEMEKRLLGRNQGRVDDNIETIKKRFKTFVESSLPVIEHYNSRDKVKKIDAAKPIPEVFEDVKTIFAPYAPKHLLALPFPSFPLLSPLG

SEQ ID NO: 51164 - protein, 136 aa, Zea Mays
MLGGKKVTAVFVLGGPGSGKGTQCANIVEHFGFTHLSAGDLLRAEIKSGSENGTMIENMIKEGKIVPSEVTIKLLQEAMIKNENDKFLIDGFPRNEENRAAFENVVRPSFLYTKFVDSHASLRNYCSFLLVTQMNS

SEQ ID NO: 51165 - protein, 78 aa, Zea Mays
MDECTNLNVPVQDYGGIFAYNAVTIHFFLCVCEVKYKMTTRGQAALGLIRLCGIVPESFHSTLFLISVVQSLYKGAFG

SEQ ID NO: 51166 - protein, 391 aa, Zea Mays
MAYIMDTNEEERVKGKTVEVGRAHFETEHTRFTILDAPGHKSYVPNMISGASQADIGVLVISARKGEFETGYERGGQTREHVLLAKTLGVAKLVVVINKMDEPTVKWSKERYDEIEAKMVPFLKSSGYNVKKDVQFLPISGLVGTNMKTRMDKSICSWWDGPCLFEVLDRIVVPLRDPKGSVRMPIIDKYKDMGTVAMGKIESGTIREGDSLLVMPNKSHVKVIGLNLDESKVRRAGPAENVRVKLSGVEEEDVMAGFVLSSVANPVGAVSEFIAQLQILELLDNAIFTAGYKAVLHIHSVVEECEIVELIEEIGMKKKKEEDPKKKKPKRKPLFVKNGAIVVCRIQVNNLICIEKFSDFPQLGRFTLRTEGKTVAVGKVVDIPPAGSPTF

SEQ ID NO: 51167 - protein, 58 aa, Zea Mays
MCMNICVGNFLVTCFPHNNIIKLWNETAFAYSAITFYSTPIKFMGCLACKTRVKYFNS

SEQ ID NO: 51168 - protein, 66 aa, Zea Mays
MLRKRVLPMFQIIVHLDLMIQSIISGVVYSQCIVSICVCVLCFPCTLFLSRGTLCQVPEIWFSFRQ

SEQ ID NO: 51169 - protein, 112 aa, Zea Mays
MSTINRKEREKENKYIWHQKLLPCYNINLMTEIINIFTILANLSTCSLNRQNISRVIFVTFIVPNVVSRQSLFGFSVFLNTGFSIAFSMCICTSLTSVAIVILPGISSVHHL

SEQ ID NO: 51170 - protein, 104 aa, Zea Mays
MNPELSCMDATGKAAKFGQLKDGYMFDTSTGMSRMLLSSPTCPVLEVLGKKLSFEIAVGLNGRVWVNAPAASTVILVSNAIMRSESLSGIKQRAMVENLLERLS

SEQ ID NO: 51171 - protein, 359 aa, Zea Mays
MALVRAYEGWKDAEREGSAYEYCWRNFLSSQTLQAIHSLRKQFSYILKDSGLIDSDGNTNNSLSHNQSLVRGIICSGLFPGIASVVHRESSMSFKTMDDGQVLLYANSVNAKYQTIPYPWLVFGEKVKVNAVFIRDSTGVSDSILILFGGAVAKGGMAGHLKMLDGYIDFFMDPSLSECYLQLKEELDKLIQQKLEDPNFDIHKEGKYILFAVQELAAGDLCEGRFVFGRETSRARLRSPEDDGKSNLIKDGMNPKSLLQTLLMRAGHTPPRYKTKHLKTNEFRAVVEFKGMQFVGKPKRNKQLAERDAAIEALGWLTQTSGVKAPDENDDDSPLDLTDSMLKLLTRPRRHSKNSSRKR

SEQ ID NO: 51172 - protein, 440 aa, Zea Mays
MIGALDGNENLTDLGRYLSMLPVDPKLGKMLIMGAVFRCIDPILTVVAGLSVRDPFLLPQEKKDLAGTAKARFSAKDYSDHMALVRAYEGWKDAEREGSAYEYCWRNFLSSQTLQAIHSLRKQFSYILKDSGLIDSDGNTNNSLSHNQSLVRGIICSGLFPGIASVVHRESSMSFKTMDDGQVLLYANSVNAKYQTIPYPWLVFGEKVKVNAVFIRDSTGVSDSILILFGGAVAKGGMAGHLKMLDGYIDFFMDPSLSECYLQLKEELDKLIQQKLEDPNFDIHKEGKYILFAVQELAAGDLCEGRFVFGRETSRARLRSPEDDGKSNLIKDGMNPKSLLQTLLMRAGHTPPRYKTKHLKTNEFRAVVEFKGMQFVGKPKRNKQLAERDAAIEALGWLTQTSGVKAPDENDDDSPLDLTDSMLKLLTRPRRHSKNSSRKR

SEQ ID NO: 51173 - protein, 107 aa, Zea Mays
MCSHQGPVVEKSTVVVSVPVVVMVETAEIDYNSSFSVFTMEAYDLLDGDACNAQIYSVASAVSRRVEKVERDYLSYDEPRTCSRARHATTLVASSAMRRTMSTSLGS

SEQ ID NO: 51174 - protein, 132 aa, Zea Mays
MPRSLVMVPLSTTHCLMQSCRHSVSGCTVFLRPSSYLGPPSVRLWSPASVLRLSTGLSLVWCLRRASCAISFRSFIALTRSMLVYCDNVSTVYLFVNLAQHQHTKHVEIHLHFIHEHVAVGDVHVHHIPMSS

SEQ ID NO: 51175 - protein, 515 aa, Zea Mays
MASPARPVAASVSGAFGLSPDPKRCSFDQALRHKENRLLMSFVNFHEQEKISKEIVTHAIESCMKKQADNLLNSLDVISGRLSQLELYCYRLERSIGELRSDVMDYHNEANLNFRCVEKQVKEVQKSVQAVQEKQELAETQKEMTKLQIVHEDSAQKSEGTAPSVFMNRENEVALVPLHQVNAVQSPPVQFQSCSGLILQQLMPVQDQQRSNQTAVYCMRGQSHLEHRQAQMFEAAGQSLQTHTRKTQPPTVVEVSQVTSQAPEFYPHPQHQWQHQTGQQVFSQARQPQPHVLQQQYSNIQQGPAQMVQLQTSSPHAHSTPQVTVVYPPYGPHQSACGNAEARSGGIVVPPSYSTISSSHRKHHEAAPVYVQSNTVSVPLAEQHQQLHSLGNGSFVPQPSKVSPCGLASYTVQGNAQTYSPAYGSPSSNPATIVAVLNQQAHGSSPMVLHHLGPQSVLNHPIDIAEKVTRMGYSKDQVEGLALRMVAAGQPADHNPLHDRLSSVSHGVAPHAWSG

SEQ ID NO: 51176 - protein, 71 aa, Zea Mays
MLCARIGDHVEIGANTCIDRGSWRETTVGNHTKIDNLVQIGHNVVIGKCCMICGQVGIAGSATFDSQLIAW

SEQ ID NO: 51177 - protein, 185 aa, Zea Mays
MMAVILPRTVRRAAEAALSLHSVPPRAACHFARSLGGVSSACSMEFVSWQNGGGILHRAASVDPTAVVEAGAVVHSGAVLGKEVVVGSGAVVGPSVSIGQSTRVGYNVVLSNCSVGEFCIIHNGSSIGQDGFGFFVDEAGQVKKKPQMLCARIGDHVEIGANTCIDRAGERQRSEIIPRLIIWSR

SEQ ID NO: 51178 - protein, 227 aa, Zea Mays
MIEKLAQFTDIRCCLIVGGLSTKVQEVALRSMPDIVVATPGRIIDHLRNSLSVGLEDLAVVILDEADRLLELGFSAEIQELIRMCPKRRQTMLFSATMTEEIDELIKLSLNKPVRLEADPSLKRPATLTEEVVRIRRARESNQEAVLLALCLKTFKRSVIIFSGTKQSAHRLKIIFGLSGMKAAELHGNLTQAQRLEALELFRKQEVDFLIATDVAARHGQEEKAMP

SEQ ID NO: 51179 - protein, 578 aa, Zea Mays
MDPSFRFDPDSSDDEASGAPARGRLAQSPWEFSLYAESVAAEHARRRTTSIDEKILHLRQGCGKPVLSDGSESDVSGSGEDDSNEKEIEEESGDEEDEREIEGVGDEEESGDREGGEEGGSELGEEKDAHEEEDTVEQNETSGPVDPSNFFASSEGATFHANSFLELNLSRPLVRACEALGYQKPTPIQAACIPLALTGRDICGSAITGSGKTAAFSLPVLERLLFRPKRVPAIRVLILTPTRELAAQVHSMIEKLAQFTDIRCCLIVGGLSTKVQEVALRSMPDIVVATPGRIIDHLRNSLSVGLEDLAVVILDEADRLLELGFSAEIQELIRMCPKRRQTMLFSATMTEEIDELIKLSLNKPVRLEADPSLKRPATLTEEVVRIRRARESNQEAVLLALCLKTFKRSVIIFSGTKQSAHRLKIIFGLSGMKAAELHGNLTQAQRLEALELFRKQEVDFLIATDVAARGIDIVGVQTVINFACPRDVKTYLHRVGRTARAGREGYAVTFVTDDDRSLLKAIAKKAGSQLKSRIVAEKPVAECAQLIEQLEDQISIIIREEKVEREARKAEMEIAKKI

SEQ ID NO: 51180 - protein, 519 aa, Zea Mays
MIEKLAQFTDIRCCLIVGGLSTKVQEVALRSMPDIVVATPGRIIDHLRNSLSVGLEDLAVVILDEADRLLELGFSAEIQELIRMCPKRRQTMLFSATMTEEIDELIKLSLNKPVRLEADPSLKRPATLTEEVVRIRRARESNQEAVLLALCLKTFKRSVIIFSGTKQSAHRLKIIFGLSGMKAAELHGNLTQAQRLEALELFRKQEVDFLIATDVAARGIDIVGVQTVINFACPRDVKTYLHRVGRTARAGREGYAVTFVTDDDRSLLKAIAKKAGSQLKSRIVAEKPVAECAQLIEQLEDQISIIIREEKVEREARKAEMEIAKAENMIAHKDEIYSRPKRTWFATEREKKLLVAAAKESLGQGKSTSGIISAKQAEDLRLKEKKRREHEKDLPRKKRRRLEAQREMLEDEDEDDEEAKESDRGKKLKKGQSLVDAAYRKAKSLKAASKRGPGASKGKKEKNARQYSEKTPNRHEEMRELFQNDMSEWKQGRSSKKNNNFAHKKSKAFNSKARYKRRK

SEQ ID NO: 51181 - protein, 133 aa, Zea Mays
MYPEASCRTEAVSVCTAKAKQRNERSETCDHRSACNSSCADDDKGRNGRGSSAGCTAKIKLWENNTIPSRTATLAAGAPRLSRRSCPSSPWAIRARFSGCCYSSASASSRTWACFPTPLAGSRRRRRRRRLWH

SEQ ID NO: 51182 - protein, 175 aa, Zea Mays
MQKHQKYFAVISKSTGDLLPYFIAVANGAISKEVVRKGNEAVLRARYEDAKFFYKMDTQKKFSEFRGQLSGILFHEKLGTMLDKMTRVENTVAELALILGINERTVPIIKDAAALAMSDLATSIVTEFTSLAGIMARHYALRDSIPEEIAEALFEITLPRSSGDVFPRTDADWIA

SEQ ID NO: 51183 - protein, 626 aa, Zea Mays
MKQTEVEVELRGPPVAKAFDEEGNPTKAAEGFCRKNNVSVDHLYRRIDGKTEYIYARVRESARFADEVLTEDLPTIVSGISFPKSMRWNSNIVFSRPIRWILALHGDFVVPFYFAGISSGNQSCGLRNSSLANFKVETAESYLGTVEKAGILINMQERKEKVLHASTVLAQGVGGDFIAPDSLLQEVVNLVEAPVPILGRYDDSFLELPKDVLITVMQKHQKYFAVISKSTGDLLPYFIAVANGAISKEVVRKGNEAVLRARYEDAKFFYKMDTQKKFSEFRGQLSGILFHEKLGTMLDKMTRVENTVAELALILGINERTVPIIKDAAALAMSDLATSIVTEFTSLAGIMARHYALRDSIPEEIAEALFEITLPRSSGDVFPRTDAGIVLAVADRLDSLVGLFGAGCQPSSTNDPFGLRRVSYGLVQILVENKKSFDLRRALTLLAGVQPIAIESDVIDEAVQFVTRRLEQLLVDEGINCEIVRSVLMERANCPYLAAQTATEMEAFSRTETFQKIVEAYSRPTRIIRGKEIESALEVDPHVFEKDEEKVLWSAYLEVADKIHPGVDIKTFVDASLILIQPLEDFFNSVFVMAEDERVRNNRLTLLRKIESLPKGIADLSVLPGF

SEQ ID NO: 51184 - protein, 497 aa, Zea Mays
MQCSNTEVGAGTMNPLTFLRVLGPEPWNVAYVEPSIRPDDSRYGDNPNRLQRHTQFQVILKPDPGNSQDLFLHSLSAIGINIHEHDIRFVEDNWESPVLGAWGLGWEVWMDGMEITQFTYFQQSGSLPLQPVSVEITYGLERILMSLQEVDHFKNILYTEGITYGELFLENEKEMSAYYLEHADVSHIQKHFDNFEEEARSLLSLGLPIPAYDQVLKASHAFNILDSRGFVGVTERARYFGRMRSLARQCAQLWVETRENLGHPLGAYEEDNLIYPHVSKKTHREEVLVQPRAFVLEIGTEELPPRDVVEATEQLEKSLVNTLEKRRLTHGKVHTYGTPRRLAIVVENLSMKQTEVEVELRGPPVAKAFDEEGNPTKAAEGFCRKNNVSVDHLYRRIDGKTEYIYARVRESARFADEVLTEDLPTIVSGISFPKSMRWNSNIVFSRPIRWILALHGDFVVPFYFAGISRFALAVGISHVAFVTLLWLILRWKLQNHI

SEQ ID NO: 51185 - protein, 472 aa, Zea Mays
MQERKEKVLHASTVLAQGVGGDFIAPDSLLQEVVNLVEAPVPILGRYDDSFLELPKDVLITVMQKHQKYFAVISKSTGDLLPYFIAVANGAISKEVVRKGNEAVLRARYEDAKFFYKMDTQKKFSEFRGQLSGILFHEKLGTMLDKMTRVENTVAELALILGINERTVPIIKDAAALAMSDLATSIVTEFTSLAGIMARHYALRDSIPEEIAEALFEITLPRSSGDVFPRTDAGIVLAVADRLDSLVGLFGAGCQPSSTNDPFGLRRVSYGLVQILVENKKSFDLRRALTLLAGVQPIAIESDVIDEAVQFVTRRLEQLLVDEGINCEIVRSVLMERANCPYLAAQTATEMEAFSRTETFQKIVEAYSRPTRIIRGKEIESALEVDPHVFEKDEEKVLWSAYLEVADKIHPGVDIKTFVDASLILIQPLEDFFNSVFVMAEDERVRNNRLTLLRKIESLPKGIADLSVLPGF

SEQ ID NO: 51186 - protein, 453 aa, Zea Mays
MQERKEKVLHASTVLAQGVGGDFIAPDSLLQEVVNLVEAPVPILGRYDDSFLELPKDVLITVMQKHQKYFAVISKSTGDLLPYFIAVANGAISKEVVRKGNEAVLRARYEDAKFFYKMDTQKKFSEFRGQLSGILFHEKLGTMLDKMTRVENTVAELALILGINERTVPIIKDAAALAMSDLATSIVTEFTSLAGIMARHYALRDSIPEEIAEALFEITLPRSSGDVFPRTDAGIVLAVADRLDSLVGLFGAGCQPSSTNDPFGLRRVSYGLVQILVENKKSFDLRRALTLLAGVQPIAIESDVIDEAVQFVTRRLEQLLVDEGINCEIVRSVLMERANCPYLAAQTATEVRCYVPHTPIRPQRFYKIQIVFVCADTCRWKHFREQKHFKKSLKRIQGQQGSSVEKKLSLLWRLTHTYLRKMKRKFCGAPTWRLLIRSILVLILRPLWMLLLS

SEQ ID NO: 51187 - protein, 207 aa, Zea Mays
MEIGMASGLETLCGQAYGAKQYDKLGMHTYRAIVTLIAGKLLILIGQDPLISREAGRYIVWLIPGLYAYAISQPLTKFLQSQSLIIPMLWSSIATLLLHIPLCWLLVFKTSMGYIGASLAISLSYWLNVMMLAAYIRYSDSCKETRSPPTVEAFKGVSVFLRLALPSALMLWNFTKSRAANFSSFNLFDDYHINVYYTLWAWSGCKH

SEQ ID NO: 51188 - protein, 475 aa, Zea Mays
MISPARVNISGPAPTGLVAPDISPSPLTVQVPVVPPKHHRSYKLVLFPAIGVLVTGVAILLMIVLIFLIRRKNKELKKMEGNNPLDAWSFSCVKKGQEGNSTIFGRFSYKEMKNATRNFSTVLGGGENGTVFRGQLNDGSVVAIRRVESSPKQSHNEFCKEMEFLGRLHHRHLVGLKGFCSTRFERFQVYEYMENGSLQDHLHSPSKHLLPWKNRVQIAIDVANALEYLHFYCDPPLYHGDVKPSNVFLDKNYLAKLAGCGLAHHSSSGNTTPSCTPVNVKAQATPGYVDPEYMVTQELTPKSDVYSYGVLLLELVTGKPVIQDNKSLVEWSRELIGTDYRLHELVDPSVADAFDLDELQVVADVIHWCTHRDGAARPSMKQVLRILYERLDPLSGRFARAVEGEEGYYYCHGGGRVKGKQAGDGVIQFSGDAARSWLPSSSSTSRSHCSRSVLLECNSPEPQSSPAHGNGAFLA

SEQ ID NO: 51189 - protein, 275 aa, Zea Mays
MNTWKMEAFKITYIRQVNICYHGKIGSKLPSMLPMLWSTFIFIVILHYTMEMLSLAMSSWTRITLQSSGNTTPSCTPVNVKAQATPGYVDPEYMVTQELTPKSDVYSYGVLLLELVTGKPVIQDNKSLVEWSRELIGTDYRLHELVDPSVADAFDLDELQVVADVIHWCTHRDGAARPSMKQVLRILYERLDPLSGRFARAVEGEEGYYYCHGGGRVKGKQAGDGVIQFSGDAARSWLPSSSSTSRSHCSRSVLLECNSPEPQSSPAHGNGAFLA

SEQ ID NO: 51190 - protein, 449 aa, Zea Mays
MLFACSATKSYDTVSKDVIQRWTYPMVPDVVSSRDSSESRLHRQGIYKASDVTLSPSAQIGANSVVGSVTSIAGHCKVLNSVIGQGCKIGKNVLINGSFIWDNVIIEDGCKVSNSLVCDGVHLRAGAVVEPGCVLSFKVEVGKNVVVPAHSKVSLLPQPSNEDSDEELEYADTNSGIADSPPFSSMRSNGDQATVPSEEDELGTSETGTCGVVGYIWTSVDSGIMEEWRQSIAPIPKEKLEELQHAVPDDDRSEDESNNPTLPDKDDSSDSLVEDDDHISKFEKEVEETFQRALGGGVNRDNLILEINGLRLAYSLQHADCAGAVFYSVMKSALLAAQSSNDTLLKTTADALGKWKDLLRNYTKTVDEEMEILLKFEEMCQETTKDFSPLFPKILPYLYDTEVVSEDAILRWAEEKEHADESDKVFVKQSEAFIQWLKEAEEEDDEEEE

SEQ ID NO: 51191 - protein, 462 aa, Zea Mays
MGYKIYTHELRSGYAARIDNFRSYDTVSKDVIQRWTYPMVPDVVSSRDSSESRLHRQGIYKASDVTLSPSAQIGANSVVGSVTSIAGHCKVLNSVIGQGCKIGKNVLINGSFIWDNVIIEDGCKVSNSLVCDGVHLRAGAVVEPGCVLSFKVEVGKNVVVPAHSKVSLLPQPSNEDSDEELEYADTNSGIADSPPFSSMRSNGDQATVPSEEDELGTSETGTCGVVGYIWTSVDSGIMEEWRQSIAPIPKEKLEELQHAVPDDDRSEDESNNPTLPDKDDSSDSLVEDDDHISKFEKEVEETFQRALGGGVNRDNLILEINGLRLAYSLQHADCAGAVFYSVMKSALLAAQSSNDTLLKTTADALGKWKDLLRNYTKTVDEEMEILLKFEEMCQETTKDFSPLFPKILPYLYDTEVVSEDAILRWAEEKEHADESDKVFVKQSEAFIQWLKEAEEEDDEEEE

SEQ ID NO: 51192 - protein, 454 aa, Zea Mays
MLFACSATKIDNFRSYDTVSKDVIQRWTYPMVPDVVSSRDSSESRLHRQGIYKASDVTLSPSAQIGANSVVGSVTSIAGHCKVLNSVIGQGCKIGKNVLINGSFIWDNVIIEDGCKVSNSLVCDGVHLRAGAVVEPGCVLSFKVEVGKNVVVPAHSKVSLLPQPSNEDSDEELEYADTNSGIADSPPFSSMRSNGDQATVPSEEDELGTSETGTCGVVGYIWTSVDSGIMEEWRQSIAPIPKEKLEELQHAVPDDDRSEDESNNPTLPDKDDSSDSLVEDDDHISKFEKEVEETFQRALGGGVNRDNLILEINGLRLAYSLQHADCAGAVFYSVMKSALLAAQSSNDTLLKTTADALGKWKDLLRNYTKTVDEEMEILLKFEEMCQETTKDFSPLFPKILPYLYDTEVVSEDAILRWAEEKEHADESDKVFVKQSEAFIQWLKEAEEEDDEEEE

SEQ ID NO: 51193 - protein, 273 aa, Zea Mays
MARKMLIDGEVAAVADGGHYDYDLFVIGAGSGGVRGSRTAASFGAKVAICELPFHPISSEWLGGHGGTCVIRGCVPKKILVYGASFRGEFEDSKNFGWEINGDINFNWKTLLENKTKEIVRLNGVYQRILTSAGVTMIEGAGSLVDAHTVEVSQPDGSKQRYTAKHILIATGSRAQRVNIPGKDLAITSDEALSLEELPKRAVILGGGYIAVEFASIWRGMGAEVDLFYRRDLPLRGFDDEMRAIVASNLEGRGIKLHPGTNLSEGAHQTPRD

SEQ ID NO: 51194 - protein, 390 aa, Zea Mays
MRSVCFLHFLFSCILSAQQYLFCFFLWVWGLFMLRDVEREPLLFNFQQKLAYHIYLACSWSARCWPCTTAFMCREGNVTCLRRRNLLFERQFHLLAEFDEAKRSCRKRLDGHNRRRRKPQPDTMSSGSFMTSQQGTRFSSFPVPRPEPSWPGVIKSEDSGSYYAHQRHPVLSSRPHFAGGGSTPPAYSSKEGRRFPFLQDGCDQQQVGGFSAGAGAQQLEVSSTSTVCQPLLKAAAAAAPPPPPESSSSNKMFSDGLAPAVLDSDCALSLLSSPANSSSVDVGRMVVHQPAEHIPMAQPLVPGGLQQQQQHHPFGGSPAWFACSQAGSSAVSAGGFACPPGVESEQLNTVLVPSSDGGGHDMNMNYHGIFHVGGDGSSDGTSPSLPFSWQ

SEQ ID NO: 51195 - protein, 829 aa, Zea Mays
MIRENLTWIAQMLLQPSPAVDVRNHRGWTLRDFLERLPREWIYEELMEMLEDKGVHLSPTIYEVADWVKFRRTVTSPAFGWQGAGPRSIGFVQSVVDNDHLAVSFCTGEAHVLTSEVIKVIPLNRGQHVQLKPDVSEPRFGWRGQSRDSIGTVLCVDDDGILRVGFPGASRGWRADPAEIERVEEYKVGNWVRIRPSLTVAVHGMESITPGSVGIVYSIRPDSSLLLGLCYLSNPWLCEPEEVEHVDPFKIGDQVCVKRSVAEPRYAWGGETHHSVGKIIDIESDGLLIIDIPNRAAPWQADPSDMEKIENFKVGDWIRVKVTVPSPKYGWEDVTRNSIGIIHSLQDDGDVGVAFCFRSKLFLCSVADIEKAQPFEVGEKVHVSPSISEPRLGWLNETAATIGAISRIDMDGTLNIKVSGRKSLWKVAPGDAERLSAFEVGDWVRPKPSIGSRPTYDWNSVGRINIAVVHSIQDSGYLELAGCFRHGKWLTHNTDIEKVQTVKIGQHVRFRAGISEPRWGWRDANPDSRGIIAGVHADGEVRVAFFGVPGLWRGDPADLEIENIFEVGEWVRLRNDVEQWRSLKPGSIGVVHGVGYQGDAWDGTIHVAFCGEQERWIGPSSQLEGVSKFVVGQRVRIRGCIRQPRFGWSNHSHSSIGTISSIDADGKLRIHTPAGARAWLTDPAEVEKVEDEEEVCIGDWVKVKDSVGTPVYQWGDVNHSSIGVVHRADDGELWIAFCFCERLWLCKAWEVEKVRPFRQGDKVRIRSGLVSPRWGWGMETYASKGEVVGVDANGKLRIKFRWRDRLWIGDPADVVLDDAHLLTEASNGF

SEQ ID NO: 51196 - protein, 398 aa, Zea Mays
MTPPGKKETALKDYTGSLAIISEIEPKDAIMQLLMQETYSRSECSKFIKIIQERVLDSDSGDIDAGGFALTSARKASRLAVDGYSSFSPHESSPATSSLQMHGCDNSAAVGTIPKLTHTNQSPFINNAKNINPVLKRNYSVREDPYGEIRRVRPKINGNSWDISKFKQVDIIRNHPAANSREELTARNPNASRDGKKLLKDIMGASNLTYPNFISKAETADETSDVPDKPSAVTPQQHDSSFPQAGKKQKGFAATTLNQCSNEKGFALKVEPLNAFIPFEQQMMDLSHRKQENAACDDSCSLSKLMLKEDIEAAPSLPTGIQVQNGSKNRRRRQPNVQKTTATPTRSPARGQRRKNNDAMVKSEMGLIEQSKLVLTEQEPELGDVPVKRPVGRPRKAR

SEQ ID NO: 51197 - protein, 365 aa, Zea Mays
MEIPLELMLTITQKKPWMFFPDIIPLGHPIFDVIESTDPETDWDLRLACLLLYAFDIEDNFWQLYSDFLPSVDECTSLLLAPKEDLMELEDEDLASQMLKHQERAIDFWQKHWDKPIPLKLKRLARDHERFLWALSIVQSRSVNLKLRMGAFIQDANVLAPYADMLNHSPNANCFLHWRFKDRMLEVMIKAGQAIKKGDEMTIDYMSGVNSKFMERYGFSSPTNPWELINFSSPATIHMDSFLSVFNIAGLHDELYHNSALTSVVETDFVDGAVVAAARALPTWSDGDVPAIPSVERKSAQALQEECRQMLDSFPTTIEQDQQILDSDAHISKTREIAIKYRLHRKMLLQKIMDALDIYQDRILF

SEQ ID NO: 51198 - protein, 219 aa, Zea Mays
MIKNTVATLMVRLHHLPLPRAAPAPTYRCGRHLALAPPLPRLRASAAVMSTAAEQTIADQKRTLRAEVRRALKALSADQRASEDLAIQTTILDSSWFKASKRLCAYISCQQLREVDTSKILAECLPSNPGQEELAKDLYVPRVEDKNRNMRMLKITTMDDLVKNSMNILEPSPVDATGNNREDVLSSLSPVDLFLLPGQAFDRTGRRLGRGGGYDYIVL

SEQ ID NO: 51199 - protein, 85 aa, Zea Mays
MEDRIEHDRSEQRPNYAHLPVTSAYPVVLLLLLAFFLSFFSFNTSREATYEKRRLSPHLSAREVELKKLCKPPDGKEVWHGVQCR

SEQ ID NO: 51200 - protein, 254 aa, Zea Mays
MIGPVQSRGRGQSAMDVDEAGGEERRPSEKELFRAAESGDAAAFASLAPADLSLRNEDGRSLLHVAAAAGHPQVVLALAQCGGDAAASVLNAQDEEGWAPIHSAASSGNSQIVDILLERGADVNLVTDGGRTALHYAASKGRLNIAEKLIAHGANVNKKDKFGCTPLHRAASTGNAELCEFLIEEGAEVDAVDKTGQTPLTHAVICENKGAALLLIRHGADVDVEDKEGYTALGRASNSFRPVLIDAARAMLEG

SEQ ID NO: 51201 - protein, 158 aa, Zea Mays
MAAAMDVDEAGGEERRPSEKELFRAAESGDAAAFASLAPADLSLRNEDGRSLLHVAAAAGHPQVVLALAQCGGDAAASVLNAQDEEGWAPIHSAASSGNSQIVDILLERGADVNLVTDGGRTALHYAASKGRLNIAEKLIAHGANVNKKDKVCILSTI

SEQ ID NO: 51202 - protein, 487 aa, Zea Mays
MAEATGHGGRVVDLSGAEIRGDLEDRNPPIFLPRQPAASPLLALDIGGTLIKLVYTASRGGGADGTDLRFAKFERRRLQECFNFIRAEGLLASNAGGEGVTLKATGGGAYKFADDFLEKLGVCLDKLDEMDSVVSGANFLLQSIPGAAFTHMNGLRNPVDVSPNNLFPYLLVNIGSGVSILKVTGNRKFERVTGTHIGGGTMFGLAKLLTGCKSYDEFLQLSQKGDNFVLDLIVKDICGELVCQKQGLSTSTLASSFGKVITSKKKLTDYKPEDLASTLLSAFTYNIAQIAFLVASLLGLRRVFFGGSYIRGHKSTMENISYAIDFWSQSQMQAVFLRHEGYLGALGALMSYGDPSGENLTLEEKEPHHESAPVDGTSADEESDSNIFPYLLVNIGSGVSMIEVIGKGKFERIIGSHLGGGTILGLARLLTGCSSYEEFLELSQRGNNLSVDLTVGDIYGEEGYPKFFFLCVRLAFQHPLLRLALEK

SEQ ID NO: 51203 - protein, 340 aa, Zea Mays
MENISYAIDFWSQSQMQAVFLRHEGYLGALGALMSYGDPSGENLTLEEKEPHHESAPVDGTSADEESDSNIFPYLLVNIGSGVSMIEVIGKGKFERIIGSHLGGGTILGLARLLTGCSSYEEFLELSQRGNNLSVDLTVGDIYGEEGYPKIGLPASTTAASFGKVNSSKLSEYKVEDLAAALLNSFTYNIGQIAYFVANLSGLKRIFFRGAYVCGHEKTMDKISRSLKYWSKGEVQTTFLCHEGFLGTLGAFWSYENMGIDSLAAHEVIREVLLGAPYTGQFPSLPVTQQQENGEHGTLEGEVESLRHDNALLKAEVERLQKENALLRAKLVRSGETSTL

SEQ ID NO: 51204 - protein, 509 aa, Zea Mays
MAEATGHGGRVVDLSGAEIRGDLEDRNPPIFLPRQPAASPLLALDIGGTLIKLVYTASRGGGADGTDLRFAKFERRRLQECFNFIRAEGLLASNAGGEGVTLKATGGGAYKFADDFLEKLGVCLDKLDEMDSVVSGANFLLQSIPGAAFTHMNGLRNPVDVSPNNLFPYLLVNIGSGVSILKVTGNRKFERVTGTHIGGGTMFGLAKLLTGCKSYDEFLQLSQKGDNFVLDLIVKDICGELVCQKQGLSTSTLASSFGKVITSKKKLTDYKPEDLASTLLSAFTYNIAQIAFLVASLLGLRRVFFGGSYIRGHKSTMENISYAIDFWSQSQMQAVFLRHEGYLGALGALMSYGDPSGENLTLEEKEPHHESAPVDGTSADEESDSNIFPYLLVNIGSGVSMIEVIGKGKFERIIGSHLGGGTILGLARLLTGCSSYEEFLELSQRGNNLSVDLTVGDIYGEEGYPKIGLPASTTAASFGKVNSSKLSEYKVEDLAAALLNSFTYNIGQA

SEQ ID NO: 51205 - protein, 742 aa, Zea Mays
MEQDQSVVVGSADSGAAAFGFATGNPPSLAVTGGSAVAPDGGAQAADASAYQAEHTALNGTVGDMGNYPSTGAAENGEAVPNETGEPVPELSYEEAVLSAEEARLWSVVTANSLDFNAWTALIEETEKNAENNILKIRKVYDSFLAEFPLCFGYWKKYADHEARLDGVSKVIEVYERAVLAVTYSVDIWYNYCQFAISTYDDSDIIRRLFERGLAYVGTDYHSNILWDEYIKYEESLEAWSHLADIYTRVLEHPIQQLDRYFNCLKELASKHSLSEILTAEEASLYVVTSETTAQAPDGEAHPDDVDKLGQPEISSSTDAESLAKYVSMREEMYRKAKEYESKIIGFELAIRRPYFHVKPLDNPELENWHNYLDYIEKEEDINKVIKLYERCVIACASYSEFWIRYVQCMEDKRSLDLANNALARATHVFVKKQPEIHLFSARFKELNGDIFGARAEYQHLYSDLCPGFLEAIVKHSNMEHRLGDKELSCSVYEKVIAAEKGKEQSQLLPTLLIQYSRFLFLAVIHLESIFPCEKRIEFLDSLVEKFVTPESSQGELASLVDKEEISSIFLEFLDLFGDAKSIRKASTRHTTLFSCKRSILPSKKRKADDAVVSDRDKFAKTGSVQSATGTDPNASNPPVWPATSETSGHQWGASYAQQAAYPAYGTYDYSHQMPQPAPQTAAYGAYPPTYSVQAYTQQSYTQPAAIPAAPVPAVVPAPTPASAYPQQPAAAPQPYYGTTYY

SEQ ID NO: 51206 - protein, 391 aa, Zea Mays
MLNCFQVIKLYERCVIACASYSEFWIRYVQCMEDKRSLDLANNALARATHVFVKKQPEIHLFSARFKELNGDIFGARAEYQHLYSDLCPGFLEAIVKHSNMEHRLGDKELSCSVYEKVIAAEKGKEQSQLLPTLLIQYSRFLFLAIRDLEKAREILTVLHEQLNLTKPVLEAVIHLESIFPCEKRIEFLDSLVEKFVTPESSQGELASLVDKEEISSIFLEFLDLFGDAKSIRKASTRHTTLFSCKRSILPSKKRKADDAVVSDRDKFAKTGSVQSATGTDPNASNPPVWPATSETSGHQWGASYAQQAAYPAYGTYDYSHQMPQPAPQTAAYGAYPPTYSVQAYTQQSYTQPAAIPAAPVPAVVPAPTPASAYPQQPAAAPQPYYGTTYY

SEQ ID NO: 51207 - protein, 471 aa, Zea Mays
MFPPRRMPQRTRYNDMDSKIRHHYEVIQEASPCHIYFDLEFDTRLNKKRDTDEMVDILIAVVFSALRDKYSIEGHEEWITELDSSTEEKFSRHLIIRIPKIAFKDNSHVGAFVCEVCSQIAAQRTTNHDLDKLYITKEISSGPVDRLFMDTAVYSRNRCFRLVFSSKSGKKSFLVPTKRFKCQELNDKDVFMESLICRLDDNCEKLLICKLDLECKKTLHFDSEISMSQIQGRSYRHRIATYQNDFSHAYTCGKSPFPPLDGFIESIASFGNVSGKIRSWFWFSQESLIIYNMLRSRYCENIGREHKGNHVFYIVDFQRAAYYQKCHDPDCRGYRSPLRPVPWDVIPELVESDQIEYQGHAMETNIENSSMSGKSITGAGAEDPEWWEQVVEFADSIENMDHSLATLEVKSDASIENMDHAPSLCASEENGCFEADPEWVMHAERAMEQYEEQSGGSQSHATSQVFDLEDV

SEQ ID NO: 51208 - protein, 123 aa, Zea Mays
MLRRKFYPAAIKYLQQAIDKWDRDEQDLAQVYNALGVSYKRENKLDKAIQQFQKAVELQPGYVTAWNNLGDAYEQQKDLKSALKAFEEVLLFDPNNKVARPRVDDLRPRVSMYKGVPVKSEKR

SEQ ID NO: 51209 - protein, 311 aa, Zea Mays
MARLLLFPSQACVDPGRHLLLHPPVSRPRAVRSGPPPAAPRRTGVVSLPGRCPPPLCWNHHPFLPYHQREDGSFLLQKTYKDERRSGNLLLRFSALPYCTMAWLSTAQLAQSSVGEKLNMVYEVGELFELGIQLSYLLILIGLLGAGTFFVIRQVLVRRELDLSAKELQEQVRSGDASATEYFELGAVMLRRKFYPAAIKYLQQAIDKWDRDEQDLAQVYNALGVSYKRENKLDKAIQQFQKAVELQPGYVTAWNNLGDAYEQQKDLKSALKAFEEVLLFDPNNKVARPRVDDLRPRVSMYKGVPVKSEKR

SEQ ID NO: 51210 - protein, 107 aa, Zea Mays
MDQEKKLEVSNTSHTYKHHCSVGVDVHEIFVKRSRLRVVLSYIGIIFLLVNACQPLLTKESLSLGSVWNITFAVLVAKCLQYKPVKRESVVIMPAFGIQLEIHFWSQ

SEQ ID NO: 51211 - protein, 190 aa, Zea Mays
MTLRARVAAKAEEKRLELLYIQWTEHHKRLSNFLRTKAEPPIYYMPTKPIIDDPAIVEQNKEKVFEEWKSMRRDELTRFQKQVEEQYLSNVERQLERIQNARNARKANGHANMQEMDKELDTHRAEHGPKTRRVPEEGGNDDDEDAEDMAAEDEVMDEVLGINDGINEDPSKPSEEATTEGGEPAPEEAQ

SEQ ID NO: 51212 - protein, 246 aa, Zea Mays
MAPFLKFQQEDKKLSNSEAFLRRSETQRKAEQKVREESERLRQKEREQIAEKRKRDMTLRARVAAKAEEKRLELLYIQWTEHHKRLSNFLRTKAEPPIYYMPTKPIIDDPAIVEQNKEKVFEEWKSMRRDELTRFQKQVEEQYLSNVERQLERIQNARNARKANGHANMQEMDKELDTHRAEHGPKTRRVPEEGGNDDDEDAEDMAAEDEVMDEVLGINDGINEDPSKPSEEATTEGGEPAPEEAQ

SEQ ID NO: 51213 - protein, 174 aa, Zea Mays
MNNICSMFDSILLPPYVGRTKAEPPIYYMPTKPIIDDPAIVEQNKEKVFEEWKSMRRDELTRFQKQVEEQYLSNVERQLERIQNARNARKANGHANMQEMDKELDTHRAEHGPKTRRVPEEGGNDDDEDAEDMAAEDEVMDEVLGINDGINEDPSKPSEEATTEGGEPAPEEAQ

SEQ ID NO: 51214 - protein, 62 aa, Zea Mays
MKRAIDVISVDRRQKSISASYMAFLESEHMTAIPCRFTLHPCKVGHLAGASSSGKVFLWTRA

SEQ ID NO: 51215 - protein, 232 aa, Zea Mays
MASPPPGAGLTEYERRREENIRRNETILAALRRKAAELSASFIPTASSPKRPKKQHPLARTTSPVVLRRSLRTRGIPAGESSACDGANTSLNTPPSPTKPRSTRFSSSLASALRDATAAEPSPSVKSWIGAPDGFDPCRELVLRPVDVRKVVPGRILSLRILPLSDRTVVVAGNVHGHIGFWDVDRLVEDEDGDGVDGVFEYFPHRGSVGGIVMHPAMLHKDGQGTNYMEFT

SEQ ID NO: 51216 - protein, 315 aa, Zea Mays
MRSVQFGQKGIPYLNTYDGCTILYPDPLIKANDTIKIDLETNKIMDFFKFDVSNVVMVTGGRNTGRVGVIKNWEKHKGSFEQLAGPDAAQHARASGAGAAGETEIQTHRSRSFARQGPAAQPAEPPEDLQGEEEPVVAREQGRNGTQLRRHIDATLGSGNLREAVRLPVGEDLNEWLAVNTVDFFNHINVLYSTLAEFCTPHTCPVRVQVGRRRAKVKVPIKVSAPKYVDYLMDWIEIQLDDEAIFPQQLGAPFPTNFRDVVVKTIFRRLFRVYAHIYHSHFQMIVKLKEEAHLNTCFKHFALFTLFFKPDKRPG

SEQ ID NO: 51217 - protein, 151 aa, Zea Mays
MMDESFLDRMVSQLRSTCKYYTGYPKDLGRSRIIPFTSERQFVQLLHEGRCTYTQHLDKVLEEAAAKFYPHIKFVRVECPKYPGFCLTRQRNEYPFVEVFYNPEQAASPGKSVDPNITKYSVKVLPFNYDQSVYGFREYFKKHGFKYSETN

SEQ ID NO: 51218 - protein, 524 aa, Zea Mays
MFWRMTGLSAASPVDTILDKENFTLEELLDEDEIIQECKALNTRLINFLRDKAQVSQLLRYIVEEVPEDSEKKQSFKFPFIACEIFACEIDIILRTLVEDVELMDLLFSFIKPDHPHSTLLAGYFSKVVICLMLRKTAPLMNYVQEHPDIVVQLVDLIGITSIMEVLVRLIGADETIYLNFADTLHWLENTYVLEMIVDKFSSSDSPEVHANAAEILSAVTRCAPPALAAKICSPSFVGRLFHHALDESRPKSVLVHSLSVCISLLDPKRLASVSYQAFRSNLTHGTLVTASPETVDGILESLGDLLKLLDITSSQNVFPTTYGCLCPPLGKHRLKIVEFISVLLTIGSEIAEKKLISQSVIKHCIDLFFQYPYNNFLHHHVENIIVSCLEVKRNQLIDHILNDCGLVGKVLAAEKSSSLAVESNGPTLPSEGKEPPRIGNIGHITRIANKLIQFGNSNSMIQSHLQENSEWAVWQIDVLIKRNEVENVYHWASVQHLYMIVGGIAMTTTSETETTMWQHSLII

SEQ ID NO: 51219 - protein, 549 aa, Zea Mays
MFWRMTGLSAASPVDTILDKENFTLEELLDEDEIIQECKALNTRLINFLRDKAQVSQLLRYIVEEVPEDSEKKQSFKFPFIACEIFACEIDIILRTLVEDVELMDLLFSFIKPDHPHSTLLAGYFSKVVICLMLRKTAPLMNYVQEHPDIVVQLVDLIGITSIMEVLVRLIGADETIYLNFADTLHWLENTYVLEMIVDKFSSSDSPEVHANAAEILSAVTRCAPPALAAKICSPSFVGRLFHHALDESRPKSVLVHSLSVCISLLDPKRLASVSYQAFRSNLTHGTLVTASPETVDGILESLGDLLKLLDITSSQNVFPTTYGCLCPPLGKHRLKIVEFISVLLTIGSEIAEKKLISQSVIKHCIDLFFQYPYNNFLHHHVENIIVSCLEVKRNQLIDHILNDCGLVGKVLAAEKSSSLAVESNGPTLPSEGKEPPRIGNIGHITRIANKLIQFGNSNSMIQSHLQENSEWAVWQIDVLIKRNEVENVYHWACGRPTSLHDRGRDSDDDDFRDRDYDVAALTNNMSQAFRFGIYRNDDIEEVNCASLY

SEQ ID NO: 51220 - protein, 307 aa, Zea Mays
MGYGYVEPFLPPQQQQQQGGYGQLQAQLAPRPPACPYSSSASAPPVSASYHSSPPPTSPPPLSSPPPASPLPEPSPPSSPPPALLPPPPDAPPPSLPPSPLPHPTPSPPQAPPPPLPTDQPRVQPRVYPSPPPPSLPPPPPPPPTVSPPSPGPSNSPSPSPSPAPATQAPAPAPARVAAYSPPPPKIAPPPPPHYRGKSHYTPHSPVKSHSNSTHAASGSGNNIEISREAATTIVALAGLAMLSFIGATIWFVKKKRRRIEPPATLPTQQPAPPPPPNYIPSSAGSSLASDGFYLRSPGYPFMSYHR

SEQ ID NO: 51221 - protein, 483 aa, Zea Mays
MLGTTVIIPTALVPQMGGNNEDKAVVIQTLLFVAGINTLLQSFFGTMLPAVIGGSYTFVLPTISIILAGRYANEPNPHIKFLRIMRGTQGALIVASALQIIVGFSGLWRNVARYLSPLSAAPLVALVGFGLYELGFPSVAKCVEIGLPQLILLVIFTMYLPHAVHMLKSIFDRFAVLFTIPIVWLYAYLLTVGGAYRNAPPKTQFHCRTDRSGLIGGAPWIRVPYPFQWGAPTFDAGEAFAMMAASFVALVESTGAFIAVSRYASATPIPPSVLSRGIGWQGIGILLDGLFGTGNGSSVSVENAGLLALTRVGSRRVVQISAGFMIFFSILGKFGAVFASIPAPIFAAMYCIFFAYAGSAGIGFLQFCNLNTFRTKFILGFSVFMGLSVPQYFNEYTSIAGYGPVHTHSRWFNDIVNVIFSSKAFVAGFVAYLLDNTIDRHEASVRRDRGYHWWDKFRSYRTDTRSEEFYSLPFNLNKFFPSV

SEQ ID NO: 51222 - protein, 584 aa, Zea Mays
MCDEGKKQVTHLSRVGSLYMATSVVVARLAGEASQPKVLPSANGVSSESYWRVAATRRWQGRGVRCCAAGFRGGGADADAVIASEDFVGFFREAWPYIRGHRGSTFVVVISSEVVCGPHFYRVLQDISLLHGLGIKFVLVPGTHIQIDKLLSERGKKAKYVGQYRITDEDARKAAMDAAGRIRLTIEAKLSPGPPMLNLRRHGVIGRWHGLVDSIASGNFLGAKRRGVVNGIDYGFTGEVTKIDVSRIRERLDSDSIVVISNMGFSSSGDVLNCNTYEVATACALALEADKLICVVDGQVFDDHGRAIQYMSIEEADLLIRKRARQSDIAASYVKVVDEEGINSLHKGDDRPSLSPKAYINGYAASFRNGLGFNNGNGIYSGEQGFAIGGEERLSRSNADPFKNGLGFNNGNGIYSGEQGFAIGGEERLSRSNGYLSELVAAAYVCHGGVQRVHIIDGCVDGSLLLELFTRDGAGTMIARDVYEGTRMATAEDLPGIRKIIRPLEDSGVLVRRTDAQLLEALESFYVVERDGSIIACAALFPFPEEQSGEVAAIAVSEECRGRGQGDKLLGMFFAYMDNQNPFS

SEQ ID NO: 51223 - protein, 218 aa, Zea Mays
MAIARTGVYVDDYLEYSSTLAGDLQRILSTMRELDDRAHGIMGQTKEQIKYILGVSSHGYDRSNMDDDESERMKKDIEASQDNALNLCTEKVLLARQAYDLIESHIKRLDEDLGQFAEDLKHEGKIPPDEPTVLPPVPVVSRDEKRSKKAGTSMDVDQTIDPNEPTYCICHQISYGDMIACDNENCGGGEWFHYTCVGLTPETRFKGKWFCPTCRNLQ

SEQ ID NO: 51224 - protein, 376 aa, Zea Mays
MHFLLLLLVLSLKATLAHFVTCCQWIELTAVALMYEDTIWFGQLPGITAPIPGVGVLPNLYNLAAGQFNPLVIQPQAMTQQATRHARRVYVGGLPPTANEQTVAIFFNGVMAAIGGNTAGPGDAVLNVYINHDKKFAFVEMRSVEEASNAMALDGIMFEGAPVKVRRPTDYNPSLAAALGPSQPNPNLNLAAVGLTPGSAGGLEGPDRIFVGGLPYYFTEAQVRELLESFGPLRGFDLVKDRETGNSKGYAFCVYQDLNVTDIACAALNGIKMGDKTLTVRRANQGASQPRPEQESILLQAQQQVQMQKLVYQVGGALPTKVVCLTQVVTADELRDDEEYNDIVEDMREEGRKYVPHNAIAECFIVRPYAILAIGL

SEQ ID NO: 51225 - protein, 282 aa, Zea Mays
MTQQATRHARRVYVGGLPPTANEQTVAIFFNGVMAAIGGNTAGPGDAVLNVYINHDKKFAFVEMRSVEEASNAMALDGIMFEGAPVKVRRPTDYNPSLAAALGPSQPNPNLNLAAVGLTPGSAGGLEGPDRIFVGGLPYYFTEAQVRELLESFGPLRGFDLVKDRETGNSKGYAFCVYQDLNVTDIACAALNGIKMGDKTLTVRRANQGASQPRPEQESILLQAQQQVQMQVVTADELRDDEEYNDIVEDMREEGRKYGKPHEAHRVLLYLLCFKSSYIQLL

SEQ ID NO: 51226 - protein, 301 aa, Zea Mays
MTQQATRHARRVYVGGLPPTANEQTVAIFFNGVMAAIGGNTAGPGDAVLNVYINHDKKFAFVEMRSVEEASNAMALDGIMFEGAPVKVRRPTDYNPSLAAALGPSQPNPNLNLAAVGLTPGSAGGLEGPDRIFVGGLPYYFTEAQVRELLESFGPLRGFDLVKDRETGNSKGYAFCVYQDLNVTDIACAALNGIKMGDKTLTVRRANQGASQPRPEQESILLQAQQQVQMQKLVYQVGGALPTKVVCLTQVVTADELRDDEEYNDIVEDMREEGRKYGKPHEAHRVLLYLLCFKSSYIQLL

SEQ ID NO: 51227 - protein, 377 aa, Zea Mays
MHFLLLLLVLSLATLAHFVTCCQWIELTAVALMYEDTIWFGQLPGITAPIPGVGVLPNLYNLAAGQFNPLVIQPQAMTQQATRHARRVYVGGLPPTANEQTVAIFFNGVMAAIGGNTAGPGDAVLNVYINHDKKFAFVEMRSVEEASNAMALDGIMFEGAPVKVRRPTDYNPSLAAALGPSQPNPNLNLAAVGLTPGSAGGLEGPDRIFVGGLPYYFTEAQVRELLESFGPLRGFDLVKDRETGNSKGYAFCVYQDLNVTDIACAALNGIKMGDKTLTVRRANQGASQPRPEQESILLQAQQQVQMQKLVYQVGGALPTKVVCLTQVVTADELRDDEEYNDIVEDMREEGRKYGKPHEAHRVLLYLLCFKSSYIQLL

SEQ ID NO: 51228 - protein, 752 aa, Zea Mays
MESTMEKPAVMDAARGGGGVGRAKSDHLAPSLSLSRTASAETVLGTAADAAKPAGFGRKRRSASVGGGNNNSHIRKSRSAQLKLDVEDLVSSGAALSRASSASLGFSFTFTGFTPPLQHMCSADPPSFSDDENLDIEAGTRRKKLVTEPTLPIYLKFAEVKYRVAGKGSPREILGGISGSASPGEVLALMGPSGSGKTTLLSILGGRAAAGGAVDGCISYNDEPFSKSLKRRIGFVTQDDVLFAHLTVKETLTYAALLRLPRTMTQQQKKERAMDIIHELGLERCQDTMIGGSFVRGVSGGERKRVCIGNEILINPSLLFLDEPTSGLDSTTALRIVQLLHDIAEDGKTVITTIHQPSSRLFHKFDKLILLGKGSLLYFGKASEAMPYFQSIGCAPLIAMNPAEFLLDLANGNTTDVSVPSELDDKVHMENHNLENNNSKIDYRPSAQDVHEYLVDAYETRVAFKEKKKLLAPLPISDDLKATITSSKREWGTSWWQQYSILFCRGIKERRHDYLSWMRITQVIATSVILGLLWWHSDPSTLKGLEDQAGLLFFIAVFWGFFPVFTAIFTFPQERAMLNKERAVDMYKLSAYFLARTTSDLPLDLFLPIIFMVIVYFMAGLKATATHFFLSMLTVFLSIIAAQGLGLAIGATLLDIKKATTLASVTVMTFMLAGGFFVKSVPPFISWLRYLSFNYHTYRLLLKVQYDPVPDILTTTRHMDSGGTEVAALVAMVIGYRVLAYLSLRRAKALGS

SEQ ID NO: 51229 - protein, 174 aa, Zea Mays
MSRRKRRSSLFDMVPDESMDLPPLPGSQEPETSVLNQPPLPPPVEEEEEVESMESDTSAVAESSAASALMPESLQPTYPMIVPAYFSPFLQFSVPFWPNQEDGGDLPQETHEIVKPVAVHSKNPINVDELVSMSKLSIGEPGQETVSTSLSLNLLVGQNRQSAFHANPQTRAQA

SEQ ID NO: 51230 - protein, 313 aa, Zea Mays
MDHLISTIVQWFERRSKAFEPTYLYGVEKGYFLLSEGAKTRHGVRTINITISARNPCFGNRWQQLLINSIVGYDTILTNSLVNSPGHGYLYNFQTKELYDLSYGHEPPEGPTRFGDYFVTKCGVLLMSLFVFFTTTMSVSFTLRETQSRMLRFTVQLQHHARHHLPTFQLIFVHVIESLVFVPIMIGILFFLFEFYDDQLLAFLVLTLVWLCELFTMISVRTSISMQFFPRFFLLYFLVFHIYFFSYTYGFSYLAFSATAAFMQHLILYFWNRFEVPALQRFMRSRAHIHQQTEMFVIMVKITPIHLEMEMIR

SEQ ID NO: 51231 - protein, 596 aa, Zea Mays
MDPEQTFLRVHARLSGTLSQLLTPRIRLVLEYLYLAGAVALFCLLVVMHTNFVQQPGCSSEFSGIEFGEAQLVQIKIISGGLWSSRGASYIMDLQNLGRSAEKILEVNGDKFNILASKFWSTWVGPGARRSLPDLKAAGEGSVHHPLSAKESFKAAVTFLFRKWYLRAVSFWKNIKQLSENTLQLMVRSNWNDFLHIIKDLQLPSMDHLISTIVQWFERRSKAFEPTYLYGVEKGYFLLSEGAKTRHGVRTINITISARNPCFGNRWQQLLINSIVGYDTILTNSLVNSPGHGYLYNFQTKELYDLSYGHEPPEGPTRFGDYFVTKCGVLLMSLFVFFTTTMSVSFTLRETQSRMLRFTVQLQHHARHHLPTFQLIFVHVIESLVFVPIMIGILFFLFEFYDDQLLAFLVLTLVWLCELFTMISVRTSISMQFFPRFFLLYFLVFHIYFFSYTYGFSYLAFSATAAFMQHLILYFWNRFEVPALQRFMRSRAHIHQQTDALLVQDESTRSQQEGQQNGISEPAANNALQYQEQNPQRAGSTPAGSGSLNPFGSLLLWLLGGGASDGIVSFFSMFRDVRDHGQDYTDPPRNGNDQVT

SEQ ID NO: 51232 - protein, 428 aa, Zea Mays
MDHLISTIVQWFERRSKAFEPTYLYGVEKGYFLLSEGAKTRHGVRTINITISARNPCFGNRWQQLLINSIVGYDTILTNSLVNSPGHGYLYNFQTKELYDLSYGHEPPEGPTRFGDYFVTKCGVLLMSLFVFFTTTMSVSFTLRETQSRMLRFTVQLQHHARHHLPTFQLIFVHVIESLVFVPIMIGILFFLFEFYDDQLLAFLVLTLVWLCELFTMISVRTSISMQFFPRFFLLYFLVFHIYFFSYTYGFSYLAFSATAAFMQHLILYFWNRFEVPALQRFMRSRAHIHQQTGVHITSSTIYTSTLHIARVNVRDPGTINDGLGAAREADALLVQDESTRSQQEGQQNGISEPAANNALQYQEQNPQRAGSTPAGSGSLNPFGSLLLWLLGGGASDGIVSFFSMFRDVRDHGQDYTDPPRNGNDQVT

SEQ ID NO: 51233 - protein, 315 aa, Zea Mays
MELEEAVPPAAMVGEDNAAAPTQDFGLPAELIAVLPSDPFAQLDVARKITSIALSHRLGLLEAEAARLRSQLAERDAEAEDLREHVEQLDAALAVATGRLRHAEEEKDALQRDNSELSNTVRKLNRDVAKLEVFKKTLVQSLQEDDSSDNTAPRERAAAASNFSSAPSDSAFSTSKSSQVSETASSVSEENNQVDPDAPRRPPRPHVFLQSYNSTPRMTPPDSPPRRFASVSPPRRHSISVTSMNMFNDRSSGFSGQHSSPFDAPSQTGRTRVDGKEFFRQVRNRLSYEQFGAFLANVKELNAHRQTREDTLRQA

SEQ ID NO: 51234 - protein, 107 aa, Zea Mays
MGAGLDPSPSFGGCSDPVLVELSMGGDYYRACCGEPDSDIPEGPKLPCVGDKEPLSSSAAEFQSGSPILQEKIKEHILERQDKAEVDHIMVKIEECKKEDTPVSWIY

SEQ ID NO: 51235 - protein, 314 aa, Zea Mays
MEAMEELSELAESMRQAASLLADDDPSDAAAPRRPTTFLNAVALGNVSSGKSAVLNSLIGHPVLPTGENGATRAPIVVDLQRDPGLSSKSIVLQIDSKSQQVSASALRHSLQDRLSKGTSGGSGRGRADEIYLKLRTSTAPSLKLIDLPGIDQRAVDDSMINEYAGHNDAILLVVIPAMQAADVASSRALRLAKDIDSDGTRTVGVISKVDQADGDAKVIACVQALLSNKGPKNLPEIDWVALIGQSVAIASAQSAGSENSLETAWRAEAESLKNILTGAPQNKLGRIALVDTIAKQIRKRMKVRVPNLLSGTT

SEQ ID NO: 51236 - protein, 1384 aa, Zea Mays
MDASTAGDGDTNTLKRPCKTSPPEGETDKYKRQKRECQDFSPRRYQLDVYEVATRHNTIAMLDTGAGKTMIAVMLIKHFGKINKANNDRKLIIFLAPTVQLVTQQCEVIKSYTDFEVEHYHGAKGVDQWKAHSWQQQLLKYQVMVMTPQVLLDALRQAFLILDMVSLMIFDECHHATGNHPYTRIMKEFYHGSEHKPNVFGMTASPIIRKGVSSDLDCKNQLSELENILDSKIHSVVDREEIELCVPSAKEVNRYYEPRTVSFDDLSEELEILCSKYDGLIIQLHNRSTNQYKDADEITKESRKRLSNSLAKICYCLEDAGLLCASEATKICIERGQRKGWLKGGSDTTDQQSGQNGPILFAEISMLHMEFFQEVLDIIGKRVQQQQGIDALLNSERGCVEAKNMGYISPKLYELMQVFLSFSDPDNVRCLVFVDRKISARVIERTMKKIGQLSCFRVSFLTGGSSSVDALTPKMQKDTLDSFRSGKVNLLFTTDVAEEGIHIPDCSCVIRFDLPRTTRSYVQSRGRARQRDSQYILMIEQGNVKQDDLISGIMRSKASMTGIASNREPEDSHPSFLPTEEINEYHISKTGAKITTDSSISVLNQYCDKLPKDKYYTPRPKFQFTHYGDGYECTVTLPSSAMFQLLVGQKARNMQKAKQLVCLDACKRLHQLGALDDHLSPSVEEPPPEISSKSSISTPGAGLGTTKRKELHGTTKVLSMSGSWGSDRSVTKLQGYKLNFVCDQVGQKYSAFVLLIDASIAKEAATLDIDLYLHDKMVKASVSPCGPLELDAWQMEQTKLFQALLFNSLFGKLFIGSKASKTPREFILKKDDVFLWNKENMYLLLPVDSTLDSHKSVCINWSVIDVVATAVGFMRSIYSDGKCNLTDKLNYEKNGEDLIHLANKSCKGNDLKNMVVLAIHTGKIYTIVVVSDLCANSKFDGTTDKKEAKFRTFAEYFEKKYSIFLCHPLQPLLVLKPTHNPHNLLSSKNRDEDNVVENKNRANSLVHMPPELLIPLDLPIDVLRVFYLFPSLMHRLESLMLASQLRSEIAYRDSDISSFVILEAMTTLRCCEDFSMERLELLGDSVLKYAVSAHLFMTFLNKHEGQLSSRRQETICNATLYRLGIERRIQGYIRDAAFDPRRWLAPGQLSRRPCPCECPVNSEVVTEDIHRIDDKSIIIGKACDKGHRWICSKTISDCVEALIGAYYVEGGLKAAFAVLKWFQIETEIEEELIMEALSSASVRNYLPKVDVVELLEAKLGYTFQMKGLLIEALTHSSQQESGATYCYQRLEFLGDAVLDILITRHLFLSHKDTDEGELTDLRSASVNNENFAQVAVKHNLHQFLQHSSGFLQDQITEYVNSLESSSMDRASLLSSGPCRGPKRT

SEQ ID NO: 51237 - protein, 554 aa, Zea Mays
MSHLDAASLLAPSPPLAKPHPRSRFLCLISSMLAVLGASLAGLLLFALHPAPNPVPNYASLFLSLGSNDTAASHLRALTLHPHVAGTKANALTARYVFDALSALSFPTHITPYSVLLSYPVHRSLSLSAPGRGVVTSFSLKQETYPNDPYAAAAAETIPTFYAYSASGSVSAEAVYANYGREEDFSYLASRGVDVAGKVAFARYGRIHCEDIAHNARAAGAAAAVVYTDPLQYGGAPGEGWFPDSRWLPPSGVQVGSLFRGVGDPTTPMWASSEGCERVSLEEAMNTDDMPLIPALPVSAQDAMEIHRAMGGAVAPEDWQGREDGPVYRLGPGPAVLNLTYLGNDSMATIENVFAIIEGAEEPDRYVILGNHRDAWTFGASDPNSGTAAMIELAKRFSMLQKQGWRPRRTIIFCSWDAEEYGLTGSTEWVEENREMLYSRAVAYLNIDVSVVGPGFLPSTTPQLDELLQQVTKVVQDPDNSSQTVYDSWIKSSTPLRVLRLGDGGSDYSAFVQHVGIPSMNIIFGEGPGYPVYHSLYDDYVWMAKFGDPAFRSC

SEQ ID NO: 51238 - protein, 190 aa, Zea Mays
MAKFGDPAFRRHVAAASIWGMMALRLANEDILPFNYMSYAIELEAYTKTVENEVKGTTVTCSPLYNSIRTLGAAATKVNNEQKELQKLLLSKQLNKDSLKIRQLNDRLMQTERAFTSREGIFKLEWFKHLVYGPSDQNDWDTAVYPGIANAIASARSSNTSESWKFVQHEIYRVARAVTQASAILSGRLT

SEQ ID NO: 51239 - protein, 439 aa, Zea Mays
MSHLDAASLLAPSPPLAKPHPRSRFLCLISSMLAVLGASLAGLLLFALHPAPNPVPNYASLFLSLGSNDTAASHLRALTLHPHVAGTKANALTARYVFDALSALSFPTHITPYSVLLSYPVHRSLSLSAPGRGVVTSFSLKQETYPNDPYAAAAAETIPTFYAYSASGSVSAEAVYANYGREEDFSYLASRGVDVAGKVAFARYGRIHCEDIAHNARAAGAAAAVVYTDPLQYGGAPGEGWFPDSRWLPPSGVQVGSLFRGVGDPTTPMWASSEGCERVSLEEAMNTDDMPLIPALPVSAQDAMEIHRAMGGAVAPEDWQGREDGPVYRLGPGPAVLNLTYLGNDSMATIENVFAIIEGAEEPDRYVILGNHRDAWTFGASDPNSGTAAMIELAKRFSMLQKQGWRPRRTIIFCSWDAEEYGLDSCLLQLPNLMSYFSK

SEQ ID NO: 51240 - protein, 120 aa, Zea Mays
MEPIMIVPILRAGLALADLATSILPSTRTFHLGMARDETTLMASVYLNKLPDRFPKGCKILIVDPMLATGGTVTAAVDLVMERGAEISQIKILLLPLLPSRSSIKDSQGFVCIQEPWIKL

SEQ ID NO: 51241 - protein, 143 aa, Zea Mays
MEPIMIVPILRAGLALADLATSILPSTRTFHLGMARDETTLMASVYLNKLPDRFPKGCKILIVDPMLATGGTVTAAVDLVMERGAEISQIKIISAVAAPPALKKLNQRFPRICVYTGAMDQIVNEKGFIIPGLGDAGDRSYGT

SEQ ID NO: 51242 - protein, 1531 aa, Zea Mays
MSHFHPTQHASDNDFQMWQQQMMFKHLQEFQRQQQLQQSDHGARMQLSFGQFHAPAKPLPGDQLSTMSNEMVNNETMNSGWPHNFTGGDLSLTSNSQMLNNGSTNWDQIVGSPVVGNFMNGSMFVNAHNQSMRPMGLATHQVDQTFYPMHATSSRGPGNQYSQFLGIPADPQSEAARVGPVQSEKTSRPFNSSMNELGLHMQGTTSLMHNFRGKGGFLNNSLMQSQGDNIRAGSPVTMNQLQHGFQTQDFHGRPNQVDLQAGMQEKSAMQVGQASRGASLDPTEEKILFGSDEDSNWGALLRGDNDNVNSLDNDNYGGGYSSLQSGSWSALMQEALQSTTSESPKEEWSGLSFHKTEQVMASNANLSGRNGSKFTGLSGANLENARPSPASSYADGTMNNPNLASFQHVIRPPSERRDHMSHESSNAPVNNHQSTSEVNKGYFQQGIKQIHSDARQGQAHLVNGTWPHQKTELLRSNLQSTGVHATPPGGHGFGMSQQIATDHNINRESSNNQNDWKANNALGQDMCNSQNIFNSNENSWKSTGGNANSVQRFQQRRSDVSATNESSDGKNISMMSSSMPMMTQDHYQMVTSQSGEQIGMNRNLTHRAPETSESPGKSAEQRPGDFNQEYLNAIPNERETHISNHGRHITSDSAPRRHSVSAGKESENLGQSSQQAMGSYILQNRAMGSSGMNIGLSPGNPMSNSLFPPQTRNSLQHHFGTNSHVSNSMPSASEKMMMAQEQLQSRHGLPNSSSASTLGGADTGLSQNRAVQNSQHMLQLLHKVDNSRNSNVVADIPNNSLGVVSAQQQLNHSSLQGFGLRLAPPSQLQSISGNLWSSQTNADGKQFYQDGDRTQLPSTPSQSLTPQHQNSLSSPFHSSETENTGQPIACFPQLGSGQQYPMADDRSGPAPMLQQQPQQSNSATVFKNVWTNISAQRLTASNLWSSQKADDQGQRASTPSDIATSSANSQNQSPKQAADSDAKLASSQKGNLELTGTTVTGGNESLQKPSSDENSINAVSSFAQLRQQGILGAKHGENPGANFQAMNVSHNNANHSGGIVLHGSPAPTNIQQQNYSLLHQMQTSRHMDVDPGSLSGKTTKPDIGSDAAQIDWNSGQRFAHVTNNSTKSSADNIGSPGVPGSFTSDLKMLSFASRNEERNPNIPSRFPSGECPSPGMITTQDDNQNQVQHMGTGAMSNSDERSERPRINPQMAPSWFGHYGNYRNGQSVATLNAATLNAQKPMALPFNFPKASRNNENNSHAENRVEPSQSVRPGHHLPSARMEALVPSNVKVSSMMRRPKKRKTMDSTLVSWHKIIESPRKLRGISTPEMDWAWAANRLIEKDEAETPDDAPLNYLPRKRLILTSQLIQQLLPAIPATILRAQAVSAYGSATYTLSMLTLRDACSMASSSYNSCSPVEDENNPSEQPSAKKMEDRVSKVVEVFVGRIRKMENDFISLNKRASMLDVQLECQDLERISIVNRLGRFHGRSHAAAVESSSAPEMTPRRIFPERHVMSFAVPGNLPEGVCCLSL

SEQ ID NO: 51243 - protein, 360 aa, Zea Mays
MEMRAAPDRATPRMVAAMSPPTPERGTLGRRVAAVAVSAGSPRSSPDRGRPALVERSSATALAVELIDAEIAQSFSQQRKQREGGGPTYHETFAYAQGPFARVPEALSSKPGHLSASQQRVYEDFVHVWHPHNQNVGATGSGLSGVATVSSTLGVLRAYSPNSTSASSSNLSTVHMGGLTCITQPTELGSEDTVIAQFLSNPAQVGPSESPVLFSGTVGAASTFSPLASNDLPEISAMVPPPSTSADRLGSILPEPLNTGDALERYKQVAQKLEALIANDGKHVEIQSVIAEVPDMLRRCVSRDEAALVVAQKVFKSLYDNASNSAYVSWLLATLIAIRDVCKLVVKELTSWVAVLFSEW

SEQ ID NO: 51244 - protein, 471 aa, Zea Mays
MEMRAAPDRATPRMVAAMSPPTPERGTLGRRVAAVAVSAGSPRSSPDRGRPALVERSSATALAVELIDAEIAQSFSQQRKQREGGGPTYHETFAYAQGPFARVPEALSSKPGHLSASQQRVYEDFVHVWHPHNQNVGATGSGLSGVATVSSTLGVLRAYSPNSTSASSSNLSTVHMGGLTCITQPTELGSEDTVIAQFLSNPAQVGPSESPVLFSGTVGAASTFSPLASNDLPEISAMVPPPSTSADRLGSILPEPLNTGDALERYKQVAQKLEALIANDGKHVEIQSVIAEVPDMLRRCVSRDEAALVVAQKVFKSLYDNASNSAYVSWLLATLIAIRDVCKLVVKELTSWVIYSDEEKKFNIEIIFGLIHSKLLNLGEYNVHLTKLIDGGRNKVATEFAMSLVQTLITQDPVSISELHNVVDAISKLAWGPGSPESLQQLIGIARNNVLAAQVNKEESIANETTLIDPN

SEQ ID NO: 51245 - protein, 647 aa, Zea Mays
MAGPTSRLLILARRADRRRCLPFLVPRALQAAPPTFSPALPLPPCLPASTPVMSYSSAFTSVHGERPSSEYAKIRKESLETQFGRILGSSSRRHFADRGFGPFLALYRAATISFHVVKLTIWHLLLNDMHKRAEKFRETLIRLGPFYIKLGQALSTRPDILPSAYCQELAKLQDQIPPFPTRIALRTIESQLGSRISDLFADISPEPIAAASLGQVYKAHLRSGELVAVKVQRPGMAPLLTLDALLFHMIGGQMKRFAKARKDLLVAVNEIVRHMFDEIDYILEGKNAERFATLYSHGSSGVNSEASTSIKVPKVYWNYTCKTILTLEWIDGIKLTDAERISKANLNRKRMIDEGLYCSLRQLLEEGFFHADPHPGNLVATEGGSLAYFDFGMMGDIPRHYRVGLIQMLVHYVNRDSLGLANDFHSLGFVPEGTDLLAVADALRFSFGDVRRQSNDFQGVMNHLYDVMYEFSFSLPPDYALVIRALGSLEGTAKALDPEFKVIESAYPFVIGRLLADPSPDMRKILRELLICDDGSIRWNRLERLIAAISEQSSESSSASGADSSENANGSPEWRSFDMHSVIAATEDLFDFILSRKGWRVRVFLVQDIVNASDVFLQEATFPYVYAKVGKIGDLNPEGGHEPQFRL

SEQ ID NO: 51246 - protein, 277 aa, Zea Mays
MRGLHRCPHQLLLVSPPPRSAPACRQSATASSRGLRSSLAVFSAPGARVAAAAREQKWGHVEGDEDGGEEGLGEALHRTRELVECAMFAAVAGLAYFLSNSLAIENYFSCFFPLPIVISSLRWGLEASRKTVATVLLLFTLSGPVKASTYLLMHGVVGLIMGTVWRLETNWIVSIILCSIVRALGACGYVLVSSFLIRENILALITVNIHASLTYILTAAGVNTIPSMGTIYLLFGTLLLLNCGFFVFLLHVMYTVFLAKLGIKPSLRSPRWLDRVM

SEQ ID NO: 51247 - protein, 489 aa, Zea Mays
MATLTVTEAVHYSAQLQLPDSVPPADKRERADRAIKQMGLAAVAGHRIGGRVCKGISGGQRRRVSICVELLASPALVFLDEPTSGLDSAASFHVMSRIAGLARAERVTVVATMHQPSSEVFQLFHGLCLMAYGRMVYFGPASDAIQFFDSNGYPCPMRRNPSDHFLMMINKDFERSLAIRNEALFMMKQQGAAFTKKRQATFLTKCVVLTKRSVINMHRDMGYYWLRFGIYIAICVSIGTIFFNVGYGFASIQARASMLMFTSTLLTMMSIGGFPSFVEDMKVFRKEQLNGHYGATAFVIANTVSSTLYLGIISIIPGAVCYYLTGLQRRLDHFLYFAAVLWACTMLVEGLMMIVAALVPDFLLGIITGSGIQGLLMLNAGFFRLPHDLPKPLWKYPTYYISYHKYATQGLYKNEFLGLVFDDGVLGKGLTVSGDYILRTSLQVEMGYSKWVDLAILLAMVFIYRVLFLVTIKVGEAVKPMIKCMSIKV

SEQ ID NO: 51248 - protein, 693 aa, Zea Mays
MAASPLPRWAPTPSPTRPLRVSSAGGQTAVSSSSWSWAFCRSFIGSAVVYPPWRRSTPPPPPPPAPAGDPAAANAAADDGRRHGRFCSHPLDCVGARDCSLPEDAGGGREVFLTWEDLSVTASSSTGGKAKPAVILDKISGYARPGEVLAVMGPSGCGKTTLLDALAGRLGSDKRRTAGNILINGRREKLAFGTSAYVTQETLLMATLTVTEAVHYSAQLQLPDSVPPADKRERADRAIKQMGLAAVAGHRIGGRVCKGISGGQRRRVSICVELLASPALVFLDEPTSGLDSAASFHVMSRIAGLARAERVTVVATMHQPSSEVFQLFHGLCLMAYGRMVYFGPASDAIQFFDSNGYPCPMRRNPSDHFLMMINKDFERSLAIRNEALFMMKQQGAAFTKKRQATFLTKCVVLTKRSVINMHRDMGYYWLRFGIYIAICVSIGTIFFNVGYGFASIQARASMLMFTSTLLTMMSIGGFPSFVEDMKVFRKEQLNGHYGATAFVIANTVSSTLYLGIISIIPGAVCYYLTGLQRRLDHFLYFAAVLWACTMLVEGLMMIVAALVPDFLLGIITGSGIQGLLMLNAGFFRLPHDLPKPLWKYPTYYISYHKYATQGLYKNEFLGLVFDDGVLGKGLTVSGDYILRTSLQVEMGYSKWVDLAILLAMVFIYRVLFLVTIKVGEAVKPMIKCMSIKV

SEQ ID NO: 51249 - protein, 743 aa, Zea Mays
MAASPLPRWAPTPSPTRPLRVSSAGGQTAVSSSSWSWAFCRSFIGSAVVYPPWRRSTPPPPPPPAPAGDPAAANAAADDGRRHGRFCSHPLDCVGARDCSLPEDAGGGREVFLTWEDLSVTASSSTGGKAKPAVILDKISGYARPGEVLAVMGPSGCGKTTLLDALAGRLGSDKRRTAGNILINGRREKLAFGTSNNVTSSGGWCTMHTCLLIALKAYVTQETLLMATLTVTEAVHYSAQLQLPDSVPPADKRERADRAIKQMGLAAVAGHRIGGRVCKGISGGQRRRVSICVELLASPALVFLDEPTSGLDSAASFHVMSRIAGLARAERVTVVATMHQPSSEVFQLFHGLCLMAYGRMVYFGPASDAIQFFDSNGYPCPMRRNPSDHFLMMINKDFEELEEEGSTALLLPSATEVIETLVDSLMSQRSLAIRNEALFMMKQQGAAFTKKRQATFLTKCVVLTKRSVINMHRDMGYYWLRFGIYIAICVSIGTIFFNVGYGFASIQARASMLMFTSTLLTMMSIGGFPSFVEDMKVFRKEQLNGHYGATAFVIANTVSSTLYLGIISIIPGAVCYYLTGLQRRLDHFLYFAAVLWACTMLVEGLMMIVAALVPDFLLGIITGSGIQGLLMLNAGFFRLPHDLPKPLWKYPTYYISYHKYATQGLYKNEFLGLVFDDGVLGKGLTVSGDYILRTSLQVEMGYSKWVDLAILLAMVFIYRVLFLVTIKVGEAVKPMIKCMSIKV

SEQ ID NO: 51250 - protein, 273 aa, Zea Mays
MKYKSVPNTLYEDAEKCLRLALYSNPPVMAALLPLIQILLLGDKLKVALNELEKACLSLATALPFRLRGRLLEEYDQNQVSTIFSCYEEALRRDPTCSYSMERLIKMHKKGYYNTIQLLEAIALHLDSVNGKSCIWEELVSCFLRLFSDNTADYEDCISCTNTHGGESLEASSKFSSVFFEQFTRESWKARCRWWARHHFSQNAYTSEAQSGDCKLLAAKAACAAHLFGPEFPYVKAVGVYIAKQEALDEISVLVRNKQNSVRLLQTLEKLTR

SEQ ID NO: 51251 - protein, 268 aa, Zea Mays
MEWINSVKPAVDARIVSDLSEDGDSDIDGCQNVRKEARSALSGLLKDDGILVIPTALGCPPKLNAKELSSESYNSQTLRLLSLASMSGCCQVSIPLGTHDKCPISVSLIARHGGDRFLLDTTQTMYTTIQEQVEILAKSSVSSKQAMNEEAAEAAKEKGNAAFKEKQWQKAVNFYTEAIKLNGKVATYYSNRAAAFLELTSYRQAEADCTSAIELDSKSVKAYLRRGTAREMLGYYKEAVDDFNHALVLEPMNKTAGVAINRLKKLFP

SEQ ID NO: 51252 - protein, 187 aa, Zea Mays
MADQVYAGYWSWEHNGVLLEQFPTKDVIEDLDLGLDNLLSLEQVIVKVNCLGATAAQVQELEAVAMRAVENHANRPTIKMDRLYEENILSDEKLEALLQQHIQLEGGVLQLKDKPDAFFISQLRLYRHLQKAVISYDCAGASMCEVLKVEAACRHAAEVHPNHPSIELIRTNTDEMASSSDHPSTEV

SEQ ID NO: 51253 - protein, 245 aa, Zea Mays
MLLPFLRSHPLLHHAARLSSPRTRLILRRDLLPLARSRPIRMAAHSGSGSGASSPAPAPPAAVVQKSKIKFCPACGSPTKLAIPDGDEKMRAVCSSCGGVHYENPKMVVGCLVEHDNKVLLCRRKIEPAYGLWTLPAGYLEVGESAAEGASRETLEEACADVEIISPFAQLDIPLIGQSYIIFRARLKTPNFSPGAESLECALFALDDIPFDSLAFSSIVVTLRMYTEDVRSGNIKYHYCIINKR

SEQ ID NO: 51254 - protein, 318 aa, Zea Mays
MVNGLVGSADDWKFAAEQFVRRMPDKVIVHRSQCNSATQTFDGVDLMGERLANEVLSVVEQRRGVKKISFVAHSLGGLVARYAIGRLYEPNSRRKSSGGESRDDVVHLNGHIAGLEPMNFITFASPHLGSSGNKQLPFLCGLPFLERRASEAAHLIVGRTGKHLFLTDNDDGRRPLLLRMVDDSDDLQFRSALRSFKRRVAYANANFDHMVGWRTSSIRRQHELPKHRLLVRDEKYPHIVYVEKEVTDNNETKAHADHYDPEEEMIRGLTQVPWERVDVSFQKSTQRLVAHNTIQVKSYWLNSDGADVINHMMDNFIV

SEQ ID NO: 51255 - protein, 347 aa, Zea Mays
MLGYLDFFLGGDEKRPDLPPRLRQRFPMSLIFGGDGSYMTPFLLNSDSVLTSLMSQAVPSWIWHRLVAGLNAQLRLVRCGNLKVTCLPVINWLETHANPSLAENGIRVDLAWFQATALGYCQFGLLVYAVEGDAALTEPDGSPRIKTEQQTPRITGGVLDSNSLRTLNDRRDLFYPFSLILHNSKPVGHQDLVGLVISILLLADFSLVLLTFLQLYSYSMVDVLLVLFILPLGILSPFPAGINALFSHGPRRSAGLARVYALWNITSLVNVVVAFICGFVHYKSSTKTHPSVQPWNLGTDESSWWLFPTGLMVLKCIQARLVDWHVANLEIQDRAVYSNDPNIFWQS

SEQ ID NO: 51256 - protein, 400 aa, Zea Mays
MSTECSDLGDEFWLPEEFLDDDFFSEEEKAAVAARSESDEEDSLAGLSRRLAGLLGDDGERKPPTAKAEVAVIGSPQSTLCGLPKSGQESPNGGASKGTSPPSSPPLEQKPADPWDVLYEAAGQVARIRAASSVPVQVPANAYAFSKPSPPPPPPPQIAPPSAKVPAGAGGHYHPLAHLVSQRQMQAAQFHLLKQHQLLKLQRQRHLAAWSARQSACAKPVGCGGGDAPLGLNPAAWPPLQKPPPPPPPQQHQAPAHPASGMRAVFLTPPGAKRERNGTGVFLPRPAGAPAAEPKRKTAGACSTVLVPARVVQALNLRLEDLGAQPRYYPGGFVLDHAGATPCSRARSAARLPLRQCATEVPESSSRRLDLEGGRGREWSRQDSVDNTPAPLSFGGRQSC

SEQ ID NO: 51257 - protein, 197 aa, Zea Mays
MSGAGAGQNRAPRHCGRLRAIDNAGVVVAVAVAARDRDLLRSGGSVVTNDGHRRRQVHGGAAGAEGRLGRPPRQVRGHQRVRLRLRPQRALVAAGAASRGHAARAVPGRAPRPTAATMAAASPEPEEGALRLLAMVVTSHAMLPTDVEASGLNHPANVLPPILGFLHSSAVLCIQRVNTVTISSLYDQRRWEAEDAM

SEQ ID NO: 51258 - protein, 1835 aa, Zea Mays
MSQRGDRGEGHARRPGRSSSFGGHRGGGVGGAGKGGAGSSGQPPLSTNRSFRKPGNGHGGQQRVVNQPDTTGFQPAPAPAPHQTPARPPPAPQNAAVHVPISAPWPQPQGPQVSSSSAASDRPANPPLPKATHAAPRAPPKSSNPPLPQGGSKGEPPKGFNFQFGSINMNGLPQFPARTSSAPPNLDEQKRNQVLVEELKVTPTPVQPTPKQQLLQQHPHPLQKQQHQLPQLSHQPQQPQQQSTRKETVGSSQPNSINPHTTSQLKRDVHPSPSVPNVTSVRPTVQQMPGVQMPIPFHHQPAQVSLQFGGHGAQLQPQVVPSSFQMSMGLTGSSTPQVPQQLYAPTLQHHQLQQQAMMHPGQGMGYVPSVAHQFPQLGSIPMNIASQYPQQQPNKPAAARKAIVKITHPDTHEELKLDKRMDSSGQRAAPSIAQQSQPGVNYAPHLGFFHQPPNSYNQSGMYYSTTASVNQVATGSSGPRYNYPVTQSAQAMTYISPSAAPPVSGQSQYTVKPHPMGLLSEKSGTHVTISAPPAKSDPPKLHAAGDAASSLKKDNEVVSGITVLNKPTLERESNDPLVTVKHSTVISPSLPIHGEKPQTLVTSSPVANSVSPVTGADGKSKEPIQRSGSFKDSKKNVTKKDVRNSYEPPNPTSFVEDKVQTVKVGDGDLQETKKLNNELDLTNSSSAPTVPLAVSTENADSTAVTSEIFKSFELTRGASQFFSNLFTLAAADVPGTDTSSRRPSSEGTGEPGVESFTVSAVECDESKRTHKVVKDPSKDNISSDATKHELPKECAVDSTEQASAVTSNTDDSYAAPLVTNQEQLLKGSASEKQAVMNNSSMNSDTSAHFFDGNDVGVTTSGTSEPTAQTSNDEGDSDISPETDLAVYNVPLGSSELQLKSESRANDQQPAAPTVSVRPVSREKPSTKSTAGKKKKKKEMLAKADAAGSSDLYNAYKGPEEKSEVVGTVEGADNSSTVDTTHVLSDELEKDPSTSADDCKKKVELDDWEDAADMSTPKQPSDSGNQASITQVLDSDVTEANSRKKYSRDFLLTLQHHYTGLPFGFQMNEAVNAIMNNLAGKSYVADREPHPSPGRGLDRPTSRDRRGAAMADDRWTRAGVPLSPGRDVHMDLPNGPSVINYRGGPGGNHGVLRNPRSQSSNQYGGGLLAGPMQSVGPQVPRSGSDADRWQQKGLMPSPGTPVQAMHKAERKYVIGKVSDEEEAKQRQLKAILNKLTPQNFEKLFEQVKEVNIDSVATLTGVISQIFDKALMEPTFCEMYANFCFHLAGALPDFSEDNEKITFKRLLLNKCQEEFERGEREEAEADKTEEEGEIKQTKEEREEKRIRARRRMLGNIRLIGELYKKRMLTERIMHECIKKLFGNHDDPDEENIEALCKLMSTIGDMIDHVKAKEHMDAYFSMMQIMSTNQKLSSRVRFMLRDSIDLRRNKWQQRRKVEGPKKIEEVHRDAAQERHAQSSRLGRGPAVSSVPRRAHPMDYGPRGPSASASSSSQQGSIRGMPPHSRGSQDIRHDERHQFDNRTVLPQRVVKDEAITLGPQGGLARGMSIRGQPPVSNTEIPSVIDHRRIVSSSNGYNSAADWTSSSGREDSNSRLPDRTSGRIPASSQSAVTSQRPASQEGRSRSKSYSEDELREKSVLTIREYYSAKDEKEVVLCIEELNAPNFYPFLVSLWVNDSFERKDMERELLAKLLVSLCSGRHNLLSKQQLSDGLSNVLASLEDNLSDAPRATEYLGRLLARFVEESILLLQEVGKLIQESGEEPGYLIQGGIAADILGAVLDSIKSDKGNSFLDEIKTTSSLKLVDFRPQHLKRSKLDAFM

SEQ ID NO: 51259 - protein, 221 aa, Zea Mays
MAAENEEKETACAGYKHGPPWVFKGSALYQLHLVKASTARAFVPRDLRLVEAFGYTLGGMFLARYHDSPAGEFDELVVIAGIVWNPPTSCAWAARVLVNSVEACRHGRKEVGLPSHVATFSSKNEAASLGDRPLARPNSFLNMLGIGSTAFEQGNGREIEVSESKGGSSTRHLCNISLPFTGSHKDHQWAGPAIRMSLPSFSGRTVDHPDLLKYSCQVECR

SEQ ID NO: 51260 - protein, 367 aa, Zea Mays
MVEKAKTHFTLAGSANQSDPAEWQKLHEVEIHQGRCMDARKIGDWKSALREADAAIAVGADSSRLLLALRSEALLWLHKLEEADLTITSLLKLDDASLPSTPTRVSGMSADSYVHIVQAKVNVTFGRFDSAVALAEKAKLIDGVSSEVEVILNNVRLVALARARGNDLFKAACWSKLGRWAKAVEDCSEALRVQPNYTKALLRRAASYAKLERWADCVRDYEVLRKDLPGDTEVAESLFHAQVALKTARGEVVSNMKFGGVVEEIISLEQLQDVIRSPGVSVLYFMATMNKQCAQITPSVDSLCSECPALNFLKVNVDERPLVASAENVRVVPSFKIYKDGTRVKEMVCPSLQVLRYSVRHYAVSSS

SEQ ID NO: 51261 - protein, 477 aa, Zea Mays
MRRGGGATPARTSGDAAPLLHGHGSNSSRSRSPASCPAPAPPATSGGLQEITRAGNEWYKKGRHADALRHYDRAVALCPDSAACRGNRAAALIGLGRLAEAFRECEEAVRLDPASGRAHGRLAGLCLRLGMVEKAKTHFTLAGSANQSDPAEWQKLHEVEIHQGRCMDARKIGDWKSALREADAAIAVGADSSRLLLALRSEALLWLHKLEEADLTITSLLKLDDASLPSTPTRVSGMSADSYVHIVQAKVNVTFGRFDSAVALAEKAKLIDGVSSEVEVILNNVRLVALARARGNDLFKAACWSKLGRWAKAVEDCSEALRVQPNYTKALLRRAASYAKLERWADCVRDYEVLRKDLPGDTEVAESLFHAQVALKTARGEVVSNMKFGGVVEEIISLEQLQDVIRSPGEFLLYMHLACCRHFTSFLVLVVLRSGQLTRCIRSLLHGYNEQAMCTNYPVCGLPLLRVPCIEFPEGKR

SEQ ID NO: 51262 - protein, 147 aa, Zea Mays
MNSNSLAMSAPAAAVSAAADAGGEHEEQQEAGHGEEGDGSPKQAVNLGEDEKTESGPVTAPPIVARGFQESGGVAVEHILPDSPFASTTNKEASAPTAQNGGISNGSPHHVASSPLFPPAPAIELPPYNSCFFQAPRFSPGHEAIGL

SEQ ID NO: 51263 - protein, 88 aa, Zea Mays
MDKGHKKCLILWLRIQDWANFILNFVKDNGLEVMTIEEIRSGIDTRGTELEGIDRGVLMRALRQLEQKGKAAIFKGTSADDEGVKFSV

SEQ ID NO: 51264 - protein, 178 aa, Zea Mays
MPRDETHTLNVKKVALKSMSHAWKDFKWKLNINYVKKNKTPFEDYPELKKEWWPNFVECVTSAEYIALGEKGKKSQSMNKFRQKLGRQSYTVQKRKWAKEDAQALTEGKSIPFQDMPDGRHKDWARVDVNEKSVASTFTPFYNMDILATAIGSNHPGRTTGVSAYVGLGMGLAQGDGH

SEQ ID NO: 51265 - protein, 408 aa, Zea Mays
MGLPQIPVVKEEEPTEVSTPAGSSFSVDGPCDSGKLLEGSSSGSWFQNPSISDFKRKFAPGAASNGLNSQFRTRHAVDDPAGYQSLNPKPRDPNYRSCTKIKSTLHIPAMRVVGFDSGTDGSTGGPDIMVSHKMHSSLVIGNCDSSVVHHEVQARKRVLSPLTNALPAGQFYGNALNIGSGDEKVQNPRCVRQLSYSGFHDSKKANTGALDSFQPSTRSELRYSDWSTGQGFCKFSSNTFTDGPLLEGRELFSCSDQPGVEGIMNLAKVPARLSHSPPPTLSPLRPKWMHRMKAARAQRDLTGRIENDIIDLKEMGRSNFDDYSEYVGTIRMGDILEETSILHDGFDTMIPKRNFHRRYRCLGPESAPVSTHIECINSSNLLPVRRSLVGSFEESLLSGRYSCGKDNQ

SEQ ID NO: 51266 - protein, 717 aa, Zea Mays
MGLPQIPVVKEEEPTEVSTPAGSSFSVDGPCDSGKLLEGSSSGSWFQNPSISDFKRKFAPGAASNGLNSQFRTRHAVDDPAGYQSLNPKPRDPNYRSCTKIKSTLHIPAMRVVGFDSGTDGSTGGPDIMVSHKMHSSLVIGNCDSSVVHHEVQARKRVLSPLTNALPAGQFYGNALNIGSGDEKVQNPRCVRQLSYSGFHDSKKANTGALDSFQPSTRSELRYSDWSTGQGFCKFSSNTFTDGPLLEGRELFSCSDQPGVEGIMNLAKVPARLSHSPPPTLSPLRPKWMHRMKAARAQRDLTGRIENDIIDLKEMGRSNFDDYSEYVGTIRMGDILEETSILHDGFDTMIPKRNFHRRYRCLGPESAPVSTHIECINSSNLLPVRRSLVGSFEESLLSGRYSCGKDNQSIDGFLAILNVTGGSFSPPTQKFPFTVSSIDEDSSLLYYSSIDLAGRLPTNNTKGPKLKRSLSSSDSRSTNSRLRIPVKGRIQLVVSNPEKTPLHTFFCTYDLSDMPAGTKTFMRQKITLSSASPSHPTREESKASDVKVESVQCGSELREFGALFSECSDNGHELEKGRSADMECFSMECDVREPNENGTSGNSENDANAEGCCCQINSCEGGKIYFNRSPKVNDIPAGGVLRYALHLRFLSPFSKKSSKSRYHCKLDMSSQPHSRSRTEEERRFYLYNDIRVVFPQRHSDSDEGEWSVLTVKARPKR

SEQ ID NO: 51267 - protein, 225 aa, Zea Mays
MLVGIRVRQLPVGDGIWIARHKEDHTEYVLDFIVERKEVMDLDGSIEDNRYRDQKLRMKKCGLRKLIYLVEGDLNRAPKRVKTACFTTEILDGFDVQRTTGFADTQKRYVDLTRSVIAYYDASFSIVGKASPVCPTYDDFKRKCYDLKKKTVSDIFGCQLMQVPQVTEEAAQAVVELYPTPLLLAKAYSILGGDTSAQEKMLKKKNEMVNAGASRNIFHLIWGDG

SEQ ID NO: 51268 - protein, 388 aa, Zea Mays
MRPLPKKPNAALPVPKQLKVHHPENESLSRFFLEKWRAMMQEPDGLSQNNYLAFANANRSLCSSKEPIRTLKDFSNVKGVGTWLINHMKSFFEKSSQDLSPAKGKKAKGTKSYLPRKNTAAYAILITLHRAKTSGKDFMMKQELIDAAEASGLSRDAIGPNKSKAKQSYGKDWYTGWSCMKTLLSNRLVTKWSNPAKYMLTQEGEGTARDCLSRSGLDDSARPLTIIGAHNTSAMDPSVARHSPELVSDSSLTKKKSNCYRQVQATNYEGIICCDSDSEEPCGKDIPLKGMEPITSCGPPDISRPFQGTPKLQSSTMGSAKLAMPPRRANENFLEAYEVILILDDREKFGSRSRKVADNICSLSHFAVDVSWDQSLHSSISCPTFSLL

SEQ ID NO: 51269 - protein, 487 aa, Zea Mays
MQARLLLDMLGKGIESALTNPSTLLPEPWQASSDMLSSIDADKMTVEPALLPNIQGYVDAVLDLASHFITRLRRYASFCRTLASHVGPSSTTGTSRNMVTSPTNSSPSPSNNQGNQGGSTSATGNSQMQEWVQGAIAKISNNSDGAATATQNPMSTRTSFMPISINTGTFPGTPAVRLIGDCHFLHRLCQLLLFCLLFRRRQSPRLLASSQKNQDSAMQKIQHMMNAKTEDNSSTVRSGLGAAKVEEGHSARGGQFVLGGAKGPEENPIGKSVRIGSGNAGQGYTSDEVKVLFLILVDLCRRTSTLPHPLPASQNMPRPRGADAAGLLLRELELQPPAEEWHRRNMFGGPWSEPDDFGPLDNMPRLKISGSINSHLSDMEVDAVSSIGIDLWPRKRRLSERDAAFGLKTSVGLGGYLGVMGSRRDVVTAVWRTGLDGDWYKCIRCLRQTCAFAHPGAPNQTNEREAWWISRWSHACPMCGGSWVKVV

SEQ ID NO: 51270 - protein, 1613 aa, Zea Mays
MDGGHTTRHPMSPAISASTVLPQQRQMQPHHHPARPAIADLFTLYLGMNSKQRAEDPLRESSNKLQKRVTALNRDLPPRDEQFISDYEQLRMQFPDAEQLQAITESVLISFVLQCSSHAPQSEFLLFATRCLCARGHLRWDSLLPSLLNTVSSIEAPMVQGVSVTGGGSVTPSSAITMPNAPNFHQSNPASPLSVMNTIGSPTQSGIDQPVGANVSPIKAAEFSSSAQLGTAARGDQSRRGAEASYLHHLSCRIILAGLEFNLKPATHAVIFQHMVNWLVNWDQRPQGMDETDTMQTCRLEKPLHEWMHLCLDVIWILVNEDKCRIPFYELVRCNLQFLENIPDDEALVSIIMEIHRRRDMVCMHMQMLDQHLHCPTFGTHRFLSQSYPSIAGESVTNLRYSPITYPSVLGEPLHGEDLANSIPKGGLDWERALRCLRHALRTTPSPDWWRRVLLVAPCYRSQSQQSSTPGAVFSPDMIGEAVADRTIELLKLTNSETQCWQDWLLFADIFFFLMKSGCIDFLDFVDKLASRVTNSDQQILRSNHVTWLLAQIIRIEIVMNTLSSDPRKVDTTRKIISFHKEDKSLDANNIGPQSILLDFISSSQTLRIWSFNTSIREHLNSDQLQKGKQIDEWWKQMMKASGERMIDFTNLDERATGMFWVLSFTMAQPACEAVMNWFTSAGMADLIQGPNMQPSERIMMMRETYPLSMSLLSGLSINLCLKLAYQLEETIFLGQAVPSIAMVETYVRLLLIAPHSLFRPHFTALTQRSPSILSKSGVSLLLLEILNYRLLPLYRYHGKSKALMYDVTKIISMIKGKRGEHRLFRLAENLCMNLILSLKDFFFVKKELKGPTEFTETLNRITIISLAITIKTRGIAEVEHMIYLQPLLEQIMATSQHTWSEKTLRYFPPLIRDFLMGRVDKRGLAIQAWQQAETTVINQCNQLLSPSAEPNYVMTYLSHSFPQHRQYLCAGAWMLMNGHLEINSANLARVLREFSPEEVTANIYTVVDVLLHHIQCEVQRGHLAQDLLSKAITNLSFFIWTHELLPLDILLLALIDRDDDPYALRLVISLLEKPELQQRVKNFCNTRSPEHWLKNQHPKRAELQKALGSHLSWKDRYPPFFDDIAARLLPVIPLIIYRLIENDATDIADRVLAFYSSLLAFHPLRFTFVRDILAYFYGHLPIKLIGRILNLLGVSTKTPFSESFAKYLVSSNSSICPPPEYFANLLLNLVNNVIPPLSSKSKSNPADTTRSTFNKHHASSQPGGVGNTDGQRAFYQNQDPGSYTQLVLETAAIEILSLPVPAAQIVSSLVQIIAHVQAILIQSNSGQGMSGGLGQSSGLPTSPSGAAESSGPNQANSAATGINATNFVSRSGYSCQQLSVLMIQACGLLLAQLPPEFHMQLYSEAARVIKDCWWLADGSRPVKELDSAVGYALLDPTWASQDNTSTAIGNIVALLHSFFSNLPQEWLESTHTVIKHLRPVNSVAMLRIAFRILGPLLPRLAFARPLFMKTLALLFNVLGDVFGKNPQVSNPNPVEASEIADIIDFLHHAVMYEGQGGPVQSTSKPKLEILTLCGKVIEILRPDVQHLLSHLKIDPTSSIYAATHPKLVQNPS

SEQ ID NO: 51271 - protein, 92 aa, Zea Mays
MLLTPSGRFEIQKKICLSISNYHPEHWQPSWSVRTALVALIAFMPTNPGGALGSLDYKKEDRRALGIKSREAPPKFGSPERQKLIDETRKHW

SEQ ID NO: 51272 - protein, 160 aa, Zea Mays
MNDRAWLALKKNTYICMCAHACIYICMRVQQAAELVKGLNTCGARPPGPPALGLLSAPAVVAAAADAPVATRRWQEGQMESAAAAAVGMKKAAGWGCGWLRARSCWSSRWRRRFSSVNVSQQRLRISQSTSVCFSLVLALLFWNQTSTCLGLRTGLTGLR

SEQ ID NO: 51273 - protein, 155 aa, Zea Mays
MSRDLDCPVQTQMAVAVLDRSFSSEYPGGSRTEGRQLSWKRVFVQTDNGSVLGIELERGENVQTVKKKLQIALNVPTDESSLTFGDLVLNDDLSSIRNDSPLLLKRNQIHRSNSTPCLSPTGQDVWQRDRSGPIEILGCSSPSSRMKQIAKDVIR

SEQ ID NO: 51274 - protein, 228 aa, Zea Mays
MAASIGIMDGAYFVGRGEILHWINATLQLSLAKVEEAASGAVQCQLMDMVHPGVVPMHKVNFDAKTEYDMIQNYKVLQDVFNKLRIGKNIEVNKLVKGRPLDNLEFLQWLKRYCDSVNGGIMNENYNPVERRSKGCKERVSKGSNKPSKSLQANRLSGADPTDGGHGVGKVCNTFSEEHYIEQIQKLSEKMTKAVRKILYAADAKDSPLPEANDIITKSPSLFSNETE

SEQ ID NO: 51275 - protein, 110 aa, Zea Mays
MAVSDPCHVAAPHPYLSACWPEDLAPFSPLSGIRTVHVGVQDPPAGVRTAHVEVHDPTAGSGCICGGPGPTCGGSRLTVAILVHFHPRARGGSRPVHERGAGPTAQVLST

SEQ ID NO: 51276 - protein, 670 aa, Zea Mays
MLDNGNFILRSITNQAKIIWQSFDSPTDTWFPGINITLGAKLLTSWKSYDDPAVGDYSFGPGITNASQLIIWWKGIQFWTSLRWNGDTNSLIPELTSLGIIPVLFQCDNLTCTYTANPRDTMTKIVLDPNGSLNIAQFSPVTESWTLLWRQPPSCEVSNICGVFGICNNNMSPICHCPLGFEQQAGDTRKGCTRQIQLQCNGDRFVNMSNMRFPDSRVKLSVMGDGKCQLECMKNCSCTAYTYSVLDGCSLWYGNLTNMQDGYKSGAGTLYLRVANSSGHKLLWIAGVLPSIGFLIFCLILFIWISRSKNKGKGKQDGHHSIMTSDAIKLWEGEKTSTYFAVFSFSQIRNGTDKFSTENMLGEGGFGPVYKGHLPDGQEIAVKRLAANSGQGLTEFKNEVLLIAKLQHSNLVRLLGCCIEEEEMLLVYEYMPNKSLDFFLFEKSRRALLDWEMRMNIIEGVAQGLIYLHKHSRLRVIHRDLKASNILLDTDMNPKISDFGMARIFDPKGTQANTKRVVGTYGYMAPEYAMAGNFSTKSDVFSYGVLLLEIISGMRNAGPRRHGNSVSLLGYAWELWNEGRCHELIDKPLRGRCPENVALRCIHVSLLCVQEQAADRPSMTEVISMITNGSATLPDPKQPGFLSMLVPNETDVAEETCSLNGLSVTILDGR

SEQ ID NO: 51277 - protein, 576 aa, Zea Mays
MFGKISFCRECTLVNLLILSVIASRCLSAPTERLGSIFQNQSILDGQTLVSMSRIFVLGFFSPGASSKRYVGIWHNDVSERRVVWVANRNDPLQDTSGILKFDNSSNLIVLDGRGNSFTVAYGRGVQDVEAAMLDNGNFILRSITNQAKIIWQSFDSPTDTWFPGINITLGAKLLTSWKSYDDPAVGDYSFGPGITNASQLIIWWKGIQFWTSLRWNGDTNSLIPELTSLGIIPVLFQCDNLTCTYTANPRDTMTKIVLDPNGSLNIAQFSPVTESWTLLWRQPPSCEVSNICGVFGICNNNMSPICHCPLGFEQQAGDTRKGCTRQIQLQCNGDRFVNMSNMRFPDSRVKLSVMGDGKCQLECMKNCSCTAYTYSVLDGCSLWYGNLTNMQDGYKSGAGTLYLRVANSSGHKLLWIAGVLPSIGFLIFCLILFIWISRSKNKGKGKQDGHHSIMTSDAIKLWEGEKTSTYFAVFSFSQIRNGTDKFSTENMLGEGGFGPVYKGHLPDGQEIAVKRLAANSGQGLTEFKNEVLLIAKLQHSNLVRLLGCCIEEEEMLLVYEYMPNKSLDFFLFELC

SEQ ID NO: 51278 - protein, 454 aa, Zea Mays
MPVVGAVTLYVSLLTFTLRVHPDRLDYVDQVLGACVKKLSGKAKLEDSRATKQIVALLSAPLEKYSNIVTALELSNYPRVMDYLDNATTKVMAVVIIQSIMKNTTCISTSDKIEALFDLIKGLIKDMDGAQDDELDEEDFKEEQNSVARLIHMLHNDEPEEMLKILCTVQKHILQGGPKRLTFTVPSLVFSALKLVRRLQSQDGDVTGEDVPATPKKIFQILHQTIDALSCVPSPELALRLYLHCAEAANDCDLEPVAYEFFTQAFILYEEEIADSKAQITAIHLIIGTLQRMNIFGVENRDTLTHKTTGYSAKLLKKPDQCRAVYACSHLFWADDQDGIMDGERVLLCLKRALRIANAAQQMASATRGSSGSVTLFIEILNKYLYFFEKGIPQITNTVIQDLIELIRTEKQSDNSVADPSTEAFFSSTLRYIEFQKQKGGSIGEKYEQIKTSS

SEQ ID NO: 51279 - protein, 113 aa, Zea Mays
MAAAALRPAILRRIRLSPSPSLALAAAGTGASHPHALGRWLARPMSSHDAHLTRDEVIDRILDVIKSHPKIDPSKVVMAIEEEFKLEIPDMEADKIDSLPLAIEYVANHPMAG

SEQ ID NO: 51280 - protein, 166 aa, Zea Mays
MAVLLRSTSAAASTAGPSSALLATTFRRSRGCLLPRAAPQRRLYVARASAQPLEVCAKESITIPGRLGDCPFTQRVLLTIEEKHLPYDLKLVDLANKPDWLFEINPEGKVPIVKLEEKWIGDSDVITQALEEKYPEPPLATPPEKASVFTGAETPTKEASIERARH

SEQ ID NO: 51281 - protein, 235 aa, Zea Mays
MAVLLRSTSAAASTAGPSSALLATTFRRSRGCLLPRAAPQRRLYVARASAQPLEVCAKESITIPGRLGDCPFTQRVLLTIEEKHLPYDLKLVDLANKPDWLFEINPEGKVPIVKLEEKWIGDSDVITQALEEKYPEPPLATPPEKASVGSKIFSTFIGFLKSKDPSDGTEEALLNELTSFDSYLKDNGPFINGGIISAADLSLGPKLYHMEITLGHYKNWSVPDSLSYVKTYMKL

SEQ ID NO: 51282 - protein, 319 aa, Zea Mays
MTFAAEPVCRSKGRRNSLGSERMIAAFSKPSPDRSSVSSIRSVKDDYTATQSVRELSVDESMVEVASKPVASRTSDVMRTPKATPWKMMTTLRNRLEAPQASYDRTSHTEFSRTPVDKRNSRVARRASLPLPVFETPKQRSSMSVLERLESPDVSVNSPRIDRIAEFPLASCEDPLFSTVKPPTPASASASATPPFVDRSITKDKCTAQTLRSAAHDGGNGRSEDGGGLSSGRTTTTAASSGGTSGSLQPKGRFDTTSYQQRAEALEGLLEFSAQLLQQERYEELGVLLRPFGPDEMVSPRETAIWLTKSFKEAMATGL

SEQ ID NO: 51283 - protein, 403 aa, Zea Mays
MAVRRRTAAAAAGDPPPQAPPADEAAAVAPDEPVLRAPNLRVAAVAAALFLAPFSYLAFVHYSLTADLQRSILKCGAMSLVGFCVALKLIPIAARYHLRRRMFGYDINKKGLPTGQIKVPEALGLVVGIVYLVIAIIFQQFHYAPDSIWLVEYNAALTSICFMILLGFVDDVLDVPWRVKLALPTFAALPLLMAYAGGTSIIIPKPLTPYVGLTVLELGLFYKLFMLLLAVFCTNSINIHAGLNGLEVGQTVVISAAVLIHNVMRIASSTDIETQQAHEFSIYLVLPFLTISLALLAFNWYPSIVFVGDTYTYFAGMALAVIGILGHFSETLLLFFLPQVLNFLCSVPQLFHFVPCPRHRLPRFDPGAGLLTGTKDGNLVNIFLRLFGKCSERALCIRLLIFQ

SEQ ID NO: 51284 - protein, 179 aa, Zea Mays
MYAHACLLVVTHTLLTGTWPHQLAWSVASIVSLRPTQPGEALPLDEPQQELHHLGGLLERVGGAGLLGVLGHQDADALALAPAPQRPEGVLVGAVVADVHGQDVGAAREAERLEQELERLALVPLDGGPHLQHHPPLRQPQPGVLPQNALHRLPQLAPHLNTIDRIDHRSSCQLGRCVS

SEQ ID NO: 51285 - protein, 283 aa, Zea Mays
MALAPSPPALPPNPALPLPWWGRAGRGALLGARARVRAVRAALRPPSQWSVGSWRGRPAQQQPEYPDKADLEDVLRTVGTFPPIVFAGEARTLEERLAEAAVGRAFLLQGGDCAESFKEFNANNIRDTFRVLLQMSVVLMFGGQMPVVKVGRMAGQFAKPRSDGFEERNGLKLPSYRGDNINGDAFNGESRLPDPHRMIRAYSQSAATLNLLRAFATGGYAAMQRVAQWNLDFTENSEQGDRWGCCESTMINLHAYRLTHLFLQYFNSSQDVCILGSFYGLSD

SEQ ID NO: 51286 - protein, 270 aa, Zea Mays
MEVAAAACGWNLDTTIIFPEDHIMPRLFTPSLAKKYEELYQQNGVKFIKGALIEKLGAGSDGRVSSAVLKDGSVVEADTVIVGIGAKPVVSPFEAVGVNPKVGGIEVDSLFRTSVPGIFAIGDVAAFPLKMYNRIARVEHVDHARKSAHHCVETLLTSQTKAYDYLPYFYSRVFEYEGSSRKVWWQFYGDNVGEAVEVGNFDPKVATFWIDSDSRLKGVFLESGTSEEFSLLPQLAKSQPVVDKSKLQAATSVEDALEIARSSLRSSAMV

SEQ ID NO: 51287 - protein, 1916 aa, Zea Mays
MKTEASPAAGDIEEPLVHFKWRYMVRLIQWHLTEELLVPSVLIEWLSNQLQERDSVDVLELLLPIMLGLVDTITLSQTYVRMFVELLVRRLNDASVVDSPKGPSVSSVIAELLRYMVLAVPDTFISLDCFPLPSFVVPDVYGRGALLKITSSGGISSSKRCDAYRYLSCGYAVCSIQKRAYDLATVANPNLQARGAAKVVQALDIALVTGNLSVAYSSLFNDLSDTLMEERWIKEVSPSLQSSLMWIGTVELSLICSIFFLCEWATCDYRDCRASPSRNVKFTGRRDLSQIHMAVSILKNKMDEMNNLSRSKSSTRVTLNNITKGSSLTDACLTAAAVDDTSGLQSNAKNVDEKKDTNDIFESPGPLHDIIVCWLDQHEVSSVAGFTRVDVLIVELIRNGIFFPQAYVRQLIISGITDKNDTMLDVERKRRHHRTLKQLPGSSLFDILEETRTVEEQQLYEMMSTYSSERRLVLSELSCDHSFYASGRGEYTASSCIRKQSDLPLASGGDKHGRVPEQVEDVKALLSSLLGFTYPSPVESEPRQIKTSFQESATSTLSQVETGEAKSGCEVCMRSKGQKLDDTATPFQGFSLIQSDEEDIWWVRKGTKLQESFNIEPVQKSVKQTSRGRAKVVRKTQSLAQLAAARIEGSQGTSTSHVCESKMSCPHHKPNIDGDNVKDFDHTRVANLTEIGKSLKRLRLLERRSVSSWLLKTVRQLIEGNETTAAKATNSISILSLQSDDKTTSKWRLGDEELLSVLYLLDTCCDLVSCARFLVWLLAKIRGGMGSSGQPGRSSMHTRNRDHQVCQVSEALVFSSLLRYENILLAADILPDVLSALVNRNSVSAIVRHPGSTAFAYVRYFLKKYRDVAGVAKWEKSFRTTCDQRLLAELDNGRSIDGELISSSGVSAGEEIDEQVRQKLNGRSSRLVQNMKEIVQRQADEIQRSLKEKKVLATPRNPPTFEKEDSYQIAHDIVSGLVECIRQNGGANPDGDLSTVASAVSAIVANAGHVIAKHLDFAGGNYQGVNSVSNSLNFVRHTLRVHINSLCLLKETLGDRFSRAFEIALAVETSGAVTAAFASPKMHRNQFQPSPEAHDAYGNHTSDLSNSGKGFVGRTAKVSAAVSALVVGAVVHGAVSLERMVAALKIKDGLDILQLLRGLKSSSNGVSRPTGTFRIEHSTDVLVHWFRVLLGNCRTVYDGLIADILGDSYILALSRLQQMLPLSVIFPPAYSIFAMVLWRRYIFNREDPQLYQSLSNAISDITRHQPFREICFRNTHRLYNLLASDVGDSEFAAMLETHSPDRNSKILPFIPLRARLFLDALIDCNTPTIQGDGASEPCDPKDNELKLSERLMQLLDTLQPAKFHWQWVEMRLLLDEQALMEKVAAGKTALESLRSLSPKAEGFTLSDSEKGFTEVILSRLLARPDAAPLYSEAVRLLGKLQESLVMDVKWILQGQDAILGRRSTRQQLVHIAQRKGLSTKAQVWKPWGWSSLLSDVIPNKTAKRKLEVTSIEEGEVVDDTVDAKRPSKTPPHSVDRSFEAIRSINKYLTEKALAELVLPCIDRSSADIRGILSVDLIKQMGTISEHIKAIARNGAKQAGSVPSGNEVPSSKSSGRKGIRGGSPNIGRRAPVGNDPSPPSASALRAALWLRLQFIIRLLPVIMADRSMRQTLASAILGLLATRMIYEDADLPLPPTNATALRREVDSLLEPPLDVLLDRPGESLFERLLCVLHALLGSYKPSWLKSRSASRSTIRIQRDFSAFDNEAAEGLQSALDHMELPETIRRRIQAAMPLLPPSRHPSLQCQPPQLSLAALTPLQSSTSGVGPQQKSCSASWVPTNVSGRSKAALPSHDPEMEVDPWNLLEDGTSCPSTASGSHGASGVTGDHANLKACSWLKGAVRVRRTELTYIGSLDDDT

SEQ ID NO: 51288 - protein, 383 aa, Zea Mays
MGKAARWFRSFLGKKDQATTKGQRRQQDQALPPPASAKRWSFGKSSRDSAEAAAAATAAAAVVSPDAGNAAIARAAEAAWLRSAACAETDRDREQSKHAIAVAAATAAAADAAVAAAQAAVAVVRLTSKGRPPSPVVLAAVRIQTVFRGFLAKKALRALKALVKLQALVRGYLVRRQAAATLQSMQALVRAQAAVRERRAALHHQPVRPRYSLQERYADDTRSEHGVAAYSSRRLSASVESPSYGYDRSPKIVEVDPGRPKSRSSSRRASAPLLDARSSGSGGGEEWCANNPASSPLPCYLPSGPRRIAVPTSRQFPDYDWCVLEKARPATAQSTPRYLQAHAPATPTKSVAGYSPSLNACPNYMSSTQASEAKVRSQSAPKQ

SEQ ID NO: 51289 - protein, 459 aa, Zea Mays
MYEGAVKEDGRGKTIWDKFAHTFGKVADLSNADVAVDQYHRFEEDIQLMADMGMDAYRFSIAWSRILPNGTGQVNQAGVDHYNRFIDALLSKGIEPYVTLYHWDLPQALEDRYNGWLDRQIVYDFAEYAETCFEAFGDRVRHWVTLNEPHTVAVQGYDAGLQAPGRCSLLLHLYCRSGDSATEPYVVAHNFILAHAKVSDVYRKKYKAAQNGELGIAFDVMWFEPMTNTTADIEAAKRGQEFQLGWFADPFFFGDYPASMRSRVGDRLPRFTAAEAALVKGALDFVGINHYTTYYTKHNSTDLVGRLLHNTLADTGTISLPFRNGKAIGDRANSIWLYIVPSGMRSLMNYVKERYNSPPIYVTENGMDDGNSPFTSIKDALKDSKRVKYHNDYLTNLAASIKDDACDVRGYFAWSLLDNWEWTAGYSSRFGLYFVDYKDNLKRYPKSSVQWFKNLLASS

SEQ ID NO: 51290 - protein, 212 aa, Zea Mays
MGNLESGGKGEKTPKNSTTIALQSPFPEYNGRFEIGLGQSMSGGRMLLPLNATADAPIYVNPKQYEGILRRRRARAKAESENRLAKGRKPYLHESRHLHAMRRVRGTGGRFVNTKKEGRGTGVASNGGSKTAAAAPSRLAMPPSFQSSVASLSGSDVSNMYSGGLEQHLRAPHFFTPLPPIMEDGDHGGPPTRISSSFKWAASDGCCELLKA

SEQ ID NO: 51291 - protein, 249 aa, Zea Mays
MWCCSGADDEPHAAPLAANPAATPPRAPAQARGPSMPRTGGAAASAAKVLPIDVPAVALSELNRLTGNFGDRALVGEGSYGRVYRATLATGEVAAVKMFDNGSSSGQSEAEFCEQLSVVSRLKCEHFTQLLGYCLELNNRIVLYQFATIGSLYDILHGKKGVKGAAPGPVLTWIQRARIAYGAARGLEHLHEKARPSIVHRDVRSSNVLVFGGHDAKIGDFNLTNQSPDSATRLHSTKVLGTFGYHAPE

SEQ ID NO: 51292 - protein, 552 aa, Zea Mays
MMSHEQQIVPPSKGSVNGFPHRKLDKEGSGTQSRINLVRSSSGGFTNSGVVLKMAQVIKDGSARGQRYPAVLVKKPETMIIPARELVQVFAKDIELGGELPKVPGNDKRKDLLIDSAITRYHYLEERELERWAPDGGDSECIELEKYDRKGNRSWDQFETNAALFGVKSTFNEEIYTTKLERGPHMRELEKHASRIAREIEGEDTRDIHLAEERGLFLGDDLDHDEEIKYSAVRRDTDNSKYKPPFTKVPSSTCHVDSFNRTVNIDPNDSLACSSTMDKESSSHIFDDTDASATIHTNSVSQPTSDYLSDRPLSNDENRLDRKLNKESNENMDNRKLQHEDNLPDGARPLISEALDGRSSSSHAYEPSFSGQGFKSPETPDSTVPVKHPSAMEPVTSSQRPGSSTSSTSERIGANSAAGAPGLSPSSSIGSLTAEKSTLNPNAKEFKLNPNAKSFTPSASLRPPHPTSSDASYYYPNNMPAMPLGPGLPVGMGFPPAYGAQPVMYNTQPGASPHGYMHPAGPQYGQQMTIGGQTRPVYYYAPEMQQYRGRNF

SEQ ID NO: 51293 - protein, 302 aa, Zea Mays
MATTTTTTPLIVSFSRSCSCPYPHRHFPGKPKLPAPTSCSLSLRLLAAPLAVLPRRPRDVSAAYGDGDMDDDFGDFDPDDADGVGEDDDVDNEQDYDVDYDRLLAPVVKPPSPPGASASPGEEGDIAMVAADSFVSTRDSASDTVVDYAVDEDEFHKIRLLHCDFLIRKVPDPDDDVFDFREMYVTPPDTDIYSIPRVLAPMPQKYARCTKKNFGRYHVSEPPVEHLRDPLYKTEREIMKVFLTKHYRNRRADDPDFFLDFEEIYVIDSRTRSITRAKVMVSVPEGKKRDRRNDLLLIRDGD

SEQ ID NO: 51294 - protein, 200 aa, Zea Mays
MRTSFTRLGCSTATSLSARCPTPTTTSSTSESATFHRTRAGDATQINNITCTCLLTQLCGAHLAEHGISAQQMYVTPPDTDIYSIPRVLAPMPQKYARCTKKNFGRYHVSEPPVEHLRDPLYKTEREIMKVFLTKHYRNRRADDPDFFLDFEEIYVIDSRTRSITRAKVMVSVPEGKKRDRRNDLLLIRDGGESFRIIDK

SEQ ID NO: 51295 - protein, 616 aa, Zea Mays
MEEKAMANGAATADVAAPDNKDNTKEEASESKEPAANQDADDQNKGLENGAEGQSGGDVNMADAEVTEEGDGDPGVAKQVDSEDIKTDADTKEDGNAKAEEVEDVKMTEADTGSTEVKDKEEKGDEVVDTTVDKQDESKEQEEGVSAEQDEKQGEEAEEKGKEMDADEKQEEEAEEKGSADEKDEDEGDQKMEENKEETPKNKKARSARDRSQGNDNKHDGSKSREAKSLLNTPSPYGTDRPQRERKIVERLVEVIEKEPNRNFVVEKGRGTPLKDIPSVAHRISRKKPSDLKFLHSILFGRKGKAVDFKGHILQFSGFVWHESDEKHRVKAKEKLDKCVKETLLDLCWTLGIPTPKANIRKEDIVSKLLDFIAEPHSAADSGLSDDQKFINDSTSSKRQKKALEYDTDEDESMKSDSEENRDEDSDEAGDKQEGDYVSGKEKAGKFSEVKESSGKKKANTGSGHQSGPPKKIIRSPVKKVSSKIHEEKESPNNSAKVFSRKKKPTAEKEIKEKKSSGKKVTKGKGESVEAVLPSKDDLRKTITEILKKVDFNTATFSDILKKLDNHYKMDLAPKKEAIKVMIQDELTKLSEEDEGEGAGDTEKKQQQPQAKEIEA

SEQ ID NO: 51296 - protein, 263 aa, Zea Mays
MASAAHAPTPVLKDELDIVIPTIRNLDFLEMWRSFFHPYHLIIVQDGDPSKTIRVPEGFDYELYNRNDINRILGPKAYCISFKDSACRCFGYMVSKKKYIYTIDDDCFVAKDPSGNDINALEQHIKNLPSPSTPFFFNTLYDPYRVGTDFVRGYPFSLREDVPTAVSHGLWLNIPDYDAPTQLVKPLERNTRYVDAILTIPKGALFPMCGMNLAFDRELIGPAMYFGLMGDGQPIGRYDDMWAGWCTKVTTDHLGLGVKTGLP

SEQ ID NO: 51297 - protein, 242 aa, Zea Mays
MSIEERKISVISKSIALNPNAEEFVPSSLRSVNDSSKRSYATTVVSGISKESSTDKPESILRSNSDEEAHQYWQQQLPDDITPDFKVMGQDESPGPDSLSLTDLSINDGIGTSIFSPNQTLSMQHRASPFIRDKLNTHPKINLSIPTYMDERSQATILSPTAGSMSPNAAPWVKTLRNGGHYNTSIRDASQYNGDSSIGASLHNLTDAYHGSRRSLSSTMDIMNQLEDRSYIHSYCWIYVQA

SEQ ID NO: 51298 - protein, 448 aa, Zea Mays
MDEETSSWMDRDLTDSDLRYRLLMQNLEELETSLVGKDLEMDILEQLGALGSFNASVARGVSALHGRPDGSLLDDPEPETTPLDAGQEDSQVVVVRSGKSQERKLRRMRASSDEKGSRTSVKVNPPRRPKKSRKASSSQFISEWKSHPGQRRIIVREQSALLSTIKECAGLEKIREKMVKEGQEVSYHRWAEAAGVDEAELVSRLQAGYCCRDRLLVTTEWLVRCIARTYTGMGTALDDLLQAGKMGVLDGAEKFDSRKGCRFSTYVKYWIRKGMLALLAENSGVTLLPARMESIMRKVKEARRGIRYRQGRNPSDSEVAAAVGVSVANVRLARKCSRRAVSLYSEVAIGQDVKFAEVIPDESASPDEAALFRGQLRERLLLVLGRLPAREGRVLRLRHGLEDGRCRSLEEIGGIYGVSKEWIRKIEKSAMARLRDDDAVRRDLHDFV

SEQ ID NO: 51299 - protein, 395 aa, Zea Mays
MEYFDARRKPRNVGKIIAALVLTTLCIFALKQSPGFGGNSVFSRHEPGVTHVLVTGGAGYIGSHAALRLLQDSYRVTIVDNLSRGNMGAVKVLQGLFPQPGRLQFIFADLGDQKSVNKIFAENAFDAVMHFAAVAYVGESTLEPLRYYHNITSNTLLILEAMASHGVKTLIYSSTCATYGEPEKMPITEATPQFPINPYGKAKKMAEDIILDFSKSKGADMAVMILRYFNVIGSDPEGRLGEAPRPELREHGRISGACFDAALGVITGLKVKGTDYPTTDGTCIRDYIDVTDLVDAHVKALNKAEPRKVSIYNVGTGRGRSVNEFVDACKKATGVNIKIEYLSRRPGDYAEVYSDPTKINKELNWTARYTDLKESLSVAWRWQKSHPSGYGPNRI

SEQ ID NO: 51300 - protein, 458 aa, Zea Mays
MGAAPAARRCALLLALVVLVAAAGERGGSGAGGEAGAEQVLRLWSSADSARGGEAVDEEDRFFRWEWEEEEEDDDNNDEEEGEEEDDHAVVVQRKGACRNVVNVDSFGAAGDGVADDTQAFASAWKTACSLDNAVFLVPAGRRYKVGAIQFVGPCKDRRMIIQIQGTVVAPEEPSEWDPRSPRLWLLFSGLAGARIQGGGVIDGSGSKWWASSCKINRSNVPVQAGPDGRDDRLVPGRARAGPPRAERAADARDGVTLTRRARRRAAHRRARGQPQHGRHPRGRVHGGHHPELPHRHRRRLHLHRQRQLRRQDAGHRLRARARHQHREPRQGRRVRGCGGRGAGQGADQPRAERGADQDVAGRGRVRPRRALRRRGRGRRRPPHRHRPVLLRRDPPAEGRRRRRRLRQPDLRRGRVRRVLPQHQRHVAPRRGHPVRLQRRRAVHRHRSQQHQPAPRRR

SEQ ID NO: 51301 - protein, 522 aa, Zea Mays
MGAAPAARRCALLLALVVLVAAAGERGGSGAGGEAGAEQVLRLWSSADSARGGEAVDEEDRFFRWEWEEEEEDDDNNDEEEGEEEDDHAVVVQRKGACRNVVNVDSFGAAGDGVADDTQSSLDYQAFASAWKTACSLDNAVFLVPAGRRYKVGAIQFVGPCKDRRMIIQIQGTVVAPEEPSEWDPRSPRLWLLFSGLAGARIQGGGVIDGSGSKWWASSCKINRSNPCRPAPTAVTIDSCRGVRVRGLRVQNAQQMHVTVSRSRGVRVAGLRIDAPEDSPNTDGIHVAESTAVTIQSCRIGTGDDCISIVNGSFGVKMRDIDCGPGHGISIGSLGKGGAFAAVADVALDRARISRAQNGVRIKTWQGGAGYVRGVRFADVAVDGVDHPIVIDQFYCDVTRRQRDGGGGGACANQTSAVAVSDVSYRNISGTSRRAEAIRFACSDAVPCTGIVLSNINLRRADDDGEVQTVCNCAVGLDYGRVQPAADCLRSSTCGGTPDGHHHHDDDDEEQGKDDAVLHTEL

SEQ ID NO: 51302 - protein, 713 aa, Zea Mays
MLEANGQDTSGPERHLLDRCADGMLFGALGPCPVCANGMYYYNGQYQCSGNVSEWSKCTYSATEPVRVKKKWQIPHGTKNDYLMKWFKSQKVKKPERVLPPMSPEKSGSKATQRTSLLSSKGLDKLRFSVVGQSKEAANEWIEKLKLAGANFYARVVKDIDCLIACGELDNENAEVRKARRLKIPIVREGYIGECVKKNKMLPFDLYKLENALESSKGSTVTVKVKGRSAVHESSGLQDTAHILEDGKSIYNATLNMSDLALGVNSYYVLQIIEQDDGSECYVFRKWGRVGSEKIGGQKLEEMSKTEAIKEFKRLFLEKTGNSWEAWECKTNFRKQPGRFYPLDVDYGVKKAPKRKDISEMKSSLAPQLLELMKMLFNVETYRAAMMEFEINMSEMPLGKLSKENIEKGFEALTEIQNLLKDTADQALAVRESLIVAASNRFFTLIPSIHPHIIRDEDDLMIKAKMLEALQDIEIASKIVGFDSDSDESLDDKYMKLHCDITPLAHDSEDYKLIEQYLLNTHAPTHKDWSLELEEVFSLDRDGELNKYSRYKNNLHNKMLLWHGSRLTNFVGILSQGLRIAPPEAPVTGYMFGKGLYFADLVSKSAQYCYVDRNNPVGLMLLSEVALGDMYELKKATSMDKPPRGKHSTKGLGKTVPLESEFVKWRDDVVVPCGKPVPSSIRSSELMYNEYIVYNTSQVKMQFLLKVRFHHKR

SEQ ID NO: 51303 - protein, 355 aa, Zea Mays
MQSVAEMASNAYRKPSVSPSATMLKALPMRFLASPEPGGWSRRLPRRSLRSVSAALMTNPAYFEVGRFLGGYGFMNITSYSSSQFGEPSNVAGIQDLGLGYSPEEIERLRVQDIGEGEVTIRLYEGRVVQGPFRGTRAVFKVYPGARADASEADLMALNELRTHAFLQSDASDICENIQFLLGAFETATGEQWLAFRDDGRYSAADYANVTSARQLKEKSGGTPFWNPFDRAYKLELRRYFVLKLLNGAMSGLVHMHNHDRLHQSLGPSSVILNTALDKEGRYLVPRLRDLAFSVDIGYSSIGAGVLSDGLWRRASAAGASTPLEKRAFGIADDMQVFFFPPSTKNEHHSLHALY

SEQ ID NO: 51304 - protein, 280 aa, Zea Mays
MALNELRTHAFLQSDASDICENIQFLLGAFETATGEQWLAFRDDGRYSAADYANVTSARQLKEKSGGTPFWNPFDRAYKLELRRYFVLKLLNGAMSGLVHMHNHDRLHQSLGPSSVILNTALDKEGRYLVPRLRDLAFSVDIGYSSIGAGVLSDGLWRRASAAGASTPLEKRAFGIADDIYGAGLLLAYMSFIPFCKAGVMDGISLQRLLESTFRLDIYAAREYCLADDQLSEAVSFLDLGDGAGWELLQAMLNPDYRKRPIAEAVLNHRFITGAVLRNY

SEQ ID NO: 51305 - protein, 534 aa, Zea Mays
MDFDEYEYLEKTVEAFAAPANGSSPPGSGYKDKERSSRRRSTGGDEERDNVERRSKRSRPEEGRDRDRERHRYRDGDRHRSSRERRDRDRDVKEKEQGRENDKDRRSRDREREKEEREKDRQRRSRSRSERRRDDEERDRYRERDVRRRKEEVAEPEVDPERDQRTVFAYQLSLKADERDVYEFFSRAGKVRDVRLIMDRNSRRSKGVGYIEFYDAMSVPMAIALSGQLLLGQQVMVKPSEAEKNLVQSNASSGAASGGARKLYVGNLHSNINEDQLRQVFEPFGQVELVQLPLDPLSGLCKGFGFVQFARLEDAKAAQSLNGQLEIAGRVIKVSAVTDQAGMQVSGATGDLDDEEAGGLALNASSRALLMQKLDRSGITTSLTGGTGIAGLTTPVAIPTVSVLGAAPAAAPLLHPTVPGLAIPGATLPITTPSIDLAPPSQCLLLKNMFDPALETDPDFDLDIRDDVQEECSKFGQLKHIFVDKSTAGFVYLRFDSITAAMSAQKALHGRWFAGKMITATFMTPQQYEMKFPS

SEQ ID NO: 51306 - protein, 400 aa, Zea Mays
MDFDEYEYLEKTVEAFAAPANGSSPPGSGYKDKERSSRRRSTGGDEERDNVERRSKRSRPEEGRDRDRERHRYRDGDRHRSSRERRDRDRDVKEKEQGRENDKDRRSRDREREKEEREKDRQRRSRSRSERRRDDEERDRYRERDVRRRKEEVAEPEVDPERDQRTVFAYQLSLKADERDVYEFFSRAGKVRDVRLIMDRNSRRSKGVGYIEFYDAMSVPMAIALSGQLLLGQQVMVKPSEAEKNLVQSNASSGAASGGARKLYVGNLHSNINEDQLRQVFEPFGQVELVQLPLDPLSGLCKGFGFVQFARLEDAKAAQSLNGQLEIAGRVIKVSAVTDQAGMQVSGATGDLDDEEAGGLALNASSRALLMQKLDRSGITTRIQPPLQQHCFHIYLAYQV

SEQ ID NO: 51307 - protein, 229 aa, Zea Mays
MQRFWFCADAKAAQSLNGQLEIAGRVIKVSAVTDQAGMQVSGATGDLDDEEAGGLALNASSRALLMQKLDRSGITTSLTGGTGIAGLTTPVAIPTVSVLGAAPAAAPLLHPTVPGLAIPGATLPITTPSIDLAPPSQCLLLKNMFDPALETDPDFDLDIRDDVQEECSKFGQLKHIFVDKSTAGFVYLRFDSITAAMSAQKALHGRWFAGKMITATFMTPQQYEMKFPS

SEQ ID NO: 51308 - protein, 401 aa, Zea Mays
MDFDEYEYLEKTVEAFAAPANGSSPPGSGYKDKERSSRRRSTGGDEERDNVERRSKRSRPEEGRDRDRERHRYRDGDRHRSSRERRDRDRDVKEKEQGRENDKDRRSRDREREKEEREKDRQRRSRSRSERRRDDEERDRYRERDVRRRKEEVAEPEVDPERDQRTVFAYQLSLKADERDVYEFFSRAGKVRDVRLIMDRNSRRSKGVGYIEFYDAMSVPMAIALSGQLLLGQQVMVKPSEAEKNLVQSNASSGAASGGARKLYVGNLHSNINEDQLRQVFEPFGQVELVQLPLDPLSGLCKGFGFVQFARLEDAKAAQSLNGQLEIAGRVIKVSAVTDQAGMQVSGATGDLDDEEAGGLALNASSRALLMQKLDRSGITTRIQPPLQQHCFHIYLAYQGL

SEQ ID NO: 51309 - protein, 452 aa, Zea Mays
MQIRLSPSMRSITISTSHGLLDLMRFKVAARHFSYRTVFHTVLILAFLLPFVFILTAVMTLEGFNKCSSLDCLGRRLGPRLLGRGNDGSMRLVRDLYVMLDEVNSEEAPLNLKVPETFDEFIWDMKNNDYDLRSFAFKLKATMESMDKELRSSRLSEQLNKHYAAIAIPKGLYCLSLRLTDEYSSNALARKQLPPPELVPSLSDNSYYHFVLASDNILAASVVVRSTVRSSLKPERIVFHVITDKKTYPAMHSWFALNSLSPAIVEVKGVHQFDWLTKENVPVLEAIETQRTARDRYHGSHRPRTSASDNPRVFAAKLQAGSPTYTNVLNHIRIYLPELFPSLNKVVFLDDDVVVQHDLSPLWDIDLAGKVNGAVETCIGGDSRVMSKRFRNYFNFSHPLIAKNFDPSECAWAYGMNIFDLKAWRKTTIKDQYHHWVKEGVYQVQLGSSVIP

SEQ ID NO: 51310 - protein, 414 aa, Zea Mays
MKNNDYDLRSFAFKLKATMESMDKELRSSRLSEQLNKHYAAIAIPKGLYCLSLRLTDEYSSNALARKQLPPPELVPSLSDNSYYHFVLASDNILAASVVVRSTVRSSLKPERIVFHVITDKKTYPAMHSWFALNSLSPAIVEVKGVHQFDWLTKENVPVLEAIETQRTARDRYHGSHRPRTSASDNPRVFAAKLQAGSPTYTNVLNHIRIYLPELFPSLNKVVFLDDDVVVQHDLSPLWDIDLAGKVNGAVETCIGGDSRVMSKRFRNYFNFSHPLIAKNFDPSECAWAYGMNIFDLKAWRKTTIKDQYHHWVKENLKSNFTLWRLGTLPPGLIAFKGHVHPIDPSWHLLGLGYQEKTDVSSVEQAAVIHYNGQSKPWLEIGFKHLQPFWTKYVNYSNEFIRNCHIMEPQFRLS

SEQ ID NO: 51311 - protein, 191 aa, Zea Mays
MVSASAPPPQAQSDAAGSGEEVSKKVRKPYTITKSRESWTEQEHDKFLEALQLFDRDWKKIEAFVGSKTVIQIRSHAQKYLLKVQKNGTSEHVPPPRPKRKAAHPYPQKASKNVMPDFAGVYSFLGSVFDPSTSGHLQKLKEMNPIDVETALLLMRNLSINLTSPDFEDQVLPIRDASTQQSRPEVRTTIL

SEQ ID NO: 51312 - protein, 251 aa, Zea Mays
MVSASAPPPQAQSDAAGSGEEVSKKVRKPYTITKSRESWTEQEHDKFLEALQLFDRDWKKIEAFVGSKTVIQIRSHAQKYLLKVQKNGTSEHVPPPRPKRKAAHPYPQKASKNDSSSIHRNSGMNVPVSSWAHSSIPQAVASSMVKEDLGAGTPGSNNFCSSSTEGLPRTWQPVMPDFAGVYSFLGSVFDPSTSGHLQKLKEMNPIDVETALLLMRNLSINLTSPDFEDQVLPIRDASTQQSRPEVRTTIL

SEQ ID NO: 51313 - protein, 506 aa, Zea Mays
MAPAMGLKRPAAGAGAAAAQTVTLSAPAVRDAVRTAVREAEATAKATAPAARVPATAAVPAEIARDGVLCLEEVDGRRWSYVVDAAGAAVKAKGRASVGGAFKAVPLQSPMPPVEEIMSFIRSYVVPEGFPDSVTPSYVPYMTWRALKHFFGGAMGVFTTRTLLNSVGVSQSRAASGAVAINWILKDGAGRVGKMLFARQGKKFDYDLKQLRFSGDLLMELGAGIELATAAFPQLFLPMACIANVVKNVAAVTSTSTRTPIYKAYAKGENIGDVTAKGESVGNIADLLGTGMSILISKSNPSLVTSFAFLSCGYLLSSYHEVRSVVLNTLNRARFTVAVDSFIRTGYVPSLKDGNSQETIFNPPWRHEPVAIGSRFGDAFQEPASFLAIKPLFEDERYIVTYNPTKDKVYALLKDQAKPDDILKAAFHAHVLLHFINASHANLNARKRMNSNRSYQYDPLNMDFVPHIEESCKIVMSSYGVFKKKAREQGWIMSESLLNPGRARLL

SEQ ID NO: 51314 - protein, 1003 aa, Zea Mays
MDAAGGAKGRDGVDKKEVGSGSGNGGGDAGKKVPFTGLFRYADGTDVLLMLLGTVGALANGVSQPVMTVIFGQVINAFGDATIDDVLNRVNQAVLNFVYLGIATAVVSFLPILAVYAEVSCWTMTGERQATRIRSLYLKSVLRQEIAFFDVEMTTGQIVSRMSGDTVLVQDAIGEKVGKFQQLVATFIGGFVIAFVKGWLLSLVMLACIPPVVIAGGIVSKMLAKISTKGQASYSDAGNIVEQTLGAIKTVVSFNGEKQAIALYNKLIHKSYKAAVEEGITNGFGMGSVFCIFFSSYGLAIWYGGKLVLSKGYSGGDVINILFAIMTGAMSLGNATPCMAAFAEGQSAAYRLFTTIKRKPEIDPDDQTGKQLEDIKGDVDLNDVYFSYPARPEQLIFDGFSLHVSSGTTMAIVGESGSGKSTVISLVERFYDPQAGEVLIDGVNIKSLQLDWIRGKIGLVNQEPLLFMTSIKDNITYGKEDATIEEIKRAAELANAANFIDKLPNGYDTMVGQRGAQLSGGQKQRIAIARAIIKNPRILLLDEATSALDVESERIVQEALNRIMLDRTTLVVAHRLSTVRNADCISVVQQGKIVEQGPHDELVMNPDGAYSQLIRLQESKEEEEQKPERHVSDSRSKSRSLSLKRSISRGSMGNSSQHFLTLPIGMPGSVELLEGNDENWEEDEKEQARDGDREAPKKAPMGRLASLNKPEVPILVLGSLAAGVHGVLFPLFGLMISNAIKTFYEPPHQLKKDASFWGLMCVVLGIVSILSIPVEYFLFGVAGGKLIERIRALSFRSIVHQEVAWFDDPKNSSGALGARLSVDALNVRRLVGDNLALAVQVTSTLIAGFVIAFVADWKLTLIILCVMPLSGVQGYAQVKFLKGFSQDAKILYEDASQVATDAVSSIRTVASFCAEKRVTTIYDDKCEASKKQGVRTGMVGGLGFGFSFLMLYLTYGLCFYVGAQFVRHNKSTFGDVFKVRKNASYHQRCSLSLSLSLSLSLSL

SEQ ID NO: 51315 - protein, 251 aa, Zea Mays
MQVWKQRLVQMGGRVVEKPTKGELAGVNHVLAMDAKALLRELDAAWLHRFRGSVVSFEWIEECLKSGERLPIHNFAINYEKEFKPKNAVCTGNLVASRPSKRTKMSSEYPGDHQIISGGDREKELAAGGPPGASAHVVEGSSAGKQPNQYASSQSSSADSKDTIGSHGTFGIEEASSGGPSIYAPADLNKNITKIFGRLIDIYRALGDDRRSFSYYKAIPVIEKLPFKIESADQVKGLPTIGKSLKDHVYK

SEQ ID NO: 51316 - protein, 169 aa, Zea Mays
MSGSASRKLFQAARSIVLSASQRSSFSVLAAEGRTAALANFGRKILPSACSYHRQGSHAASGWGAIAAAVPAAVYMLQDQEAHAAEMERTFIAIKPDGVQRGLISEIVNRFERKGYKLVAIKLIVPSKGFAEKHYHDLKERPFFNGLCDFLSSGPVLAMERVSSSMGEN

SEQ ID NO: 51317 - protein, 228 aa, Zea Mays
MGRPYAVKGRKKKRKLEEAAAASDAAPPVEEAEELPPPEVRSGEEKSSEEDEAAAGEEEHAAADGLPILPRTVDGKRRPGAIFVLERACLEVGKVGKTMQILNSDDHANYLRKQNRNPADYRPDIIHQALLAIFDSPLTKAGRLQAVYVRTEKGVLFEIKPHVRMPRTFKRFCGLMSQLLQKLSITAVGKREKLLNVVKNPVTRYLPVGARKIGWCHGPWKDRQGIYR

SEQ ID NO: 51318 - protein, 283 aa, Zea Mays
MGRPYAVKGRKKKRKLEEAAAASDAAPPVEEAEELPPPEVRSGEEKSSEEDEAAAGEEEHAAADGLPILPRTVDGKRRPGAIFVLERACLEVGKVGKTMQILNSDDHANYLRKQNRNPADYRPDIIHQALLAIFDSPLTKAGRLQAVYVRTEKGVLFEIKPHVRMPRTFKRFCGLMSQLLQKLSITAVGKREKLLNVVKNPVTRYLPVGARLSFSAEKSVNLFDYVAKSNDDEPLVFVVGAMAHGKIDKEYTDDYIQICNYPLSAACCLNRICSALEQKWNIQ

SEQ ID NO: 51319 - protein, 295 aa, Zea Mays
MASAGVAPSGYKNSSSTSIGAEKLQDHMNELKIRDDKEVEATIINGKGTETGHIIVTTTGGKNGQPKQTVSYMAERIVGQGSFGIVFQAKCLETGETVAIKKVLQDKRYKNRELQTMRLLDHPNVVALKHCFFSTTEKDELYLNLVLEYVPETVHRVVKHHNKMHQRMPLIYVKLYMYQICRALAYIHGTIGVCHRDIKPQNLLVNPHTHQLKICDFGSAKVLVKGEPNISYICSRYYRAPELIFGATEYTTAIDIWSAGCVLAELMLGQVKVVWTNSSKSSRSLVLQQGKKLNA

SEQ ID NO: 51320 - protein, 112 aa, Zea Mays
MSDLDIQIPTAFDPFAEANAGDSGAAAGSKDYVHVRIQQRNGRKSLTTVQGLKKEFSYSKILKDLKKEFCCNGTVVQDPELGQLQGDQRKNVSNFLVQAGIVKKEHIKIHGF

SEQ ID NO: 51321 - protein, 300 aa, Zea Mays
MGGRGAPDATRMLVVAVVGVMVAAAAVLCPAPAAAGKLGKQAKALVAVKAALHDPGNALWDWDLKFGNDPCHWNMVTCHEGQIQELSMTNKNLSGTLSPAIGKIRSLRYLLLHQNAISGPIPDTIGRMKLLEVLDLSNNHFSGSIPSTLGNLANLQYLRLNNNSLSGPIPESLATDALMIFNLDVSFNNLSGHRPAFRTWNVFFEGNPFLSDIGSESIAAPVAPKDVKEEDLQFMSKSIFMLLVCIAIGCSLVAVVTGAVLFWKRRQRERVFAVADDEDPNVTYAGIVQLYLLINMFAIT

SEQ ID NO: 51322 - protein, 277 aa, Zea Mays
MGGRGAPDATRMLVVAVVGVMVAAAAVLCPAPAAAGKLGKQAKALVAVKAALHDPGNALWDWDLKFGNDPCHWNMVTCHEGQIQELSMTNKNLSGTLSPAIGKIRSLRYLLLHQNAISGPIPDTIGRMKLLEVLDLSNNHFSGSIPSTLGNLANLQYLRLNNNSLSGPIPESLATDALMIFNLDVSFNNLSGHRPAFRTWNVFFEGNPFLSDIGSESIAAPVAPKDVKEEDLQFMSKSIFMLLVCIAIGCSLVAVVTGAVLFWKRRQRERVFAVADG

SEQ ID NO: 51323 - protein, 131 aa, Zea Mays
MATAPYASSLFLASSPISTAPRASAGSFPPSAQPFSMRLRPRPSPAVAAAVQAEHQPAVAATPKPPALPFRVGHGFDLHRLEPNLPLIIGGIDIPHDRGCEAHSDDFPGFRPPLEGRRFFGVHEGSCEIDA

SEQ ID NO: 51324 - protein, 160 aa, Zea Mays
MATAPYASSLFLASSPISTAPRASAGSFPPSAQPFSMRLRPRPSPAVAAAVQAEHQPAVAATPKPPALPFRVGHGFDLHRLEPNLPLIIGGIDIPHDRGCEAHSDGDVLLHCVVDAILGALGLPDIGQIFPDSDPRWKGADSSVFMREAVPCGMWSGEHP

SEQ ID NO: 51325 - protein, 183 aa, Zea Mays
MSLPIALVVGIAGGATLLAVAAVLLALWCAARMRARRNRNSDTGSSDPSTLVEWGKGGRSSLAPDLEHQVARQFSLEDLVQATKNFSDTNIIGAGSFGLVYMGLLLDGTVVAIKRRVGAATQVFADEVRLLSEIRHRNIVTLIGYCQEGGLQMLVYEYLPNGSVCGHLYGNVFILLGKKIVAY

SEQ ID NO: 51326 - protein, 103 aa, Zea Mays
MDYSMQGSKDSYSPQVHNHLYPDSQPGLYPPPPQGGYGYGYQYQGYLGESANPPYYYYTGSWPEQPPAPSDGAPFRYRYLQDQDDADCITFLRGWFPVCWSAE

SEQ ID NO: 51327 - protein, 412 aa, Zea Mays
MPTICLQGRSSIPWAPNMLSSITQLQRMHLVTAIGPAWNCSLRMVLKEAKNYPREPAAHVAIRTVRRFLEKQKDKIAGVVFCTTSSSDTEIYKRLLPLYFPRDKQEEYIAIVKLPADVGDENGETAIDERKIRIRPLPAGVLDRTVSANLVDLPLSNSGSALKRGSFKLDSYLDPSFMSIIKDPDLRRKEQWEKSAQAQKGFNYARLFGYGDLGCPSLSAAEEYSLHSRYLTKANSLNLSEIAEMKIIYRGGVDIEGRPVMVVVGAHFLLRCLDLERFVLHVVKEFEPLIQKPYTIVYFHSAASLQPQPDLGFMKRLQQILGRKHQRNLHAIYVLHPTLGLRTAVLAMQMFVDGEVWKKVVYVDRLVQLFRYVPREQLTIPDFVFQHDLEVNGGRGLIVDPRTKHIYQRTSS

SEQ ID NO: 51328 - protein, 234 aa, Zea Mays
MAAPGSAIKHTFSSLLKQKPPKTSPTKSRGSMAVSMREVDPVFQGAGQKDGLEIWRIEKLQAVPVPKESYGKFFTGDSYIVLKTTALKNGSFRHDIHYWLGKDTSQDEAGTAAIKTVELDAALGGRAVQYREIQGNETEKFLSYFKPCIIPEEGGVASGFRHTEVNEREHKTRLFVCRGKHTVHVKEIQNLRYSNSMDQIQVFRRGLKHLRLCNILKIQTMKENVKLRQLRMES

SEQ ID NO: 51329 - protein, 1325 aa, Zea Mays
MESSGGDKPTATDATESVVGLDGEETLSERESVGARHGPALSNGGGKEAPSSSSSAGNKRKHGILGSNQMELNEPGMPSSSSGDSTWSLDSLDDRHQISLLRSKNEHSEHSVTSAGVTVIRQPRGVLRLRKRDQNVSTESWTGGHNIPQANGVPRSSQLLRRNKKGKSTVFEQNRIGGDEPVSCLRTENGTCDQDTGSKFCSETEFSAEKLSHLSGEAPKAVHVDKGGCDHVKDDDGVSLEENAAMMLCSLSDNICAGSPRKGMKSSDTSSKRCIPQHSNHFKSSNKKIKDVPSPARLLRKRDGKVPFRKRRPRRHFYEVSPSDVDPFCIVKERIRVFWPLDETWYFGLVKEYNPDTRLHHVRYDDKDEEWINLQNERIKLLFLPAEARNRSKCTNSRSVFDLKHEQGDREDMDGSEGNTESSESGPIGSWLARSNQAKSAALCNISKQDHSHSNIVPISFDQKQCRGSDAKESNDYIPCDSFGNGSAKVLKDRTTPEDRRFRFVYSRKRFCRKTNGFLSISEQHSNCQIRARFAMVLAACPEKSKWEHLQGKLQYHCSKSELSKDSTKCTGRRALSSMDLFSKGFDVQDFLPESNYSDREPIICCLDEHCRFTQSVLDMTTAPSLLPWHHKKMLTESNLTNGSQQSMSCTLDEDQQQLVTEHASDTVFHAPPQVCSLNLGSSPDSPLDMASASCANPSSSASRESNIAERNVSTECNGSSIGDANIIHRKCEDQNGPCAGPDKSFSSNLSVICSSQKSAESRLSINIDKANDKPLDNDEKEKQPISNLVQELNEHPIGCVTPTAPRTTSHRNRFTSISRAFGDGSKLLPEDHVLTGFAGGSKKPRSQVSYSVSPKSEELGIKNKGHFRKIQSHVSAKINDAKKLPDSSRSGHSSPESLTCVANVLVTVGDRGWREYDTQITMDSDGQSERRICVKLAEGTKYAHKVCQVLQPGATNRYTHAMMWKGGAEWCLEFPDRSQWLIFKQMHDECYSHNIRAASVRNIPIPGVHLVEIHDDNDVVSFVQSEAYLVHIGTDVEIALDQSRVLYDMDSDDEEWISSWRKSLVRDNTTTLQFAEDLFERVMDKLEKFAYSHNCNGLSIDQMKELETDDVPLHTIEVIHAYWQDKRQKRGMPLIRHFQSAMWKIYEQQLHEWESKVCRMQSSSNGYQEKKLPPKPALFAFCLRPRGLHVPYKGPKQRSHKKLMSTGCHSFSREHDGFYRQVSGRRYNECTGDGRISESYDTGSLYSPTGYSPRFSTRTDSPRAFESSERSSTPRFSRNNSSTKRSAALAFSDDHQPSPSCRPQRAKRSAHDHWNAAIHDWQNS

SEQ ID NO: 51330 - protein, 390 aa, Zea Mays
MAVKLDNAHQEYSNAIVVAQATSNQMSKRDILRPYMDIIDNMLSQMLREDPAFKPSGGRLGENDMDYDTDDKSMATLRRQLRRAHEEYYRCKSEYMTCVMEALKLEDTIKNYERRDANGWKYVSSFSESRSGTLGSILDTIEFIWCCILRKQLQKAFAVILGCMSAAILLAEATLLPSGVDLSLFSILIKAVGKQEVLVQVAAFVPLMYMCICTYYSLFKIGMLMFYSLTPRQTSSVSLLMICSMVARYAPPISYNFLNLIRLGGNAKTTFEKRMGNIDDAVPFFGRGFNKIYPLIMVVYTLLVASNFFVRVIDFLGRWKRFKFQREEENIDGLDPSGMIILQKERSWIEQGCKVGEQVIPLARNFNGVNADIESQNVPLQRRSCVPLLK

SEQ ID NO: 51331 - protein, 391 aa, Zea Mays
MFPIATADDQYHHTTNTLKYADRAKEIKTHVHKNIGTLDTHVEDYQRMIDNLQVEVSQLKKELAEKEHQLSVKPTEKTADSELSWLNVLSQETGENVQERINLQKALFELEETNKRNRMELQHLDDSIARHQVKEMDSTILQALTSRRQVILDNIRDNDEAGSGYRKDIEMNESRRRQLQDMIEEAISNNGNKTYLHILSQYRLLGMTNAELQIEMAMRDQVIHNQREALRSLWNILYGTGLNQKQILKLAAKQGLTVEGCPLPSSSPDVTTPPSCQPHRFPSFMPFPGPQSEPYSPSACFFQHGFSTMSLLKNQHETPTICRQEHLSSYYMMSGCSPYSGDGKQWSSGRPTAFFSTPEKPKEAQSQHNKEHSGSHDFSLHRKDLWSTERK

SEQ ID NO: 51332 - protein, 202 aa, Zea Mays
MEKGASEASAPCARCGKPAQLQCPKCAELKLPRENAAFCTQDCFRAAWSSHKSVHPKPGALASQQSPEGWKYCLRKGRGRALQLPRFEWTGPLRPYPISKMRVVPDEIEKPDWALDGIPKIEPDSDLQKRVEIKTPELIERMRETCRIAREVLDAAARVIKPGITTDEIDRVVHEETIARGLSMKSFAMEFQMPGNLRMVTL

SEQ ID NO: 51333 - protein, 328 aa, Zea Mays
MRSTSPIPTWEIPIWKDISPRQKKVNEALKLINSTLDELIAICKRLVEQEDLQFHEEYMNEQDPSILHFLLASGDDVSSKQLRDDLMTMLIAGHETSAAVLTWTFYLLSKYPKVMAKLQDEADSVLGDGLPTIEDVKKLKYTTRVINESLRLYPQPPVLIRRSLEDDILGGYPIGRGEDIFISVWNLHHCPKHWDDAEVFNPERWPLDGPNPNEINQNFSYLPFGGGPRKCVGDMFATFETVVATAMLVKRFDFQMAPGAPPVDMTTGATIHTTEGLKMTVTRRTRPPVIPNLEMKIITDSQESTLSAPSMVVSAASVASGEDQGGIS

SEQ ID NO: 51334 - protein, 525 aa, Zea Mays
MAARQPPPSSASAPAPAAGLSMKDYLKRYVSGPGTDGDQKRAKKKTKKKPKPAGGVLIVDEDPVWQKPVQVDEEPASSGDDKPLVDEDIEVKRMRRLEAIRAARPYNAIAEDGSGWVTVAAPEEQGGGSTHQRRNDTPLPERGRAPTREDLSPVRRRQRRDTPSPVHGDAAAKDFSPPRRPSPVHGDAAAKDFSPPRRRQRRNTPSPVHGDAAAKDFSPPRRRQRRDTPSPVPDGAAAKDFSPPRRRQRRQDTPSPKDSGAADQDDMSPPRKSRQREDLSPPRKGARHITEEPRDISPRKKRDISPSRKSTKEGASKQVKKSGLMTAEEVKEDIRKIKEAEMIKFASQDPSLVGKGAKAVFRDKEGRRISEEEMCKAKEPEKPKEIHIEWGKGLVQKREAESRLKEIEAEKSKPFARTRDDPELDNMLKERIRWGDPMAHLVKRKDPEFILEDLGDDEKMKESGFIVPQSIPTHSWLKRGVDAPPNRYGIKPGRHWDGVDRSNGRRTMLIVPGVTDGFSVCAVAS

SEQ ID NO: 51335 - protein, 231 aa, Zea Mays
MPGSPKVFFASSASRRSGSLRRLLSTPVFSAACLLFGLAGFVAAALALSRSPSVTHSRCPDSSRPLSVSVAWDRSPGDGSAGGSAELPASLATGSRGRHKVMAFVGIFTGFGSIGRRRALRRTWLPADRQGLLRLEEATGLAFRFVIGKSNSKNKMAALNREVEEYDDFVLLDLEEEYSRLPYKTLAFFKAAYALFDSDFYVKADDDIYLRPDFPCFWLKSGHIHKHTLDA

SEQ ID NO: 51336 - protein, 187 aa, Zea Mays
MPGSPKVFFASSASRRSGSLRRLLSTPVFSAACLLFGLAGFVAAALALSRSPSVTHSRCPDSSRPLSVSVAWDRSPGDGSAGGSAELPASLATGSRGRHKVMAFVGIFTGFGSIGRRRALRRTWLPADRQGLLRLEEATGLAFRFVIGKSNSKNKMAALNREVEEYDDFVLLDLEEEYSRLPYKTFL

SEQ ID NO: 51337 - protein, 531 aa, Zea Mays
MARSSSATGSWARRFPCCCDGDRRNRFGGRSLSGDLLPPPSVGAMAQQPPRLRKKNLVSPYDPRYNPRRVWETFLILLVVYSAWICPLEFAFLRYLPRAPFVVDDVVNGFFAVDIVLTFFVPYVDSKSCLVVDDHRKIAARYLSTWFAFDVCSTFPFQSISLLFDEHEHSLGLKFLNVLRLWRLRRVSSLFARLEKDIRFNYAVIRCTKLISVTLFAIHCAGCINYLIADRYPDPRRTWIGAAMPDFREAGLWIRYVTSMYWSITTMTTTGYGDLHAENSREMLFGIAFMLFNLWLTAYLIGNMTNLVVHSTGRTRDFRDMVQVASEFAARNQLPQQIEEQMLNHICLRFRTEGLKQQETLDMLPKAMRSSISLYLFFPVVQGSYLFKGVSSGFIQQLATEMQPEYFAPKEDIMLQNDKPSDMYLLVSGAVDILTFLDGTEQVYGKAAEGELLGEVGVMSNKPQPFTFRTTRLSQILRIARSKLMDIMRENGEDGQIIRSNFQQRLRVEQRLYIAMHQDGPVPAFERRMDP

SEQ ID NO: 51338 - protein, 459 aa, Zea Mays
MGDHAEMLHATPAMYNGAGAAPRGGWWSTAVPATTCSTELAGGFTTWSSALAASYDLAAEGAKANKSATTASSESPGNNSSVTFQEPAGGVGTAVVQQPLAGCADWRHPYLSSGAATLHGFLQDGHQQDMSSSTTEQSPMAASSLMNPSSNNLALALQQGHHHQEPDHQQMLSNFGGSEAELLLSPTTSPYGFQSSLLRSLMEPTADAAKPALPGYQQQYDQYQQMGMGQARSFAPAGGAASREALQFTNDAPSWNPSAAAGFGVPPAPAPAPAPADQASSSVRSVKPSPAARATATLALKTALEGVGESASSIITKKKANGELVPAFKKSRLQTPSPLPTFKVRKEKLGDRVTALQQLVAPFGKTDTASVLHETVEYIKFLHDQVGVLSAPYLKNNGHQVPYLKRSSPDRSEDDNSHAGERSLKGRGLCLVPISSTFAVASEVPVDFGWSTAFAASFR

SEQ ID NO: 51339 - protein, 289 aa, Zea Mays
MDCVGAVDSSGTDDDLPQSYQNSRGMKGSGRITGNGRDSVGASLYTRVQPQTDMETQIHELEQEAYCSVLRAFKAQSDAITWEKESLITELRKELQVSDKEHRELLNKVNGDDIIRRIRKWRESTGGLMINLVNNSQRTHDPIPSPTTSARKRQKMSQPILSACVPAPSAMHSQPLTAPMQPSSSGAKKGAQPGTKVKKTKPGQKIPGGSAVKSMPSSAGPGGRGTIINRNMSAGLPPESSQLNPLIGRKVMTRWPDDNSFYEAEITDYDASKTRHGNGLTSRRWHLRI

SEQ ID NO: 51340 - protein, 314 aa, Zea Mays
MVICTIMDRHNFPLHFLLERILEDTHVSASGGIAQPSSSRGQIDVFGSILREGSTAINNVAFNLQESDGKSMTESRTTFGRASGVDNISRVASVSVHPKSSETAFKILKQLDRTIPSPTSKPLGLRQTLAKKNTFSVATYRQIKEPDIIIGNDNKQSSINESGSASSETTYGKKVQQPQSSPISGESSEKVQRSGANSDVYEAGTSQRPLKSNLTPTSVAEVLDNNNTSKGFSFTFPIPKAPSSLLEPPPTPTMASPPRTLPITNEDVPKFTFGSSSMANKLVFSFNSTSSSPGAGGTDPTFKFGSDNKRELVF

SEQ ID NO: 51341 - protein, 50 aa, Zea Mays
MISPEDPRKWLVKRVVGMHGGSVTYLVDPGNNDSSSRTVVVMHFSCSQGW

SEQ ID NO: 51342 - protein, 212 aa, Zea Mays
MAAALSGTAVSTAALLAPIRAPTSAFIRRSQLTCHRLHSLKCRRAGSIVPAAAAAAAGSSSPSSAVFHGECFVVGDNIDTDQIIPAEHLTLVPSKPDEYRKLGSFAFAGLPSAAYPTPFVAPGEESSRYAIIVGGANFGCGSSREHAPVALGAAGARAIVAEGYARIFFRNSVATGEEYKLKPIGDAGPVIEAGGIFAYARKTGMIASKAAA

SEQ ID NO: 51343 - protein, 132 aa, Zea Mays
MDAADVWGRSSSSSSSSAAAARRLQARYDLYMGIDDADAGLDEVTEPRGGAESYNCPFCGEDFDFVGLCCHIDDEHAVEAKSGACPICATRVGMDLIGHLTMQHGSYFKISFFNYAAVADHLHFYIFHIILQ

SEQ ID NO: 51344 - protein, 93 aa, Zea Mays
MSDADKLAAGIAAPVGGVMTECGTNPPVEHILSAEDAECCICLCPYEDGVELRELPCNHHFHCSCIDKWLHINATCPLCKFNIVKSNLHREEV

SEQ ID NO: 51345 - protein, 186 aa, Zea Mays
MFSFIWWILGFYWVSAGGQALSHDAPQLYWLTIVFLAFDVFFVVFCIALACVIGIAVCCCLPCIIGILYAVTDQEEGASEDDVNNLSKFKFRTMSDADKLAAGIAAPVGGVMTECGTNPPVEHILSAEDAECCICLCPYEDGVELRELPCNHHFHCSCIDKWLHINATCPLCKFNIVKSNLHREEV

SEQ ID NO: 51346 - protein, 148 aa, Zea Mays
MQDFIPQFLDQLFPGAYISFSITELNKGTYRGRMTSFIQSIISSQLQKQVSLFTNPIWLVKTRLQLQTAKHHTSQYSGFSDALKTILREEGFLALYRGIGPGLLLVTHGAIQFTAYEELRKAMIFFKSAQSRADDAGGGESLVVTDQI

SEQ ID NO: 51347 - protein, 228 aa, Zea Mays
MPLGTSPVVAEAEAWTWENAAAGAAAGFATVAALHPLDVVRTRFQVSGGRGWSEVPPYRNTAHAVYTITRSEGLRGLYAGFYPAVLGSTVSWGLYFFFYNRAKQRYLQRKNDQLHPVHHLISAAEAGALVSLFTNPIWLVKTRLQLQTAKHHTSQYSGFSDALKTILREEGFLALYRGIGPGLLLVTHGAIQFTAYEELRKAMIFFKSAQSRADDAGGGESLVVTDQI

SEQ ID NO: 51348 - protein, 599 aa, Zea Mays
MASERPLLIATTPGASTPDDAPSPHPPAASLLPPAQSEPPLRADRLAFSVEIPDPFRSYRRGDGPAADPSASLERERDVGDDESREVIVGESSPEFSGNAIRTAKYSFLTFLPRNLFEQFRRLSYVYFLAITVLNQLPQVAVFGRGASVLPLAFVLFVTAVKDAYEDFRRHRSDRQENNRLATVLALGTAGEFQPKRWKHIRVGDVVRIESNETLPADMVLLATSDPTGVAHVQTVNLDGETNLKTRYAKQETHVMFSQNGGVGGVLHCERPNRNIYGFQANLEIDGKRVSLGPSNIVLRGCELKNTTWAIGVVVYAGKETKVMLNSSGAPSKRSRLETQLNRETVILSIMLIGMCTTASVLAGIWLLNHRRELEFTQFFREKDYTTGKNYNYYGVGMQIFITFLMAVIVYQVIIPISLYISMELVRLGQAYFMGADKDLYDESSRSKFQCRALNINEDLGQIRYVFSDKTGTLTENKMVFQCASIRGVDYNSGKDTGGYSVVVGDHLWTPKMSVKIDPELVKLLRDGGSNEEPKLVLEFLLALASCNTIVPLVLDTRDSKQKLIDYQDLIYWDFMSLIVIVRECLLSWAALIRLLSCM

SEQ ID NO: 51349 - protein, 319 aa, Zea Mays
MCQAMDSILCPDTINDPSKGPSEAHNHSQRSGLSFAVGGAASANKQSAIIPATRPLTRAELSKKFRDHFGYTLDIGPSGIPHKDAGQGLFLSGQANAGAVLAIYPGVIYSPAYYRYIPGYPRIDVCNNYLITRYDGTIIDAKPWCFGGETRALWDGSDLVDYNAMAPKGSENNSDRVWRMLSKPLEKGVRENFGEVLERRNPLAFGHFANHPPKGSSPNVMICPYDFPLTEKDMRVYIPNITFGGQETIRMKRFGSFYFKSGGSDNQAGDSLVLKTLVLVSTRSICDEELFLNYRYSNSKRRPEWYSPVDEEEDKRRWS

SEQ ID NO: 51350 - protein, 382 aa, Zea Mays
MSLTSKAQNNSLSNNVFRGLSDTEIQNSWKSRAEQPQPEPKCEKDPFNSFVADFDTHNLNIAVGKASELELEVSNLKEQLKKITLEKAEMTTKHEKLSAICRSQRQEIQELKLTLVEPTPPSNKVSSRTQDSGSQRKEKIQGTVWELEQGMLAIASNSSSASSDAKTWQAFPDTKTQARPKVDHATNGSQNITKNTTSGASPDAWGFGTDNFRTPATTLRATTQINRAAAQRSSSQRFNAGVAKSQSRSCFPRVKVVHTSLQRDNRYYERENLLMVIKNNLLWHHLSMGLGYDDSNSNDSGVSPSSDRANNIEVATVSPVPAVVKKQARFLVASPRSPDVNETMMEELHELCEAREAGTAFIMEHSACGDQARVVTAQEADM

SEQ ID NO: 51351 - protein, 249 aa, Zea Mays
MQRKEKIQGTVWELEQGMLAIASNSSSASSDAKTWQAFPDTKTQARPKVDHATNGSQNITKNTTSGASPDAWGFGTDNFRTPATTLRATTQINRAAAQRSSSQRFNAGVAKSQSRSCFPRVKVVHTSLQRDNRYYERENLLMVIKNNLLWHHLSMGLGYDDSNSNDSGVSPSSDRANNIEVATVSPVPAVVKKQARFLVASPRSPDVNETMMEELHELCEAREAGTAFIMEHSACGDQARVVTAQEADM

SEQ ID NO: 51352 - protein, 495 aa, Zea Mays
MKFNSDGKTIFCGLHESLKALSWEPTICHDVIDVGWSTLADLTVDEGKLLGCSYNQNCVGVWVVDLMRNEPYVDSSAGSHLNGSINRPIQSDDSMSSVFGRLSISRSPANEIGSDTLLGCSMSGSKESPVSTSASMRGLSKPPGKGDLRLSRSISTPLLSPRVRLNPNFIDRQKNQAATAVPLPEPIVRFKANLSSDAGMLSRKSHASAAPMYRSRSNSSRYGIMESSSIPVLALRHSSRKDAGPVHSEAATGELADIEPQNIEKEGLVANHGKEDGKLVPVIASRSSKIVEEVGYRRITNDVGCKRVTLESGLRVNSDMDYRSRAPESHEVQQLIHLSEPAGLHGKFIRESSGAGDNNCSGSICTESAEFNEVDIWYRVSGFDKWNPAAARNPEFASIHRNEVIGIRQLMESSGKYVVDDRPSSSNYDNIQYVTTLYSSRLHPSLSGKLSASASYEDDISGLVENHQEFIHVMKSRLTKLEVISAGGLPLLAKK

SEQ ID NO: 51353 - protein, 378 aa, Zea Mays
MKFNSDGKTIFCGLHESLKALSWEPTICHDVIDVGWSTLADLTVDEGKLLGCSYNQNCVGVWVVDLMRNEPYVDSSAGSHLNGSINRPIQSDDSMSSVFGRLSISRSPANEIGSDTLLGCSMSGSKESPVSTSASMRGLSKPPGKGDLRLSRSISTPLLSPRVRLNPNFIDRQKNQAATAVPLPEPIVRFKANLSSDAGMLSRKSHASAAPMYRSRSNSSRYGIMESSSIPVLALRHSSRKDAGPVHSEAATGELADIEPQNIEKEGLVANHGKEDGKLVPVIASRSSKIVEEVGYRRITNDVGCKRVTLESGLRVNSDMDYRSRAPESHEVQQLIHLSEPAGLHGKFIRESSGYLVLINGTLLLQGIQNLPASTEMK

SEQ ID NO: 51354 - protein, 254 aa, Zea Mays
MERRSSVRFVPSEIARMEKLAADRKDQVFDNKFCQKLAEEFNRSVGRAGSKALQATQVQGWFLNKFPASATKPTCVPTASQEKTSASEINVSVSEKRSAASEEKLFPLDTETKDMIPELEDLEFEAKSTKDFAWYDIALFLAHRRNRAGEVEVRVRFEGFGADEDEWVNVKKFIRQRSIPLESSQCKSVVEGDLVLCFREGNEEALHFDAHVLEVQRKQHDIRGCRCVFLVEYDHDQSQERVSLRRLSRRPKYF

SEQ ID NO: 51355 - protein, 440 aa, Zea Mays
MESMRVHVLNTITTPSLSLLNELQTVEEMKRQCDEKRELYEFMLNAQKEKGRSKNAKGDNVASEQLKQAQEDYQEEATLFLFRLKSLKQGQFRSLFTQAARHHAAQLNLFRKGVKSLEAVEPHVRLAAEQQHIDHQFSALEEEDYVVEDENDDEYNDSHDGELSFDYGENKETEKSGIASRNHTEDFFNSSKEDYSSVPHERQRIESQSAPLFPGKKVNTEERIKDLRRSATRKLNTYVLPTPNDVRATSQIASGNPISGPLESKGAFHSSPLHPSADIRDLRDNKLPSPARLSNVQSVLKESNTNTAETRKVLPVGDLALPGYYDLKTLDNNKVKRGSFSGPIASRPRPTENNDVISAAPRHSSAHQPVHMRVSPGNSPPPISSPKIKELHELPRPPVNTSKNTTFPSLVAHSAPLVANPASLTPKVQDHFRGENRFRR

SEQ ID NO: 51356 - protein, 573 aa, Zea Mays
MRSCYDNLLSVAAAIANSAYEFSEALQDMGACLLKRITPNKDGINDKVLLLLGKSQFELRKLVDSYRVHVLNTITTPSLSLLNELQTVEEMKRQCDEKRELYEFMLNAQKEKGRSKNAKGDNVASEQLKQAQEDYQEEATLFLFRLKSLKQGQFRSLFTQAARHHAAQLNLFRKGVKSLEAVEPHVRLAAEQQHIDHQFSALEEEDYVVEDENDDEYNDSHDGELSFDYGENKETEKSGIASRNHTEDFFNSSKEDYSSVPHERQRIESQSAPLFPGKKVNTEERIKDLRRSATRKLNTYVLPTPNDVRATSQIASGNPISGPLESKGAFHSSPLHPSADIRDLRDNKLPSPARLSNVQSVLKESNTNTAETRKVLPVGDLALPGYYDLKTLDNNKVKRGSFSGPIASRPRPTENNDVISAAPRHSSAHQPVHMRVSPGNSPPPISSPKIKELHELPRPPVNTSKNTTFPSLVAHSAPLVANPASLTPKVQDHFRARQMLPSTASPLPTPPPGSISRSFSIPSRGRTGSDGKEIEDQQDKGAARMSLSSLPSAQTLLEDRQPLSAAAGSVSKT

SEQ ID NO: 51357 - protein, 232 aa, Zea Mays
MTSIRSMCLNNHPGFDNGGILWFHNLTEFPHGTLAPIFPILVAGLHYLNVQISFQGSQIKDHPGIFGLLAKYYRIYLNVLTIPLFLVAHVVPQGCLVYWTTNGLFSVAQQLSLRNDAVRKLLGLPDTRAQVGYRAQKSPLEVPEMMQLEDANLQTKSMPSDKGTASESTTPNFAMGSMDGNISASSSPEELLEQALQYLGTGCRDQAIPLISREKPRSVHSVDWDGTNPVLK

SEQ ID NO: 51358 - protein, 368 aa, Zea Mays
MTSIRSMCLNNHPGFDNGGILWFHNLTEFPHGTLAPIFPILVAGLHYLNVQISFQGSQIKDHPGIFGLLAKYYRIYLNVLTIPLFLVAHVVPQGCLVYWTTNGLFSVAQIRFHAFNLNKLDAAKNDAVRKLLGLPDTRAQVGYRAQKSPLEVPEMMQWSQLEDANLQTKSMPSDKGTASESTTPNFAMGSMDGNISASSSPEELLEQALQYLGTGCRDQAIPLIRTAVERNPDLYTALIGMGQTLFSNRLFPEAAVCFEHAIPKIQEDDPLLVLAYFGAGLSNKRQGDNETAIKLLERLAELKEPEKPINKSRYFQGMLALASILYREGRNSEAAKYLRMAIAYDPSVERLLKECEEGMDDQPKPEEK

SEQ ID NO: 51359 - protein, 612 aa, Zea Mays
MEVEALEKKGHAAFAKAMKSFGSSERYKRSTSGRYFEDMYATDALRSSDKTIVLPMPEVVKAKVKCDITKEAQPGRGAQSTLRKEILQLEKHLKDQQAVRGALEKALGPNAGPVSLSPENPMPQAANELIREIATLELEVKNMEQYLLTLYRKAFEQQQAPAFSPPDRREASKPSVSSRSGQLRETPMATKSSCKSRGDAALRSSYPPAHKKLNDPLADCCTSARFDRVVDSDVLRCQSALSYRGVCSSRILPSEDDSLARALRSCHSQPFSFVEEGDTGASGMISLAEYLGTNVADHIPETPNNLSEEMVRCMAGIYCRLADPPLVHHGSSSSPSSSFSSTSAISPQYVGDMWSPKYRREATLDSRLINPFHVDGLKEFSGPYNTMVEVPMISRDSRRLKEAEDLLQTYKLILYRLEAVDLRRMTDEEKIAFWVNIHNALLMHAYLKNGVPQNNLKKTSLLVKAACKIAGRNINAAVIQSIVLGCNTHCPGQWLRTLLYPRIKSKVRVYTPKRLFHQLESAKEEFIRATAGVWKEQKLLLPKLVEAYAKDVKLSPQGLVDMVQRYLPESMRMAVQRCQHGGRSSGKVVEWVSYNPAFRYLLARDLAFPHLS

SEQ ID NO: 51360 - protein, 173 aa, Zea Mays
MTWHVPEQRICPWVACSCSSSCMCFCNRAFRSSWILCSASYTRGILLKLSADLIDPFGSVQVAFSATRGLVPRFGGIYMGCGLEFRGRYEKGTNWQLGTRSVHGDHGTERKPSPVSGAPGGRSTVLVPASPPVQLAHRTLAFAISSKATDLTKGSLRELVDTSAMPSSRNSHT

SEQ ID NO: 51361 - protein, 685 aa, Zea Mays
MGKYAAGGELKPPTTAYSRGSGKHPQLMPSTPRWAVANGAGVILSVCDEEVARYETANLTAAAVPALLLPPPTTPLDEHLVAGLPPLEPYARLFHRYYAIATPSATQRLLFGLLEAPPSWAPDALDAAVQLVELLRAAEDYASGMRLPKNWMHLHFLRAIGTAMSMRAGIAADTAAALLFRILSQPTLLFPPLRHAEGVDVHHEPLGGYVSSYKKQLEVPASEATIDATAQGIASLLCAHGPDVEWRICTIWEAAYGLLPLSSSAVDLPEIVVAAPLQPPTLSWNLYLPLLKVFEYLPRGSPSEACLMRIFVATVEAILRRAFPSETPEQSRKPRSQSKNLAVAELHTMIHSLFVESCASMDLASRLLFVVLTVCVSHQALPGGSKRPTGSDNHSLEEATEHSRLTNGRSRCKKRQGPVATFDSYVLAAVCALSCELQLFPCISKNGSHSNLKDSMKIIIPGKNNGINNELHSSISSAIIHTRRILAILEALFSLKPSSVGTSWSYSSNEIVAAAMVAAHVSELFRRSRPCLNSLSALMRCKRDAEISTRASSLYHLIDLHGKTVSSIVNKAEPLEAHLTLTPVKKVNQHRCEENNTNSSDSAKLENKNGSTHKKNGFSKPHLKCAEEVLNGNVASTSGKSIASLQVEASDLANFLTMDRNGGYRDVCRKHISSPRMEEGCGCTL

SEQ ID NO: 51362 - protein, 965 aa, Zea Mays
MSESNVKWIDGLHFTSLYWPPPQDVEQKQAQILAYVEYFGQFTADSEQFPEDVAQLIQSSYPSKESRLIDEVLATFVLHHPEHGHAVVHPILSPIIDGTLCYDRHGPPFSSFISLFSHTSEQEYSEQWALACGEILRVLTHYNRPIFKVERQHSEAECSTTSDQATSSDSTDKKSNNSLGNESDRKPLRPLTPWITDILLAAPLGIRSDYFRWCSGVMGKYAAGGELKPPTTAYSRGSGKHPQLMPSTPRWAVANGAGVILSVCDEEVARYETANLTAAAVPALLLPPPTTPLDEHLVAGLPPLEPYARLFHRYYAIATPSATQRLLFGLLEAPPSWAPDALDAAVQLVELLRAAEDYASGMRLPKNWMHLHFLRAIGTAMSMRAGIAADTAAALLFRILSQPTLLFPPLRHAEGVDVHHEPLGGYVSSYKKQLEVPASEATIDATAQGIASLLCAHGPDVEWRICTIWEAAYGLLPLSSSAVDLPEIVVAAPLQPPTLSWNLYLPLLKVFEYLPRGSPSEACLMRIFVATVEAILRRAFPSETPEQSRKPRSQSKNLAVAELHTMIHSLFVESCASMDLASRLLFVVLTVCVSHQALPGGSKRPTGSDNHSLEEATEHSRLTNGRSRCKKRQGPVATFDSYVLAAVCALSCELQLFPCISKNGSHSNLKDSMKIIIPGKNNGINNELHSSISSAIIHTRRILAILEALFSLKPSSVGTSWSYSSNEIVAAAMVAAHVSELFRRSRPCLNSLSALMRCKRDAEISTRASSLYHLIDLHGKTVSSIVNKAEPLEAHLTLTPVKKVNQHRCEENNTNSSDSAKLENKNGSTHKKNGFSKPHLKCAEEVLNGNVASTSGKSIASLQVEASDLANFLTMDRNGGYRGSQTLLRSVLSEKQELCFSVVSLLWQKLIASPEMQMSAESTSAHQGWRKVVDALCDVVSASPTKASAAIVLQVKILLYSYVWS

SEQ ID NO: 51363 - protein, 658 aa, Zea Mays
MPSTPRWAVANGAGVILSVCDEEVARYETANLTAAAVPALLLPPPTTPLDEHLVAGLPPLEPYARLFHRYYAIATPSATQRLLFGLLEAPPSWAPDALDAAVQLVELLRAAEDYASGMRLPKNWMHLHFLRAIGTAMSMRAGIAADTAAALLFRILSQPTLLFPPLRHAEGVDVHHEPLGGYVSSYKKQLEVPASEATIDATAQGIASLLCAHGPDVEWRICTIWEAAYGLLPLSSSAVDLPEIVVAAPLQPPTLSWNLYLPLLKVFEYLPRGSPSEACLMRIFVATVEAILRRAFPSETPEQSRKPRSQSKNLAVAELHTMIHSLFVESCASMDLASRLLFVVLTVCVSHQALPGGSKRPTGSDNHSLEEATEHSRLTNGRSRCKKRQGPVATFDSYVLAAVCALSCELQLFPCISKNGSHSNLKDSMKIIIPGKNNGINNELHSSISSAIIHTRRILAILEALFSLKPSSVGTSWSYSSNEIVAAAMVAAHVSELFRRSRPCLNSLSALMRCKRDAEISTRASSLYHLIDLHGKTVSSIVNKAEPLEAHLTLTPVKKVNQHRCEENNTNSSDSAKLENKNGSTHKKNGFSKPHLKCAEEVLNGNVASTSGKSIASLQVEASDLANFLTMDRNGGYRDVCRKHISSPRMEEGCGCTL

SEQ ID NO: 51364 - protein, 138 aa, Zea Mays
MNAANLGGQLGSLGNFNAITSIFLSANQITGSIPSSLSKLENLSAMSVNGNHLSGGLPDTFDSLNRLVNLDISSNNLTGVLPSSMKSLASLTSLHMQDNQLSGTLNVLQGLPLKDLNIENNIFSGPVPASLLNIPNFK

SEQ ID NO: 51365 - protein, 117 aa, Zea Mays
MNAANLGGQLGSLGNFNAITSIFLSANQITGSIPSSLSKLENLSAMSVNGNHLSGGLPDTFDSLNRLVNLDISSNNLTGVLPSSMKSLASLTSLHMQDNQLSGTLNVLQGLPLKDLS

SEQ ID NO: 51366 - protein, 98 aa, Zea Mays
MTSSSVTQLSGRMRASLDYEAPEFQDYGVISERGDVYSFGVVMLELLTGRKPYDSSRPRHEQHLVRWASWQLHDIESLSKMVDPPIRGHVLRSIVTFC

SEQ ID NO: 51367 - protein, 106 aa, Zea Mays
MVSKPVVLVFLLVVLIITSQFEWKQQLVNELESTARNQKHVSSREELVKDQIIFTQEKMIQRLNNFVRNLQQQLVQCRGNNRTVNRSGTSLTSYISEIQMPQMMDD

SEQ ID NO: 51368 - protein, 62 aa, Zea Mays
MNCCQHHHLALCLQYLELFWLAGGGVLISELIQDIDTPLAKGERAIKPRRRRRVKNSGFRKQ

SEQ ID NO: 51369 - protein, 57 aa, Zea Mays
MVSSRTRHGMRSMRLMCIYVAAAGAALPRLCNLMAVFLFKTKTNKRWQCKKEKKNCV

SEQ ID NO: 51370 - protein, 76 aa, Zea Mays
MEGDRLRCTPALLPRIVVGRGGDIRNTVLSLESTAGLESVRCMSRTDLKLDGSFADMILIPDTGVLDKSRILHLLF

SEQ ID NO: 51371 - protein, 404 aa, Zea Mays
MARLFFLLLLFPLLYSSVTGLNRSDFPPSFLFGASTSSYQVEGAYLDDSKGLSNWDVFSHVPGNIDDGSNGDVAADHYHRYKDDIEMMHSIGLSSYRFSLSWSRILPKGRFGGVNQAGVKFYNSLINGLLEKGIQPFVTINHYDIPEELQERYNSWLNPEIQEDFTYFVELCFKMFGDRVKHWVTFNEPNLIVKLAYSIGAFPPNRCSEPYGKCDSGNSSTEPYIAAHNMILAHAKTVNIYRKNYKSKQGGFVGISLHLRWILDPLFFGDYPHQMRQILGPNLPKFTEGEKKLLKNQIDFIGTPVANTYVVPSSMEKLVMYLKQRYKSIPLYITENGYAQIANISTTAEEIINDIERSTYIRDYLTYLSFAIRLLHASIIFSCKLLSSQVIIKLCYFCAGKEQM

SEQ ID NO: 51372 - protein, 490 aa, Zea Mays
MNQCVPSWDLVDDPTAAVAGGGGGLNHQVSTTGGAHRGLLLQASAGGAGGGGAFAPVVVPMSNQYYEVAELTWEKGNISSHGLLNRPAHNKYPPAAAPSSAQLHAIAGGGGRGGGSPSGDRETLEAVVGEAAARSHFLSQPAPPWLIGADAVARAAADALVPCAARAGESAADGGEAGASRRKRPRVVGDDSLVVCASQGSTAPRRRGESALLTQLDACGTEADDVCGFRTTTTNNSTSMDRDDKGSPDTENTSIGGGASDSRCFSRRSQRDGLCDDDEENVVINGDDGAMRSSISTKRSRAAATHNESERKRRDRINQKMKTLQKLVPNSNKTDKASMLDEVIDYLKQLQAQVQLMSRMGSMMMPMAMPQLQMSMMAQMAQMAQMAQMAQMNMGSLGQPGYAGLTPPMMHPPPFVPVSWDTTATATTSLAPQAGSGTVPADAFSAFLACQAQQNGQQQPGSMEAYNRMVALYQKMNQTQQSAPSNPSKQ

SEQ ID NO: 51373 - protein, 490 aa, Zea Mays
MNQCVPSWDLVDDPTAAVAGGGGGLNHQVSTTGGAHRGLLLQASAGGAGGGGAFAPVVVPMSNQYYEVAELTWEKGNISSHGLLNRPAHNKYPPAAAPSSAQLHAIAGGGGRGGGSPSGDRETLEAVVGEAAARSHFLSQPAPPWLIGADAVARAAADALVPCAARAGESAADGGEAGASRRKRPRVVGDDSLVVCASQGSTAPRRRGESALLTQLDACGTEADDVCGFRTTTTNNSTSMDRDDKGSPDTENTSIGGGASDSRCFSRRSQRDGLCDDDEENVVINGDDGAMRSSISTKRSRAAATHNESERKRRDRINQKMKTLQKLVPNSNKQTDKASMLDEVIDYLKQLQAQVQLMSRMGSMMMPMAMPQLQMSMMAQMAQMAQMAQMAQMNMGSLGQPGYAGLTPPMMHPPPFVPVSWDTTATATTSLAPQAGSGTVPADAFSAFLACQAQQNGQQPGSMEAYNRMVALYQKMNQTQQSAPSNPSKQ

SEQ ID NO: 51374 - protein, 533 aa, Zea Mays
MNQCVPSWDLVDDPTAAVAGGGGGLNHQVSTTGGAHRGLLLQASAGGAGGGGAFAPVVVPMSNQYYEVAELTWEKGNISSHGLLNRPAHNKYPPAAAPSSAQLHAIAGGGGRGGGSPSGDRETLEAVVGEAAARSHFLSQPAPPWLIGADAVARAAADALVPCAARAGESAADGGEAGASRRKRPRVVGDDSLVVCASQGSTAPRRRGESALLTQLDACGTEADDVCGFRTTTTNNSTSMDRDDKGSPDTENTSIGGGASDSRCFSRRSQRDGLCDDDEENVVINGDDGAMRSSISTKRSRAAATHNESERKRRDRINQKMKTLQKLVPNSNKTDKASMLDEVIDYLKQLQAQVQLMSRMGSMMMPMAMPQLQMSMMAQMAQMAQMAQMAQMNMGSLGQPGYAGLTPPMMHPPPFVPVSWDTTATATTSLAPQAGSGTVPADAFSAFLACQAQQNGQFCLDFFGSFYRICSDSFLSIDEAWNCVTESMTAGAREQEVAHAVFCREEREIVEKGSAGTRCLFCGDRCGGCWRAK

SEQ ID NO: 51375 - protein, 489 aa, Zea Mays
MNQCVPSWDLVDDPTAAVAGGGGGLNHQVSTTGGAHRGLLLQASAGGAGGGGAFAPVVVPMSNQYYEVAELTWEKGNISSHGLLNRPAHNKYPPAAAPSSAQLHAIAGGGGRGGGSPSGDRETLEAVVGEAAARSHFLSQPAPPWLIGADAVARAAADALVPCAARAGESAADGGEAGASRRKRPRVVGDDSLVVCASQGSTAPRRRGESALLTQLDACGTEADDVCGFRTTTTNNSTSMDRDDKGSPDTENTSIGGGASDSRCFSRRSQRDGLCDDDEENVVINGDDGAMRSSISTKRSRAAATHNESERKRRDRINQKMKTLQKLVPNSNKTDKASMLDEVIDYLKQLQAQVQLMSRMGSMMMPMAMPQLQMSMMAQMAQMAQMAQMAQMNMGSLGQPGYAGLTPPMMHPPPFVPVSWDTTATATTSLAPQAGSGTVPADAFSAFLACQAQQNGQQPGSMEAYNRMVALYQKMNQTQQSAPSNPSKQ

SEQ ID NO: 51376 - protein, 391 aa, Zea Mays
MAKLASIARRFPNGSMRLVMVTVIGAVLGFFIGISFPSVSITKLHFPDSFISYIEDKDAGLTTQAILNHAWTSARNARGNGTEPTSNSTLKIYVPTNPKGAEGLAPGIVVSESDFHLRRLWGDPSEDLPFKPKYLVTFTVGVEQKANINRAVKKFSDNFAILLFHYDGRVSEWDEFEWSQRAIHISVRKQTKWWYAKRFLHPDIVAAYEYIFIWDEDLGVEHFNAEEYIKLVKKHNLDISQPGLEPDRGLTWQMTKRRGDSEVHKDTEERPGWCSDPHLPPCAAFVEIMAPVFSRDAWRCVWHMIQNDLVHGWGLDFALRKCVEPAHEKIGVVDSQWIVHQVVPSLGNQGQSENGRARCRKEWGMFQTRMAEAEKAYYKMMGITPPNSTRV

SEQ ID NO: 51377 - protein, 115 aa, Zea Mays
MIWFLFDESIYTFPILKRLLQKKIGIIFPQQVSFFRELQAKPLYFCTAGVMVSISSLFVLIFCLYIFSGMSFSQLQQVVIRMKAVRQRISKCICVLFMVFKAVRRGKALDLRLDA

SEQ ID NO: 51378 - protein, 477 aa, Zea Mays
MASSILSDCSSARLLPLRRSLLPPRAPRLRSCPALATPRRLLVAARPQLLPRPRHMDSVPAATASSADSATVSADAPAKLIDGKLVAKQVREEIAVQVTRMKDVIGIVPGLAVILVGSRKDSQTYVRNKKKACEAVGIKSYEVNLPEDSSEEEVIKHIASFNSDPSVHGILVQLPLPRHMNDENILNAVSIEKDVDGFHPLNIGRLAMQGRDPFFVPCTPKGCMELLHRHGVEIKGKRAVVIGRSNIVGTPAALLLQKANATVSIVHSQTKNPEQITRQADIVIAAVGVANLVRGDWIKPGATIIDVGINPVDDYVPTVFDNFSANVVVDGNTVNLGLWDTAGQEDYNRLRPLSYRGADVFLLAFSLISKASYENVSKKWIPELKHYAPGVPIILVGTKLDLRDDKQFFVDHPGAVPITTAQGEELRKQIGAPYYIECSSKTQLNVKGVFDAAIKVVLQPPKAKKKKKVQRGACSIL

SEQ ID NO: 51379 - protein, 649 aa, Zea Mays
MALARLLGTAFLLLLFSHAEAAGEVGVNYGTVANDLPNPASVVQLLKQNGITMVKIYDANANALTSLANTGIKAMVMMPNANLARAASDPTYAAQWVQDNVMPYYPATQINAVAVGNEVFDDPSVDKMDLVPAMTNVQAGLAGLGVAGDIKVSSPIKFDALQVSWPPSSGRFRDDIAQPVMKPMLDLLQRTGSYLTINAYPFFSYYSDPRSISLDYALGNSNPGVSDDKANLRYDNLLDAQVDATHYAMEALGVSTVDAYVGESGWPTKGVVGGKIPPAARRLLGAAEGSARRLLDTGDDAGSPASIPNARAYNNNLINRMLSGRTGTPHRPNANMDVYIFALFNENDKGSNGADDVEQNFGLFYPNETKVYEFSFQGGGGPPGPSSDSWCVGNAAAGGKALQDALDYACGHGADCSAIQPTGSCYEPNTVLAHASYAFNSYYKKNNRAAGTCDFNGAASVVYQAPADTCSSAQPTWCVAKPGVGDAQLQPALDYACGHGADCSAIQSGGGCFQPNTVAAHASYAFNDYYQRNGRADGTCDFSGAAAVVNQDPGLCAATASWCVAKQGVGDDQLKQALDYACGHGADCSAIQQGGACFQPDNMPSHASYAFNSYYQRNGRASVACDFSGAGVVVYQQPTVGNCVLPSNG

SEQ ID NO: 51380 - protein, 90 aa, Zea Mays
MRPRVLLVTLAVIVVVLAALPLSKGTEEEDGGAAVAAVDAAGTSSWPCCNECGFCKLSYPPQCQCLDFSMVGCHPECKRCIRYTADGGVD

SEQ ID NO: 51381 - protein, 181 aa, Zea Mays
MGTCLICCYCSDMAEKEETKGRCPACHTRYDKDMIVKMAATCDRTVADKNAEKKQKAQRVKPKAAPTATTTSTVESKKHLATIRVIQRNLVYIIGLPAHLCNESVLERREYFGHYGKVLKVLVSRPTGPPSQQASANSSISVYVSLNYTVYMHDLFILHMNLDLYFQYWSISLMEYQITIY

SEQ ID NO: 51382 - protein, 160 aa, Zea Mays
MIRPSFPKWYFVHEVPEQFPNSDVTAIVDETWQIGDRVDWLKEGCYWSGTITKIINEDLVEIELPAPPIGEGKCYKAKCSDLRPTLEWSLARGWMVPLSQNQMMIMTTTIAGMPGKRCAELQTRLRKLQAPWSLHLRQPQTTLPATCIRRMLLSHPQRTC

SEQ ID NO: 51383 - protein, 343 aa, Zea Mays
MFRDSPESSQDSSKRRKAVLPSPSQAKNGNIIRIKLKSNQDPQSVLLEKPRVLEQPLVQQMSSVSSLSSKQNSINRKVNVRSTAGQQWVNGDSQAVQKSLVTETLSRAMQRTVPQPAVKVTRRADPQLSVKAPVGRSDLPPKFSGSVGPSPARVTGRFCPAPVKTQQRIEHPPSMVSQRVDPQAKVSQKEMGSAVCLPQAPHPPVLQKPKDLPVPKQREPINSLPKEEPCFSGRTVEADQGKEAKLSRSDRKKIHKTEKKNKKFRDLFVTWNPLLMENEGSDLGGQDWLFSSTRSSDGSMAQPTVPDGLGPIHPMVQQQPYLQPRATFLPDLHIYQLPYVVPF

SEQ ID NO: 51384 - protein, 302 aa, Zea Mays
MSALAAGGGAAADGAPEATAAPTRREKRRERKKERRRRARRQAAARARAAVEAEAPAVDPEEERRLLEIQEAEAAAESERALRAFEDAERRWLEAAAARAAEKAAAAAAEEDARAAEASARNKPKDGQGNQSEEDSEWEYVEDGPAEIIWKGNEIIVKKKKVKVPKGSKEKLQIQEEDRPTSNPLPPQSVALAAHRREPSLSAQEVLDKVAQETPNFGTEQDKAHCPFHLKTGACRFGLRCSRVHFYPDKSITLLMKNMYNGPGLALEQDEGLETRDRLHVLSCYLQNFDLRHTVIRPVDFT

SEQ ID NO: 51385 - protein, 276 aa, Zea Mays
MSALAAGGGAAADGAPEATAAPTRREKRRERKKERRRRARRQAAARARAAVEAEAPAVDPEEERRLLEIQEAEAAAESERALRAFEDAERRWLEAAAARAAEKAAAAAAEEDARAAEASARNKPKDGQGNQSEEDSEWEYVEDGPAEIIWKGNEIIVKKKKVKVPKGSKEKLQIQEEDRPTSNPLPPQSVALAAHRREPSLSAQEVLDKVAQETPNFGTEQDKAHCPFHLKTGACRFGLRCSRVHFYPDKSITLLMKNMYNGPGLALEQDEGLEVC

SEQ ID NO: 51386 - protein, 355 aa, Zea Mays
MTTSASPLFPNPRKRHLDASPLPRHFHGPQSQTRLSQRHRRRFFLPLPPKARSFASDMGNHMSSAFGWPSDDGRGLLCCWIGKARGLTVAMDVEAGTGLHLVDRRRVTDSRKTTLKEEAVKPPQWKKRRPFYKEALEAAATHYDPRLEAIGIEIRLQKEKLAYIPKSDKAAKEVINLYLELLKEREKREPNRFLKCHFFNTFFYKKLACGKNGYDYKSVKRWTSQRKLGYELIECDKIFVPVHKDVHWCLAIINVKENFFQYLDSLGGMDHNVPKVLARYISEEVKDKSNRVINTSLWHEELVDIPLQRNGWDCGMFMLKYIDFHSRGLPLSFSQEHMEYFRKRTAKEILRLRAD

SEQ ID NO: 51387 - protein, 112 aa, Zea Mays
MVLLNSRIGSGRKNGRKRNDVEEDIGDDFLSDSSEGGGSPTYNESGDSDSNDGGGDDEDGEPSGPCFAARTQPKLATDQYNGPGQDEQAVPLRPRSKRQKKLSIKGLYMLQK

SEQ ID NO: 51388 - protein, 410 aa, Zea Mays
MMREGDARVTLLRSKLHGLVERNRDLEEENKQLRHQVSQLKGQISSLEGQETNKRMLWKKLENSATGISYSKEKQFVQSNDGAKEAVDLNSSLSHSRQQFSSVNQVRSRAPRVPNQPPNPTSTQPKATVRKEGCMAPPPPPPPLPSKLQRSTKAIQRVPEVVELYRSLVRREGKNNAKSGSVGIPAATNSREMIGEIENRSAYVLAIKSDVENQGNFVNFLASEVQNAAYKKIADVEEFVKWLDGELSYLVDERAVLKQFPNWPEKKADALREAAFNYRDLKNIESEASSFHDDRRVATPMALKRMQALQDKIEQGIHNTERVRDSASGRYKDLKIPWEWMLDSGVISQLAKEYMNRIVKTLKSDPFANEEELLLQGVRFAFRIHQLAGGFDEGCRKAFQELNTNASKSE

SEQ ID NO: 51389 - protein, 233 aa, Zea Mays
MLVVQLPPPEVAGEDESNSRGVFVEFMTKVAQFNELVESGERLLGRFREELEYFRRPQISKEADVMNQILKSNCTVRMRSYIETGCRVHCQNISNINQLSSCENGLKDHIKKVKTLLEELECLVENVYGITLTASLSALEVSDSQCLDSMLSTDRCSVEEDRSADRLDRDVSFATVMVMVRNALKADYTMQEKIVCALSLKTPSSELEGYCLMWNLRPYIDDDVMRLAWKMCP

SEQ ID NO: 51390 - protein, 263 aa, Zea Mays
MCAAQLLCPAADTSAALLCSTSSEGEIPAMLVVQLPPPEVAGEDESNSRGVFVEFMTKVAQFNELVESGERLLGRFREELEYFRRPQISKEADVMNQILKSNCTVRMRSYIETGCRVHCQNISNINQLSSCENGLKDHIKKVKTLLEELECLVENVYGITLTASLSALEVSDSQCLDSMLSTDRCSVEQEDRSADRLDRDVSFATVMVMVRNALKADYTMQEKIVCALSLKTPSSELEGYCLMWNLRPYIDDDVMRLAWKMCP

SEQ ID NO: 51391 - protein, 115 aa, Zea Mays
MLVVQLPPPEVAGEDESNSRGVFVEFMTKVAQFNELVESGERLLGRFREELEYFRRPQISKEADVMNQILKSNCTVRMRSYIETGCRVHCQNISNINQLSSCENGLKDHIKKDLA

SEQ ID NO: 51392 - protein, 158 aa, Zea Mays
MDRSTIHQQQFLQRKEKTRKYSTPMGSSAAAAGDLTRGSQSQHPDRSRVQCSPVRAAAPPVERLVVGVALLGAAEQPSAAPGLAPAAVGPRRHRHLHRLAPPARRALAVAPRRPRPDQRLRRRRPLAVADLLWWTRILEPVMRRSTTCNNQEESGALA

SEQ ID NO: 51393 - protein, 454 aa, Zea Mays
MALKQKDTDAAATATGTKKRRRVFFSDTVWNPGEVSSVDCTAIQPFDLNHFFGEDGKIYGYKNLKINVWISAKSFHGYADVSFDETSDGGKGITDLKPVLQNIFGENLVEKEEFLHTFSKECEYIRTAVTNGSAIKHDGSYESDPAVEIVRVELQGAAAFLYSRLVPLVLLLVEGSTPIDIGEHGWEMLLVVKKATQEAGSKFELLGFAAVHNFYHYPESIRLRISQILVLPPYQGEGHGLGLLEAINYIAQSENIYDVTIESPSDYLQYVRSSIDCLRLLMFDPIKPALGAIVLSLKETNLSKRAQSLRMVPPADLMETVRQKLKINKKQFLRCWEILIFLSLDSQDHKSMDNFRACIYDRMKGEILGSASGTNRKRLLQMPTSFNKEASFAVYWTQEIEDEDEQTVEQQPEDLKTQEQQLNELVDIQIEEIAGVAKNVTSRCKDKMTELVVQ

SEQ ID NO: 51394 - protein, 684 aa, Zea Mays
MLRHLVRTGQLADARSLFDAMPRRDEVAYATLLSGYAAAADFPGAMALFSRFRASSSQPHDAADPFILSPVLKACASAAASAGLLPLPHAAAAAALHAFAVRSSSLPSVFVSTALADAYAKAGRLDLALQVLDEMPSRNVVSWTTLVASLARAGRRHDALRRFAEMRASGVACDSHACSAALTACADAGLLPRGREVHALCAKLGLDAVPFVANALAALYARCGDVDRALAAVGRMGSHDVAVCTTLIASYVQTGRTEEAIEAFVRMLRDESSNSASPNEYTFSAVIAACPNMDRAYLGEQLHAQAARRGLSHARSVANSLVKLYSRRGHLSAADAIFRESVVKDVVSWSTIISGYTQEGLAEESFALFSEMRHHSSCPRPNEFTLASLFSVCASAASLDTGRQLHALAVAAGLEHHAMVRSALVNMYGKGGSMSDANVVFSNRTKDDVISWTAMIVGHAEHGHSKEAFELFEEMCRIGLKPDHVTFIGVLTACSHAGELELGLRYLNAMNKSYGLEPEKEHYGCVVDLLARAGRIHEAEELIGRIAAEERDGVVWTSLLRACAARGAEETGKIAAERMMEAEPWGSGAHVVMANLYASKGLWCEAAQERHLMKQKGVLKGAGWSSVEVGGDDRGVGVFVSGDRTNPQDSAIYMMLELMYYGAGMVRQIPDQLDLGSEGELTVY

SEQ ID NO: 51395 - protein, 85 aa, Zea Mays
MAVVWAVFSSNSELQVRPRDSRFIHHLLCNTIGVLCGAGFSELRAAGFGLVSKIGLEATNTSGSLILHCGILRPDKRLNLTYLSY

SEQ ID NO: 51396 - protein, 83 aa, Zea Mays
MSPLVRVLAPHATSTQAAQPRAVAMASKHLVLAACLLLLLPTASVATDVDYCKGLPGEGERGADPARSGRTRQARHFQDLRFY

SEQ ID NO: 51397 - protein, 163 aa, Zea Mays
MSPLVRVLAPHATSTQAAQPRAVAMASKHLVLAACLLLLLPTASVATDVDYCSKKDYPVKVSGVQILPDPVEPGKPATFKISASTDKTIEKGKLVIDVKYFFFYVHSETRDICGETSCPATGDFVLSHQQTLPGFTPPVRLLRTASNRTSGPCLAALFSNTVV

SEQ ID NO: 51398 - protein, 62 aa, Zea Mays
MVGKLFTVEDVVIGGLFVISLLLESMQDKDLLWVLLLCSNRFGQSRKLRTIFWGASLDLEQL

SEQ ID NO: 51399 - protein, 312 aa, Zea Mays
MKSEPFEAGGYKWYILVYPQGCDVSNHLSLFLCVANHEELLPGWGHFAQFTIAVGNLDPKKVKYSDTLHKFWKKEHDWGWKKFMELSKIQDGFLVDDVLEIIAQVQVIREKADRPFRCLDRPYRRELLRVYMTNIEQIYRRFVEERRRKLIRLIEDKMRWSSFRAFWLAIDPTTKHRMSREKSDIILKMVVKNFFVEKDVTSTLVMDALYTGLKALEACSNGKKGMVTSIDLEELSASMVHVDMDMFVLAGDFITLIERAALEPLSCQSLSPKGDKCSQTRAKDGGTGEINKVPIELQERRLTELGQKILKY

SEQ ID NO: 51400 - protein, 127 aa, Zea Mays
MDPPTAEWRPAVSAAAVVARREAAKTQARPEPNLNLRWRDRTRPLPLVRSSRLPPGTTTHIPISRGQAAGSAAAAAAAAALPAPLSHWPPRWRSASTTSRSASPRRSPPAAAAAAAAAAAGSSPSPP

SEQ ID NO: 51401 - protein, 214 aa, Zea Mays
MPALHRRKAPFQGLSHHSRPRPLSGTILAFQGLPPPPRSAALSPVLLEYGTASPPRDPCLLPPRSLVPPATARNSEPHSPPPYQSPHLRRSPRPLSTTPGPRHRCRPSASSSPPTSACGIRYRKKRQEENTSPQPRCSPFTAQAQSIAPSTRAPATTAPSLLMVMPPRVVLRSRPRCRGLSYEADTPCGCPHKGYCACAFTFGTVGALMAADDV

SEQ ID NO: 51402 - protein, 269 aa, Zea Mays
MRPLCSNPPLHSKSHGGSHRSLARLRFPCSLGMELITNVTEYEKLAKERLPKMVYDYYASGAEDQWTLKENREAFSRILFRPRVLIDVSRIDMATNILGFSISMPIMIAPSAMQKMAHPDGELATARAAASAGTIMTLSSWSTSSVEEVNSVGPGIRFFQLYVYKDRNIVRQLVKRAEMAGFKAIALTVDTPILGRREADIKNRFALPPHLVLKNFQALDLGTMDKTNDSGLASYVAGQVDRTLSWKVLFVHPSFLASLFFFFFLRIPS

SEQ ID NO: 51403 - protein, 716 aa, Zea Mays
MFLPSSGPWHANNELAGNYQKQRDSSAWNRAEQKRLKEELTSVVAKLEESKQKLAVLKAQGDNKQATPILVPMLGKKTAEKVGDKQTELQDLEATHKELMESISKRLEEIRRLHTERIGILNNLATFQNILTDFKSIHSSKAFQLVNDQLQKSQAELDGHQTLLEKLQVDMDTFVWRERQFNQKVDLAEISQKVSAYYVSRIADLEKDVQKLCNEKNMLVLKLEGALREPGRNQVISEFKALVSSLPREMGAVQTELSKHKDASLQLHSLRAEVHSLSSIRTRKEQEIEETSRSAHAGSDISQLQSLVHELRENTQELKLFVELYKHDSADSRQLMESRDRELAELAGVHVLRYSLNESKLEQRVIAANEAEAISQQRLATAEAEVAELGQKLETSRRNLVKQSDILKSKHEECEAYMVEIESIGHAYEDIMSQNQQLLQQIIERDDHNTKVWRHGVEIFSGLLKLFMEGVKAKQSHDALHLEVCSLQRNLQHASTLMDLCNQKLIHLEDKLRGWSERLRRLSEDGMQQSISLGISQTKLTGMHGEAPKLGQALNVLQAKVGSNRLEVAELLIELETERFSKKRLDDDLDLMSSKASSLREKADNSQVLQKLLHEAKEYRGILKCGICHDRQKEVVIAKCYHLFCNQCIQKSLGSRQKRRLAPVSHTPELPGALLIPGICAASQRLRYQKVLRSTEKHSQFSSRSQLPETFSNKQR

SEQ ID NO: 51404 - protein, 867 aa, Zea Mays
MPTCLHVQDPRNIAMSRPLDFAVLNYKNQRLAEQLEVHKFEFRALESRFNDLKEKQRTHNETLILVENYWERLVAELGIVPVCKSESSHSSCSTGNNNIRKDGICFRLGAGFLNGLLEAGASATESSGFSNCQLGNDVSSEESTTIDILQKMFLPSSGPWHANNELAGNYQKQRDSSAWNRAEQKRLKEELTSVVAKLEESKQKLAVLKAQGDNKQATPILVPMLGKKTAEKVGDKQTELQDLEATHKELMESISKRLEEIRRLHTERIGILNNLATFQNILTDFKSIHSSKAFQLVNDQLQKSQAELDGHQTLLEKLQVDMDTFVWRERQFNQKVDLAEISQKVSAYYVSRIADLEKDVQKLCNEKNMLVLKLEGALREPGRNQVISEFKALVSSLPREMGAVQTELSKHKDASLQLHSLRAEVHSLSSIRTRKEQEIEETSRSAHAGSDISQLQSLVHELRENTQELKLFVELYKHDSADSRQLMESRDRELAELAGVHVLRYSLNESKLEQRVIAANEAEAISQQRLATAEAEVAELGQKLETSRRNLVKQSDILKSKHEECEAYMVEIESIGHAYEDIMSQNQQLLQQIIERDDHNTKVWRHGVEIFSGLLKLFMEGVKAKQSHDALHLEVCSLQRNLQHASTLMDLCNQKLIHLEDKLRGWSERLRRLSEDGMQQSISLGISQTKLTGMHGEAPKLGQALNVLQAKVGSNRLEVAELLIELETERFSKKRLDDDLDLMSSKASSLREKADNSQVLQKLLHEAKEYRGILKCGICHDRQKEVVIAKCYHLFCNQCIQKSLGSRQKRRLAPVSHTPELPGALLIPGICAASQRLRYQKVLRSTEKHSQFSSRSQLPETFSNKQR

SEQ ID NO: 51405 - protein, 376 aa, Zea Mays
MKIIEGEFGCPVSHMFSYVSDEPVASASFGQVYQGRTVDGSLVAIKVQRPDLLPSVLRDIYILRLGLAFIRKIAKRRSNISLYGDELGRGFVGELDYNIEAANATKFMEVHSRYPFMLVPKVLKQLTRKRVLTMEWVAGENPKDLLSLSKGVSEKFTQASDNQKLEAKSRLLDLVNKGVEASLVQLLETGLLHADPHPGNLRYTPEGRVGFLDFGLLCMMERKHQRAMLASIVHIVNGDWASVVYDLTEMDVVPPKTNLRRVTMVLGKIWSVAFKYHFRMPPYYTLVLRSLASLEGLAVAADGTFKTFQAAYPYVVRKLLSENSLETRRLLNQAIFNKRKEFQWQKIDAFLKLASARMICMCQLLTVLGKQTDSSL

SEQ ID NO: 51406 - protein, 465 aa, Zea Mays
MVEDAQAREAPVQRLADSIAGPFVYTVMTLAATTFSFWYYIGTHLFPEVLLNDIAGPDGDSLLLSIKLAVDVLVVSCPCALGLATPTAILIGTSLGAKRGLLVRGGDVLERLAGIDTLVLDKTGTLTEGKPVVTSIASLAYEETEVLRLAAAVEKTALHPIANAIMNKAELLKLDIPITSGQLTSPGFGCLAEVDGSLVAVGTLDWVHDRFETKASPTELRDLRNRLEFMLSSEASSSNQSKSIAYVGREGEGIIGAIAISDILREDANLTVERLQQESITTFLLSGDRGEAVTSIGRTIGIRNENIKSSLTPQDKASIISTLQAKGHRVAMVGDGINDAPSLAAADVGIAMRTHSKENAASDAASVVLLGNRLSQVVDALSLSKATMAKVHQNLAWAVAYNIVAIPIAAGVLLPQYDFAMTPSLSGGLMALSSIFVVSNSLLLQLHGSFQNTEKRQGDLSSRLN

SEQ ID NO: 51407 - protein, 310 aa, Zea Mays
MGIAQHHDAVSGTAKQHTTDDYAKRLALGAAKVEKGVNTALACLTSSNGTCGSSVVKFSQCSLLNISYCPSTEEAISSTKRLVVVVYNPLGWERSDFIRVPVNDQNLVVKGSDGNIVESQLVEVDNVTRNLRKFYVKAYLGITTHKAPKYWLLFQASVPPMGWNSYFISKSTGAGYNSTEHVSDVVSPSNSTIEVGPGHLKMSFSKASGQLNRIFNSISGVDLPVQQSFLWYRSSEGDASDSQASGAYIFRPDGNTPTTVSSSVPLKVIRGPLVDEVHQQFSSWIYQITRLYKNKEHAEVEYTGRRSSHG

SEQ ID NO: 51408 - protein, 144 aa, Zea Mays
MCHLKLLCQNIMVKASVYWDLFFILQMIFLKETNPHVQSYKKIKLGCGCSCVASSCWTEEREGRSSWRADFYSGGLLFSMGLLGYIFSRSTISLVLGITPGLATLLLGTLSLKFWRSDRSSFLLILAQAEVMLMCKHLHLEFCL

SEQ ID NO: 51409 - protein, 494 aa, Zea Mays
MAMLLRRRLPLLRLLRPLHTGSMASISSSSTPPPPPPPPLQKPHAAFVGPRSRRLRFPNAAPVESGRGAGKSSPAAAYLAMGAAAALASLPVAYADSNEQGAVDTVASADPAVGEDLARKERKRILELVQSRGMQRGSYPKFDVAVKGQKVVVKFNMPSNCNVSHLIVDLVTHIGLEAEQHGGGSEVLVRAWDSPAARQITLNPPKKTSTGDHNEDGLCVLIFEPLIGSDYSEIEFIKPGSFSLKELEALISALKIASEKGSSGKNTPRKGNGQRSKHLPSLEKVVSDLEAMGVRVYGFDETSSVPMDGTVIWENLAGYEPQKREIEDTVLLALQSPEVYDDIARGTRCKFETNRPRAVLFEGPPGTGKTSSARVIAKQAGIPLLYVPLEVVMSKYYGESERLLGSVFSLANDLPEGGIIFLDEVDSFAIARDSEIHEATRRILSVILRQIDGFEQDRRVVVIAATNRKEDLDPALIRSANSCGNSCTVCQAFD

SEQ ID NO: 51410 - protein, 93 aa, Zea Mays
MTDVVIFLCIMHRISVTFVNKDGSEKTIRVPVGMSMLEAAHENDIELEGACEGSLACSTCHVIVMDVNYYNKLEDPADEENDMLDLAFGLTET

SEQ ID NO: 51411 - protein, 459 aa, Zea Mays
MTPPGQLLPLSRLPPGLSSRCPPPAHAQARVSLLHPWAHRLHGRFMPSPHLFRSPACPPRAPTPPGLSAAAGGEAQAAAVAEFVTSERVKVAAMLGLALALCNADRVVMSVAIVPLSQAYGWTPSFAGVVQSSFLWGYLMSPIIGGALVDYYGGKRVMAYGVALWSLATFLSPWAAGRSIWLFLFTRVLLGIAEGVALPSMNNMVLRWFPRTERSSAVGIAMAGFQLGNTIGLLLSPIIMSRTGIFGPFVIFGLFGFLWVLVWIPAISGTPGEHAQISAYELKYITKGQKLVKPQIGSEKTKKVPPFSKLLSKWPTWALICANAMHSWGYFVILSWMPVYFKTIYHVNLREAAWFSALPWVMMAVLGYVAGVVSDMLIRNVNWLSGARYCFALSECSKESNHCFSLAYSCCWIEILRPLRFLSKSTGDCPTICWSPTWNVKYSWDICCHSRNYWSRVFC

SEQ ID NO: 51412 - protein, 396 aa, Zea Mays
MAVDEKQEEAISGALQQLNQKKTHLEDNMRLANELKVEEEELYFFTSSLLSMLAEYNIRPPQINASIITTVTKRLYQQMHLKLRSLNDNLGDMTQPGNIYNPNLQQVTLSRNEPSPSYNLDSNRNTLQQYAQGPSDRHMDQMDTGGTTPSNYFEGDRRVDGDSQLYQPDGDALPGIEGFQIAGEPRPGFQLTACGFPTNGTTLCNFQWVRHLENGTRQSIEGATMYDYVVTADDVGTFLAVDCTPMDDNGRQGDLVTEFANNGNKITCDPEMQSHIDAYISNGRAEFEVFVLQAYSPEEWELATLVLTRPNYQIKFKKTGEAIIDEKYSQSLQMKIPNGRTTQFVLVTAGATLPFNTQGISEPNNEDYDVRLRDLIVLVMRTFQKKALDAKRKVNT

SEQ ID NO: 51413 - protein, 527 aa, Zea Mays
MRDPFDAPVDLINPDHNGGNKLSRTGAVSAGDYGLQNGPKSFAPNSDTLVRHQVQVASLHKDLVLEDPNTRIMDPETKELYFRSQSQGDEILLLRKKIAEASLKELRLLGEKHILERRLTDLRMAVDEKQEEAISGALQQLNQKKTHLEDNMRLANELKVEEEELYFFTSSLLSMLAEYNIRPPQINASIITTVTKRLYQQMHLKLRSLNDNLGDMTQPGNIYNPNLQQVTLSRNEPSPSYNLDSNRNTLQQYAQGPSDRHMDQMYHGSNFQQDTGGTTPSNYFEGDRRVDGDSQLYQPDGDALPGIEGFQIAGEPRPGFQLTACGFPTNGTTLCNFQWVRHLENGTRQSIEGATMYDYVVTADDVGTFLAVDCTPMDDNGRQGDLVTEFANNGNKITCDPEMQSHIDAYISNGRAEFEVFVLQAYSPEEWELATLVLTRPNYQIKFKKTGEAIIDEKYSQSLQMKIPNGRTTQFVLVTAGATLPFNTQGISEPNNEDYDVRLRDLIVLVMRTFQKKALDAKRKVNT

SEQ ID NO: 51414 - protein, 214 aa, Zea Mays
MMDCAGGRDPVEDFLLGGAGAGDDGDLVAVFCDDGGGRDEPCSSGPTSKACREKMRRDKLNDRFLELSSIMNPGKEAKLDKANILSDAARMVAQLRGEAEKLKESNEKLRENIKDLKEEKNELREEKVRLKVEKDRLEQQVKAMSVAPTGYVPHLPHPASYHPAAFTPFAPPQQAPANKSAPIPAPFPGMAMWQWLPPTIVDTTQDPKLWPPNA

SEQ ID NO: 51415 - protein, 230 aa, Zea Mays
MDPTAPSPAPPAGDGAQPSDQNRQRPRSALRGALGVAFPIAVSFLFSFLVGLAGLALGGLSSTASVSMPSTCRILSSGVDLRSSKVCELGLLNYRAKHVFYPSSKRRFRCHDDYYWASVLQVEYTEYFSGQLSYAVAEAPKEALPHNCRPDFGAAWSTTLKFKVNESYSCRYMLGSNKADIHSNKLFNCTAEEPSTGELFKRILILIMQTSIYATICMVSSLKSTCQTCR

SEQ ID NO: 51416 - protein, 169 aa, Zea Mays
MKILEQAFMEAADNALPHPMEDAYLEACHTNNMIEFEPEYHVNFGNPDIDEKPPMSLEEMLQKVKPFVVAYEGIQNQEEWEEAVKDVMARAPHMKELIDMYSGPDVVTAKQQEEELQRVANTLPESIPSSVKRFTDKTLLSLKNNPGWGFDKKCQFMDKYARIVSEQYK

SEQ ID NO: 51417 - protein, 412 aa, Zea Mays
MVAREIAPCRARNCSTACCGFCSSADELTSAYELKHRTMLSAAEASCMASTAAICAASLYFRSSFPSLTSDGGSVVHEALASVSFLLLAATFTRLVTFGLFKTPDVLLIGEESLLFTTLSESSAGALAELFLGGVRILLSSLFDGFSSANDFRLGVEELRFSDFFSALAGFESELPLSFASAFPSQLLLKALGPDSKLNKVLLMELPREDFLPAVVAFNTDAAFSSKDSLDGGDFSAPLVLTLCFMSLENLSNDAGREWALVGEDGVDLALVDFAFELTTSFLSERRPLSACFERLEFDLGTGILGTTIGGGGLGGLAAAKKKSGGAGHHKILRAADAGMAARDRPDPPEDRHRGGCLETVDMDELPQLDDVAEDEVVLLVRQRHVGGVRRVGHLEELEEDPGYQRRHRCSS

SEQ ID NO: 51418 - protein, 73 aa, Zea Mays
MVAAVSLPSQAQAVLRSRLCDPVFIHSALSSSLDTNYSKLKYLVASSVSEACNNSVLLLGPRGCGKAGGRHGS

SEQ ID NO: 51419 - protein, 877 aa, Zea Mays
MSSRLKDTGGGGGRATAAATRPLTPKPFSVSSSARRTTAVAAAGKENTASKPSKPTSAVRWSTSSLPRASRIQSSVESSKLVSTLRAPVLPGRPSVGKDNVVEAGLRRSVNGGIRASSVEKGRRSVSVVGSRASEARRGSAGAGGDGTSRRERLDAKAKGLDEISRRRDDLDAKGKQTDEIGRKRESFDAKPKQIGGKRQGFGVNVSKQCDEIKGKTDAFVSNMKKQSEDVGGRRVGSDSKAKAGEEINMRKEGLNKLVKEMHTQKADPGEVSSKSVECCATQKDDEIGNTSVIPVFTVHVVDSMDAPDPIRKQQKNNEEGRKPEEKGKLSDRIRVFEKVAAGGEGASAKPVSAVNRYPSKLHEKLAVLEGRVQKIATDIKKTKEMLDENNPDEPKQILSNIQKEITAIEKAISHVKDDNKIQLGTAENSECENSHPETAEKCTIAKPGDLKQAGKGLNADELEARFLPHHKLLRGHISSTSTQQESSVGMRKDCNGKTRSAASNPDDDENSIAMEFLASLDGEENDFFKERKANKLEKNKTCEVADATSKTSSQGSSKNPVVPNHKEETELLATEELEEFDDRENKSSMMLQEETDESCNSQLSGIGNKSSTGGWFVSEGEAVLLAHGDGTCSYYDIANHEFKSEYKPPSMVSNNMWGDCWLIRAPGVDGCSGRYVVAASAGNALDPGFCSWDYYTREVKSFHVEEEASQAFAPTSRAILGALSNVGSSRSSSALSNAERQQWWYRPCGPLLLSTASKQKMVTAYDIRDGDVVMKWEVSNPVMGMEYSSPLQWRSKGKVVIAGSESIGLWDVNSLNPQPLLSVASGKKLYCLHVNNTDAEVGGGVRQRVSSSEVEGNDGVFSTQESVNVAQKEGCK

SEQ ID NO: 51420 - protein, 363 aa, Zea Mays
MHPPPHPSMKPGGEEEEDVQVLVVRSHHHSDQSSTRSHHHQQVVIRARPYYRRWSPWLVSGATVACVAIFLVTMLVKMGALDVAKVVHGRQGWRLITCMWLHAGVVHLLINMLCLLVVGIRLEQEFGFVRIGLVYLISGFGGSLMSALFIQSSSVSVGASGALFGLIGSMLSELITNWSLYANKVAALLTLLLVILSNLALGLLPRVDNFAHIGGLVSGFLLGFVVFVRPHLDWLTQQQRSGGGGQGQQQAPPPVAAARKRKHRTYQYVLWLAAAALLVAGLTAATVLLFRGYDANQHCPWCHYLSCVPTRRWRCDGSPTTCTATTQENNTLSVVCEGGSNRTYVVAAASQDRIKDLCNQLCT

SEQ ID NO: 51421 - protein, 293 aa, Zea Mays
MIDRLVKMGALDVAKVVHGRQGWRLITCMWLHAGVVHLLINMLCLLVVGIRLEQEFGFVRIGLVYLISGFGGSLMSALFIQSSSVSVGASGALFGLIGSMLSELITNWSLYANKVAALLTLLLVILSNLALGLLPRVDNFAHIGGLVSGFLLGFVVFVRPHLDWLTQQQRSGGGGQGQQQAPPPVAAARKRKHRTYQYVLWLAAAALLVAGLTAATVLLFRGYDANQHCPWCHYLSCVPTRRWRCDGSPTTCTATTQENNTLSVVCEGGSNRTYVVAAASQDRIKDLCNQLCT

SEQ ID NO: 51422 - protein, 257 aa, Zea Mays
MEEDSSAMEPNRLREAEAAAGELKRLREAGQSQYMYRSIADARVVGGRVCLFAVVSEIGATVHSRGTDFTVTLRVIDESYKSGISVTFFADSTALLPCVKSCGDVISLHNVVTSIRYHDSEHDKDFLNQMRTWLPQGLKDFTSNNSELYLMNLKSDSTFDLVCKVFHVHVENNNSIFYVWDGTDTPAAEFPAMMYDSRIANRVRRRPMASIPSSVTDVEYEDAGYASLMKSLTHHDVLLLSHFLQLFISFISVFDLV

SEQ ID NO: 51423 - protein, 272 aa, Zea Mays
MLLPSSSSSSASASKGNSFGKTVNDHLRSTLSFDNKQPPFASQNFDYGQTIACISYPYNRSRSGDVWAAYESRTSTATVQFRSQIAGGGSSTRIPLPLELAENEPIYVNPKQYHGILRRRQLRAKLEAQNKLVRARKPYLHESRHLHAMKRARGSGGRFLNTKQLQQSHTALTRSTTTSGTSSSGSTHLRLGGGAAAAGDRSVLAPKTMASQDSSKKAVSSALAFTATPMLRRDDGFLQHPSHLFSFSGHFGQASAQAGVHNGSQHRVPVMR

SEQ ID NO: 51424 - protein, 552 aa, Zea Mays
MDYQGDNLRDFFQTNGRKVLQRAENNYSLKYFTENEIRNITDGYKSVLGRGAFGEVYKGTLEDQSSVAVKRYIHGTHKEVFAKEVIVHSQINHKNVVRLLGCCTEENALMIVMEFISNGNLDSILHGNRGNGRVPFPLKKRIEIAIEVAEVLWCMHSMYSPVLHGDIKPANILLDENFQPKISDFGIARLLSANGPQQATTVIGSIGYLDPAYCESGILTPKSDVYSFGVVLLEIITRNKAVDGTVTLAQSFNEALTKGEDVQHMFDEEISVAENKKFLRRIGQLAAKCLQRDVKTRPEMVEVANSLRMIRKAMQRDQDEDVLLAAYQFGDLKIFNETEMKEMTKNYSMAFRKSMCECLYNGVIGMNRPIIVRLLETSSETGREIFLNTMSILSQKNHKNVVNIVGFHIGKSSLECVYESCCDLSKTMLGSISLSNRNLYDTICSMKKLHLQQRLSIAVQCAEGLVHIHSLAAESPESCGTSLLGNFRSANIFLDENFVPKIFNVNLSTFLGLSGETVMQLGCSARFVMNMKGTLFMRPFPLPSIAYNLIFK

SEQ ID NO: 51425 - protein, 1609 aa, Zea Mays
MNDSTVEANVQSLCDGGLLMQLDGNSHVIYAEEEAGGTRLQIDGKTCLLQNDHDPSKLLAETPCKLLRFLVADGAHVDADVPYAEVEVMKMCMPLLSPASGVIHCMMSEGQALQAGDLIARLDLDDPSAVKRAEPFDGIFPQMELPVAVSSQVHKRYAASLNAARMVLAGYEHNINEVVQDLVCCLDNPELPFLQWDELMSVLATRLPRNLKSELEDKYKEYKLNFYHGKNEDFPSKLLRDIIEENLSYGSEKEKATNERLVEPLMNLLKSYEGGRESHAHFVVKSLFEEYLTVEELFSDGIQSDVIETLRHQHSKDLQKVVDIVLSHQGVRNKAKLVTALMEKLVYPNPGGYRDLLVRFSSLNHKRYYKLALKASELLEQTKLSELRASVARSLSDLGMHKGEMSIKDNMEDLVSAPLPVEDALISLFDYSDRTVQQKVIETYISRLYQPHLVKDSIQMKFKESGAITFWEFYEGHVDTRNGHGAIIGGKRWGAMVVLKSLESASTAIVAALKDSAQFNSSEGNMMHIALLSAENESNISGISSDDQAQHKMEKLSKILKDTSVASDLQAAGLKVISCIVQRDEARMPMRHTFLWLDDKSCYEEEQILRHVEPPLSTLLELDKLKVKGYNEMKYTPSRDRQWHIYTLRNTENPKMLHRVFFRTIVRQPNAGNKFTSAQISDAEVGCPEESLSFTSNSILRSLMTAIEELELHAIRTGHSHMYLCILKEQKLLDLIPFSGSTIVDVGQDEATACSLLKSMALKIHELVGARMHHLSVCQWEVKLKLDCDGPASGTWRVVTTNVTGHTCTIDIYREVEEIESQKLVYHSATSSAGPLHGVALNNPYQPLSVIDLKRCSARNNRTTYCYDFPLAFETALQKSWQSNGSTVSEGNENSKSYVKATELVFAEKHGSWGTPIIPMERPAGLNDIGMVAWIMEMSTPEFPNGRQIIVVANDITFRAGSFGPREDAFFETVTNLACERKLPLIYLAANSGARIGIADEVKSCFRVGWSDEGSPERGFQYIYLTEEDYARISSSVIAHKLELDSGEIRWIIDSVVGKEDGLGVENIHGSAAIASAYSRAYEETFTLTFVTGRTVGIGAYLARLGIRCIQRLDQPIILTGFSALNKLLGREVYSSHMQLGGPKIMATNGVVHLTVPDDLEGVSNILRWLSYVPANIGGPLPITKPLDPPDRPVAYIPENTCDPRAAICGVDDSQGKWLGGMFDKDSFVETFEGWAKTVVTGRAKLGGIPVGVIAVETQTMMQIIPADPGQLDSHERSVPRAGQVWFPDSATKTAQALLDFNREGLPLFILANWRGFSGGQRDLFEGILQAGSTIVENLRTYNQPAFVYIPMAGELRGGAWVVVDSKINPDRIECYAERTAKGNVLEPQGLIEIKFRSEELQDCMGRLDPELINLKAKLQDVNHGNGSLPDIEGIRKSIEARTKQLLPLYTQIAIRFAELHDTSLRMAAKGVIKKVVDWEESRSFFYKRLRRRIAEDVLAKEIRQIVGDKFTHQLAMELIKEWYLASQATTGSTGWDDDDAFVAWKDSPENYKGHIQKLRAQKVSHSLSDLADSSSDLQAFSQGLSTLLDKMDPSQRAKFVQEVKKVLD

SEQ ID NO: 51426 - protein, 1570 aa, Zea Mays
MSQLGLAAAASKALPLLPNRQRSSAGTTFSSSSLSRPLNRRKSRTRSLRDGGDGVSDAKKHSQSVRQGLAGIIDLPSEAPSEVDISHGSEDPRGPTDSYQMNGIINETHNGRHASVSKVVEFCAALGGKTPIHSILVANNGMAAAKFMRSVRTWANDTFGSEKAIQLIAMATPEDMRINAEHIRIADQFVEVPGGTNNNNYANVQLIVEMAQKLGVSAVWPGWGHASENPELPDVLTAKGIVFLGPPASSMNALGDKVGSALIAQAAGVPTLAWSGSHVEVPLECCLDAIPEEMYRKACVTTTEEAVASCQVVGYPAMIKASWGGGGKGIRKVHNDDEVRALFKQVQGEVPGSPIFVMRLASQSRHLEVQLLCDQYGNVAALHSRDCSVQRRHQKIIEEGPVTVAPRETVKALEQAARRLAKAVGYVGAATVEYLYSMETGDYYFLELNPRLQVEHPVTEWIAEVNLPAAQVAVGMGIPLWQIPEIRRFYGMDYGGGYDIWRKTAALATPFNFDEVDSQWPKGHCVAVRITSEDPDDGFKPTGGKVKEISFKSKPNVWAYFSVKSGGGIHEFADSQFGHVFAYGLSRSAAITNMTLALKEIQIRGEIHSNVDYTVDLLNASDFRENKIHTGWLDTRIAMRVQAERPPWYISVVGGALYKTVTTNAATVSEYVSYLTKGQIPPKIETVRTGHGSYRLRMNDSTVEANVQSLCDGGLLMQLDGNSHVIYAEEEAGGTRLQIDGKTCLLQNDHDPSKLLAETPCKLLRFLVADGAHVDADVPYAEVEVMKMCMPLLSPASGVIHCMMSEGQALQAGDLIARLDLDDPSAVKRAEPFDGIFPQMELPVAVSSQVHKRYAASLNAARMVLAGYEHNINEVVQDLVCCLDNPELPFLQWDELMSVLATRLPRNLKSELEDKYKEYKLNFYHGKNEDFPSKLLRDIIEENLSYGSEKEKATNERLVEPLMNLLKSYEGGRESHAHFVVKSLFEEYLTVEELFSDGIQSDVIETLRHQHSKDLQKVVDIVLSHQGVRNKAKLVTALMEKLVYPNPGGYRDLLVRFSSLNHKRYYKLALKASELLEQTKLSELRASVARSLSDLGMHKGEMSIKDNMEDLVSAPLPVEDALISLFDYSDRTVQQKVIETYISRLYQPHLVKDSIQMKFKESGAITFWEFYEGHVDTRNGHGAIIGGKRWGAMVVLKSLESASTAIVAALKDSAQFNSSEGNMMHIALLSAENESNISGISSDDQAQHKMEKLSKILKDTSVASDLQAAGLKVISCIVQRDEARMPMRHTFLWLDDKSCYEEEQILRHVEPPLSTLLELDKLKVKGYNEMKYTPSRDRQWHIYTLRNTENPKMLHRVFFRTIVRQPNAGNKFTSAQISDAEVGCPEESLSFTSNSILRSLMTAIEELELHAIRTGHSHMYLCILKEQKLLDLIPFSGSTIVDVGQDEATACSLLKSMALKIHELVGARMHHLSVCQWEVKLKLDCDGPASGTWRVVTTNVTGHTCTIDIYREVEEIESQKLVYHSATSSAGPLHGVALNNPYQPLSVIDLKRCSARNNRTTYCYDFPLVS

SEQ ID NO: 51427 - protein, 463 aa, Zea Mays
MGAAARKPAAAGVLPIWLCLVCASRAQPYIGVNYGEVADNLPSADETARLLRSTSISKVRLYGVDAGLIRALAGSGISVVVGVANGDIPSLAADPAAASRWLAANVLPFVPATTISAVAVGNEVLESGDATLGAALLPAMQNLRAAAAAAGGGAAGIRFSTVNTMGVMAQSDPPSTGAFHPDVAPQLQQILGFLSRTGAPFMINPYPWFAYQSDPRPDTLAFCLFQPNAGRVDGGSKIRYTNMFDAQLDAVKSALVRAGYGDVDVVVAETGWPTRGDAGEPGATAENARAYVSNLVAHLRSGAGTPLMPGKAVETYLFALYDEDLKPGPTSERSFGLYHTDLSMAYDAGLASSAAAGGRGGGGGGAAQPRGGGWCVARAGASDAELQADLDYACSQVGVDCSAIQPGGACFEPNTVRAHAAYAVNQLYQAAGRHPWNCDFRASATLTSDDPSYGACVYTGGGQ

SEQ ID NO: 51428 - protein, 535 aa, Zea Mays
MTLSLGLLRSGLLNRRINQPANQVLRLHLAFSSASPSPSDPSAAAAGPQTTIREGKVEIFLDESNSVFYNKTQVNNRDISIAVLRSFILKRHEEYAARSRKAGPGDTTLSAQAKYKEPKVLEALAASGLRAIRYAVEVDGIGEVTAVDNNEAAVEACKKNIQHNGSLASSKVVPHHADARVYMLTHPKEFDVVDLDPYGSPAAFLDSAVQCVADGGILMCSATDMAVLAGGNAEVCFSKYGSYPLRGKHCHEMALRILLACIESHAIRHKRYIVPIISVHMDFYIRVFVRIFTSASTVKSSPLKLAHVYQCTGCNSFYLQNIGRIHSKDKENIAVPNFRLTLPEVCSECGHQFVMGGPLWSYPIHDKVWAASILSDIHAMREAYPAYPKISAILSSVSEELLEAPLFVSLHNLCAILKCTTPTMVMLQCAIRNAGYQVSGSHVDPLALKTDAPMSVIWDIMRCWVKLHPVKHRPGNHPGNVILSQEPKFQAKFSRVLGASVTRKRARFMPNPEKYWGPGTKAGRNPRTFQMDNRN

SEQ ID NO: 51429 - protein, 317 aa, Zea Mays
MCSATDMAVLAGGNAEVCFSKYGSYPLRGKHCHEMALRILLACIESHAIRHKRYIVPIISVHMDFYIRVFVRIFTSASTVKSSPLKLAHVYQCTGCNSFYLQNIGRIHSKDKENIAVPNFRLTLPEVCSECGHQFVMGGPLWSYPIHDKVWAASILSDIHAMREAYPAYPKISAILSSVSEELLEAPLFVSLHNLCAILKCTTPTMVMLQCAIRNAGYQVSGSHVDPLALKTDAPMSVIWDIMRCWVKLHPVKHRPGNHPGNVILSQEPKFQAKFSRVLGASVTRKRARFMPNPEKYWGPGTKAGRNPRTFQMDNRN

SEQ ID NO: 51430 - protein, 401 aa, Zea Mays
MQIVGDVGGNWKAVMHEQSNQCYYWNTVTGETSWDIPNGLASGVATAFVPSDVDYSNEAQTHVLPHSTLEAYPSDMSVGNGTTYPNLGMACGSAHVTQDAYAYAAPIASNEPLDIDPLYLAKYGDGLLQRLDLLERLCGSNKGLELIRREIEIRMSDLNALSSYGSSLLPLWLHAEVHLKQLDSSISKLEMNYHADSEPRNSKTEVAEHRAPDDADLITPSNGEALKYEVCAGITIDANMKIGKPASTSQNSQGRDNAAVPPKIESDNDEDMDVEMEVDEDNVEEQAQCSSVPEKEHPPSEQLSSSNLPSFEDPTPPEDNSVPPPPPEEEWIPPPPPEHEHEPAPPASPEEPAASYVQVDTIPQPYIAQENVGYTISGMEYYSTEGTNANYYMQSLWLQAL

SEQ ID NO: 51431 - protein, 436 aa, Zea Mays
MPPLAFLRRYLPARLLARACDGGVRGSPGVARDEEAGGSGGLSGRSAGAPSGECYACTQPGVPAFHSTACDQVHSPDWDADAGSSLVPVQAQQQAQPAAAAAQHAARWLFGPVLDPRSKRVQRWNRWILLGRAAALALDPLFFYALSIGRAGRPCLYLDAGLAAAVTALRTCADVAHLAHVLLQFRLAYVSRESLVVGCGKLVWDARAIAAHYARSVKGLCFDLFVILPIPQVIFWLVIPKLIREERVRLIMTILLLMFIFQFLPKVYHSIHIMRKMQKVTGYIFGSIWWGFGLNLFAYFIASHIAGGCWYVLAIQRIASCLQEECKKNNSCDLISLACSKEICFHPPWSSNVNGFACDTNMTSFSQRNVSTCLSGKGSFAYGIYLGALPVISSNSLAVKILYPIFWGLMTLRYFCTRSWQGSGRCSCGSETWNGG

SEQ ID NO: 51432 - protein, 63 aa, Zea Mays
MLTEWSSFDNTSLVLFEATLSHGFLKSVVFKEPEMDLLVSNSFCLLDVDMHMHFQSAYDQGYK

SEQ ID NO: 51433 - protein, 84 aa, Zea Mays
MYCWCHRKVEKTLLKKEAIQNLVKFFQDCPEQFFGHILDAFLKIITKSSRLNTTMATNGLTTLLIARLDHSNLVVAKVWRLEFI

SEQ ID NO: 51434 - protein, 402 aa, Zea Mays
MACSAHLVSQSLYSSHRASPGGPRNLRSQGRPPARASPSARPGSRVSGCRGVSLRVAASFEQGRRQVEVSYDPQARFNQIADQIDKDAGMTRLNLFSPCKINVFLRITGKRPDGFHDLASLFHVISLGDTIKFSLSPSKSRDRLSTNVPGVPVDESNLIIKALNLYRQKTGTNNFFWIHLDKKVPTGAGLGGGSSNAATALWAANQFAGCIASEKDLQEWSGEIGSDIPFFFSRGAAYCTGRGEIVQDIPNPLPENLPMVLIKPPEACSTAEVYKRFRLEQTSQADPMTLLEEITQNGISQDVCVNDLEPPAFEVLPSLKRLKKRIIAAGRDDYSAVFMSGSGSTIVGIGSPDPPAFVYDDEDYKDVFVSEACLLTRDENEWYREPISANATSGKEGKNTTV

SEQ ID NO: 51435 - protein, 434 aa, Zea Mays
MASSSSAATTSGDSQGLKARDACIVGVARTPIGALLGSLSSLPATKLGSIAIQGALKRAKVDPALVQEVFMGNVLSANLGQAPARQAALGAGLPNSVPCTTVNKVCSSGMKAVMFAAQSIQLGINDVVVAGGMESMSNAPKYVAEARRGSRFGHDVLVDGMLKDGLWDVYNDFPMGMCAELCSDQHSISREEQDSYAILSNERGIAAQDSGAFSWEIVPVEISSGRGKPPVVVDKDESLAKFDPVKLKKLGPTFKTNGSVTAGNSSSISDGAAAIVLVSGEKAKNLGLEVIARITGYADAAQAPELFTTAPALAIPKAISNAALQTSQIDYYEVNEAFSVVAIANQRLLGIPSGKLNLSGGAVSLGHPIGCSGARIIVTLLGILRQKNGKFGVAGVCNGGGGASALVLELIAIILSTGDRTGHYHPLKHCRVGH

SEQ ID NO: 51436 - protein, 342 aa, Zea Mays
MGNAGSNGGGAAAGHRRRSSGHGHHHQAPPPHQPQETAANRYVFAAATPYPPQYPNPNPPQYYPQYGNYYPPPPPSVPVPLPAPYDHHHRPPTAAPGEFPPPPLTHPHHYPGWAGRYPSYGQHLPMPTPYVEHQKAVTIRNDVNLKKETLRIEPDEECPGHFLVAFTFDATVAGSMTVYLFAKEELNCNLTAVKEDLMKPVTVSFKEGLGQKFRQPSGTGIDFSVFEESDLLKQGDMDVYPLAVKAETTLLVDHPPEGDDQKMKTPNSQITQAVFEKKENGDYHVRVVCQILWVNGTRYELQEIYGIGNSVEGDADANDPGKECVICLSEPRDTTVLPCRHM

SEQ ID NO: 51437 - protein, 205 aa, Zea Mays
MGMNMVTTVMAFSVSAFFVLFVFTRLLCARLHLSRAAAAAQGYNVERGTHGLEPSVVTTFPTVKLGDGGQQPPPVQEESQCTVCLEEYEAKDVVRVLPACGHAFHATCIDAWLRQHPTCPVCRASLRARNGCRATPVDYSLLVAGADAAATVQHVPASSSGASPQAVGRQRQTDDTGRADGLLEIVSEEPASSRDPSPAVAAAGW

SEQ ID NO: 51438 - protein, 144 aa, Zea Mays
MNNEKSDDSSDESSDESDEEPPQKKTKNSAPSGAAKAATNVSKKKSSSDEDDESSEESSDDEDTEQVETKETSVVTTQKPAHNEPKTPAKSQSQATGSKTIFVGNLAYSIEREQVKEFFEEAGEVVDVRLATFDDGSFKGFGHV

SEQ ID NO: 51439 - protein, 200 aa, Zea Mays
MSNAKTVQPAKAAAIKKKEDSSESSETDSQSDSEDSEPEKPTVPAKRPLATNKKNEQSSEKSDDSSDESSDESDEEPPQKKTKNSAPSGAAKAATNVSKKKSSSDEDDESSEESSDDEDTEQVETKETSVVTTQKPAHNEPKTPAKSQSQATGSKTIFVGNLAYSIEREQVKEFFEEAGEVVDVRLATFDDGSFKGFGHV

SEQ ID NO: 51440 - protein, 406 aa, Zea Mays
MIFMLSAVAPDKMPIVLENVRSVLKHGGRVLFRDYAFGDLAQERLMSKGQQISENFYVRGDGTRAYYFSNEYLVDLFSKCGLTLEEICVHNKQVENRSLELVMNRNWIQATFTLNSASPQGPNGQHDLLAYEGEDDKVVTDTSKKKSSGEEIDLSEDFCNMFGTSHSLDEVQIIGVKAKGHDFKIRMLRKEYQHTCRSTGLMLWESAQFMCCLLAENPSIVASKRVLELGCGSAGICSMVAASFTPFVLATDGDEESLDLLRQNISSNMEPNLLSRIMVRKLFWGNEDDMKAVRELHGNGVGFDCIIGTDVTYNPDAILPLFKTARGVISEKANEDSVPALILCYIQRRVDEDSILSNATSQGFRLVDKWINGVHESNGTISSWFSGNDVCSAFRHTVLSVLYFEL

SEQ ID NO: 51441 - protein, 402 aa, Zea Mays
MEAMTGGKFLQKFRLYETRSKFYLIGRDKSRIHWRVLKIDRLESTELGVDEDPTIYTESECQELLWRIHEGNMLTGGLKFVTKCYGIVGFVKFLGPYYMVIITSRRKIGTICGHEIYSVGKSEMIAISSVTVWPNVAYSRDENRYKRLLCSVDLSKDFFFSYSYNIMRSLQKNITQKNTGQAVYEPMCVWNEFLTRAIRNHLKNTCWTVALVHGFFKQSKLSVSGKDFWLTLIARRSRHFAGTRFLKRGVNEKGRVANDVETEQIVFEDTSDGIPTQMASAVQHRGSIPLVWFQETSRLNIRPDIILKPDVDYKATRLHFENLALRYGNPVIILNLIKTREKKPRESLLRAEFAKAIHYINKSLPDDKRLKFLHMDLSKLSRERHQCACTVDQGGIRCVGSN

SEQ ID NO: 51442 - protein, 149 aa, Zea Mays
MDPVSEELERRSRYLNSLIRRTKLSATPAPPPQPEPEPEHEVAPQNPEPEPETAVGKREEAKADPVVVEEEKREAKVAGDGKGKEIKGKDDGGPKEDNSRKVSVRVRAADMPLPLQRRAVRLAYEAIVAMPRLDSKRLALALKKVMWLG

SEQ ID NO: 51443 - protein, 166 aa, Zea Mays
MSLIDEMQLLPWGGKITSESLRFFSPIVIWTVFEPSEANHQALYSAFVDYYMVWLEFMDGAVRESSKEKIDRNREAQHKYLTWRAEKDPGYPLLKKLIGESGAKDLVREFLFEGVGSLGTKSFLEYFAEYAQEDGTVNKKRSMAGKSFGTRPWDAHGLFVGDAVDG

SEQ ID NO: 51444 - protein, 227 aa, Zea Mays
MVLDLNVASPADSGTSSSSVLNSADGGFRFGLLGSPVDDDDCSGEMAPGASTGFMTRQLFPSPTPPAEPEPEPVAAPVPVWQPQRAEDLGMAQRPVAPAKKTRRGPRSRSSQYRGVTFYRRTGRWESHIWDCGKQVYLGGFDTAHAAARAYDRAAIKFRGLDADINFSLSDYEDDLKQMRNWTKEEFVHILRRQSTGFARGSSKYRGVTLHKCGRWEARMGQLLGKK

SEQ ID NO: 51445 - protein, 421 aa, Zea Mays
MAGKRVTGRDGQDEGGAKAGLPAMDISLAFPQATPASIFPPSASDYYQSDDLLTSEERSIRMKYWEKAEFPFNAIPKLASLGVAGGTIKGYGCPGLSITASAVTMSEIARVDASCSTFILVHSSLAMVTIALCGSEAQKQKYLPSLAQLTTVGCWALTEPNYGSDASSLRTIATKAPGGWHIDGQKRWIGNSTFADVLVVLARNADTQQLNGFIVRKGAPGLKATKIENKIGLRMVQNGDIVLNKVFVPDEDRLPGINSFQDISKVLAISRIMVAWQPVGISMGVFDMCHRYLKERKQFGVPLAAFQLNQEKLARMLGNVQSMVLVGWRLCKLYESGKMTPGHASLGKAWNSRTAREVVSLGRELLGGNGILADFLVAKAFCDLEPIYSYEGTYDINSLVTGREVTGIASFRPAAPAKARL

SEQ ID NO: 51446 - protein, 797 aa, Zea Mays
MSSKLRPAEHSPRDPRDKEPIKKIVQSGSFKREGSDSVDVGSSKQKQTFHLSRDEKPGVLKPIKEKNLTERRASFSLKKPNIPSSPRSDSCMKSGERKNDQHISGTNILKSSKRPGYAEKNLRYDLSRTDNGNQDVTVHPKPMEVSGKDAYGVKTSNPLFRSQCAKKYRSNDVEDDDLPISVNNVNIAPNEHAEVVPTMSTAMTRESNLQDVPRESTSDDLAPKVVCCQQKLLENTGDDSCKTLEVVQDSGDILSATPRGLQMAHNLYPYDNKLDKPDLKKEAFADQSSALGNPLKDFVIPEQSYIWQGSFEVSGHGNSPEMFNGFQAYLSTCASSKVREVGEQLPDKIQLAEVPRHSSWPLQFNEVNPTEDNIALFFFAKDVESYERAYGKLLDNMLLGDLSLKANIDNMELLIFPSDKLPERIQRWNGLLFFWGIFYARKASSPLELPTNNCPLEQTNGPVIQHDMGSSKALQPLGIDLNECPNDDISDPALSLGSESEKFGASVDYNVLSESKHEDRNLNASEVHHEETAGTRQIIWGQPSVAPTVTNLPTISTGVHDIVPDYSAAAKDSTGTAGGNKMEKADQNEALFCFSQQPGAIGSISHEIKLKKHGLLPSHCHFSGSKICDDQTKSTPSSDMGSLDSHLTNKRQKTYGKHSTCIFGDEMPPIKCLSKIHPLPAGQDNPVDVLHCHRCPSDPVSLKKTVPDHIINVLSSDDEDSPEPSTSLNKASLKADEGSSALLLLSLSMVATKHNLSGSDIVDDEPLSLSLGFPSVVDGSEDQEMKQFLPEKPGINT

SEQ ID NO: 51447 - protein, 1544 aa, Zea Mays
MDEGLSASEGKILVEASSTVTTRMYQDGRRAESARCPRWELGPEAWPIGGGGGRVMRAPQERSMRDLYDRTRHKDMAAPEESVEGCGGGCAEGWEQRALASKMEDKTVVRKRLISSNNTRVKAESGTCNVCYAPCSSCLHPRSRFEDSNVECASSQTCSTRSEVKNNLLVHREKGLCSKGDNDDEFSATSDHALYSVTGRNKLVATSSIADDLSEVDMPSKRRRLLNQDTRLSRAEYLDDNNSCVTGISAEGKLLVDKKKLSISASSRDLTAKANSMANHNKLRNQCVDESKKGSDGCEMHPSSSGRFSPVDSLVMTKKLLRTQSSVSALSRLSPNRQVHEFGKAVDNLSHQPCEKASLLKNNEEPRAGQLNPCIAGENNHGTLAGYSNRHADKNDFSLNDLDNGTLCSKDEIQEHGDITSNDNDKKNVCVKQDSDQDCSMDISNDRKLNTQHDVMTDCGNSEGLIDVNVCDICGDVGREYLLATCTRCLEGAEHTYCMRVKMEKVPVGEWFCEECQLKEDQNNTRSNYGNTAVNVTEGKNQRTESQSKLKALQIVVPDLDAPQVTHSALTADQCDGSKSLHLTSADTQTRLKDTTTAAERLDMKNKKTLSVARCNKLQVLTSDLDTRPHSYGKPTSGVYNKKSRSSDFLLNHKKLQVSTDMESPLSSEGLQSPPISSKRHVESMSSPKPRLFKTGSLGKHDVISRDNSFKKSNKGGLTSVDNVPVRTTQAAKSSETLSRSYSMGNMVNAKAPIPSARGLLSKQLSFNSTNNGPKVKQLADKMSSKLRPAEHSPRDPRDKEPIKKIVQSGSFKREGSDSVDVGSSKQKQTFHLSRDEKPGVLKPIKEKNLTERRASFSLKKPNIPSSPRSDSCMKSGERKNDQHISGTNILKSSKRPGYAEKNLRYDLSRTDNGNQDVTVHPKPMEVSVNNVNIAPNEHAEVVPTMSTAMTRESNLQDVPRESTSDDLAPKVVCCQQKLLENTGDDSCKTLEVVQDSGDILSATPRGLQMAHNLYPYDNKLDKPDLKKEAFADQSSALGNPLKDFVIPEQSYIWQGSFEVSGHGNSPEMFNGFQAYLSTCASSKVREVGEQLPDKIQLAEVPRHSSWPLQFNEVNPTEDNIALFFFAKDVESYERAYGKLLDNMLLGDLSLKANIDNMELLIFPSDKLPERIQRWNGLLFFWGIFYARKASSPLELPTNNCPLEQTNGPVIQHDMGSSKALQPLGIDLNECPNDDISDPALSLGSESEKFGASVDYNVLSESKHEDRNLNASEVHHEETAGTRQIIWGQPSVAPTVTNLPTISTGVHDIVPDYSAAAKDSTGTAGGNKMEKADQNEALFCFSQQPGAIGSISHEIKLKKHGLLPSHCHFSGSKICDDQTKSTPSSDMGSLDSHLTNKRQKTYGKHSTCIFGDEMPPIKCLSKIHPLPAGQDNPVDVLHCHRCPSDPVSLKKTVPDHIINVLSSDDEDSPEPSTSLNKASLKADEGSSALLLLSLSMVATKHNLSGSDIVDDEPLSLSLGFPSVVDGSEDQEMKQFLPEKPGINT

SEQ ID NO: 51448 - protein, 161 aa, Zea Mays
MEDDDDCPPLAVELPPRVPSPPEQSPSDASPVGITVITGYLGAGKSTLVNYILNEQHGKRIAVILNEFGEEIGVERAMINEGQGGALIEEWVELANGCVCCSVKHSLVQALEQLVQRKDRMDHILLETTGLADPAPLVSVLWLDDQLESSIVLDSIITGSD

SEQ ID NO: 51449 - protein, 255 aa, Zea Mays
MSSSVGGGSAGGGGVDMVSLLEKAKDLDQLKKEQDEIVADINKIHKKLLASPEMVDKPVDTILLKLRGLYARAKELSENEISASNALIGLLDGLLQSGASTAQKKKIVAFYISEVGEQKKKRIKSDTDSARFSAASMRNQLDQAASLKGEQVAARVKSDDEKDEWFVVKVIHFDKETKEYEVLDEEPGDDEESTQKKYKLPMSYIIPFPKKGDPSSAPDFGQGRQVLAVYPGTTALYRATVASHRKRASEENLLQ

SEQ ID NO: 51450 - protein, 389 aa, Zea Mays
MNIHQGWLQQFGHSVGISGSKMVLHMTHNVFSFRCFAANGRGFSADSTNKRKIKSKKRRKDVALESSEVISGNPRNRDQWVPELRTESENKSGKKVMDKKFLEKVEAVRRSALEKKKAEENKDYQAIDYDAPIESDKSTIGFGTRVGIGVAVVIFGLVFAFGDFLPYGSVSPSKESAVVKQKLSQEEEEKFKNALQGFQATLSKSPNDPTALEGAAVSLSELGEYEKASTFLEKLIKVIPDKAEAYRLLGEVKFELKDYEGSSSSYRSALSAVDIILLCRRKLNEKSQTGLADLEATNDNGRQKPQDIDPIQVDLLLGKAYSDWGHISDAISVYDKLITDHPEDFRGYLAKGIILKENGKAGDAERMFIQAKFFAPEAAKALVDRYAQR

SEQ ID NO: 51451 - protein, 302 aa, Zea Mays
MNIHQGWLQQFGHSVGISGSKMVLHMTHNVFSFRCFAANGRGFSADSTNKRKIKSKKRRKDVALESSEVISGNPRNRDQWVPELRTESENKSGKKVMDKKFLEKVEAVRRSALEKKKAEENKDYQAIDYDAPIESDKSTIGFGTRVGIGVAVVIFGLVFAFGDFLPYGSVSPSKESAVVKQKLSQEEEEKFKNALQGFQATLSKSPNDPTALEGAAVSLSELGEYEKASTFLEKLIKVIPDKAEAYRLLGEVKFELKDYEGSSSSYRSALSSSDNIDFEVLRGLTNSLLAAKKPDEYHLPCL

SEQ ID NO: 51452 - protein, 149 aa, Zea Mays
MFAPSLVDINQATDFIHRNASCGKITYIHCKAGRGRSTTVVLCYLVKYKNMTPAAAFEHVRSKRARVLLTHSQWKAVQEFSKKNTDRPALTSGPATASPARDAAPVTVADLNGNNAPEFLAEDASLSRRNTTPSRPTIKMLSCLFPSRV

SEQ ID NO: 51453 - protein, 200 aa, Zea Mays
MVVPVPPPPLLASHVAVRAAASAISHGRRVLLNGDHPPQVAALGRGDWVKLICGASFEDAADVRNLSLVYTLAGVDCIDCAADASVVGAVNEGIEVAASIVPTVQRPWLMISVNDDCRDLHFRKAEFDPDDCPLDCSKPCEKVCPADAISLKHSMVDGERTLSDPLRGKYEGGVITERCYGCGRCLPVCPYDRIKAASFA

SEQ ID NO: 51454 - protein, 1104 aa, Zea Mays
MTTSPPPAEQEQQEEEEVLVPHGPHQELPNGAQPMEVVPAEPAATVENQQIEDPPISRFTWTIENLSRVSTKKLYSEIFVVGGYKWRILIFPRGNNVEFLSMYLDVADSGVLPYGWTRYAQFSLSVVNQIHNKFTIRKETQHQFSARESDWGFTSFMPLGELYNPSRGYLVNDTCIVEAEVAVCKVVEYWSYDSKKETGYVGLKNQGATCYMNSLLQTLYHIPYFRKIQLTTDISCQAVYHMPTTENDMPSGSIPLALQSLFYKLQYNDSSVSTKELTKSFGWDMHDSFMQHDVQELNRVLSEKLEDKMKGTVVEGTIQQLFEGHHMNYIEYLQLDVKGCQDVYASFDKYVEVERLEGDNKYHADKHGLQDAKKGVLFIDFPPVLQLQLKRFEYDFMRDTMVKINDRYEFPLQLDLDRDNGKYLSPDADRNVRNLYTLHSLLDVDDILAIKAIRCVVVDLIDSHAHNDYSYSVLVHSGGVHGGHYYAFIRPTLSDQWFKFDDERVTKEDAKRALEEQYGGEEELPQTNPGLNNTPFKFTKYSNAYMLVYIRESDKDKIICNVDEKDIAEHLRIRLENDREEKERRKKEKAEAHLYTIIKVARDDDLKAQIGKDIYFDLVDHDKVPSFRIQKQMTFAQFKVGQLKELVNKAHNAELKLFLEVELGLDLKPLPLPDKTREDIFLFFKLYEPEKEQLRYVGRLFVKASGRPQDILLKLRMLAGFSQDDDIELYEEIKFEPNVMCEYIDNRLLFRSCQLEDGDIICFQKPSKPDSADRYRFPDVPSFLTYIRNRQVVHFRSLEKPKDDEFCLEMSKIFTYDQVVEKVAEKLGVDDPSKIRLTSHNCYSQQPKPQPIKYRGVERLLDMLIHYNQTSDILYYEVLDIPLPELQALKTLKVTYHHATKDEVSVHSIRLPKNSTVGDVLNDIKTKVELSHTNAELRLLEVFYHKIYKVFAPNEKIENINDQYWTLRAEEVPEEEKNLGPFDRLIHVYHFTKDTQNQTQVQNFGEPFFMVIREDETLSSIKERIQKKLKVPDEDFSKWKFAYISLGRPDYFEDSDTVALKFQRNMYGAWEQYLGLEHPDTAPRKAHTANQNRHSFERPVKIYN

SEQ ID NO: 51455 - protein, 1129 aa, Zea Mays
MTTSPPPAEQEQQEEEEVLVPHGPHQELPNGAQPMEVVPAEPAATVENQQIEDPPISRFTWTIENLSRVSTKKLYSEIFVVGGYKWRILIFPRGNNVEFLSMYLDVADSGVLPYGWTRYAQFSLSVVNQIHNKFTIRKETQHQFSARESDWGFTSFMPLGELYNPSRGYLVNDTCIVEAEVAVCKVVEYWSYDSKKETGYVGLKNQGATCYMNSLLQTLYHIPYFRKAVYHMPTTENDMPSGSIPLALQSLFYKLQYNDSSVSTKELTKSFGWDMHDSFMQHDVQELNRVLSEKLEDKMKGTVVEGTIQQLFEGHHMNYIEYLQLDVKGCQDVYASFDKYVEVERLEGDNKYHADKHGLQVLEPSEASMDHNGRQHAHRYWMSSIPCRCVKDAKKGVLFIDFPPVLQLQLKRFEYDFMRDTMVKINDRYEFPLQLDLDRDNGKYLSPDADRNVRNLYTLHSGGVHGGHYYAFIRPTLSDQWFKFDDERVTKEDAKRALEEQYGGEEELPQTNPGLNNTPFKFTKYSNAYMLVYIRESDKDKIICNVDEKDIAEHLRIRLENDREEKERRKKEKAEAHLYTIIKVARDDDLKAQIGKDIYFDLVDHDKVPSFRIQKQMTFAQFKEEVAKEFGIPTQFQRFWLWAKRQNHTYRPNRPLCPQDEAHTVGQLKELVNKAHNAELKLFLEVELGLDLKPLPLPDKTREDIFLFFKLYEPEKEQLRYVGRLFVKASGRPQDILLKLRMLAGFSQDDDIELYEEIKFEPNVMCEYIDNRLLFRSCQLEDGDIICFQKPSKPDSADRYRFPDVPSFLTYIRNRQVVHFRSLEKPKDDEFCLEMSKIFTYDQVVEKVAEKLGVDDPSKIRLTSHNCYSQQPKPQPIKYRGVERLLDMLIHYNQTSDILYYEVLDIPLPELQALKTLKVTYHHATKDEVSVHSIRLPKNSTVGDVLNDIKTKVELSHTNAELRLLEVFYHKIYKVFAPNEKIENINDQYWTLRAEEVPEEEKNLGPFDRLIHVYHFTKDTQNQTQVQNFGEPFFMVIREDETLSSIKERIQKKLKVPDEDFSKWKFAYISLGRPDYFEDSDTVALKFQRNMYGAWEQYLGLEHPDTAPRKAHTANQNRHSFERPVKIYN

SEQ ID NO: 51456 - protein, 713 aa, Zea Mays
MNFHSNWILIEIMENIYLLMLTGMCVIFIPFTAHNDYSYSVLVHSGGVHGGHYYAFIRPTLSDQWFKFDDERVTKEDAKRALEEQYGGEEELPQTNPGLNNTPFKFTKYSNAYMLVYIRESDKDKIICNVDEKDIAEHLRIRLENDREEKERRKKEKAEAHLYTIIKVARDDDLKAQIGKDIYFDLVDHDKVPSFRIQKQMTFAQFKEEVAKEFGIPTQFQRFWLWAKRQNHTYRPNRPLCPQDEAHTVGQLKELVNKAHNAELKLFLEVELGLDLKPLPLPDKTREDIFLFFKLYEPEKEQLRYVGRLFVKASGRPQDILLKLRMLAGFSQDDDIELYEEIKFEPNVMCEYIDNRLLFRSCQLEDGDIICFQKPSKPDSADRYRFPDVPSFLTYIRNRQVVHFRSLEKPKDDEFCLEMSKIFTYDQVVEKVAEKLGVDDPSKIRLTSHNCYSQQPKPQPIKYRGVERLLDMLIHYNQTSDILYYEVLDIPLPELQALKTLKVTYHHATKDEVSVHSIRLPKNSTVGDVLNDIKTKVELSHTNAELRLLEVFYHKIYKVFAPNEKIENINDQYWTLRAEEVPEEEKNLGPFDRLIHVYHFTKDTQNQTQVQNFGEPFFMVIREDETLSSIKERIQKKLKVPDEDFSKWKFAYISLGRPDYFEDSDTVALKFQRNMYGAWEQYLGLEHPDTAPRKAHTANQNRHSFERPVKIYN

SEQ ID NO: 51457 - protein, 1145 aa, Zea Mays
MTTSPPPAEQEQQEEEEVLVPHGPHQELPNGAQPMEVVPAEPAATVENQQIEDPPISRFTWTIENLSRVSTKKLYSEIFVVGGYKWRILIFPRGNNVEFLSMYLDVADSGVLPYGWTRYAQFSLSVVNQIHNKFTIRKETQHQFSARESDWGFTSFMPLGELYNPSRGYLVNDTCIVEAEVAVCKVVEYWSYDSKKETGYVGLKNQGATCYMNSLLQTLYHIPYFRKIQLTTDISCQAVYHMPTTENDMPSGSIPLALQSLFYKLQYNDSSVSTKELTKSFGWDMHDSFMQHDVQELNRVLSEKLEDKMKGTVVEGTIQQLFEGHHMNYIEYLQLDVKGCQDVYASFDKYVEVERLEGDNKYHADKHGLQDAKKGVLFIDFPPVLQLQLKRFEYDFMRDTMVKINDRYEFPLQLDLDRDNGKYLSPDADRNVRNLYTLHSLLDVDDILAIKAIRCVVVDLIDSHAHNDYSYSVLVHSGGVHGGHYYAFIRPTLSDQWFKFDDERVTKEDAKRALEEQYGGEEELPQTNPGLNNTPFKFTKYSNAYMLVYIRESDKDKIICNVDEKDIAEHLRIRLENDREEKERRKKEKAEAHLYTIIKVARDDDLKAQIGKDIYFDLVDHDKVPSFRIQKQMTFAQFKEEVAKEFGIPTQFQRFWLWAKRQNHTYRPNRPLCPQDEAHTVGQLKELVNKAHNAELKLFLEVELGLDLKPLPLPDKTREDIFLFFKLYEPEKEQLRYVGRLFVKASGRPQDILLKLRMLAGFSQDDDIELYEEIKFEPNVMCEYIDNRLLFRSCQLEDGDIICFQKPSKPDSADRYRFPDVPSFLTYIRNRQVVHFRSLEKPKDDEFCLEMSKIFTYDQVVEKVAEKLGVDDPSKIRLTSHNCYSQQPKPQPIKYRGVERLLDMLIHYNQTSDILYYEVLDIPLPELQALKTLKVTYHHATKDEVSVHSIRLPKNSTVGDVLNDIKTKVELSHTNAELRLLEVFYHKIYKVFAPNEKIENINDQYWTLRAEEVPEEEKNLGPFDRLIHVYHFTKDTQNQTQVQNFGEPFFMVIREDETLSSIKERIQKKLKVPDEDFSKWKFAYISLGRPDYFEDSDTVALKFQRNMYGAWEQYLGLEHPDTAPRKAHTANQNRHSFERPVKIYN

SEQ ID NO: 51458 - protein, 415 aa, Zea Mays
MVFCDLTMLSQVTREGKYVHSDVPKQLLYGTMVFVRQTIVADASKALSRAVCIAVRYSAIRKQFGSQDGGPETKVLDYKTQQSRLFPLLASAYAFRFVGDWLKWLYMDVTQKLEAKDYSTLQEAHACTAGLKAVTTSATADAIEECRKLCGGHGYLNSSGLPELFAVYVPACTYEGDNIVLLLQVARILMKTLSQLTSGKQPVGTMAYMGNVQYLMQCKCAVNTAEDWLNPVAIQEAFEARALRMAVNCAQNIGQAANQEEGFYERSPDLLEAAVAHIQLVIVTKFISKVQQDIPGPGVKEQLQNLCNVYALYILHKHLGDFLATGCITPKQGALANEQLGKLYAQVRPNAVALVDAFNYTDHYLGSVLGRYDGNVYPALYEEAWKDPLNETVVPEGYHEYLRPLLKQQLKLSRL

SEQ ID NO: 51459 - protein, 263 aa, Zea Mays
MASRHRNASPVTAGKDSPQPASAATSLRLVAEFPLDAPEAKESVTVTVRFRPLSSQEVRLGEEIAWYADGDTIVRSEQNHSIAYAYDRVFGPTTTTRHVYDAAALHVISGAMEGINGTIFAYGVTSSGKTHTMHGDQRSPGIIPLAVKDAFSIIQETPKREFLLRVSYLEIYNEVVNDLLNPSGQNLRIREDLQGTFVEGIKEEVVLSPAHALSLIAAGEEHRHVGSTNFNLLSSRSHTIFTLTIESSGPCSESSEEEAVTFS

SEQ ID NO: 51460 - protein, 582 aa, Zea Mays
MLCPLLQPEKTIESSGPCSESSEEEAVTFSQLNLIDLAGSESSRAETTGVRRKEGSYINKSLLTLGTVISKLTDGKATHVPFRDSKLTRLLQSSLSGQGRVSLICTVTPASSNSEETRNTLKFAHRAKHIEIQVSQNKIMDEKSLIKKYQNEICQLKEELDQLKRGILSGTPSKDATEDNVILWKQKLEDGNVKLQSRLEQEEAAKAALLARIQRLTKLILVSTKATQTPRLSQCPRPRRRHSFGEEELACLPHRRRDIVLDGESNDLFVAMEGFDETFEVSSKGENKNRKGLLNWFKLRKHDGGSNAPSLGGDQSSLRKALAAPWTPVEIGLNSQTEQEMSNSPENLSANLLSIDHEEFHSDGLYGEEASLVQYMSTSFFVYSTTHLIRTNAGYVTRKTSDHVDLLREQLKILSEEVALHKSVLKRLVEGAGRSTMNGHVEIEMKKVSDEIKDKQQQIAHLERQIKGELDQLEHTPSHATLLEQVNEKAFELEVKTADNRILQDQLQQKTRECQALEETVAHLHEQLSQALEANDLLSESIIFQQYTDNNLQTGSQIHIENPESIDISDELHQKAEQRLMN

SEQ ID NO: 51461 - protein, 1014 aa, Zea Mays
MASRHRNASPVTAGKDSPQPASAATSLRLVAEFPLDAPEAKESVTVTVRFRPLSSQEVRLGEEIAWYADGDTIVRSEQNHSIAYAYDRVFGPTTTTRHVYDAAALHVISGAMEGINGTIFAYGVTSSGKTHTMHGDQRSPGIIPLAVKDAFSIIQETPKREFLLRVSYLEIYNECPFAQEVCNQILNWEGLTMPQQANPSNFDSISEWWESAASHISRDRSREFNGSVIYTMWNIWKERNRRIFEHNSLSVVNDLLNPSGQNLRIREDLQGTFVEGIKEEVVLSPAHALSLIAAGEEHRHVGSTNFNLLSSRSHTIFTLNLIDLAGSESSRAETTGVRRKEGSYINKSLLTLGTVISKLTDGKATHVPFRDSKLTRLLQSSLSGQGRVSLICTVTPASSNSEETRNTLKFAHRAKHIEIQVSQNKIMDEKSLIKKYQNEICQLKEELDQLKRGILSGTPSKDATEDNVILWKQKLEDGNVKLQSRLEQEEAAKAALLARIQRLTKLILVSTKATQTPRLSQCPRPRRRHSFGEEELACLPHRRRDIVLDGESNDLFVAMEGFDETFEVSSKGENKNRKGLLNWFKLRKHDGGSNAPSLGGDQSSLRKALAAPWTPVEIGLNSQTEQEMSNSPENLSANLLSIDHEEFHSDGLYGEEASLVTRKTSDHVDLLREQLKILSEEVALHKSVLKRLVEGAGRSTMNGHVEIEMKKVSDEIKDKQQQIAHLERQIKGELDQLEHTPSHATLLEQVNEKAFELEVKTADNRILQDQLQQKTRECQALEETVAHLHEQLSQALEANDLLSESIIFQQYTDNNLQTGSQIHIENPESIDISDELHQKAEQSEIDELKQRLCELTEAKTQLETHNQKLQEESMYAKGLASAAGVELKALSGEVTKLMNHNERLANDLALARNSTRVRSGHRVGRRDSYTKRLEPASRRDVHASSERESALEVMLMAKDQREAELQKKIEESKQKEAFLEGELANMWVLVAKLKKGQVIDQDDVSMPYPMDRDS

SEQ ID NO: 51462 - protein, 533 aa, Zea Mays
MSGMSARIKEMVRVATARLGGEQAGGGGASSSGFARRESTARLGGGGTSLRRQPQPMAPSVRTVCCNDREANAPVGYKGNSVSTTKYNILTFLPKGLFEQFRRVANLYFLMISIMSTTPISPVHPVTNVVPLSLVLLVSLIKEAFEDWKRFQNDMSINNAHVDVLQGQCWESTPWKRLQVGDIVRIKQDGYFPADLLFLSSTNPDGVCYIETANLDGETNLKIRKALEKTWDYVIPEKASEFKGEVQCEQPNNSLYTFTGNLIMDKQTIPLSPNQLLLRGCSLRNTEYIVGVVIFTGHETKVMMNSMNVPSKRSTLEKKLDKLILALFATLFTMCVIGAIGSGVFINEKYFYLGLRGHVEDQFNPQNKFVVTILTMFTLITLYSTIIPISLYVSIEMIKFIQCTKFINNDLHMYHAESNTPALARTSNLNEELGQVEYIFSDKTGTLTRNLMEFFKCSIGGEMYGTGITEIEKGGAERAGIKIDDDEGKRSANAVHEKGFNFDDARIMRGAWRNEPNLEACKFFQRVRKLRKR

SEQ ID NO: 51463 - protein, 700 aa, Zea Mays
MLSLPLRRRRRLLRFCARRNPTFLRLSIAASAAALSTAPTVASAVVTPISDRLRVLRSLHAVAPDHLLSHPLPSSAHICLAAHLAARARLFAHSRRLLSRLLGAGHRPHLAASLVDILHRAALALGPHRSALPSVFDTLLSLLADHGLLDDAVRALARVRQLRVPPNTRTCNHILLRLARNRQGGLVRRLFEHLPAPNVFTFNIVIDFLCKQGELVEARALFVRMKAMGCSPDVVTYNSLIDGYGKCGELEEVELLVSEMRKSGCAADVVTYNALINCFSKFGWIEKAYSYFGEMKRLGVMANVVTLSTFVDAFCKEGLVREAMKLFAQMRVRGMMPNEFTYTSLVDGTCKAGRLDDAIVLLDEMVHQGLVPNVVTYTVMVDGLCKEGKVAVADDVLSLMERAGVKANELLYTTLIHGHFMNKNSERALDLLNEMKNKGMELDVSLYGTLIWGLCKVQKLDEAKSLLHKMDDCGLRPNTVIYTTIMDAFFKAGKESEAVALLHKIPDSGLQPNVVTYCALIDGLCKAGSIYEAISHFDKMRELGLDPNVQVYTTLIDGFCKIGSLSKAVHLMNEMVDKGMSLDKVVYTSLIDGHMKQGDLQGAFALKAKMIETGLQLDLYCYTCFISGFCNMNMMQEARGVLSEMIGTGITPDKTAYNCLIRKYQKLGNMEEASSLQNEMESVLSSCTEEDTASGSGCET

SEQ ID NO: 51464 - protein, 405 aa, Zea Mays
MASASSAQGAHETDPEKVKLVTVLSIDGGGVRGIIPATILAFLEEKLQELDGPDARIADYFDVVAGTSTGGLLAAMLTAPGQDHDGRRRPLFDAKDLAQFYIDHSPKIFPQKNWILSKIAGTLRMVRGPKYDGKYLHGLLRQHLGDMRLDKALTNVVIPTFDIALLQPTIFSSFELKRRPSKNALLADICISTSAAPTFFPAHYFETEDGDGRTRAFNLVDGGLAANNPTLCAMGQVSKDIILGDDDFFPVKPADYGKFMVISVGCGSNRDRRYSAKAAAKWGIFNWLIKDGTAPIIDMFNSASADMVDIHLCVLFRALHSSENYLRIQYDQLTGSAGSIDDCSKENMDKLVQIGKDLLSQNVSRVDLETGKNMDVPSAGTNAEQLAKFAKQLSDERRRRQKLSK

SEQ ID NO: 51465 - protein, 60 aa, Zea Mays
MSMKEEVQEARRVKMLCCPSKAMDTENEIQVLCDQLAEKSPDSLCLLKEAKSHNPYAFAA

SEQ ID NO: 51466 - protein, 1182 aa, Zea Mays
MVFKGRFFSSRHKSSESSSSPDGSNSPRTPTSAPASASAASPASSSSSRSDKKKTKSETPKKRDKLFGSAATAPKSAASSASSSPAGDGRKGSVPHHRDAGVGGGGGASAAALSPILASSLGLNRIKTRSGPLPQEGQRMAAVIGSSNLSRGQGQAEPSAASAGVGGRKGVTSWADTSSSSRGKGKTTELPMRSTAGTSLGPVGKSAVKAKPSAQRNHSGDLRTPTHIPEAACAYDPCETPKESESPRFKAIMQATSAPRKRLPADIKSFSHELNSKGVRPFPFLKPRGIYNLKEVIKVIHVRFEKAKEEVNSDLAVFAGDLVSVMEKYADSHPEWKDALEDLLILARTCCVMTPGEFWLQCEGIVQDLDDHRQELSMGVLKKLYTRMLFILTRCTRLLQFHKESGFAEDEVVIDQRDKIIQSADRQILTQSGVGDTTSRASKSEARKSYSQEQHNLKWKRSQEIKPVNLLPPLDTDVKKVADSPTKERISSWKPFPSPVTKVPKESTPTKLESPNKKTDAHSTVSSHVELSSPVESLPQQQLPVKHQHKTSWGHWSDQPNISEEGSIMCRICEEYVPTQYVEDHSRVCAIADRCDKKGVSVDERLIRVAEMLEKMVESYSPKDLPNAAVSPDVAKVSSSSINEESDGPSPKLSDWSRRGSADMLDYLQETDNTISLDDIKNLPSMTCKTRFGPKSDHGMATSSAGSMTPRSPLTPRSNHIDMLLAGKNAINESGDLPQIVELADIARCIANTPLDEESALSQMVTCIEDLQEIVNRRKHEALTVQTFGTRIEKLHREKYLQLCDSVDMDKVDSASTIMDEEDDVVRSLRASPVHPVKDRTSIDDFEIMKPISRGAFGRVFLAKKRTTGDLFAIKVLRKADMIRKNAVESILAERDILITVRNPFVVRFFYSFTSRENLYLVMEYLNGGDLYSLLRNLGCLDEDVARVYLAEVVLALEYLHSMHIVHRDLKPDNLLIAHDGHIKLTDFGLSKVGLINSTDLSGPAVSGASLYGDDEPQMNELEQMDHRARRQNRSAVGTPDYLAPEILLGTGHGCSADWWSVGVILFELIVGIPPFNAEHPEAIFENIMNRKIPWPHVPEEMSFDAQDLIDRLLTEDPHQRLGANGASEGEDSTGLNEFESSANVNYSFSNFSFKNLSQLASINYDLLTKGLKDDPPPRTEM

SEQ ID NO: 51467 - protein, 960 aa, Zea Mays
MVFKGRFFSSRHKSSESSSSPDGSNSPRTPTSAPASASAASPASSSSSRSDKKKTKSETPKKRDKLFGSAATAPKSAASSASSSPAGDGRKGSVPHHRDAGVGGGGGASAAALSPILASSLGLNRIKTRSGPLPQEGQRMAAVIGSSNLSRGQGQAEPSAASAGVGGRKGVTSWADTSSSSRGKGKTTELPMRSTAGTSLGPVGKSAVKAKPSAQRNHSGDLRTPTHIPEAACAYDPCETPKESESPRFKAIMQATSAPRKRLPADIKSFSHELNSKGVRPFPFLKPRGIYNLKEVIKVIHVRFEKAKEEVNSDLAVFAGDLVSVMEKYADSHPEWKDALEDLLILARTCCVMTPGEFWLQCEGIVQDLDDHRQELSMGVLKKLYTRMLFILTRCTRLLQFHKESGFAEDEVVIDQRDKIIQSADRQILTQSGVGDTTSRASKSEARKSYSQEQHNLKWKRSQEIKPVNLLPPLDTDVKKVADSPTKERISSWKPFPSPVTKVPKESTPTKLESPNKKTDAHSTVSSHVELSSPVESLPQQQLPVKHQHKTSWGHWSDQPNISEEGSIMCRICEEYVPTQYVEDHSRVCAIADRCDKKGVSVDERLIRVAEMLEKMVESYSPKDLPNAAVSPDVAKVSSSSINEESDGPSPKLSDWSRRGSADMLDYLQETDNTISLDDIKNLPSMTCKTRFGPKSDHGMATSSAGSMTPRSPLTPRSNHIDMLLAGKNAINESGDLPQIVELADIARCIANTPLDEESALSQMVTCIEDLQEIVNRRKHEALTVQTFGTRIEKLHREKYLQLCDSVDMDKVDSASTIMDEEDDVVRSLRASPVHPVKDRTSIDDFEIMKPISRGAFGRVFLAKKRTTGDLFAIKVLRKADMIRKNAVESILAERDILITVRNPFVVRFFYSFTSRENLYLVMEYLNGGDLYSLLRNLGCLDEDVARVYLAEVWGFTVWR

SEQ ID NO: 51468 - protein, 853 aa, Zea Mays
MAAVIGSSNLSRGQGQAEPSAASAGVGGRKGVTSWADTSSSSRGKGKTTELPMRSTAGTSLGPVGKSAVKAKPSAQRNHSGDLRTPTHIPEAACAYDPCETPKESESPRFKAIMQATSAPRKRLPADIKSFSHELNSKGVRPFPFLKPRGIYNLKEVIKVIHVRFEKAKEEVNSDLAVFAGDLVSVMEKYADSHPEWKDALEDLLILARTCCVMTPGEFWLQCEGIVQDLDDHRQELSMGVLKKLYTRMLFILTRCTRLLQFHKESGFAEDEVVIDQRDKIIQSADRQILTQSGVGDTTSRASKSEARKSYSQEQHNLKWKRSQEIKPVNLLPPLDTDVKKVADSPTKERISSWKPFPSPVTKVPKESTPTKLESPNKKTDAHSTVSSHVELSSPVESLPQQQLPVKHQHKTSWGHWSDQPNISEEGSIMCRICEEYVPTQYVEDHSRVCAIADRCDKKGVSVDERLIRVAEMLEKMVESYSPKDLPNAAVSPDVAKVSSSSINEESDGPSPKLSDWSRRGSADMLDYLQETDNTISLDDIKNLPSMTCKTRFGPKSDHGMATSSAGSMTPRSPLTPRSNHIDMLLAGKNAINESGDLPQIVELADIARCIANTPLDEESALSQMVTCIEDLQEIVNRRKHEALTVQTFGTRIEKLHREKYLQLCDSVDMDKVDSASTIMDEEDDVVRSLRASPVHPVKDRTSIDDFEIMKPISRGAFGRVFLAKKRTTGDLFAIKVLRKADMIRKNAVESILAERDILITVRNPFVVRFFYSFTSRENLYLVMEYLNGGDLYSLLRNLGCLDEDVARVYLAEVVLALEYLHSMHIVHRDLKPDNLLIAHDGHIKILGCPRLV

SEQ ID NO: 51469 - protein, 389 aa, Zea Mays
MAMVLPISAHPPLQAEDLPHGVVTMRCDITTCSSAHVSFLVSCSAQTCFDDQLLGSRIKNEIIEKRQLVRALLNNEDNKPSSYEPLPSMCVACGASTFEVWITMPKWAAQVLKHLAPEISYRSLVALGIAWVNGTPVSSFDRQDADRLLFFCSNQCGDQAIQNGSYAHVSSWSAPLTKDRTTGSLESKQMSFGAKGVVGDNTISLSSLKPRLKPATMRPLPHSRKQQMHPFMGFPQSIIHDASQVKPSLPAPPVKHNAVPVTAVTPRKSSSGSPSSWSRVQLPIPLNPLPIKKHECNRLPIHSCSEEDFLKDVMQFLLQRGHIRLVPQGGLAEFPDAVLNSKRLDLYNLYKEVVYRGGFYVGNGINWKGQIFSKMHNHTVTNKMTWCSG

SEQ ID NO: 51470 - protein, 544 aa, Zea Mays
MSASTEPEKDAAAAAATEGDEKTEAKDSGSGWELLYCGGTSFDAMGRKVVGGAQGNLVSPTRLRPLVGVDIRFVASGCTACHCVALDAGGKCYTWGRNELGHGDTLLRNLPTVVSQLSKYKIIKACVGRNHTVVVTDDGKSLSFGHNKHGQLGTGSLRNEIESSPVSCIVAEATNVACGADFTAWLSSVEGSSILTAGLPQYGQLGHGTDNEYNAKESSVKLTYEPQPRPRAIAAFSGKTVVKVACGTNHTVDSNGFVYTWGFGGYGRLGHREQKDEWQPRLVEVFQKHNVLPPNAIVSAGSVSSACTAGGGQLYMWGKMKNTGDDWMYPKPVMDLSGWNIRCMASGNMHHIVGADDSCISWGVAQNGELGYGPNGQKSSANPKKVDILEGMHVTSVGCGFGLSLIVVDRANVGDRLGQLEIYDGDTGAEVEKVEVQVTKKASASTNSRANKRKKTKDVSESESEEDDDDDEDESGDDENGGVEESKGRRGRKPANRGRGRGGKKATPEAKPSGRGRGRPKKTESSAQKAGGTSGRGKRGRPRK

SEQ ID NO: 51471 - protein, 209 aa, Zea Mays
MRRGYSYSPSPPRGYRRRARSPSPHDHYGGRGRDLPTSLLVRNLRRDCRPEDLRRPFGQFGRVKDIYLPRDYYTGDPRGFGFVQYYDPADAADAKYYMDGQVVLGRQITVVFAEENRKKPQEMRARDRVRGHSYDDRRYSRSRSPRYYRGRSPSRSQSYSRSPPQNPRHRLRERSYSGSPVDSRSRSGSPYEDGYRKSSRRERSLSVSG

SEQ ID NO: 51472 - protein, 153 aa, Zea Mays
MAATSIKVAHLTTLALFSPTPNPFGPKSSKHRARAPPPISISMDPALVDPAHLQALMLACGHSCTLRLSPALSVSAVEPVDLSKLRTALAHSFVVVSVFCGARFFTHDREREGEGQRFLGLEIGLDLQGERRLVGFGRAVSDLGLTASVHDIV

SEQ ID NO: 51473 - protein, 273 aa, Zea Mays
MFMHTAVYDNEILLSSFFFAAVTMRGIGLALVHSTGTLTPVESAASLPKLCSTLQLRTVQNSGTRRTTACSGSASQTRKRTGGRGPSSTSSSSNACRRSTGRSSRGSSSSRTAFSATPPAPTTNRRARSRSPWGGKRCRSSGRSTRWTSPSMATSTATKGHARSTSLSASSMDPTTTAARSRRRRTSLSAAQEPAFSILSSPPRRSSGATSPTSTTGSSSSRPSTIPPCCSSTRRAATATCMTISQSHATTGTSSLAPSTTAPGAHWLPEVPQ

SEQ ID NO: 51474 - protein, 407 aa, Zea Mays
MTDWVYMPWVTPSANPVRFVVRSPPPSCCQSRLGNRIVRESSMKGRLLLLLWAWAAATWVSVSAVTRLGRGVAGEQPLSRIAVERVVLAVNDAAYVKASPLVLGHKGENSEWADVEFFHPNPSDDDWIGVFSPANFSDAICEAENTGTPVLCTAPIKYQFANFENDGYNKTGKGYLKLQLINQREDFSFALFSGGLSKPKLISVSNKVAFANPKAPVYPRLAQGKSWNEMTVTWTSGYDITEAVPFVEWGEKGGRRLLAPAGTLTFDRNSMCGSPARTVGWRHPGYIHTSFLKDLWPDSPYTYRLGHRLMNGTRVWSKSYSFKASPYPGQDSLQRVVVFGDMGKAEADGSNEFSDFQPGSLNTTYQIIRDLEDIDMVVHIGDICYADGYLSQWDQFTAQIEPIASRR

SEQ ID NO: 51475 - protein, 438 aa, Zea Mays
MYSCWCVRPVAAVGLLCLVLAIESRPAEIDLLVDRSGSFPSVSRCLLGTGTGGGVAMALQYVEAQRQLRPDLSDWYASLADLYQRKLWHQLTLKLDQFLQLQTGDTIIQLYNNFIVDFETKINLLKLAHFAVITSRQYPDKDAAITFLEGVITKLRETRESRINEPILYVKMQIAAINLEKGNKKECKNLLEDGKTTLDSMTDVDPTVHASFYWISSQYHKACQEFAEFYKNALLYLAYTTVESLSESFKLDLAFDLSLAALLGDNIYNFGELLAHPIINSLIGTKVEWVYHMLQAFNSGNLALYQELCRVHNAALTAQPALVQNERKLLEKINILCLMEIIFSRPSEDRTIPLSVIAERTKLSISDVECLLMKSLSVHLIEGIIDEVDSTVHVSWVQPRVLGIPQVKALRDRLDAWVGKVHTTLLSVEAETPDLVAV

SEQ ID NO: 51476 - protein, 334 aa, Zea Mays
MASSSASSRHQVTITLGRSGQVVKRRAMSDDINDGELPLLGKKRSVRDRLGSNVSDSDFYESQQRNKRRQLESNSSHGDDGSDRLVGKGDLRLKLMRKGLLPRSNGSAEQNDIDLREKLSRNHKLPNYDSRGHAAESRASYDMRDEPPELSSRYSSREDVLGSRHSSVVSRVPYARSVDDLLKLDYSRKSYPSWTDDGLRHRSPERMLKVRSDMYPRIAYDQIRPMPPLRSAGSSRPQSFITRDAPDTSRSQPYAGKSTISIDTVQRTNGITPSTAALPKAPVMDEAPLTVTGLLNSLGLEKYVVLFQAEEVDLSALRQMGESDLKDMGVPMGT

SEQ ID NO: 51477 - protein, 161 aa, Zea Mays
MRFILLTPADIGLLIHTKIDSYLALNLKMLIRFCQKLQKSWYVSWPGGHPKIIHRDIKASNILLDFKFEAKVADFGLAKCTTDNNTHVSTRVMGTFGYLAPEYATSGKLTEKSDVFSFGVMLLELITGQRPIDTTQLAMLAISTYVLPFACCIILIPIAKL

SEQ ID NO: 51478 - protein, 286 aa, Zea Mays
MSVLMKRATELGVSLQVVHPLDPQKLEDQPLGLHGEHQYMNAGLAIALANTWLERQGHLNRLHVKHSGTLPDQFIKGLSSACLQGRGQIIPNSQVNSENDRDSSLVFYLDGAHSSESMEMCARWFAHATNSDGIQPGPSEQPHTDRDSRKFLLFNCMTVRDPQRLLPRLLDTCAQNGLHFEHALFVPNQSQYNKLGSLASPPSEREQIDLSWQLSLQKVWGNLPHHNKGLNDVNSSGATSVFESLPLAIKWLRETAQQNQSIQFQVLVTGSLHLVGDVLRLLKNNK

SEQ ID NO: 51479 - protein, 542 aa, Zea Mays
MVHIIAAIVKVRQVTGVSQETQELIDAELSARVLQLISVTDTGAHTQRYQELSKQRLDRAILIFVQSFRRSYVGDQAMHSSKQLYGRLSELLGLNDHLILLNVIVGKIATNMKCYAESEDVIDHTLSLFLDLATGYMTGKLLLKLESVKFIIANHSPENFPFLAEYKCSRSRTTFYYILGSLVFMEDSPVKFRTFMEPLQQVALNLEATPDAAFRTDVAKRAFVGWMRDLRGIAMATNSRKTYGLLFDWLYPSRMPLLLRAISLCTDEPEVTTPLLKFTYEFVLNKAQRLTFDSSSPNGILLFREVSKIIVAYGSRILLLPNGTDIYGSKYKGIWISLTVLSRALCGNYVNFGVFELYGDRALADALDISLKMTLSVPLSDILAFKKLSKAYFGYMEVLFNNHIKFVLNLDTNTFIHIVSSLESGLKGLDAGISSQCASAIDNLAAFYFNNITSGDSPPSPASVNLARHIGECPNLFPQILKTLFEIMLFEDAGNQWSLSRPILSLIMTSEQMFSELRAHILASQVVWCNCNAALRIVAACW

SEQ ID NO: 51480 - protein, 649 aa, Zea Mays
MQSMESLAQLEVLCEKLYNSRDSAERAHAESTLKCFSENSEYISQCQYILDNASTPYALMLASSSLLKQVSDRSLSLMLRLDIRNYVINYLGTRGPKLQNFVIVSLIQLVCRITKFGWFDDDRFRETVKEATDFLGLASQDHYFIGLKILNNLVTEMNQPNPAMPLTLHRKIAGSFKDQFLLQIFQISLTSLNQLKSEAPDDFGHIPLDLALKCLSFDFVGSPVDESSEEFGTVQLPASWRPLLQDPSTLQIFFDYYKVNDIRVSKEALECLVRLASVRRSIFVEDPARSQFLSHLMLGTKEILLTGQGLADHDNYHEFCRLLGRFKVNYQLAELLNVEFYGEWIGLVAEFTTRSLLSWQWASNSVYYLLSLWSRLVTSVPYLKGETPSLLDETVPKITEGFITSRINSVQAILADNSLENPLDSVEVLQDQLEFLPFLCRFQYQSSSLYIINIMEPLLQAYTERSRLPAPGDADELSVIEGQIAWMVHIIAAIVKVRQVTGVSQETQELIDAELSARVLQLISVTDTGAHTQRYQELSKQRLDRAILIFVQSFRRSYVGDQAMHSSKQLYGRLSELLGLNDHLILLNVIVGKIATNMKCYAESEDVIDHTLSLFLDLATGYMTGKLLLKLESVKFIIANHSVKSSASH

SEQ ID NO: 51481 - protein, 131 aa, Zea Mays
MPHLSRIPGVLSTGDVLQWLSGNATKSLDILAQYWQFLPQPNNPKSGDYGFSKSDMRRFGADEGRRVYKALENAADRLSSTLDLLLILTKRAQIWLQEDQMLRTQPFFSRTGGDLVLCTQRSGYQIRRMCI

SEQ ID NO: 51482 - protein, 197 aa, Zea Mays
MRRFGADEGRRVYKALENAADRKIKIRIVQHSGFAPDFDQESADLAAGRPNVENATVLFEDWWGSGVVHAKVWISDKKDVYIGSANNDWKSLTQVKELGIYFAGCPHIAKTVEVYFQNLWTLSTLNSTFYTKQAWDTQWQVSRKVPCWSHFLQPKERCRGGVKRISGLIYEETRGILKIFLEQCCWFRGSSRAHPAR

SEQ ID NO: 51483 - protein, 290 aa, Zea Mays
MVMMGIEFTGSVPFSYVYLHGLIRDAEGRKMSKTLGNVIDPLDTIKEYGTDALRFTLSLGTAGQDLNLSTERLTSNKAFTNKLWNAGKFLLQNLPDKNDVSAWDVLLSNKFDSEASLQKLPLPECWVVTGLHELIDKVSRSYDKFFFGDAAREIYDYFWGDFADWYIEASKTRLYHSSDKIAAATAQSVLVYVFENILKLLHPFMPFVTEELWQAFPYRKQALMVTPWPTTDLPKDLRSIKRFQNLQSLENCASYIKERKKSHTKDGILLSKFPKDPTHNRRTLQTGTKT

SEQ ID NO: 51484 - protein, 278 aa, Zea Mays
MMSLHGMSCCLISSTQKHHSRNCHCQNAGWLQDYMNSSIRYIEASKTRLYHSSDKIAAATAQSVLVYVFENILKLLHPFMPFVTEELWQAFPYRKQALMVTPWPTTDLPKDLRSIKRFQNLQSLIRGIRNVRAEYSVEPAKRISASVVATADVLEYVSREKQVLALLSKLDVQNVHFTESAPGDANQSVHIVADEGLEAYLPLADMVDVSEEVKRLSKRLSKMQSEYDALVARLNSPSFVEKAPEDIVRGVREKASEADEKISLTKNRLTFLQSTITT

SEQ ID NO: 51485 - protein, 203 aa, Zea Mays
MGRRGSYDRLEALSLEIERKLHKALMSNSQRLQILQQLFADIALKVDDRARDAIMSESDDGIAPADEREDGWLCFYEILANHFVRVPESGRRILELIVQLWSQSFAANIFALLFQKWLFEAPLDEKEISLRYSSALVQGATNVFWIDIQTNTRHFLSLYHYLLEDVALVPERLSKISLQAGRDLFLLLSRFMFFYDQASKAKN

SEQ ID NO: 51486 - protein, 782 aa, Zea Mays
MQYAYGATRLVLMDYDKSRRSNSKKRTHSNSDDGKRKRLNTRHDDTSMFSEPIETIYRILCPVKKIGSVLGRGGDIVKALREETKAKIRVADSIPGADERVIIIFNYQNEPEPTDEAAEEKNSDGLGNFKSHCFAQDALLKIHDKIVSDEIHDEVANDEKSESADDVTARILVQGNQVGCLLGKGGSIIQQLRSNTGAGIRVLPSENLPQCALKSDELVQISGAPSLVRKALYEISTRLHQHPRKENRPLEEIIDASTQRKRESPTLQHEYSMLPHLHSDHTPPIPLLDPYRSGPQYPVTETEEFSIRILCASELIGSVIGKSGANVRRVEQQTGARIKVQEIDKDASGERLIIISSNEIPAEPISPAIEALILLHDKVSAPSEKHHSSTRLVVPSSKVGCIIGEGGKVITDMRRRTGAEIRVYSKADKPKYLSFDDELVQVAGPPTIARGALTEIASRLRTRTLRDTSTANNPPPFAPFDDPPVDMPSRKLSLYGGPATDPPYGRPANDPLYGRPAIDPPFGRPTNDRPYGRTAVAPPFGRPANDPPYGRPTNDPPYGRPSGSIPYGRPNGSAPREPSDAYPVDYFSKREYPSGSPMFTSNAPSAAYERYAAPTRFPTREFPSAFSPGVDHMPHHSYRDHVPTDSYSSRGTQQLGITRGGNSDAYDYTEAAGQIHGREDYREPTSATGRFLSTIELRIPNSSLGSIVGAGGVNLAEIRQVSGARLRLHEAHAGSSESVVEIQGTLDQAKAAQSLLQGFISANSRQQQQPYSSRMPLYPSWG

SEQ ID NO: 51487 - protein, 450 aa, Zea Mays
MDYDKSRRSNSKKRTHSNSDDGKRKRLNTRHDDTSMFSEPIETIYRILCPVKKIGSVLGRGGDIVKALREETKAKIRVADSIPGADERVIIIFNYQNEPEPTDEAAEEKNSDGLGNFKSHCFAQDALLKIHDKIVSDEIHDEVANDEKSESADDVTARILVQGNQVGCLLGKGGSIIQQLRSNTGAGIRVLPSENLPQCALKSDELVQISGAPSLVRKALYEISTRLHQHPRKENRPLEEIIDASTQRKRESPTLQHEYSMLPHLHSDHTPPIPLLDPYRSGPQYPVTETEEFSIRILCASELIGSVIGKSGANVRRVEQQTGARIKVQEIDKDASGERLIIISSNEIPAEPISPAIEALILLHDKVSAPSEKHHSSTRLVVPSSKVGCIIGEGGKVITDMRRRTGAEIRVYSKADKPKYLSFDDELVQLSGCWASNYCKRSPHRNCFEA

SEQ ID NO: 51488 - protein, 165 aa, Zea Mays
MAKTKQGNKDVDSYTIGGTNKVVYVGDCVLMRASDSDNQPYVARVEKMEGDGRGSVRVQVRWYYRPEESKGGRRQFHGAKELFLSDHFDLQSAHTIEGKCVVHSFKNYTRLDNVGPEDFFCRFEYKAATGSFTPDRVAVYCKCEMPYNPDDLMVQCDACKHWPKS

SEQ ID NO: 51489 - protein, 78 aa, Zea Mays
MFLQCQQVQKVAISQDRRGPIGNGDALNEVGGPTNPTSNSRQGVDAPARRVLAPRIRSLDKRVLLTIVYSVIITVLYS

SEQ ID NO: 51490 - protein, 231 aa, Zea Mays
MRLNLYLPGYVAPEYAMTGHLLVKSDVYSYGVVLLELISGRKPVNISESKDPENLVTWARPLLSHKEGLEKLIDPSLDGNFNFDNVAKVASIASMCVHTDPSQRPFMGEVVQALKLIYNDPDEACDDSYSPRNSSDQDGDYEGDLVFESGSWGFGASGCLDYRNSLPFVTMDYSSGRIEGPHDPRAALSAGSHAQSPVLQNRSGPLRMKKKLASFYRSRGSISEHGHLPRH

SEQ ID NO: 51491 - protein, 225 aa, Zea Mays
MLDPGFKILQLCFLLAKRFHGICEVFEESGRTLVRGTLDYLQGLKMLGVKRTERVLPTGISLTVVGEAIKDDVGTIRIQRPHKGPFYVSPKSIDQLIMNLGKWAKLYRLASMGFATFGAFLLAKRAIQHFLERKRRHELQKRVLNAAAQRQAREAEGSIGSSDTEPNSKKDQLVLDICVICLEQEYNAVFVPCGHMCCCMACSSHLTNCPLCRRRIDQAVRTFRH

SEQ ID NO: 51492 - protein, 755 aa, Zea Mays
MSVAFGGPVMTKFTIALREIGTYKEVLRSQVEHMLNDRLLNFVDIDLHDVKDAHKRFDKASLSYDQIREKYLSLKKGTRPDITTAIEDELHSARSSFEQARFNLVTSLSHVEAKKRFEFLEAVSATMDSHLRYFKQGYELLHQMEPYINQILAYAQQSRERANKEQASLVERMHEYKRQIDRESRSSINGLNDSYNGDRMQTIGRSSHKQIEAVMQSTSKGKVETIRQGYLSKRSSNLRADWKRRFFVLDSRGMLYYYRKQITRPPAGCSMQRNVNPPEHGSGLLSRLFSSHYHIHDEKSVARHTVNLLTSTIKVDAEQSDLRFCFRIISPTKIYTLQAESAVDQMDWIEKITGVIASLLSSQSPEQCFMSSPKGSGHDRSTSDGSSFTSSVEFEPSVIDDLVLEKYSGNGQHDVIRGTHHHRTSMKPEKPIDLLRKVDGNNMCADCGALEPDWASLNLGALLCIECSGVHRNLGVHISKVRSLTLDVRVWEPSVINLFQSLGNMFVNNIWEDMLPDDNSSADGSDTSQYLSVSKPKHKDVFSAKEKFIHAKYVDKEFIRKRSMDENQLAEQMWNSVAANDKKTAYSLIVRSRANVNLVYGEMPSSPFLTLGKALQQEQPVSPPDGSPKFFDCNSHDKISPREPLSPASTSSRTDDMEDGCEGLSLLHLACRVADVGMVELLLQYGASVNMNDSRGRTPLHHCILKGRHRHAKLLLSRGADSQAMDRDGRTALQYAIDGGTSDEDILALLEDHSR

SEQ ID NO: 51493 - protein, 302 aa, Zea Mays
MGKRKQRGGGDGEPAAEGGAGGGHSPSTVFVSNLPYTFKSSDLEAVFSEVGPVRRCFMVAEKGSEKSRGFGFVQFATVQDADRALQQKNGSPVAGRKIRVKLAMNRAPLKERLQKGNMQVKDSDAKDEADEISPAEKHKGKSHKTDPEQLHLLSNDAKVSKEAPIGDSEKVKNSEKQRVAKTVIFGGLQDSAMATEVFRQAREIGSVVSVNYPLPKEEMRFNGLARDGCTSDMAAVLFASVKSAWDSVVQLHNKEVKGATVWARQLGGEGSKIRKWRAIVRNLPFKRRRSWICLVQQGLSGM

SEQ ID NO: 51494 - protein, 358 aa, Zea Mays
MGKRKQRGGGDGEPAAEGGAGGGHSPSTLEAVFSEVGPVRRCFMVAEKGSEKSRGFGATVQDADRALQQKNGSPVAGRKIRVKLAMNRAPLKERLQKGNMQVKDSDAKDEADEISPAEKHKGKSHKTDPEQLHLLSNDAKVSKEAPIGDSEKVKNSEKQRVAKTVIFGGLQDSAMATEVFRQAREIGSVVSVNYPLPKEEMRFNGLARDGCTSDMAAVLFASVKSAWDSVVQLHNKEVKGATVWARQLGGEGSKIRKWRAIVRNLPFKITEKEIVDMFSSAGFVWDVTIPHKSDEGISKGFAFVSFTRKQDAENAIKNINGKDVAKRPVAVDWAVPKKVYTVAAKVDAKDNGNRVIFC

SEQ ID NO: 51495 - protein, 323 aa, Zea Mays
MDAQRALLDELMGTARNLTEEEKKGHKELKWDDPDVCGPYMVRFCPHDLFVNTKSNIGPCSRIHDPKLKESFEKSPRHDTYMQRFEAELAQQCEKLVMDLDRKIRRGRERLAHDSAVPMPIPGKLAELLSVRKEQVKKLLEQIEELGEAGKVDEAEALMRRVDILNAEKTALANEADNKVAMLEKKMELCETCGSFLVADDALERTQSHVTGKQHIGYGMVRDFLAEYKQKRRQKRKSGLQGSRKQRSIGNRGEKSMIVGAGIEIPEGRGLGSVTLTVIVSMSEAEEEIGFMITGTEDQNTEAIATEMGGILKEVDTDTGVVV

SEQ ID NO: 51496 - protein, 573 aa, Zea Mays
MAAVAAATSHLLRHHRNPHLLLLRAAISSSRALPQQPELSPDPTAGTPDLAGAAPLPPNPSTGSPFYTQNWRNPAAANPPSSLLPTVVAGSPFGAQHFMAAFYDAPDVTGLKETFAKYMAEQRWEDMKHLFDHWVRSLDAATGKPNHPDVDLFNHYLRANLMTRALPHEMLDLADHMLEFELQPNAASYNLVLKSMVASQETEGAEKLIERMLQTGTFPDDESYNLVVGLLIRQNLVDSSLKYLDLMLKSGYTLSLTVFTDYIRACMRSGRLDTLTSIIEKCKTTDKNKVLCPEWTWCIDIADAAFEANNSKLALFALEYLARWIARGENVKPPVQLSVNEGLVISALSAAGRTYNTDLLNAAWSLLRKSLRQKRAPTPETYLAKIYAHSSIGQLQRAFGTLREFENAYGNSEDIDLELFSPFTSLHPLVVACCKDGFSTLDSEKFDLTPDIHSYNALLCAFGKLKQTGEACNVFQHVLTLGVKPNATTYSLLVDAHLANKDPKAALAIIDEMVDAGFTPSKDTLRKVRRRCSRESDFDSDEKVQSLAKQFNYRMGGENRREMLYSIEYNPVY

SEQ ID NO: 51497 - protein, 352 aa, Zea Mays
MHESGSGFYHHRTIQHQKAQVTPAAAISTINSGIGRNMCSTLNMSNSYGLSHKSGPADVTLDLQLKPPTRPELGINWKGLAPAPELSLSLFGKPMDEPEFPSTPNALFHSGTAGSSKKVSGEAAATLGSDKAPVEKIVTPVPCNVNPLNTTSATVSGIDQLPSNNLVKKEPEEISQQHIIDGAKKPNPLERQSVGQVIGCAESEKTDSAPQGARKIGFDLNSDIFANSSIHNESDVAAVDAPIPAKTLPDTCHDTSMPAVPEVDKFVKHEESTSATLSPVVETGNGHTTLLVEAKSQRSQGNVASPAVGLSESSSQPTVSTVCKPTAGHIRADEDTRQRSCDTNESCGALPS

SEQ ID NO: 51498 - protein, 217 aa, Zea Mays
MPPELGMSSRTVAGAVVNRRPRRLFGRSSERKNPLNLQFERQVARLEARQQQQRIKELVSSANVSDHRVFGDTEKLQNAKLCELHPASWFCVAWYPVYRVPRGNFRAAFLTYHSLGKLVHKKCSMDTNDGHTQVVSPVVGLQSYNDKGEQWFQLRCPDLKQLPIEDSLKTSPAEVHKERLRTLKMGALAMARAVVPKGSGESVNHHPDYEFFLSRCA

SEQ ID NO: 51499 - protein, 830 aa, Zea Mays
MFFLCQSLVGYPLLINNCGIHLLARCVIVTVIPFNFCYDFKSLSLTESASEDPSSRPTSPEENPETSSSPSILFLHLNAQDVSHRRWQDNSSRLLEDKPTTSNSMSDSDFLVNSFTKPSDNARPSRRKSKKKSKKHRQRCRKPTDGSEAKFREGNGAASAADVGDCEDSTLSPKHVGDIRFEETSPSSSVKEASEEAPESDDDEYHCCSGGSVSSASYCDEMELSKSTTSCPALCGQCPSSNLQYLDNTQNSAPTGPSQETCYAGSKANCNHDTKSLFIFRNERGSDPCEATEFCSSSSGFDENWIEKFDYDSGICSPKSVGTYGGDQAAHLCSDTTGDNDFCLVISRKRARKEKKMSLWKSYGAHASTPALDRNKKYVGHSSMQMTNEFNSNDWSHRQNHVSRIHPQHGNALKSSTKNFMQRPSIGCRETQYGFPAKESKLGASLNHSTGPREKTCGKLTGGFDKTAQQLYLDRDLSNALNSSESIRCETRSISSSEPTTPKSLKGNYTSESGESTDITIGALPMQKRRLQDLVRTDDASETISGRSSPCSESSTTELIAGHSTDSSIEGNHGCQGLCNSRTHLAQMLRVVNDACKVQVGADVLLAAGYPISDLEKFICSATPVIGRAPCMISNTCSLDQVVSDSVCQHDISNVSLRRIWEWYEEPGCYGLEVKALSNLSSKTSSSSSSEFFAYFVPYLSAIQLFGLSRNNMHHSFGVQGRELLISSNTASSMSSHPVHAKAHTLLEESNACLPESSLVVEDPGELIFEYFETEQPSLRPPLFENEFVSNGTFHDQVTMRDFFFWYCIGSTDQDVYELWPKARELILCP

SEQ ID NO: 51500 - protein, 536 aa, Zea Mays
MVRLHQLLSRTLASHQILASATSSVRSTPRLLLPLRLPPPAPPPHGRTLLPIIVAASRQYASSTFGRRGRSTRPPMLLRRKRARSPTRKGPGELRVQIGIEEALPDDPGILSIAETLRTDVGKAVKLALNDLEGSDYMTRDPSICNVDKYASIEVSVLLCDDDFIRKLNKEWRDEDHATDVLSMSQHIPELDIPILQLGDIVISVDTARRQAEERGHTLVDEIRILMVHGLLHLLGFDHEVSKVAEEEMEKEEEHILNTLEWRGKGLIKSAYDIATVMEHLQNSVEADSNIEKVILQEKHQPKLSHIICDIDGTIMDYEGGLHEKSIGSLREAIATGVNVIMVTGKSRASTIRTFKLLDFREKGDFISETSPGVFLQGSLIYGRDGKKVHRAELDLDVCKEALLYSLKHRIPLVAYCEEQCLTLFEHPFVELLHTVHNENKVKVMHSIEDLLEYSSIQKLLLFDSTKEDSSVLRQHFSELSRGKAHVIKMHSNTIDIVPLNTSKGGGLRILLDHLGITKDCDLDSIGDYTRWLSNK

SEQ ID NO: 51501 - protein, 133 aa, Zea Mays
MMNQLVFFLVLLLGFLRLRWWHAQSSSFPHSAQPRSISVPLNSLSVSSVGALGVGFMTWMDEFSEFPLPLWMFLPLEESQALFPLLLPPFFMWFYLCCVAITYYCTPSAFSTKEILRLFIFLLITAPQVVHST

SEQ ID NO: 51502 - protein, 376 aa, Zea Mays
MKMRSGVVVRISEIDPMKWPGSKWRSLLVRWEDGAECNGQDRVSPWEIEIAGGSVSVSHSLSASSSKRTKLCPQGNLDVPAMWNGCTDSMETGKLPRVLQGQELMSFRTCHVPCAPQTAEAAKLQSSDASRFLSNAHGCALGGPTSRLAVHSSGFTYQCVGFNESIGFSEVLQGQEISRAVPKFQGMMSEACSLKDRYGLHSYMRAPVAVNGLSATTQECSLALSTPPGAQVPSLYPGNVVNRTVVPQLGLARKFGGGGTNGQQSGPFDRPRELWTRPQHETPDQMNLDQFETRRPSVPVDAAKLGSGGGEVRKTSCRLFGFSLTEKILPADDDDVKEVSYETECQNPRMLDLFGYNCSTPSAALPALCAAAPFGM

SEQ ID NO: 51503 - protein, 186 aa, Zea Mays
MVKNEKLSSNILTPTTKAADHDVPVTPDEIIESGLMSKEDFHEAGSKALSLFAYGQKVALENGLILVDTKYEFGKTPDGTIVLIDEVHTPDSSRYWIANSYEDRFKSGLEPENVDKEFLRLWFKNNCNPYEDAVLPEAPEELVCELAWRYIFLFETITKTKFEILEAQEPIHERISRNVAQALRDL

SEQ ID NO: 51504 - protein, 542 aa, Zea Mays
MLTGRESLVRLIGRRRRSPLPASLVAALSLPSPSPSTSLAQADDGGGSGEAAGGEAGSTSGGSRVVGMGAEWVVCPVCGDSIRGSDYCVNTHLDMCLTRGTKRKLTQSTLLNFQFSKKVSAEPTINNLNNESETENMKQIDEGLSSDQAFFAFDSEIGSSKAGTTISSPTWELPTVATSCSFDECAVMDSSTVVVVDTVIVGRRFHENIELREDADITFMRDPQNAKDPDAIKVLHAGSECEEMLGYLPRDLAKVLAPLVDKHHVECEGSVVGLHEQQFGNVPIQITIQKCKSDNQRNNDPNCCQSLWENFVSIVKRENFRRPHSARYQTNFNLMIADVMVNHAHVFSDIEKSFLASFKSLSDDGQRLFIRIYTRKGPWFRKGSISYQEISDLEHAVMELELAGYIDMLSCTIDPFEYDMKEILDVLSVPEMKEILKELPKDNTICTRRHELVSTLLSSYRNGTCASLPKRILKWTGTCIRISKMADELLWRIQRLFFLNGDQDLSSFLLVEFGIVKFPDYVCSISHRIFQERNDLLEYEDV

SEQ ID NO: 51505 - protein, 577 aa, Zea Mays
MLTGRESLVRLIGRRRRSPLPASLVAALSLPSPSPSTSLAQADDGGGSGEAAGGEAGSTSGGSRVVGMGAEWVVCPVCGDSIRGSDYCVNTHLDMCLTRGTKRKLTQSTLLNFQFSKKVSAEPTINNLNNESETENMKQIDEGLSSDQAFFAFDSEIGSSKAGTTISSPTCMNDSLGTSETITSYAPSNTVLSDAKDAVNDGAGELPTVATSCSFDECAVMDSSTVVVVDTVIVGRRFHENIELREDADITFMRDPQNAKDPDAIKVLHAGSECEEMLGYLPRDLAKVLAPLVDKHHVECEGSVVGLHEQQFGNVPIQITIQKCKSDNQRNNDPNCCQSLWENFVSIVKRENFRRPHSARYQTNFNLMIADVMVNHAHVFSDIEKSFLASFKSLSDDGQRLFIRIYTRKGPWFRKGSISYQEISDLEHAVMELELAGYIDMLSCTIDPFEYDMKEILDVLSVPEMKEILKELPKDNTICTRRHELVSTLLSSYRNGTCASLPKRILKWTGTCIRISKMADELLWRIQRLFFLNGDQDLSSFLLVEFGIVKFPDYVCSISHRIFQERNDLLEYEDVRF

SEQ ID NO: 51506 - protein, 119 aa, Zea Mays
MEAMPRPSVAPSLQLQARPCPRWPRRKHCPPSSVASRRVACSASAADADVVDLFDAAKLTVDKFVTSGMVVGLGSGPASALAIQYLGTRLRRGSLAGITAVTSQVRAQCERGRQGRDTG

SEQ ID NO: 51507 - protein, 160 aa, Zea Mays
MYQDPRDACSAIAAESYKLWLEHENRTDDITIIIVHIRDMENAGSDKADYGSIGASIAGQTIQSEIPVFVQPEASNMNRSAATGMRSPSFGSPTERSLSCVAPSPTDPLLIHGRVSDASKPGQSEQRAASQPPVQTWHQIDGVTTELERSMQQSILPTSC

SEQ ID NO: 51508 - protein, 451 aa, Zea Mays
MGCAQGKCCLPRHPRRGSAAVGGRGGATLGRAAVPGAGLVLEYAALAVAGLYPDSPARESQDTHLVATRFAGDPDLHLFAVFDGHGAAGASCAGFARDALPRLLLASLAAGPAAAFRDAMLAANAEMHAAPGVDDSMSGTTAVAALVAGGALHVANVGDSRAVAGVWRAGRLVAEDLSWDQTPFRADERARVKACGARVMSVEQVEGMRDPEDVGWTPNEGDPPRVWARDALYPGTAFTRSLGDLAAEAVGVIAEPEVKSVEITPSHLFFVVASDGVFEFLSSQEVVDRVAMYQDPRDACSAIAAESYKLWLEHENRTDDITIIIVHIRDMENAGSDKADYGSIGASIAGQTIQSEIPVFVQPEASNMNRSAATGMRSPSFGSPTERSLSCVAPSPTDPLLIHGRVSDASKPGQSEQRAASQPPVQTWHQIDGVTTELERSMQQSILPTSC

SEQ ID NO: 51509 - protein, 590 aa, Zea Mays
MGMDAGGGKLPYSYAGQQDGGKLVKSVSRVEPRRFGLGLVAGFLLVTCAYFSTAKFDAIQIAMTSRPVSSNAGGVGVGSLEVGGVVAAADTYNASRQGLDLGKKGPGATSMADEGSEAEALEKDGGKASSPSGPGSWSGVPAALLPPVSSEEAANSTLESGGLEDEELQVQDAVASGSKRSKDSAAAAAATRSANVSSPSVVHSHHAILPAPAQRIPEVKQADSETTPAREREWKPLCDVTSNRRIDWCELDGDVRVVGANASVTLVAPPGADNRTFRAESWRIKPYPRKADRGYTGNYFHAFTDVILPLFLTARRYAGEVRLLVADLQPWWVGKFLPVFRSISKYELVDLDRDPRVRCFRHVQVGLTSHADFSIDPRRAPNGYSMLDFTRFMRAAYGLPRGDVVAAAPARRPRLLVVARARTRRFVNTEEIVRGAEAVGFEAVVSEGTHEVAPFAELANGCDAIMGVHGAGLTNMVFLPTGGVVIQVVPLGGLEFVAGYFRGPSVDMGLRYLEYRIEPEESTLVDQYPRDHPIFTDPNGIKSKGWESLKDAYLDKQDVRLDMERFRPTLQEAIAHLRKAKAKANGDGNN

SEQ ID NO: 51510 - protein, 270 aa, Zea Mays
MNLCNASVTLTSATVASATGNSTPVITFCLALLLRMEVVKLRSVSGIAKVTGVALCLAGALVIALYTGPSLSPVNRHHRASGGAHGFKAPTRGGTWVTGTFLMLLSNVTWSLWTVLQGALLKEYPNKLLVTTSQCLFSTAQSFVVAAVAERDFSKWALKLDVSLIAVAYTIKGPVFLAVWNPLCFVLTIFCSSFFLGENVHLGSIVGGILLVCGLYSVLWGKTLEVHQTVESGDNTVGEVQNGQEEKNHQQKVLEKGRQEEASMTAPGVV

SEQ ID NO: 51511 - protein, 353 aa, Zea Mays
MDAKKPYMLAITTVAIYTGMYVVSKAAFNQGMNSFVFVFYRQAAASLLLLPIALVLERKNVRSMSSGLILKLFLLALIWNTLGMNLCNASVTLTSATVASATGNSTPVITFCLALLLRMEVVKLRSVSGIAKVTGVALCLAGALVIALYTGPSLSPVNRHHRASGGAHGFKAPTRGGTWVTGTFLMLLSNVTWSLWTVLQGALLKEYPNKLLVTTSQCLFSTAQSFVVAAVAERDFSKWALKLDVSLIAVAYTIKGPVFLAVWNPLCFVLTIFCSSFFLGENVHLGSIVGGILLVCGLYSVLWGKTLEVHQTVESGDNTVGEVQNGQEEKNHQQKVLEKGRQEEASMTAPGVV

SEQ ID NO: 51512 - protein, 411 aa, Zea Mays
MQGRMRGARRSARGESSRKAAGREVEPFTLCGEMSHLTRATSEPCRRARGAAFARRARPFSAYELVSAREAGRAGGAGFSAADRAYLGRQHIPTKGPWGVDDVESEAYVSQFSADGSLLIAGFRGSRIRVYDAEKGWKIHKDISCRSVHWTVSDIALSPDQRFLAYASLTPIVHIVNVQNAGKESHANITEIHEGLDLTGGDEDEDFGIFSVKFSKDGKEVVVGNNEKSIYVYDLSANKVSARIRAHKADVNAVTFADETGNVLYSGSDDSLCKVWDRRCLSGEKSAGILTGHLDGVTFIDSRGDGRYFISNCKDQRIKLWDIRKMSSVVRSRPVSLVDWDYRWMPFPSEAHNLKHPGDQSVATYRGHSVLRTLIRCYFSPVHRSGTADIFIYVTSILKFSFEILSKGYIC

SEQ ID NO: 51513 - protein, 174 aa, Zea Mays
MQGRMRGARRSARGESSRKAAGREVEPFTLCGEMSHLTRATSEPCRRARGAAFARRARPFSAYELVSAREAGRAGGAGFSAADRAYLGRQHIPTKGPWGVDDVESEAYVSQFSADGSLLIAGFRGSRIRVYDAEKGWKIHKDISCRSVHWTVSDIALSPDQRFLGNMPVFIECI

SEQ ID NO: 51514 - protein, 269 aa, Zea Mays
MQGRMRGARRSARGESSRKAAGREVEPFTLCGEMSHLTRATSEPCRRARGAAFARRARPFSAYELVSAREAGRAGGAGFSAADRAYLGRQHIPTKGPWGVDDVESEAYVSQFSADGSLLIAGFRGSRIRVYDAEKGWKIHKDISCRSVHWTVSDIALSPDQRFLAYASLTPIVHIVNVQNAGKESHANITEIHEGLDLTGGDEDEDFGIFSVKFSKDGKEVVVGNNEKSIYVYDLSANKVSARIRAHKVCNHLINTTFFLKNAGEQYLI

SEQ ID NO: 51515 - protein, 179 aa, Zea Mays
MAAPYYGGPPAAPAPVAVVSPQFCAPYVVPLTVTKKAISLSDGDFTVTDANGATVLQVKGAVFSIRHRRVLLDAAGQPILTMLEKMGGVQRGQLERERPALHREEILDIPAEDGDGHLPGLQHRAAGVRLQDQGQLLREVVRLLPRQLQQHDRPDEPPVYRHQCAAWKGHVWRHCVPAR

SEQ ID NO: 51516 - protein, 164 aa, Zea Mays
MPIVQYLGLADWLLLPAVNSASQLTCCCGAAIPRHSYRCIVAWLGVVAPSSLSSKSPPRMLGSLVARLSISRSSDLMPQQHRGCPSSRCCYLPCYCNRASCAARLKYLSQVNILRDSCSVRPNYSVEEDSKSCGLKRKVELRSILVSCLFEDLNQRLSSFSQIK

SEQ ID NO: 51517 - protein, 192 aa, Zea Mays
MCSVARLAFVLALAIAASSIEVAESRDFNIFAQGSLPDATKGSSGLAATSGKLCQLCEQYSSEALLYLTQNETQTEILSILHHECASLAPLKQQCITLVDYYVPLFFLEVSMVTPEKFCESMHLCKKGMKISLPTREGTCGLCHHVVVEILIMLKDPNMQLEVIDLLTKTCSKAQNYEHASGWSSSIFHLFW

SEQ ID NO: 51518 - protein, 319 aa, Zea Mays
MLDCVAQRETILPFVLYIQKTLRRRPFLIKNLENVMRKFLQSLEFFEENERKKLAIFTALAFSQKLSGLPPETVFQPLLKDNLVAKGIVLSFITEFFKEYLKENTLDDLIALLKKGKMEDNLLDFFPSAKRSSEALSEHFIKEGLTSLVEYNEKKMFEVKLKEIKSTLTTMINDEAAIPEVIETVKQQVKDAKFPDLEVIRMLWDVLMEAVQWSGKNQQQNSNAALRQVKAWAELLNAFCTSGRLELELIYKVQTQCYEDAKLMKLFPEIIRTLYDQDVLAEDTVLLWFRKGSNQKGRQSFVKALEPFVKWLEEAEEEE

SEQ ID NO: 51519 - protein, 469 aa, Zea Mays
MNEGKEESENCCVDKLEDMEVGNCPTRCCKDASHSSASRKKVVPSISENQACCATTFCNERSWETNAWRARLVKAVCQKESILPTNTENPILPSSIGISCDAVEFSGKLVGSQGKFQSLGVSSNALEIHSHDNCQDPVLHESHKDEPVIARGESASGVNIVARCESVPGVDSSNFVRGKEKVMYNDSNCGNNTREGDDSNESIESCTSTKAPKRKHAQCCAATMPSSGNKRFRREDNESSCSGLLQKCGTSFFNWMSSLTNGLPMLDGATAAVPLEQKFSASTGDGSAAPSQPLQNNRSVPMQFFGFNSLFQSLYTRNVMITSGDNCRQPESNCAGHVFNRLTLELNDSNSMLNKEIGMGRETLDLATQTSAAEGFQMISGGCRGNVQSQIDIFQMRPERNMKLPSSSKFSSRSLEEKQNQCTAACSNDATQNKGGLRESLWVTRLLPKASVELMEGTPCNVENAVSPQ

SEQ ID NO: 51520 - protein, 264 aa, Zea Mays
MTLFVCFWKYDLARLIIGSEGTLGVITEVTLRLQKLPSHSVVAMCNFKTIKDAADVAIATMLSGIQVSRVELLDEVQIKAINMANGKNLPEVPTLMFEFIGTEAYALEQTLLVQKIATEHHGSDFVFVEEPDAKAELWKIRKEALWAGFAMKPDHEAMITDVCVPLSRLAECISTSKRLLDASPLTCQEDQRKEAERLNHFMVHTALSMEGTCTGEHGVGTGKMKYLEKELGIESLRTMKRIKAALDPNNIMNPGKLIPPHVCI

SEQ ID NO: 51521 - protein, 169 aa, Zea Mays
MAAPPARARADYDYLIKLLLIGDSGVGKSCLLLRFSDGSFTTSFITTIGIDFKIRTIELDGKRIKLQIWDTAGQERFRTITTAYYRGAMGILLVYDVTDESSFNNIRNWIRNIEQHASDNVNKILVGNKADMDESKRAVPTAKGQALADEYGIKFFETFWIPGPLFGFQ

SEQ ID NO: 51522 - protein, 827 aa, Zea Mays
MAFLPCLIIFNFQVLAALGQDYFDHILPDIIRNCSHQKASVRDGHLTLFRYLPRSLGGVFQNYLQAVLPAILDGLADENESVRDAALSAGHVFVEHYATTSLPLLLPAIEDGIFSDNWRIRQSSVELLGDLLFKVAGTSGKAILEGGSDDEGASTEAQGRAIIEVLGREKRNEVLAAIYMVRSDVSLTVRQAALHVWKTIVANTPRTLKEIMPVLMDTLISSLASSSSERRQVAGRSLGELVRKLGERVLPSIIPILSQGLKDPSASRRQGVCIGLSEVMGSAGKHQLLSFMDELIPTIRTALCDSTQEVRESAGLAFSTLYKSAGLQAIDEIVPTLLRALEDDDTSATALDGLKQILSVRTAAVLPHILPKLVQPPLSSFNAHALGALAEVAGPGLNSHIRTVLPALILAMDDEDVDVKNSARKAAETVLLVIDEEGVETLIPELLRGITDSQASMRRGSAYLIGFLFKNTKLYLADEASDMMSTLIILLSDTDKATVSAALEAFSRVVASVPKEQLPTHIKLVRDAVSTARDKERRRRKGVPILLPGLCLSKALQPFLPIFQQGLISGSAETKEQAAEGLGELIDVTSEKTLKEVVVPITGPLIRILGDRFPWQVKSAILSTLTIIIMKGGIALKPFLPQLQTTFVKCLQDNNKSVRTRAAAALGKLSALSTRVDPLVSDLLSMLQSGDESVKESVLSALKGVIKHAGKSVSAPIRSRGCALLEDLLQAEADDIRSCAAKVIGTLSQYMDDREIPDLVQILLEVGTSSDWCTRHGALLALSSISMHSPSKLCDLASFPSLVDLLKDSLKDDKFPVREVATRTLEG

SEQ ID NO: 51523 - protein, 84 aa, Zea Mays
MFALAAAGTTLSRAMAKRPVVAVTVERSRGMNPTVAGYLALWLPGLAWSCPAPTGTAAAALRMVPRRALATLVTVARARRRGVV

SEQ ID NO: 51524 - protein, 247 aa, Zea Mays
MPIASKLVYFQRRPAPAPPDDPGPEPPDPRRPRRRRRSGSLSSSHQKPEHDVPGHQRDHAAAAKPPGPVGKAAGLLHTASSAGLHHRSTSGSDHGRLPDAVQQARERLLQRLGSVDLVLAAGRRSSHKTWPLQTLWAGAGGLARPVVDASSGGGQTSCFQFQFQPGEREPIPVFPKPAASAVQEAEDGRAAPADAASDCSICLERCGAGGGLTQLRCGHVFHSACLQRWLRSRADCPYCRATVRARS

SEQ ID NO: 51525 - protein, 206 aa, Zea Mays
MMFQGTKGITLLQPSLRGQSERQQGFFTRPPAQGFTTAARRGRTTAGFPTPCSRPGNGSFRGSAAWTWSWRRDEGTRHGRCRHSGLELEDSLAPSLTPLRAAVKPAASSSSSSPVNVNPSLCSPNRRPPRYRKQKTGEPRPRTQLLTAPYAWRGAAPAAGSRSCAAGTSSTPPACSAGCGPAPTAPTAGPPCELAPNSRKEGRMDE

SEQ ID NO: 51526 - protein, 805 aa, Zea Mays
MSNVTVCVRFRPLSHKERKANGDNVCFKRLDSESFVLKDEREEDVVFSFDKVFYEDAQQSDVYNFLAVPIVSDAINGINGTIITYGQTGAGKTYSMEVEIYLEKVRDLLDLSKDNLQIKESKTQGIYISGATEISILNSSDALENLSQGIANRAVGETQMNLASSRSHCLYIFSVQYGCTSDERVTTGKIILVDLAGSEKVEKTGAEGRVLDEAKTINKSLSALGNVINALTTGKQNHVPFRDSKLTRILQDSLGGNSRAALLCCCSPSPSNAAESLSTLRFGTRTKLIKAPPKLIPESVDNTKKPAVETHDQDDLRDRILSKLRLSLKEEDVDLLEELFVQEGIIFDASSVVDIDSVFRDTASEEISLLMQAVEELKETVEEALQLTDENEKLRRSLQVAQEMTTQAQLAAAAAVAGAARSRTLLDFVPAVLFRPFGKLKIFVGSSTGQDAHVAPHPTVPGSHSPSRRAVSLSPQTPLLLSFSIHLSTVTMATATTSAYHCNAVLHLPRPPQFRRLLPPLPSLVTRRAASVGLGVARLGSRARARASSVPPPPPFFETVEEEEEEEEERGWSDAEAGFSDEAEDEQEWSGGNGAARGEDLGADAGEDLSGWARQWPRPRELFVCNLPRRCDVQDLLELFTPHGTVLSVEISRDAESGISRGTASVTMRSLAEARAAIDALDGFDMDGREVFVKLASDVISNRKNVNLAHITPTKDHIFETPHKVYVGNLAWSVQPQDLRELFTQCGTVVSTRLLTDRKGGRNRVYGFLSFSSAQELEEALKLDRTVFFGRDIVVKEAHVERQTR

SEQ ID NO: 51527 - protein, 841 aa, Zea Mays
MSNVTVCVRFRPLSHKERKANGDNVCFKRLDSESFVLKDEREEDVVFSFDKVFYEDAQQSDVYNFLAVPIVSDAINGINGTIITYGQTGAGKTYSMEGPSILHCNEQKTGLVQRVVDELFICLGSSASTWTVKLSMVEIYLEKVRDLLDLSKDNLQIKESKTQGIYISGATEISILNSSDALENLSQGIANRAVGETQMNLASSRSHCLYIFSVQYGCTSDERVTTGKIILVDLAGSEKVEKTGAEGRVLDEAKTINKSLSALGNVINALTTGKQNHVPFRDSKLTRILQDSLGGNSRAALLCCCSPSPSNAAESLSTLRFGTRTKLIKAPPKLIPESVDNTKKPAVETHDQDDLRDRILSKLRLSLKEEDVDLLEELFVQEGIIFDASSVVDIDSVFRDTASEEISLLMQAVEELKETVEELTDENEKLRRSLQVAQEMTTQAQLAAAAAVAGAARSRTLLDFVPAVLFRPFGKLKIFVGSSTGQDAHVAPHPTVPGSHSPSRRAVSLSPQTPLLLSFSIHLSTVTMATATTSAYHCNAVLHLPRPPQFRRLLPPLPSLVTRRAASVGLGVARLGSRARARASSVPPPPPFFETVEEEEEEEEERGWSDAEAGFSDEAEDEQEWSGGNGAARGEDLGADAGEDLSGWARQWPRPRELFVCNLPRRCDVQDLLELFTPHGTVLSVEISRDAESGISRGTASVTMRSLAEARAAIDALDGFDMDGREVFVKLASDVISNRKNVNLAHITPTKDHIFETPHKVYVGNLAWSVQPQDLRELFTQCGTVVSTRLLTDRKGGRNRVYGFLSFSSAQELEEALKLDRTVFFGRDIVVKEAHVERQTR

SEQ ID NO: 51528 - protein, 492 aa, Zea Mays
MGLFDRLPPMDHMRSEKMCFVQLIMPAESSRLAVTYLGELGLLQFKDLNEDKSPFQRIFVNQVKRCAEMSRKLKFFSDQINRAGLRSSVRPALEPDIDLEELEARLGEHEHELLEMNTNSDKLKQTYNELLEFKLVLSKAGHILASSHSHAASAEHELDENIYDNGIHEGNAYLLEQVEKAVFVVFFSGEQAKAKILKICDSFGASCYPVPEEMVKQRQIFNEVSARLSDLEVTLDAGIQHRNKALESIGSQLWRWTIMVKKEKAVYDTLNMLNFDVTKKCLVGEGWCPIFAKSQIKDCLQRSTIHSNSQVGTIFHEMDTIESPPTYFRTDKFTNAFQEIVDAYGVARYQEANPAVYSVVTFPFLFAVMFGDWGHGICLLLGALVLILREKRFSSQKLGSFMELAFGGRYVILLMAIFSIYCGLIYNEFFSVPFHIFGKSAYECRDKSCSLGGRERVKKGVGKREASFLIFSQPSRKMKRQVEICWGGGYLY

SEQ ID NO: 51529 - protein, 207 aa, Zea Mays
MRSSFGEVVSNDMYAYLKRNTRLVLSVESEEGGQKDGDATEPEQKVHEPSSETKHKQAKKKATQATISSFVVSAHPTQKSGKSVAAMFCKTPEEVVADRHKNKTTQSTLEACTKKGKEAKQIVNDHVADFLYENKIPLHVVNSRSWEVMLESIGQFGPGYSGPSYHDVRVPWLDRVVDRATTLRSKHEQAWKEYGCTVFESREILLH

SEQ ID NO: 51530 - protein, 396 aa, Zea Mays
MYGSPVSKDLNLPAQPPPMASSGLLRYRSAPSAVLGGLCEDQLQLPAAAPSAADNVFSRFLPDHHIRDDKPSPAHFPSAADMASHHQQEQMMFHSQSQSQHQQETGRSGGGLYRTVSSGMEAGGTGVGAASSLIRQSSSPAGFLDHFGMDNGYGAMLRASMGMGFQDGGASDSLAGGGGGSGRLGGQLSFSSRQGSLMSQISEMDSQEDVVGASSPDAGGGGDAAYMPGYPMSSGGWDDSSSALLPDSLPATNKRPRDSLEHGGGLAHQFSLPKTSSSEVAAIEKFLQFQDAVPCKVRAKRGCATHPRSIAERVRRTKISERIRKLQELVPDMDKQTNTSDMLDLAVDYIKDLQKQVKVTSSGGRRSAFLLQNPNCKVREPVTSKSRRLASSCPAG

SEQ ID NO: 51531 - protein, 146 aa, Zea Mays
MCVTYVAEIYRNLMASELIRRPRSNYMETLQQDITASMRGVLIDWLVENCIQTHKLQLLGITSMLIASKYEEYSAPSAEEFCNITAGTYAKAEVLEMEQQVLNDLGFHLSVPTTNTFLRRFLRAAQASRTVRSVPKPHCNESFQSI

SEQ ID NO: 51532 - protein, 156 aa, Zea Mays
MCVTYVAEIYRNLMASEVSDEYKLVADTLYLTVYLIDQFLSQNCIQTHKLQLLGITSMLIASKYEEYSAPSAEEFCNITAGTYAKAEVLEMEQQVLNDLGFHLSVPTTNTFLRRFLRAAQASRTVRSVPKPHCNESFQSICIVLNTKLASYISRLI

SEQ ID NO: 51533 - protein, 268 aa, Zea Mays
MCVTYVAEIYRNLMASELIRRPRSNYMETLQQDITASMRGVLIDWLVEVSDEYKLVADTLYLTVYLIDQFLSQNCIQTHKLQLLGITSMLIASKYEEYSAPSAEEFCNITAGTYAKAEVLEMEQQVLNDLGFHLSVPTTNTFLRRFLRAAQASRTAHLTTLNYLASYLAELTLISYDFMKFLPSEVAASSIFLAKWTLDQSDHPWNPTLEHYTSYKSFDIRTCVRALQELQHNTSNCPLNAIREKYGQQKFECVANLRSPELLRSLFS

SEQ ID NO: 51534 - protein, 454 aa, Zea Mays
MAARKKKPLLIACQATSARITRSQAAANSTRSGLAPSVPVPLKTEHNHAAKKKMKREASDENASADAGASAPLPKRRTVLKNVTNISCAKISKRCTAVTGLKLGPSQKAGQSINKQCTNKISMLLPLAVGGSSLVDDSNNAEETQMVDLLAQKEKQIVLLKEAQPLQNTEQNKGGACDEASVEERNAMNVHETAALKAGVSNGLNIVDIDKNNGDPQMCVTYVAEIYRNLMASEVSDEYKLVADTLYLTVYLIDQFLSQNCIQTHKLQLLGITSMLIASKYEEYSAPSAEEFCNITAGTYAKAEVLEMEQQVLNDLGFHLSVPTTNTFLRRFLRAAQASRTAHLTTLNYLASYLAELTLISYDFMKFLPSEVAASSIFLAKWTLDQSDHPWNPTLEHYTSYKSFDIRTCVRALQELQHNTSNCPLNAIREKYGQQKFECVANLRSPELLRSLFS

SEQ ID NO: 51535 - protein, 245 aa, Zea Mays
MAARKKKPLLIACQATSARITRSQAAANSTRSGLAPSVPVPLKTEHNHAAKKKMKREASDENASADAGASAPLPKRRTVLKNVTNISCAKISKRCTAVTGLKLGPSQKAGQSINKQCTNKISMLLPLAVGGSSLVDDSNNAEETQMVDLLAQKEKQIVLLKEAQPLQNTEQNKGGACDEASVEERNAMNVHETAALKAGVSNGLNIVDIDKNNGDPQMCVTYVAEIYRNLMASEALFYACLMFSL

SEQ ID NO: 51536 - protein, 308 aa, Zea Mays
MSCLCWFKRRSRKGRSSSSGKRGASSTATVSVSGPATATATTTTTASAESTSRSDDSGAVRPVSKSAGSSQSQRSISSLYEERGHGQLRVFDYDELQGATAEFGRAQKLGEGGFGSVYKGFIRAADGKGDRVPVAVKKLNQRGMQGHKQWLAEVQFLGVLEHPNLVKLLGYCAVDSERGAQRLLVYEFMPNKSLEDHLFRRANPPLPWNRRLQVILGAAEGLAYLHEGEVQVIRCSSSLHYWSCAFNLPPKDSLSSMVFFKWESILASKSHPDYSPQRFQEANFFDVSGKHSSMFKARTCRRRSQFQL

SEQ ID NO: 51537 - protein, 244 aa, Zea Mays
MTMKQSRFKRICVFCGSSQGKKASYHDAAVELGNQLVARSIDLVYGGGSIGLMGLVSQAVYGGGRHVIGVIPKTLMTPEISGETVGEVRAVADMHQRKAEMARQSDAFVALPGRAAERGRLLQLAADLHRQGRGGGLHQPQRPPHHRARAHRAGAHGQARGVRALPRQGGVHAQLGDHDGPPGLLTPTLPEPPAGDWDDISDPSMPFRKQAFSLPSDWGFCFVFNCMQIGFIWSAGGREKKKTG

SEQ ID NO: 51538 - protein, 136 aa, Zea Mays
MGSLCCVAARPHGASTASREWSSISRSDPPWRTGAGFSPPLSRGWEYRINSEGLSYGSHGDSGVAVNYGSSLSSNSKGASRSWERNELPQDHRYSTSEGAISYLNSPDISFQNHHIMLPMLQDSSVDEYMRVLDCR

SEQ ID NO: 51539 - protein, 320 aa, Zea Mays
MSRFPQYRHRDFYIAGESYAGHYVPQLARKIVEYNEASPHPFINLKGILVGNAVTDNYYDNIGTVTYWWTHAMISDRTYKAILRWCNFSSSSISRPCNRAMSYAMNHEFGDIDQYSIYTPSCAAAARANATVLRFKNTLVRRRRSSGYDPCTETYAERYYNRMDVQRAMHANTTGIPYRWTACSDVLIKTWQDSEFSMLPTYKKLMKAGLRIWVFSGDTDSVVPVTATRFAISHLGLKIKTRWYPWYSAGQVRNLPLLLLLLVTSSEFGAHVQVGGWSEVYEGLTFASVRGAGHEVPLFQPRRAFRMFRSFLAGEPLPKS

SEQ ID NO: 51540 - protein, 483 aa, Zea Mays
MATTRPRGEGGAASGALVMAIVVVVAIVLLLLPYGAGAEECEDGMSTRARAGDRVEALPGQPAVAFAQYSGYVAVDRDRGRALFYWLTEAVGDDAAAKPLVLWLNGGPGCSSVAYGASEEIGPFRIKPNGTGLFLNKYSWNREANLLFLESPAGVGFSYANTTSDLKTSGDERTAQDALQFLVSWMSRFPQYRHRDFYIAGESYAGHYVPQLARKIVEYNEASPHPFINLKGILVGNAVTDNYYDNIGTVTYWWTHAMISDRTYKAILRWCNFSSSSISRPCNRAMSYAMNHEFGDIDQYSIYTPSCAAAARANATVLRFKNTLVRRRRSSGYDPCTETYAERYYNRMDVQRAMHANTTGIPYRWTACSDVLIKTWQDSEFSMLPTYKKLMKAGLRIWVFSGDTDSVVPVTATRFAISHLGLKIKTRWYPWYSAGQVGGWSEVYEGLTFASVRGAGHEVPLFQPRRAFRMFRSFLAGEPLPKS

SEQ ID NO: 51541 - protein, 591 aa, Zea Mays
MAMTPHASAATVAVTPALRFPHTLSATGLSSPPLAGGCGGCRVRFRPSQRGRGTQGRRGGSHVSRVGGLLGTVFGGGGRDDGEATRKKYADTVARINSMELEVSALSDADLRARTAALQDRARSGESLDSLLPEAFAVVREASKRVLGLRPFDVQLIGGMVLHKGEIAEMKTGEGKTLVAILPAYLNALSGKGVHVVTVNDYLARRDCEWVGQVPRFLGLQVGLIQQNMTPEQRRENYSYDITYVTNSELGFDYLRDNLAMTVDELVLRNFNYCVIDEVDSILIDEARTPLIISGLAEKPSDRYYKAAKIAEAFERDIHYTVDEKQRNVLLTEEGYADAEEILDIDDLYDPREQWASYILNAIKAKELFLKDVNYIVRSKEVLIVDEFTGRVMAGRRWSDGLHQAIEAKEGVPIQNETITLASISYQNFFLQFPKLCGMTGTAATETQEFESIYKLKVTVVPTNKPMIRKDDSDVVFRATNGKWRAVLVEISRMNKVGRPVLVGTTSVEQSESLSKQLREAGIPHEVLNAKPENVEREAEIVAQSGRLGAVTIATNMAGRGTDIILGGNAEFMARLKLREILMPRDQHVMK

SEQ ID NO: 51542 - protein, 536 aa, Zea Mays
MSLLAELWRRWSDGLHQAIEAKEGVPIQNETITLASISYQNFFLQFPKLCGMTGTAATETQEFESIYKLKVTVVPTNKPMIRKDDSDVVFRATNGKWRAVLVEISRMNKVGRPVLVGTTSVEQSESLSKQLREAGIPHEVLNAKPENVEREAEIVAQSGRLGAVTIATNMAGRGTDIILGGNAEFMARLKLREILMPRVVNPIDGVIVSKKQMPPRKTWKTNESLFPCELSKETLSSVKDTVEMAVKEWGDKSLTELEAEERLSYSCEKGPTRDEVIANLRNAFVKIADEYKVYTEEEKQKVITVGGLHVVGTERHESRRIDNQLRGRSGRQGDPGSSRFFLSLEDNIFRIFGGDRIQGLMQAFRVEDLPIESKMLTRALDEAQRKVENYFFDIRKQLFEYDEVLNSQRDRVYAERRRALASDSLQSLIVEYAELTMDDILGANIGPDTPKENWDLNKLIAKLQQYCHLLDDLTPELLEGKSSSYDDLREYLRKRGREAYFQKTVSYFSFSFHGYCFFAWFKGFKKFNNNNINIAF

SEQ ID NO: 51543 - protein, 768 aa, Zea Mays
MEPRTEGDASRNLRQGRLLEPPPVPAVRTSPEGVQRHTGQDVIASRSQSAAASETGSSLPCEDGNATAETIGSSTHPVHIGVQNQDIEQEQVHETGKRYKRLTSDVWNYFTKKKEIIEENGKKREQIWGYCNFPNCKRRYRAEGRQGTTAFKNHLRSAHSIVRGQQQLKFEKDLGNNITHIQPFMYDQEVSVKKLIMAIIMHDYPFNIVEHGYFVDFIKSLHPSFPIKSCNAVGKEVMDTYLEEKEKLYAHLKTVHCRFSVTMDMWTSCSNKSYMCVTVHWINDDWCIQKRIIGFFNVKGRHTGKKLSETFTEAMVRWNLDKKLFSLTLDNASANELAVKDIISDLKDGQASLVCDGLFFHVRCACHILNLVARDGLKVISKTIDKIKALVLAVKGSPLQWKELMKCASESELDTKRGISLDVSARWNSTYLMLRDALYYKDAFARLKSSNRHMYVKNYPSPDEWDMALKIFQCLKKVYSLAEILSGTSYPTANLFYRGFCDIKVLLDDWCSSDDATISEMAIAMSQKIEKYWEHSNLALAVACFLDPRYKKKVIEYYMKKFHGDGYHVELEKIVNVVRGLYCFYSSSTPAPAKSTSPEPANSASDILMASVSDELDSFLYGTNEPTLVRSNELEKYMADPLLRLGGPFDGPFDILAWWKSKREVYPILSQIVRDVMAIQVSTVASESVFNAAGRFVDPYRNRLEPEMVEALICTKDWIAAERKDSKIVGSIVSDLEIETLSTVMANKIRAVDDKDIEWKDQEHDGCS

SEQ ID NO: 51544 - protein, 67 aa, Zea Mays
MERNYWQKTNLDQILECAKGISFACCNSCAAWRHKRSRGVICLLCRERGHSLKNCPDKSEGNLKKFC

SEQ ID NO: 51545 - protein, 501 aa, Zea Mays
MVLYRISSNKDPGAGRGESLSMKEHAALLLEKKLLDLPKLLDICAIYEHDNGKLTSSLVTNVINVQPSVLDDINIVIPQFLNIFHTMHDRCMTSLQVLTSTGSIDNGYVQLQKDFMEVLDFINDAIVTLDSFVGAYQPAALLFCTNFEMSYGVEELLNALARLYSSLLPSLLHGFKVMPKSQSNAEASLDSTLSDIPLAIRMLSKRTARFGWRLLHYCYLNDQVREHDAQTSTKMFPAKVEDPMIRGDILVQTLKDINRESTYSSQVNHGNTFLQELESEFQLMSQIGDIRNKGWIYMDDEQFQFLSRLCGSTHTSWNGISDLPVSSHGGELQQKDEETAMVESKISQIRDLFPDYGKGFLSACLEAYNLNPEEVIQRILEGTLHQDLLALDTSLEEMPHEKPAPTAVKDKGKGILVETVPQITKKPHKVAETHYFVQDGLSSATSSASQDLQGRPMMICRTLQSWTRKMLKMQLDLLSLTRNMSMKMSTMIHLMILASVW

SEQ ID NO: 51546 - protein, 291 aa, Zea Mays
MSNSGRWRRRTRSVAPSPATSSPSSPGLREAQPFRLPQWKFSQVLGELPPAAEARRDGAPRPQDDDDADEISAIEFDGRGEYLAGGDNAGRVILFRRTDGDGDDARPRAELERTDRAGAPPPRYSYATEFQSHEREFDVLDSLDISERIKKVRWCARPNSSLLMLAANDRTVKLWKVSEHKAEAPKKGNGRPSWGTAALSAATKLPRGCSSAEPDERPEKAAGDVGDGYSAKCRRVFGRAHEFNIHSVSTNCDGETLVSADDVRINLWHAEVTRQCFNIVDMKPADMEDLR

SEQ ID NO: 51547 - protein, 275 aa, Zea Mays
MSNSGRWRRRTRSVAPSPATSSPSSPGLREAQPFRLPQWKFSQVLGELPPAAEARRDGAPRPQDDDDADEISAIEFDGRGEYLAGGDNAGRVILFRRTDGDGDDARPRAELERTDRAGAPPPRYSYATEFQSHEREFDVLDSLDISERIKKVRWCARPNSSLLMLAANDRTVKLWKLQGRSPNTRRRRRRKGTVGRVGAPRRCRQPRNCRGAVRLQSLTNVLKRQQAMSETATLRNAGESSAALTSSTSTPSRPTVTGRRWCPRTTCGSTCGMRR

SEQ ID NO: 51548 - protein, 185 aa, Zea Mays
MLTAQPPPEVAGEDDSSFHHVFVEFMTKAAQFEELAESGERLLGRFREELVSSSEAGLKDHIKKAKTLLEELECLVENVYGITLTSSLSALEVSDSHCLDNMPSTDCYAMEEDKRADHLDMDVSLVTVMAMVRNMLKLDYTMQEKIVTALSLKTPASELEGYCLMWDLRPYIDDDVMRLAWNMCP

SEQ ID NO: 51549 - protein, 117 aa, Zea Mays
MLTAQPPPEVAGEDDSSFHHVFVEFMTKAAQFEELAESGERLLGRFREELEYFRRPQIPKESDVMNQILKSNCTVRMRSYVEAGCRLHYQNISNINQLSSSEAGLKDHIKKDFARRT

SEQ ID NO: 51550 - protein, 782 aa, Zea Mays
MGDSGDAVMARWLQSAGLQHLATSSAAGAGGADYRGGMPGLGGAGAGSMLSSLLMQGYGPESVEEKHRLYTLLRGLNFNGESAPTSMSEPYTPTAQSFGGGNPVEGFYSPELRGELGAGLLDLHAIDDTELLSEDVASEPFEPSPFMPKDIDDDDEDVISGSQQAPLDNYGLVTSEKESTTRENNVAKIKVVVRKRPLNRKELSRKEEDIITVHDSSCLTVYEPKLKVDLTAYVEKHEFCFDAVLDEHVSNDEVYRETVEPIIPIIFQRTKATCFAYGQTGSGKTYTMQPLPLRAAQDMVRLLHQPVYRNQNFKLWLSYFEIYGGKLFDLLSDRRQLLMREDGKKQVCIVGLQEFEVSDVQIVKEYIERGNAARSTGSTGANEESSRSHAILQLAVKKHIIVKDTRRQRDRDANEAKNTKAVGKISFIDLAGSERGADTTDNDRQTRIEGAEINKSLLALKECIRALDNDQIHIPFRGSKLTEVLRDSFVGNSRTVMISCISPNAGSCEHTLNTLRYADRVKSLSKGGNTRKEQPTGPTTTSSRESSSAPSYSLPAEAEEIPNQIQEKRPVDTYRKGTENFTSNPSAEPDRNSFSMVPNYSNKGREDNGAASGNDRERYDLKSTQTAYTSKAQLVQNSTNTQEEKVTKVSPPRRKAYKEDKSDRQGNYVKKDNGPETGRTGYKIQQAKQLQQQQRPTSASASSRQSEKESSCDDVEIDAILEEMNLLAEVDQPGSLIDNYVTQLSFLLSRKAAGLVSLQARLARFQHRLKEQEILSRKKPPR

SEQ ID NO: 51551 - protein, 59 aa, Zea Mays
MPQEVRLTSAEGSQDEDLGKKQKCRTTKLASAQIKQRRKRLDRPCWFKLLIDKCSRACM

SEQ ID NO: 51552 - protein, 266 aa, Zea Mays
MSFLYGTMSGNVPYPVDQHHLDDPHVKANLLFQAHFSRAELPISDYVTDLKSVLDQSIRIIQAMIDVCANSGWLTSALTCMHLLQMIIQGLWFERDYESLWMLPSMNDDILDHLKSRGVSTVPSLLDLSREELRRVLQPFSASELYQDLQHFPHVDVKVKLHNEQERSKPPTLNIRLQLKNSRRSASRAFAPRFPKAKQEAWWLVLGNATSSELYGLKRISFADRVINTRMELPQTFNVQETKLILVSDCYLGFDLEYSLEHLTKG

SEQ ID NO: 51553 - protein, 130 aa, Zea Mays
METFPSVKNILLLDSEGKRVAVKYYSDGWPTLSAKLAFEKSVFAKTQKANAGTDAEIVMFDGQIVVYKFIQDLHFFVTGGEEENELILASVLQGFSDAVERLLKNMVDKRTALENLDLILLCLDEIVDGG

SEQ ID NO: 51554 - protein, 160 aa, Zea Mays
MSSGGGGGQQFRYTQTPSKVLHLRNLPWECAEEELVELCKPFGRIINTKSGVGANRNQAFVEFTDVNQAISMVSYFASSSEPAQIRGKTVYIQYSNRQEIINNKSPGETAGNVLLVTIEGVQASDVTIDVIHMAHVNWRKCRYQHLQWERYHVCFAASVF

SEQ ID NO: 51555 - protein, 193 aa, Zea Mays
MSSGGGGGQQFRYTQTPSKVLHLRNLPWECAEEELVELCKPFGRIINTKSGVGANRNQAFVEFTDVNQAISMVSYFASSSEPAQIRGKTVYIQYSNRQEIINNKSPGETAGNVLLVTIEGVQASDVTIDVIHMVFSAFGYVHKIATFEKAAGFQALIQYTDADTASAAREALDGRSIPRARDILLPADFFFCT

SEQ ID NO: 51556 - protein, 340 aa, Zea Mays
MSSGGGGGQQFRYTQTPSKVLHLRNLPWECAEEELVELCKPFGRIINTKSGVGANRNQAFVEFTDVNQAISMVSYFASSSEPAQIRGKTVYIQYSNRQEIINNKSPGETAGNVLLVTIEGVQASDVTIDVIHMVFSAFGYVHKIATFEKAAGFQALIQYTDADTASAAREALDGRSIPSYLLPEHVTSCCLRISFSAHKDLNIKFQSNRSRDYNNPYLPINYSAMDGTLQPAVGSDGRKVEAQGNVLLASIENMQYAVSVDVLHTVFSSFGTVQKIAIFEKNGGTQALIQYPVIVYHLPTLKCLDLPKKKRFSLSDDVLPKPNVKVIFLCYNKNKRLSHI

SEQ ID NO: 51557 - protein, 178 aa, Zea Mays
MAATAHGDKSRDYTIPAGVIQGAPQPPGIQATSPGWQGNLQAAGPYAPPGAPPQNHSANGQVPNWTPGNSGYSPAPGTYPGQMYSSPAQYVASGSFLNTSAATPPQYATSGGFPNTPSTAPSQYAASRGFPNTTPAAPPGAPSQTPHASQQMPHQHGNHSGGGTPGTSQPPLPASYYR

SEQ ID NO: 51558 - protein, 625 aa, Zea Mays
MWATLHKPVAHANLRLLLTVSAFSGPLHLGTASAVAAAVTTRRSSSSRGVAATAMPSSSPPPLPPAEETTASAAALAPEGGFSLTEPSFLESLMPKKEIGVDRFLAAHPEYDGRSALIAIFDSGVDPAAAGLQTTSDGKPKILDVLDCTGSGDVDTSKVVKADADGAIVGASGARLVINPSWKNPSQEWHVGCKLIYELFTDTLTSRLKKERKKKWDEENQESISDALKQLNEFEKKHPKPDDTMLKKAHEDMQSRLDYLRKQAEGYDDKGPVIDIVTWNDGDVWRVAVDTQTLEGNNDGGKLADFVPLTNYRLERKYAIFSKLDACSFVANVYNDGNLVSIVTDCSPHATHVAGIAAAFHPDEPLLNGVAPGAQLISCKIGDTRLGSMETGTGLVRALIAAVEHKCDLINMSYGEPTLLPDYGRFIDLSNEVVDKHRIIFISSAGNNGPALNTVGAPGGTSTSIIGVGAYVSPAMAAGAHCVVQPPAKGMEYTWSSRGPTADGDLGVSISAPGGAVAPVPTWTLQSRMLMNGTSMSSPSACGGVALLVSGMKAEGIPLSPYSVRKAIENTAASISNAPEEKLTTGNGLLQVDRAFEYAQQAKKLPLVSYRISINQVGKSVDCAT

SEQ ID NO: 51559 - protein, 163 aa, Zea Mays
MGNTLPVHDMSESTAAIGSPNKEDLATMTLIKNWMLEIMVWHCYFSYSCFMSQSEVTRVGNHGISDWEWEEDEEMIWCYQGQAPSPRNGSSSFAWATCASGYSSPTVFGMGATNSSTMGMQQQQQQGVYGNMQAGAQNVQSMVGLQNQTQNPNFTQQIQQNQQ

SEQ ID NO: 51560 - protein, 384 aa, Zea Mays
MSQEQGMEEPPPQAVGEAQSAADVPMSEAAAVEDEDEEPVMGEGQGGESGTADAVDSVKASVKPEAEGAEEGDREELNGGPTADLTDEVVKLENGDGPVPVGGSADECGAGDGGVDKGLVGQNEPVVNQLVLVQAEEELALSKISNSSFMFDYTTGGDDSGTEEEQAAFMKELERFHREKMLEFKPPKFYGEGLNCLKLWRQVTGLGGYDQVTSCKLWRQVGESFKPPKTCTTVSWTFRNFYEKALLEYEKHKIETGEFQVASSALPDRVGSESQVGGSHVSGSGRARRESATRAMQGWHSHRLLGNGENADPIIKDKGPIVLKKDKTPKSSGSAKRKRIPSLEDDMVIPYKSDKLQKIAMKSMHWFLAFCVKRYMFSLTLLVV

SEQ ID NO: 51561 - protein, 401 aa, Zea Mays
MSQEQGMEEPPPQAVGEAQSAADVPMSEAAAVEDEDEEPVMGEGQGGESGTADAVDSVKASVKPEAEGAEEGDREELNGGPTADLTDEVVKLENGDGPVPVGGSADECGAGDGGVDKGLVGQNEPVVNQLVLVQAEEELALSKISNSSFMFDYTTGGDDSGTEEEQAAFMKELERFHREKMLEFKPPKFYGEGLNCLKLWRQVTGLGGYDQVTSCKLWRQVGESFKPPKTCTTVSWTFRNFYEKALLEYEKHKIETGEFQVASSALPDRVGSESQVGGSHVSGSGRARRESATRAMQGWHSHRLLGNGENADPIIKDKGPIVLKKDKTPKSSGSAKRKRIPSLEDDMVIPYKSDKLQNDSMVIDMGPPADWVKINVRKTFSVPLIPEAKFGVLNASECVNC

SEQ ID NO: 51562 - protein, 520 aa, Zea Mays
MATNRFVCEVCSKGFQREQNLQLHRRGHNLPWKLKQKDPLQAQRRRVYLCPEPTCAHHDPARALGDLTGIKKHFSRKHGEKKWKCDKCSKRYAVQSDWKAHSKICGTREYRCDCGTLFSRRDSFITHRAFCDALAQESARLPPTSSLSNLTSHLYGAATNAGNMALSLSQVGSHLTSTLQDGHHHRPSPELLRLGATAGGGGGSSIAARLDHLLSPNGASAFRPAQPPSFFHNAGASVGQDFGDDAGNGPHSFLQLQANKPFHGLLMQLPDLQGNGAGGPGASGGPSSLFSLGFFANNGNSSSGSSHEHASQGLMNSDQFSGGGSEAQAAAGIFGGNFVSAGGDQVPPPGLYRDQASMLPQMSATALLQKAAQMGATTSANGASAASMFRGFAGSSPQHVRPATPHMEQSDANLNDLMNSLAGGGGLGAGGGMFGGGSNGAGHAGMFDPRQLCDMAEREGKFGFGQGGGGDITRDFLGVGGGGLVRGISTPRGDHQSSSDMSSMEAELKSASSFNGGRMP

SEQ ID NO: 51563 - protein, 453 aa, Zea Mays
MLKAKKYDFVQKFYEKMQKNGVPPRAITYKVLVRSFWEQDKINEAVEAVNDMEQRGVVGAASVYYELACCLCNNGRWRDAMLQVEKLKQLPLTKPLEYAFTGMILASFNGGYIYDCISIFELMKDHCMPNIGTVNVMLKVYGHCDMFGKAKDLFETTKACFLNSQTYIHEHSSFKADTYTYNSMLEASASAQQWEYFEYVYREMALSHHCLDQSKYSWLLIKACRAGKPYLLEHALDSILERGEIPDVQLITESICQSIAHRDYGRTLQLLNIMTQASIKIKEVEWDYLLQQNMHQFSIDALEGLIKYLSTNGTTNADPAVDLVRALQSQCRDDTSTQQFELSFHGSGNKYSCSSLAELDQLTCKNLCTDIILDVPGSDREMPQLGVSALMCRDISLNGQRVENKHELSDLGQRGPQVSAIDKVLDSMNSYGDNSYGEMPSASKILELWEHER

SEQ ID NO: 51564 - protein, 265 aa, Zea Mays
MPLALAQLQDLRDRISDRLRPWSRSAQFWVRAADIYTSYKVCQLRAGFVKDEDELETMWERQHELGAEKMYSLCSELGGLFLKAAQILGKPDLAPMAWVKRLVTLCDQAPSTPFDVVRDVVEKQLGKNFDDMFEFFDVEPVGSASIAQVHRARLKLSKTDVAVKVQHPGAEQLMMVDIRNMQAMALFLQKHDLNFDLFSATKEMEKQICYEFDFVREARAMERIREFLRVTNKKPPVMVPRVIPGMVSSFDNGIYQGDPNNESWQ

SEQ ID NO: 51565 - protein, 326 aa, Zea Mays
MSPRQAIACCHLLPSTDAPTHQPQPSEPQRRSSTSERPKKAKARVPAWGERSKDGTLDRVGVAPAGVTAVRLQASMAFVAGPPTTRRNARSQPALPTPQAETRGGEINLAGEAQDPAPSPTTMTHHLQKAPLAAADPPTPPIQAPRYKHKRATPPPQRAGRVRGRQRRRPATAMATRARALPPRASRTSHHGCGHKATCPCQQGGAADGDQPLDPASQPADPAFPAADQVAGHLQEEGGVEWVEEGREMSERAVPPPPSSLLVELPASCSGDGGGEDRRRWVRSMGSRPCRPEEDDVRAGKKLGYYCEFLEHSISMNTEVKSVLLR

SEQ ID NO: 51566 - protein, 805 aa, Zea Mays
MNILQDSQDPNPLIRALAVRTMGCIRVDKITEYLCDPLQRCLKDDDPYVRKTAAICVAKLYDINAELVEDRGFLEALKDLISDNNPMVVANAVAALAEIQDSSVQPIFEITSHTLSKLLTALNECTEWGQVFILDSLSRYKAADAREAENIVERVTPRLQHANCAVVLSAVKIILLQMELITSTDVVRNLCKKMAPPLVTLLSAEPEIQYVALRNINLIVQKRPTILAHEIKVFFCKYNDPIYVKMEKLEIMIKLASDRNIDQVLLEFKEYATEVDVDFVRKAVRAIGRCAIKLERAAERCISVLLELIKIKVNYVVQEAIIVIKDIFRRYPNTYESIIATLCESLDTLDEPEAKASMIWIIGEYAERIDNADELLESFLETFPEEPALVQLQLLTATVKLFLKKPTEGPQQMIQAVLNNATVETDNPDLRDRAYIYWRLLSTDPEAAKDVVLAEKPVISDDSNQLDSSLLDELLANISTLSSVYHKPPESFVSRVKAAPRADDEEFADTAETGYSESPSQGVDGASPSSSAGTSSNVPVKQLAVASPPAMPDLLGDLMGIDNAIVPVDEPAAPSGPPLPVLLPSTTGQGLQISAQLTRRDGQIYYDISFENGTQGVLDGFMIQFNKNTFGLAAGEALQVTPLQPGQSTRTLLQMTPFQNISPGAPNSLLQVAVKNNQQPVWYFNDKIPLHVFFGEDGKMERAGFLEAWKSLPDDNEFTKEFPGSVISSIDATVERLVASNVFFIAKRKNANMDVLYLSAKMPRGIPFLIEVTAVVGVPGVKCAVKTPNREMVPLFFEAMEALTK

SEQ ID NO: 51567 - protein, 622 aa, Zea Mays
MAALVALTLALALTAAVTATAKECTNIPTELSSHTVRARLQAAPGGAAEWRWRELFHEHLNPTDEAAWMDLMPPPGAAAAAQHQQHHRQEELDWVMLYRSLKGQQQQQPVGGGTAAAGSTPFLEEVSLHDVRLDPDGDVAYGRAQQTNLEYLLLLDVDRLVWSFRSQAGLPAPGTPYGGWEKPDSELRGHFVGHYLSATAKMWASTHNGTLAGRMSAVVDALDECQRAGGTGYLSAFPAEFFDRFEAIKPVWAPYYTIHKIMQGLLDQHVVAGNGKALRMLVAMADYFAGRVRNVIQRYSIERHWTSLNEETGGMNDVLYQLYTITHDQRHLVLAHLFDKPCFLGLLAVQADSLSNFHANTHIPVVIGGQMRYEVTGDPLYKEIATFFMDTVNSSHAYATGGTSVSEFWSNPKRLAEALTTETEESCTTYNMLKVSRHLFRWTKEIAYADYYERALINGVLSIQRGRDPGVMIYMLPQGPGRSKAKSYHGWGTQYESFWCCYGTGIESFSKLGDSIYFEERGERPALYVVQFIPSTFSWRTAGLTVAQQLMPLSSSDQYLQVSFSVSAKTTNGQFATLNVRIPSWTSLNGAKATLNGKHLELASPASSGAAVISCHSSYLST

SEQ ID NO: 51568 - protein, 493 aa, Zea Mays
MKLQEIATFFMDTVNSSHAYATGGTSVSEFWSNPKRLAEALTTETEESCTTYNMLKVSRHLFRWTKEIAYADYYERALINGVLSIQRGRDPGVMIYMLPQGPGRSKAKSYHGWGTQYESFWCCYGTGIESFSKLGDSIYFEERGERPALYVVQFIPSTFSWRTAGLTVAQQLMPLSSSDQYLQVSFSVSAKTTNGQFATLNVRIPSWTSLNGAKATLNGKHLELASPGTFLTISKQWGSGDQLSLQLPIHLRTEAIKDDRPEYASIQAVLFGPFLLAGLTTGDWDAKTGAADAAASDWITPVPVESNSQLVTLAQESGGEAFVLSALNGSLTMLQRPKDGGGTEAAVHATFRLVPQGGAGAGAAAMLEPLDMPGMVVTDRLTVAAEKSSGAAFNVVPGLAGAPGSVSLELASRPGCFLVGGGEKVQVGCAGGAQQKRGDGAWFRRSASFARGEPLRRYHPMSFAARGVRRSFLLEPLFTLRDEFYTVYFNLVA

SEQ ID NO: 51569 - protein, 1361 aa, Zea Mays
MAHVSFKSKDVDSGMSRWSEYLSVEEPIPSAMATWRNMSADAPQGSSAGSHKHLQMEPVVQLSKVAEGLLAKMYRLNSILDYPDPNTHTFSDAFWKAGVFPNFPKICITMSKKFPEHPNKLQLERVDKFGLDALNENAEGYMHNLEQWILLLLDLLAFREQALRLILDLSSTVITLLPHQNSLILHAFMDLFCSFVRVNLFSDKMPRKMILQVYNILHIMLKGGRDCEFYHRLVQFVDSYDPPIKGLHEDLNFVSPRIGEVLEAVGPIIFLSTDTKKLRNEGFLSPFHPRYPDILTNSAHPMRAQDLANVTSYREWVLLGYLVCPDELLRVTSIDVAMVVLKENLILPLFRDEYILLHENYQLYVLPKVLESKRMAKSGRTKQKEADLEYNVAKQVERMLTEVHEQALVSCDAMHRERRILLKQEIGRMVLFFTDQPSLLAPNIQMVFSALALSQCEVIWYFQHVGIASSKSTRLKTVDIDATDPTIGFLLDGIGKLCCLVRKYIAAIKGYALSYLLSSAGRIRFLLGTPGMVALDLDATLKGLFQQVLHCLENIPKPQGESVPDITADLADLRKHWLSILMIVTSSRSSINIKHLEKATVSTGKEGLVSEGNAAYNWSRCVDELESQLSKHGSLKKLYFYHQHLTTVFRNTMFGPEGRPQHCCAWLGAACSFPECASAIIPEEVNKIGRDSISYVESLIESIMGGLEGLINILDSEGGFGSLEMQLSPEQAALRLNNTRAKGVSSLLTPGYESYPDNSSSIKMLEAAMQRLTSLCSVLNDMEPIGVLNHVFVLREYMRDCIIGNFRRRFHSMIRTENCIQRPSIIESLLRRHLGIIHLAEQHISMDLTEGIREVLLAESYTGPFPNLQMFETPVGTQGGGSAVEMICNWYIENVVKDASRIGVAFDAIQNCFRSSQPIGGGCLAESFTDKREMKSLVRLFGGYGIDKMDKMLREHTSALLNCIDSALRSNRDALEGLAGTVNSGDRIERDVNLKQIIDLETLADLCIQAGQAITFRRLLVEAVGAVLEEKVPLIYSLLKGLALQLPDEVPDKNEIIRLRKVASSVGVGDKHDAEWVHSILADAGAANDNSWILLPYLCAAFMVSNIWNGAVYDVNIGGLSNNLHCLARCVSAVIGGSEYTRVEREQRINSLSNVHTDELQEAELPSRVSAEANIKSCMQIYVKLSAGIVLDSWNDTSRQHIVPKLTFLDQLCELSPYVPRSTLEAHIPYTILRSIYHQLYGGSLLASEPAEQSPRQSPLISLAHASPSARQMQNRPETTPRSHTFDPGYYSSSGSQHDDGYDADRRTGRLLRSLRRSGPLDFGASRKAKKFVEGSSSGSSHGAGSLQRFAVSRSGPLSYR

SEQ ID NO: 51570 - protein, 787 aa, Zea Mays
MLQSREVHEQALVSCDAMHRERRILLKQEIGRMVLFFTDQPSLLAPNIQMVFSALALSQCEVIWYFQHVGIASSKSTRLKTVDIDATDPTIGFLLDGIGKLCCLVRKYIAAIKGYALSYLLSSAGRIRFLLGTPGMVALDLDATLKGLFQQVLHCLENIPKPQGESVPDITADLADLRKHWLSILMIVTSSRSSINIKHLEKATVSTGKEGLVSEGNAAYNWSRCVDELESQLSKHGSLKKLYFYHQHLTTVFRNTMFGPEGRPQHCCAWLGAACSFPECASAIIPEEVNKIGRDSISYVESLIESIMGGLEGLINILDSEGGFGSLEMQLSPEQAALRLNNTRAKGVSSLLTPGYESYPDNSSSIKMLEAAMQRLTSLCSVLNDMEPIGVLNHVFVLREYMRDCIIGNFRRRFHSMIRTENCIQRPSIIESLLRRHLGIIHLAEQHISMDLTEGIREVLLAESYTGPFPNLQMFETPVGTQGGGSAVEMICNWYIENVVKDASRIGVAFDAIQNCFRSSQPIGGGCLAESFTDKREMKSLVRLFGGYGIDKMDKMLREHTSALLNCIDSALRSNRDALEGLAGTVNSGDRIERDVNLKQIIDLETLADLCIQAGQAITFRRLLVEAVGAVLEEKVPLIYSLLKGLALQLPDEVPDKNEIIRLRKVASSVGVGDKHDAEWVHSILADAGAANDNSWILLPYLCAAFMVSNIWNGAVYDVNIGGLSNNLHCLARYGLTLCLMSKIVSCGYVSAVIVFVQVCKCCDWGKRIHSGRKGAANKFSFKCAYR

SEQ ID NO: 51571 - protein, 164 aa, Zea Mays
MAIAESCVDAVVMEMVAVYCGGLYTAKPELAARRIEAIGFQVGHQLSERYTMERPRFSDHLEAIKFICKDFWSELFKKQIDNLKTNHRGTFVLQDNRFRWLTRVSLDPRTENTDSTENDSAALGDTAAQTTTMLLYFPCGLIRGALTNLGISCSVSADMSNLPA

SEQ ID NO: 51572 - protein, 109 aa, Zea Mays
MQVGGGGGARDPGAQAVDHPQPGEEAGGVRAGAQPTQTLAFLLLPAEQEQQRGGGAGGGVHKPGGVPDAGGAAAEQGRGRLPREHPVAEELLAARLTGPRGLPLLILIL

SEQ ID NO: 51573 - protein, 1026 aa, Zea Mays
MASAEDQAAAAALLGGDPAAFDALLSTLMSSSNADRSAAEAAFHRLRASHPEPLALRLATSLAAPTTPADLRAMAGVLLRKVLSPAPSSDASSNNATPPAPLWPQLSPAGQAALKAHLLSALQSDPPKPIAKKVCDAISELAASLLPENAWPELLPFLFRAASGPDAHNLQESALLIFARLADYIAESLLDHLMTIHNLLASALAHPTSPDVRIAALGAAVNLVQCLPTNSDRDKMQDLLPAMMRALTDCLNSGQEVSAQEALELLVELAGAEPRFLRRQIADVVGAMLQVAEATQLEDGTRHLAVEFVITLAEARERAPGMMRRLPQFVGRLFAVLMQMLLDVEDDPAWHSAETEDEDAGEGNNYGVAQECLDRLSIAIGGNAIVPIASELLPQYLSSAEWQKHHAALITLAQIAEGCAKVMLKNLEQVVSMILNGFQHPHPRVRWAAINAIGQLSTDLGPDLQVHYHQQVLPALANAMDDFQNPRVQAHAASAILNFSENCTPEILTPYLDGIVNKLLVLLQNGKQMVQEGALTALASVADSSQDHFKKYYDAVMPYLKSILMHATDKSNRMLRAKSMECISLVGMAVGKDKFRDDARQVMEVLMALQGAPMETDDPITSYMLQAWARLCKCLGQDFLPYMSVVMPPLLQSAQLKPDVTVTSAESDDDIASDDDSIETITLGDKRIGIRTSVLEEKATACNMLCCYADELKEGFFPWIDQVAPTLVPLLKFYFHEEVRRAAVAAMPELLRSAKLAVEKGQAQGRDESYVKQLSDYIIAALVEALHKEPETEMCSSMLDSLNECMQLSGLLLDEAQVRAIIDEIKNVIIASATRKRERSERTKAEDFDADEGELLKEENEQEEEVFDQVSECLGTLIKTFKGSFLPFFEELSMYITPMLGKDKTPEERRIAICIFDDVAEQCRESALKYYDTYLPFLLEASNDENSDVRQAAVYGVGVCAEFGGHVFRPLVGEALSKLNNVIRHPDARLPDNIMAYDNAVSALGKICQFHRDGIDAAQPGLAACL

SEQ ID NO: 51574 - protein, 202 aa, Zea Mays
MAPPDSISTCSSLPLAAAPMSEPTPFPFAASPLPNPLVATASFLQHHLSRLASHLNVPRPALAAAAARTPGPQGASLSLSLAPDEVARALTGTPVFTVCNSSNEFVLVSDPATGLRSLGLLCFRSEDADALLSHVRTRQPVLGKGAKVVPITLDQVYMLKAEVRSAGCEEAEEALLSSIFSKGRHRKRTYKGFQRFKRVSLI

SEQ ID NO: 51575 - protein, 255 aa, Zea Mays
MAPPDSISTCSSLPLAAAPMSEPTPFPFAASPLPNPLVATASFLQHHLSRLASHLNVPRPALAAAAARTPGPQGASLSLSLAPDEVARALTGTPVFTVCNSSNEFVLVSDPATGLRSLGLLCFRSEDADALLSHVRTRQPVLGKGAKVVPITLDQMKSGLTAFDGVPVFQSDLLVVKKQKKRYCPVYFQKEDIERELTRASKGSRGSALSKKIMVGSLEDVLKKMEINERDSGWDDLIFIPPGKSLNQHINEVSA

SEQ ID NO: 51576 - protein, 56 aa, Zea Mays
MVATTYNERSIRSHLRRVKGLLSLSSLYVSLSTSLALLQESAQGKFAGLIYVFSVH

SEQ ID NO: 51577 - protein, 704 aa, Zea Mays
MASQAARRGGAMRPPSSGVRTAAARPPAASFLLATAATAALVGGFYFWLVVSSFRLPDSGAVGCRPDGEGSWAVGMFYGSSPLALRPIELGDTLFIFFETKTTTSMQGDIGVARSFDQGATWEFLGIALDEAWHLSYPFVFKYENEIYMMPEGNKKKELRLYRATKFPLEWTLEKVLVNKPLIDASLVQFEGYWWLFASDFTRYGVEKNAELEIWYSNSPLGPWTEHKKNPIYKSDKSLGARNGGRLFIFEGSLYRPGQDCSGTYGRMVKLHKVEKLSKEEYKEVPVNLGIEEPKKGRNAWNGMRYHHMDAQQLASGGWIAVMDGDRVPSGDSTRRSLIGYLAFLLASALVVFVGFMKGAISCYVPPSLWVPLTRRTELSRIFYVHRFNQKVRRYSTSISRYISAAKTKLSEKTWSNVLFFCVVALFGAINVCIAVHFLCGGNGAEEAYTYQGQHSQFTMITMTYEARLWNLKVFIEHYSRCESVREIVVVWNKGNPPSSDAFDSTVPVRIRVEETNSLNNRFRVDPLIKTRAVLELDDDIMMTCTDLEKGFRVWREHPERMVGFYPRMIDGNPMQYRNERYARGKNGYNLILTGAAFMDKEFAFKTYWSEKAREGRDYVHKNFNCEDLLMNFLYANASSTTRTVEYVHPAWAIDTSKLSSVAISRDTQKHYDIRTHCLANFSSIYGPLPQKWEFGMREDRWDK

SEQ ID NO: 51578 - protein, 556 aa, Zea Mays
MMPEGNKKKELRLYRATKFPLEWTLEKVLVNKPLIDASLVQFEGYWWLFASDFTRYGVEKNAELEIWYSNSPLGPWTEHKKNPIYKSDKSLGARNGGRLFIFEGSLYRPGQDCSGTYGRMVKLHKVEKLSKEEYKEVPVNLGIEEPKKGRNAWNGMRYHHMDAQQLASGGWIAVMDGDRVPSGDSTRRSLIGYLAFLLASALVVFVGFMKGAISCYVPPSLWVPLTRRTELSRIFYVHRFNQKVRRYSTSISRYISAAKTKLSEKTWSNVLFFCVVALFGAINVCIAVHFLCGGNGAEEAYTYQGQHSQFTMITMTYEARLWNLKVFIEHYSRCESVREIVVVWNKGNPPSSDAFDSTVPVRIRVEETNSLNNRFRVDPLIKTRAVLELDDDIMMTCTDLEKGFRVWREHPERMVGFYPRMIDGNPMQYRNERYARGKNGYNLILTGAAFMDKEFAFKTYWSEKAREGRDYVHKNFNCEDLLMNFLYANASSTTRTVEYVHPAWAIDTSKLSSVAISRDTQKHYDIRTHCLANFSSIYGPLPQKWEFGMREDRWDK

SEQ ID NO: 51579 - protein, 176 aa, Zea Mays
MSVFGGDSWARDAQQRKRRLDELLLPITAPSSPSTPDSFKKLHNGKLACLICPHRPVLDTPLMLSMHNKGARHIAAESRLREKELSKKHEISKRLALSSDVSHSNSGNPRTSVWPTNIKEKPLIEETRRAILEAQSSRFNDFQGKKTNRSSKAPGARTLVHCFRLETGWPWKMVQR

SEQ ID NO: 51580 - protein, 318 aa, Zea Mays
MLHQKKEAKEMPTTNAKKKSCIYKAEQSRAGEEEAQAKQSRRRRRSTRLCTWTTIPCTAFFCTYSNECAKTGKGGTGRRETFERHMDACIACIRSPAIGRGEGLGEAGGAGGDAALAVVQAHDAPAAVRQAAGLRVLPALHHLQQRQVQVDAQVVLGLVLHGPPLLHHGHQHVHRVPHVRPLRRLPGRAVPRQLRDHADALHCLAVAHVQGRVDRRAQLLRVLPYLAEPVRQVPGLLALAHAAVVDGRRPCYQLQQHYTEAEHVCFRRDLPGNCILRSQVPERPGKSGRHRVVPIRRIFHEPEVRHLGPEVVAEENVR

SEQ ID NO: 51581 - protein, 429 aa, Zea Mays
MIIVNIVHDISRMFGRGSPRMNLIQAATMKKISPRSTTNKRKKRTSPKANWNSGLEKGLVEILQDHNNDCYKGQNGWSSEAWNRIVKLFHEKFSYVTFTKCQIQDKEKELKRDYKALKEARQQSGVSWDERLCRIEAEEPIWNNLTTSNERLKKFRTKSFPLFEALGELYDGNIAEGTMNFTSIEPSRPPVTQPCQGAATQPSQAAFTLTQPSQIAFTQPSLAAFARPSRTAFRHPSLAAFPQPSQAAFAQPSQTIFTQPSEATFTQPSEATFTQPSEATFTQPSQAAFTQPSQANISQAICDEDDELRVLDPPAPASVSKRAKNVGTGNSRTRINKRTQDGNVVEMMGRFLEMKEKQAEADERATTNANEDDFPIQTCIAIVDGMEEFSDDEKVDSYDVFKDAQNRAIFMTAKDATRIKWLRKKIART

SEQ ID NO: 51582 - protein, 283 aa, Zea Mays
MAATSPTPTLAKPAAAAHARAPSAGPRRVSLTSCRCHRRRSTPSRWRSLPRCSRRGGKPVVTEVIDAAAPDKGPETGSKGEEEKEAVAGRGAPGWLRLDGVAADILAIAAPAVLALAADPITALVDTAFVGHIGSAQLAAVGASTSIFNLVSKLFNVPLLNVTTSFVAEQQAKDGNSNTGGERDEFLTPLEKARQPKKVLPAVSTSLALAAGIGLLEMVALIVGSGTLMNIIGIPVDSPMRAPAEQFLTLRALGAPPIIVALAAQGAFRGFLDTRTPLYAVGT

SEQ ID NO: 51583 - protein, 321 aa, Zea Mays
MRAPAEQFLTLRALGAPPIIVALAAQGAFRGFLDTRTPLYAVGAGNLLNALLDVVLIFPLGLGVSGAALATVTSEYLTAIILLWKLNDEVDLLSWNIIEDGVIRYLKSGGLLIGRTIAVFLTLTLATSLAAREGPVPMAGYEICLQVWLTISLLNDALALAGQALLASEYAKGNYKQARTVLYRVLQVGGVTGFVLAASLFVGFGSLSLLFTDDPAVLDVARSGVWFVTISQPVNAIAFVADGLYYGVSDFAYAAYSTFFAGAVSSIFLLLAAPNYGLGGIWAGLTLFMSLRAVAGFWRLGSKGGPWNVILSGQIVSKTKI

SEQ ID NO: 51584 - protein, 309 aa, Zea Mays
MEISLEFDTDASELVSDTWHHGANQQRGELEASLEFDPDTSELAPDITEYTLKLKQSHERARKLRADLAVEEQREQELSRMLKGIVTDPNFTETHKKRPRRKSSIERLKVSRRLAEEAMNYFEECVSISTMDSTDFSSPEDPQPNSVVNVPPKSNSRFFHKGRSIFQEPHTLADQHGYHVESDKQTQCSISATGSDVSDSVIFSHTNGAGLKIRSVSSDDPDGFDTPRSRSSCFSFTHEPVKKLENCDVRQYLGNFGRGNNTELKETRSSYFADDYASQKVDPDLLKDMVTFQNRIEYGGLVICNIRTF

SEQ ID NO: 51585 - protein, 229 aa, Zea Mays
MVVIMIYGSCSRLAPLAAFGYVMATHLSLYPAILIVPVILLLGYGLDAPPPKVFVIKGSIARKSDVSDNDKTSRQRVVQQFSWKPVLHFIFWLFIWSCHVLLLSSVILKKVGGLHEMFEKTYGFILTVKDLSPNIGVLWYFFAEVFDFFRNFFLMVFNMNIIFMVLPLAIRLKHRPCFLAFVYTAIVAILKSYPSAGDSALYLGLLGLFVNELAVHILLVFWIYWSLPT

SEQ ID NO: 51586 - protein, 323 aa, Zea Mays
MRSNGQPVYNFCVTVDDATMQISHVIRAEEHLPNTLRQALIYKALGFAMPSFAHVSLILAPDRSKLSKRHGATSVGQAMVNYLALLGWGDGTENEFFTIDDLVQKFTINRVNKSGAVFDATKLKWMNGQHLRSFPHDELIKAFEDRWTDTGILQESESGFAKEAAELLKDGIDLITDADAALTNLLSYPLHTTLSSEEAKPVVQDKISEVAWSLISAYDSGELGQALAEGRDGWQKWVKGFGKSIKRKGKGLFMPLRVLLTGKLHGPDMGGSIALIHKAGVCCAVTPQSNFVTLDERFRMLKDVDWESLAKEQETPAVPAAAS

SEQ ID NO: 51587 - protein, 109 aa, Zea Mays
MPRREPDTREDVRREPCPPVPTQACPNNDARRLGATRAPVGIKLCAGRDRSAEPGRIGGRPWSLLPWPRADAVRAQRDAAGPRRRLRTPPAPRADAATEKRLVDFPRSR

SEQ ID NO: 51588 - protein, 58 aa, Zea Mays
MAGKGSYVPPQYIPLYSLDTEEDRVPAVEENHATRPKLNQDPTQWSSGICACFDDPQS

SEQ ID NO: 51589 - protein, 201 aa, Zea Mays
MSANMQRPNPSPSIPSCRHWILREIAHCAAAIPNVETLSAAAPSRRQRHLRRTASNRAFYGSSAPSTAPSPMHPIAGCFFNASSSPSAASSTRHRRLRRTTHDRALLASSVPSIVLRNLSVPASSTRRHPRPTVGSGELYTKLRWNFCATQEFGWSNPSDQINWCENRQQLLLQLYHAHLQCDIGIELHLHFLRNANNLFE

SEQ ID NO: 51590 - protein, 374 aa, Zea Mays
MNRVSLHQVSYLVLDEADRMLDMGFEPQIRKIVKQIPPKRQTLMYTATWPREVRKIASDLLANPVQVNIGNTDQLVANKSITQHVEVIPHMEKSRRLDQILRSQDPGSKSIIFCSTKRMCDQLARNLSRQYRASAIHGDKSQAERDSVLNDFRSGRCPVLVATDVAARGLDIKDIRVVVNYDFPTGVEDYVHRIGRTGRAGATGSAYTFFGDQDSKYASDLVKILEGANQSVPPQLKEMALRGGYGGRSRRWASSDDSYGGQGYGAKRSTDSFNNNNFGNQAGGGSSFHSSSSGGQFGDTTSFHGSFDNSVRNNQTGDNASFPPSSSNNQAGDGLSFHERFYGSRGRDQSRTSNDGFRARSRSPPGKPVEVSNW

SEQ ID NO: 51591 - protein, 274 aa, Zea Mays
MMMSDDDDAEPQLNAVEGYYFVDSKNEKEPVCFSTLPFWFGDTDDLPDGKKKLVLRGTGDPGVKVYDEVVACRLGLEGKQPEFAVLTAKGRRWIRLIRPLNSYEEMIRTVLITAQMLHFLRRKPHEPEKTLWNHLCKVFNKFDVPPSEDDFRNHCSLMKQFAAKDPVLAKSEILRVFIEGKSRKKFTEVGADHIDVKQPFITDDEGIDEMNVEDVDNESDEDDDEYLFDSICAICDDGGDILWALTCWLYMSPLATHLPNLSGMYINHLSGICG

SEQ ID NO: 51592 - protein, 67 aa, Zea Mays
MTGKPRKKRSGSILNPVACSIPSRKLLWRCTRRTISLHLQSNLFSRSWVARQSLTMKSSRQRSWTCN

SEQ ID NO: 51593 - protein, 230 aa, Zea Mays
MADAASGRGHVVYPPRSAEDIFKDYRARRSAILRALTHDKENLCLYGYANEAWEVALPAEEVPTELPEPALGINFARDGMNRRDWLALVAVHSDSWLLSVAFYYAARLNRNDRKRLFGMINELQTVFEVVSGARQQQSKERSSMDNGGRAKPVKIENNGKVTDEAYEDDSDHGETLCGTCGGIYNADEFWIGCDMCERWYHGKCVKITPAKAESIKHYKCPSCSSKRARQ

SEQ ID NO: 51594 - protein, 258 aa, Zea Mays
MSMTLKATNENLPPNVIRQLAKELKNLNESPAEGINVTVNDDDFTTIFADIEGPAGTPYENGVFRMKLLLSHDFPQSPPKGFFLTKIFHPNIATSGEICVNTLKKDWNPSLGLRHVLLVVRCLLVEPFPESALNEQAGKMLLENYEEYARHARLYTGIHALKNKSKTGAISESTTALNVDKSSTAPNENAPSMPPAIPTSAASRALGTNLQDQSPTVSDPTVGAAAAAAARRKDGPMPSKVPVDRKKMDARKKSLKRL

SEQ ID NO: 51595 - protein, 495 aa, Zea Mays
MSAPPSLKPPATSAAAYPRASAAPRATGIRGACALPTRRLQCSASAAVAGASTEMADAPLDWAGRSLEELRSLPDHDTFCLMALSPLDGRYDRFVKELMPFFSEFGLIRYRVLIEIKWLLKLSQIPEITEVPQFSKEAQAFLIAIIENFCIDDAKEIKKIEKVTNHDVKAVEYFLKQRCSSNPEIAKVSEFFHFGCTSEDINNLSHALALKEGVNRVMFPAMIDICTALCSLATQNSGYPMLARTHGQPASPTTVGKEMANFAARLSDIGKSFSEVKILGKFAGAVGNYNADVVAYPEVDWPKVAEEFVRSLGLQLNPYVTQIEPHDYISKLFNLFTQFNNVLTDFDRDMWSYISLGYFKQRDLTDSTVLRNLGMGLGHSLLAYKATIRGISKVQVNEARLAEDLEQTWEVLAEPIQTVMRRYGIPEPYEKLKELTRGQAVTKDSMQQFIDGLDIPGEVRAKLSKLTPHSYTGLAEDLARYIEKWVDLESGFQIK

SEQ ID NO: 51596 - protein, 277 aa, Zea Mays
MAASSIPPCQVQEQDDEVVDRNILPYCSIDRKQKKTLGERKQKKTLGEMEQEFLQALQAFYYDQKAIMSNEEFDNLKEELMWEGSSVVMLNEDEQKLLEASLAYTSGNPIMSDAEFDELKLRLKTDGSVIVKEGPRCSLRTHKVYSDLNVDYLKMFLLNVPATTVALGLFFFIDELTGFEINVFQLPEPFGFIFTWFAALPLILFLAQSLTKAIVQDFLILKGPCPNCGTENLSFFGTILSVSSGGTTNKVKCANCSTELEYDSKSRVITLPEASNA

SEQ ID NO: 51597 - protein, 97 aa, Zea Mays
MDETIQILRGLRERYELHHKLRYTDDALIAAAQLSYQYISDRFLPDKAIDLIDEAGSRVRLRHAQLPDEAKELDKELRQISKQKNEAVRGQDFEKNL

SEQ ID NO: 51598 - protein, 148 aa, Zea Mays
MSRVAGSRLLPRISALSFCTASPATAAASSSSSTAAVAAAAATASEASSTAGDPSSQPPQTARKPWGALKFAAFAAVSTAVGGTGYVSYAYSLEEVDQMTRELRKKSKQPIPEDASGFERFQAMAYSAAMKGKEHDMSLLLIYSSWIL

SEQ ID NO: 51599 - protein, 276 aa, Zea Mays
MSRVAGSRLLPRISALSFCTASPATAAASSSSSTAAVAAAAATASEASSTAGDPSSQPPQTARKPWGALKFAAFAAVSTAVGGTGYVSYAYSLEEVDQMTRELRKKSKQPIPEDASGFERFQAMAYSAAMKVPVAAIEVYMDVRSQIEDQIRGFSEPVSDKLLPDLAPQEQHVLTLVLDLNETLVYSDWKRERGWRTFKRPGVDAFLEHLGRFYEIVVYSDQLSMYVDPVVDRLDPKGNIRHRLSRVATKYENGKHYRIFRKTWRRSIKHTAILVL

SEQ ID NO: 51600 - protein, 234 aa, Zea Mays
MPWNRFMPFLSKCCTSTVQTSSSYSSFSSSFSPIQPWLFVGLGNPGEKYQSTRHNVGFDMIDAFAQSQGIPLTTHYFKALFGEGMVDGVPVLLAKPQTYMNLSGESVGPLAAYYKLPLNRVLVAFDDMDLPCGVLRLQPKGGSGRHNGLKSVIYHFRKNREFCRLRIAGQMDPKAFVLQKFNRTGRERIDSAVREGVDILKMVAARGLTEAAKLTNADQKYKHLRSHGIQTNDD

SEQ ID NO: 51601 - protein, 265 aa, Zea Mays
METSAATPTRPPHPAAASPSPSPSSSLRLWRSAAQRNVRNQWSRLSAAKEQWLAAVADGRAHASALVNAHLCRRNMPATDLGVLKDMPGIRDKANSKLVLREEQYSGMLLSAYKEMVRQLSYLVEASHSMRCFSKAAPNCSITQFSDRQDNLNDSGDGGGAPVFKWFSILEFETLAQELVQMFVSEQKLKRLLLLEFLSIALKEGVELQTSLNWERLGSQRPGNLPLHEVLQVYLTTWHANMNINRSRIGEIFELVEEEMKIKLS

SEQ ID NO: 51602 - protein, 174 aa, Zea Mays
METSAATPTRPPHPAAASPSPSPSSSLRLWRSAAQRNVRNQWSRLSAAKEQWLAAVADGRAHASALVNAHLCRRNMPATDLGVLKDMPGIRDKANSKLVLREEQYSGMLLSAYKEMVRQLSYLVEASHSMRCFSKAAPNCSITQFSDRQDNLNDSGDGGGAPVFKWFSILEFGG

SEQ ID NO: 51603 - protein, 1152 aa, Zea Mays
MEPSSPATTATFPAAVEEHETYPPMVSSSLFPLFPFAASTSSAPPAESQWLSNPSFSFDASSLNIPATTSSSLPSPQSHSSDEDTPLQAAPAKYELVPSSPSSDEERGSRRKRSGRRKRKREKERYDGAATSRKAGIRAWAGLETKPAKDYYVDAKGDHDNLAFGSLYRMDVARYRSQNMMEAFGLNHLRFGSSHIDLDSDLDGMDNKVRAGGRYYSAKNAVSERNKGFKHLKIFKGNTSVMLAEDFVPFGTQSLPLKSTTVEQELEESWEDEILRRTREFNKMSRERPHDEKVWLAFAQFQDKVASTQPQKAARLQTTERKISILEKAVELNPDSEELLLCLLKSYGKRDNTETLLTKWEQILTKHPDSSTLWKQYLLLCQGEFSRFKVSEIRKSYVYAVQALSAACTKLCRQDNKSMDSKSSSLVQLEVGLVDIFVNLCRFEWQTGHRELATGLFQAQMEFSLFAPPLYLTTSSKQRLFEHFWNSGGARIGEDGALGWSEWLAKDEESRQKLSMQENSQETETGGWSGWFDPSLGNTETNDLSNKSLEPSLTDGNDAEDLDAEDSPAQDDVESLLKKLGIDVDAESNSEVKDAETWNRWASMELSRDNQQWMPLHENYVGSIHCGDAPSGEDNDQLSRVILFEDVTEFLFSLSSEEARFSLMCQFIDFYGGKISRWTSTNSPSWLDRILSLENITDDILEDLGAVSDVVNKNQSSYSCKYKLESLLGSMCDLSQRPGLMKFLKNAILLLLGVFPRNHILEEAVLVTTQMFTPQENSSSIQTNASRALAKSMLKKDRQDFLLCGIYGRTEAMNGNIEQARKIFDMALLSTEATSEDLRKKVPILYLWYAEMEITVSASRNNSDSMHRAVYILSCLGSNLKYSPFVGPISRLQVLRARQGFKEQIRSSRSAFSCGAINKESVALICSASLFESMTTGCYSGLEVIEETFPMTFSESNNLECEDLWVYYIKMLQKNLNQLNLSRVWPSISRGVHKYPYNPKSYSATLTLSYLYSVSNNLRLTLDKCSQRDPSVITLLFALSFEWGKAGSDNRIHSLFERALADDKLQKSVLLWRCYLAYEAEIVCNSSAARRVFFRAIHACPWSKRLWLDGFQKLGSVLTLKELSDLQEVMRDKELNIRTDIYEILLEEETNT

SEQ ID NO: 51604 - protein, 1109 aa, Zea Mays
MEPSSPATTATFPAAVEEHETYPPMVSSSLFPLFPFAASTSSAPPAESQWLSNPSFSFDASSLNIPATTSSSLPSPQSHSSDEDTPLQAAPAKYELVPSSPSSDEERGSRRKRSGRRKRKREKERYDGAATSRKAGIRAWAGLETKPAKDYYVDAKGDHDNLAFGSLYRMDVARYRSQNMMEAFGLNHLRFGSSHIDLDSDLDGMDNKVRAGGRYYSAKNAVSERNKGFKHLKIFKGNTSVMLAEDFVPFGTQSLPLKSTTVEQELEESWEDEILRRTREFNKMSRERPHDEKVWLAFAQFQDKVASTQPQKAARLQTTERKISILEKAVELNPDSEELLLCLLKSYGKRDNTETLLTKWEQILTKHPDSSTLWKQYLLLCQGEFSRFKVSEIRKSYVYAVQALSAACTKLCRQDNKSMDSKSSSLVQLEVGLVDIFVNLCRFEWQTGHRELATGLFQAQMEFSLFAPPLYLTTSSKQRLFEHFWNSGGARIGEDGALGWSEWLAKDEESRQKLSMQENSQETETGGWSGWFDPSLGNTETNDLSNKSLEPSLTDGNDAEDLDAEDSPAQDDVESLLKKLGIDVDAESNSEVKDAETWNRWASMELSRDNQQWMPLHENYVGSIHCGDAPSGEDNDQLSRVILFEDVTEFLFSLSSEEARFSLMCQFIDFYGGKISRWTSTNSPSWLDRILSLENITDDILEDLGAVSDVVNKNQSSYSCKYKLESLLGSMCDLSQRPGLMKFLKNAILLLLGVFPRNHILEEAVLVTTQMFTPQENSSSIQTNASRALAKSMLKKDRQDFLLCGIYGRTEAMNGNIEQARKIFDMALLSTEATSEDLRKKVPILYLWLQVLRARQGFKEQIRSSRSAFSCGAINKESVALICSASLFESMTTGCYSGLEVIEETFPMTFSESNNLECEDLWVYYIKMLQKNLNQLNLSRVWPSISRGVHKYPYNPKSYSATLTLSYLYSVSNNLRLTLDKCSQRDPSVITLLFALSFEWGKAGSDNRIHSLFERALADDKLQKSVLLWRCYLAYEAEIVCNSSAARRVFFRAIHACPWSKRLWLDGFQKLGSVLTLKELSDLQEVMRDKELNIRTDIYEILLEEETNT

SEQ ID NO: 51605 - protein, 614 aa, Zea Mays
MLPRTHSHQARRRSGLGPQLCAAAAALLLLLSLAVLHSRLSSSSSSRFPTSASRSRPSTPAADSNSSALLADEEDEDVAAALDPLLTVTTTAAEGDSLANPDDDRIDELDVLDEDAAGANEADSASASTVGAATPLVWDHVTGAARLPFRLPASVESLPAGLPRLDSPRRIAAAAFGSDDELVDLELRVEISSIAGIEDALLLKPASGKAAETRLRAGWARWLEGKADYLRRDRMLRSNLESLNPRNHPLLQDPDSPGLTSLTRGDRMVQRMLLAELDKPASKSFERRRLLSYENKQSMTTTVKEKPQTGRRWGYFPGIDPHLGFSEFMERFFEHGKCSMRVFMVWNSPQWAYDIRHQRGLESLLKQHPDACVVMLSETLELESFHQFVKEGYKVAVAVPNLDELLESTPTHVFASVWYEWRQTKYYHLHYSELVRLAALYKYGGIYLDSDVIILKPLTSLRNSIGATNHVSGNSRFGGAVLAFEKQSPLLEECLREFYSTYDDTLVQWNGAELMTRVISNISSRADENRGHLDIKLEPFVKFYPISSTDIIRYFSEPDNMVQKAHHDAIFSRIVNDSTTFHFWNGITSALVPEPGSLVSKILNRYCLHCLDVL

SEQ ID NO: 51606 - protein, 348 aa, Zea Mays
MLWVDKYRPKTLDKVTVHDQVARNLRKFVSEQDCPHLLFYGPSGSGKKTLILALIKQMFGAGAEKVKLENKTWKIDTGTRTLEIELAMLSSAHHVEMNPSDAGFQDRYVVQEIIKEMAKNRPIDAKGRRAFKVDKLSREAQHSLRRTMEKYSSSCRLILCCNSSSKVTEAVRSRCLNVRVNAPSEDQIVQVLEFIGKKENLILPAGFAARIAAQSNRNLRRAILFFETCKVQQYPFTSNQVAPPLDWEQYVSEIATDILTEQSPKRLFDVRQKFYELLVNCIPPESILKKLLAELLRKLDADLKYEICRWAAHYEHKMRLGSKAIFHLEAFVAKFMSIYKEFLVATFG

SEQ ID NO: 51607 - protein, 520 aa, Zea Mays
MLANGIFRKPFTTYEILSDEEKRKNYDLYGDEKGNPEFGGGNFGNHGGSTYFTGGGPKSSQFTSGNGWQTMGGQGNTKTFSFSFGGKPGASGGNPFGGGFDLGDVFSNLFGGGPMGDSHIGGSSGSARANTGTSGQHSGTTKIEDITTQVFNKEVADQGTTWLLLFYTPQSKSQFVLESVMQDVVHSLDGVLRAGKINCDNEKSLCKRSGVSIGKSARLFIYSYATAEKGSLHEYSGEHDAKSLKTFCQEHLPRFSKRVDISQFSFPLNVLPNLPQVLLLSSKKDTPAMWRAISGMFRNRIIFYDAEVHDVSHPLLKSLGVKNLPAVIGRTVNGEELLLKDGISVKDLRSGVKELKTLLDSFEKKNKKLLSNLANKKPSGQWEEIKKIPLLTASNFEETCGEKTSVCIIGVFGSNKAKGQLEAVLSEISMKTLIRGQNYNSRNAVSYALLDKDKQSGFLSSFDKSGYRSSDKLLIAYKPRRGKFAVYDGEVTLEEAERFVGSVLNGDVQLSPTKQKPVLR

SEQ ID NO: 51608 - protein, 184 aa, Zea Mays
MEATPENKATPISLAQHTYWNLAGHACGDILNHSLQIWGKHITPVDENTIPTGEIMPVDGTPFDFTTERRIGERIDGVPGGYDHNYVLDCGDEKDGLKRAARLKDPSSLRTLDLWTDAPGMQLYTANYVDGIGGKAGAVYAKHAGVCLETQGFPNAINQPEFPSVVVRPGEKYKHTMLFEFSGC

SEQ ID NO: 51609 - protein, 137 aa, Zea Mays
MDERGEKEEEHGVVEEETAAVVLKEVEVEMEMVGGSEEASAAPLLLAHPCSLLQLLLRACAGCLVRLLHGHCSDGANDDPKAAADDDDAAPEAAAAAAAAAGDGGDKAATEVWAVRRRPTTPGRPREGSGGNGGNHH

SEQ ID NO: 51610 - protein, 653 aa, Zea Mays
MAAQGQAAAGSASESGGSPAASAAAAAAAAFPATSLYVGDLHESVQDAQLFDVFSQVGGVVSVRVCRDINSRKSLGYAYVNYNNTSDAARALELLNFTPINGKPIRIMYSNRDPSSRKSGAGNIFIKNLDKSIDNKALYDTFCAFGNILSCKIATDPSGESRGYGFVQFEMDESAQSAIDKLNGMLINDKKVYVGPFVRKQDRENVSNNIKFSNVYVKNLSDTVTDDELKEMFGKYGTITSAVVMRDSDGNSRCFGFVNFENADAAAQAVQELNGKIFNDKELYVGRAQKKSEREMELKEKFEKNIQEVAEKFQNTNLYLKNLDDNIDDEKLREIFAEYGNITSCKVMRDSYGVSRGSGFVSFKSAEDANRAMNGKMVGSKPLYVALAQRKDDRKAKLQAQFSQMRPVAMAPSVGPRMPMFPPSVPGVGQQLFYGQPPPAFINPQAGFAFQQPMMPGMRPGGPMPNFMMPMVQQGQQPQRPAGRRAGSGGMQQPMPMGSQQQIFPRGGRGYRYATGRGMPDPGMHNVGAVMPSPYEMGGMAMRDAGVSQPVPIGALATALANASPDQQRLMLGENLYPLVEQLEREQAAKVTGMLLEMDQTEVLHLLESPDALKAKVAEAMEVLRSAQHLQQSNASTEQQLANLSLNDGVLSS

SEQ ID NO: 51611 - protein, 376 aa, Zea Mays
MAAQGQAAAGSASESGGSPAASAAAAAAAAFPATSLYVGDLHESVQDAQLFDVFSQVGGVVSVRVCRDINSRKSLGYAYVNYNNTSDAARALELLNFTPINGKPIRIMYSNRDPSSRKSGAGNIFIKNLDKSIDNKALYDTFCAFGNILSCKIATDPSGESRGYGFVQFEMDESAQSAIDKLNGMLINDKKVYVGPFVRKQDRENVSNNIKFSNVYVKNLSDTVTDDELKEMFGKYGTITSAVVMRDSDGNSRCFGFVNFENADAAAQAVQELNGKIFNDKELYVGRAQKKSEREMELKEKFEKNIQEVAEKFQNTNLYLKNLDDNIDDEKLREIFAEYGNITSCKVMRDSYGVSRGSGFVSFKSAEDANRAISPI

SEQ ID NO: 51612 - protein, 66 aa, Zea Mays
MYPRMSSGPQSISICLLGSLPHLSALPLEPPHALLLPRPSWSLLRVLTSMRLLLRRRRRFPMWGGD

SEQ ID NO: 51613 - protein, 769 aa, Zea Mays
MHQGQGSDLLRPPIGRSAEAPARQSRQHCSPLRAVVDAAPIQTTKKRVFHFGKGKSEGNKTMKELLGGKGANLAEMASIGLSVPPGFTVSTEACQQYQDAGCALPAGLWAEIVDGLQWVEEYMGATLGDPQRPLLLSVRSGAAVSMPGMMDTVLNLGLNDEVAAGLAAKSGERFAYDSFRRFLDMFGNVVMDIPRSLFEEKLEHMKESKGLKNDTDLTASDLKELVGQYKEVYLSAKGEPFPSDPKKQLELAVLAVFNSWESPRAKKYRSINQITGLRGTAVNVQCMVFGNMGNTSGTGVLFTRNPNTGEKKLYGEFLVNAQGEDVVAGIRTPEDLDAMKNLMPQAYDELVENCNILESHYKEMQDIEFTVQENRLWMLQCRTGKRTGKSAVKIAVDMVNEGLVEPRSAIKMVEPGHLDQLLHPQFENPSAYKDQVIATGLPASPGAAVGQVVFTAEDAEAWHSQGKAAILVRAETSPEDVGGMHAAVGILTERGGMTSHAAVVARGWGKCCVSGCSGIRVNDAEKLVTIGGHVLREGEWLSLNGSTGEVILGKQPLSPPALSGDLGTFMAWVDDVRKLKVLANADTPDDALTARNNGAQGIGLCRTEHMFFASDERIKAVRQMIMAPTLELRQQALDRLLPYQRSDFEGIFRAMDGLPVTIRLLDPPLHEFLPEGNIEDIVSELCAETGANQEDALARIEKLSEVNPMLGFRGCRLGISYPELTEMQARAIFEAAIAMTNQGVQVFPEIMVPLVGTPQLIIIADVWYF

SEQ ID NO: 51614 - protein, 104 aa, Zea Mays
MPGQPRPAHLDGSSPGDFGFDPLGLATVPENFDPLGFSKDPAKFEEYKLKEIKNGRLAMLAFVGFCVQQSAYPGTGPLENLASHLADPWHNNIGDIIIPRSISP

SEQ ID NO: 51615 - protein, 91 aa, Zea Mays
MEARPGPGNTTQQRPQRPGRENTTWHTSGSRSSRCSRTCAGPSCTCELSRGPKGRRGSDQSAGNRWTAAPWRWLVPDSTGPSRCRGKCSRC

SEQ ID NO: 51616 - protein, 318 aa, Zea Mays
MLGTFKADVKIVDDTTISVDGKPITVVSSRDPLKLPWGELGIDIVIEGTGVFVDGPGAGKHIQAGAKKVIITAPAKGADIPTYVVGVNEGDYDHSVADIISNASCTTNCLAPFVKILDEEFGIVKGTMTTTHSYTGDQRLLDASHRDLRRARAAALNIVPTSTGAAKAVALVLPQLKGKLNGIALRVPTPNVSVVDLVINTVKTGITADDVNAAFRKAAAGPLQGILEVCDVPLVSVDFRCSDVSCTIDASLSMVMGDDMVKVVAWYDNEWGYSQRVVDLAHLVAAKWPGAAAAGSGDPLEDFCKDNPETDECKVYEA

SEQ ID NO: 51617 - protein, 134 aa, Zea Mays
MALPNQGTVDYPSFKLVIVGDGGTGKTTFVKRHLTGEFEKKYEPTIGVEVHPLDFTTNCGKIRFYCWDTAGQEKFGGLRDGYYIHGQCAIIMFDVTSRLTYKNVPTWHRDLCRVCENIPIVLCGNKFGGLRDGY

SEQ ID NO: 51618 - protein, 159 aa, Zea Mays
MTTAFSYLQKAGGLESEKDYPYTGSDGKCKFDKSKIVASVQNFSVVSVDEAQISANLIKHGPLAIGINAAYMQTYIGGVSCPYICGRHLDHGVLLVGYGASGFAPIRLKDKPYWIIKNSWGENWGENGYYKICRGSNVRNKCGVDSMVSTVSAVHASKE

SEQ ID NO: 51619 - protein, 88 aa, Zea Mays
MPTVGNEMAPRRRRFISFRFSMSGTRSAEMLLAAWHTMLRWARSRPMLRPSPFTGLPSEAGSCWLTWVGLAAVESAAEVAMAAAGEDR

SEQ ID NO: 51620 - protein, 402 aa, Zea Mays
MPLVPRLSLHPCCYGGGLSEFSGLRSSASLPMRRNATSDDFMSAVSFRTHAVGTSGGSRRAPTEAKLKVAINGFGRIGRNFLRCWHGRGDASPLDVIAINDTGGVKQASHLLKYDSTLGIFDADVKPVGDNAISVDGKVIKVVSDRNPSNLPWGELGIDLVIEGTGVFVDREGAGKHIQAGAKKVLITAPGKGDIPTYVVGVNADQYNPDEPIISNASCTTNCLAPFVKVLDQKFGIIKGTMTTTHSYTGDQRLLDASHRDLRRARAAALNIVPTSTGAAKAVSLVLPNLKGKLNGIALRVPTPNVSVVDLVVQVSKKTLAEEVNQAFRDAAANELTGILEVCDVPLVSVDFRCSDVSSTIDASLTMVMGDDMVKVISWYDNEWGYSQRVVDLADICANQWK

SEQ ID NO: 51621 - protein, 114 aa, Zea Mays
MSILSVHHPLKSQDKSPQQAITLSCSRESSLKITGKNSLLLDDNADLALVKHVIEGPSLPLLVPVVHLPHASRDQTQGQSNEDLLHHTRALEGGMRNPAACHLLSCLLRSDAKR

SEQ ID NO: 51622 - protein, 62 aa, Zea Mays
MEGLTWGASKLVPVGYGIKKMTIMLTIVDDLVSIDTLIEDHLTQEPINEYVQSCDIVAFNKI

SEQ ID NO: 51623 - protein, 163 aa, Zea Mays
MLSSYAPVISAEKAYHEQLSVAEITNSAFEPSSMMVPKDVNAAVATIKTKRTIQFVDWCPTGFKCGINYQPPSVVPGGDLAKVQRAVCMISNSTSVVEVFSRIDHKFDLMYAKRAFVHWYVGEGMEEGEFSEAREDLAALEKDYEEVGAEFDEGEDGDEGDEY

SEQ ID NO: 51624 - protein, 104 aa, Zea Mays
MQHGFSDAIAKVGLTKFVSDLFLVGLFYHLYNQIATNTLERVAPLTHAVGNVLKRVFAIGFSIIVFGNKISTQTGIGTSIAIAGVAMYSYIKAKIEEEKRKKSA

SEQ ID NO: 51625 - protein, 292 aa, Zea Mays
MFKYDTVHGQWKHSDIALKDSKTLLFGEKPVTVFGIRNPEEIPWGEAGAEYVVESTGVFTDKDKAAAHLKGGAKKVVISAPSKDAPMFVVGVNEDKYTSDVNIVSNASCTTNCLAPLAKVIHDNFGIIEGLMTTVHAITATQKTVDGPSAKDWRGGRAASFNIIPSSTGAAKAVGKVLPELNGKLTGMSFRVPTVDVSVVDLTVRIEKGASYEEIKKAIKAASEGPLKGIMGYVEEDLVSTDFTGDSRSSIFDAKAGIALNDHFIKLVSWYDNEWGYSNRVVDLIRHMFKTQ

SEQ ID NO: 51626 - protein, 84 aa, Zea Mays
MLGVAGMLIPEVLTKAGLINAPQWTSRTPAASTRTPSSRATACRRTSAATRAASSTRSTSRPRSRPRRRSSPTGGWRCWRSWAS

SEQ ID NO: 51627 - protein, 77 aa, Zea Mays
MGGGNAQKSKMARERNAEKNKGGKGSQLEANKKAMNIQCKICMQTFICTTSEAKCKEHAEARHPKNDLYQCFPHLKN

SEQ ID NO: 51628 - protein, 390 aa, Zea Mays
MVVLYNHGLMGSLSLSPCFSKFKELAQAYEVLSDPEKREIYDQYGEDALKEGMGGGGSHVDPFDIFSSFFGPSFGGGGGSSRGRRQRRGEDVVHPLKVSLEDLYNGTSKKLSLSRNVICSKCKGKGSKSGASMRCPGCQGSGMKVTIRQLGPSMIQQMQQPCNECKGTGESINEKDRCPGCKGEKVIQEKKVLEVHVEKGMQHNQKITFPGEADEAPDTVTGDIVFVLQQKDHSKFKRKGEDLFYEHTLSLTEALCGFQFVLTHLDNRQLLIKSDPGEVVKPDQFKAINDEGMPIYQRPFMKGKLYIHFTVEFPDSLAPEQCKALETVLPPRPSSKLTDMEIDECEETTMHDVNNIEEEMRRKQAHAAQEAYEEDDEMPGGAQRVQCAQQ

SEQ ID NO: 51629 - protein, 116 aa, Zea Mays
MSNIGQSFQAGKAEAQGEYQAEHAAQCVKDTAGAAADSAQLQQHRATGTVEQVAQTGQGVAAGVKDTVAGAAVGVTNTVAGVAAGVTNTVTGAVAGVTNTVTGAAAGVKDTVTGGH

SEQ ID NO: 51630 - protein, 123 aa, Zea Mays
MQIFVKTLTGKTITLEVESSDTIDNVKAKIQDKEGIPPDQQRLIFAGKQLEDGRTLADYNIQKESTLHLVLRLRGGIIEPSLQALARKYNQDKMICRKCYARLHPRAVNCRKKKCGHSNQICI

SEQ ID NO: 51631 - protein, 209 aa, Zea Mays
MEDFYEARIDDVDGEKIGMFGVYDGHGGVRAAEYVKQHLFSNLIKHPKFITDTKAAIAETYNLTDSEFLKADSCQTRDAGSTASTAIIVGDRLLVANVGDSRAVISKGGQAIAVSRDHKPDQTDERQRIEDAGGFVMWAGTWRVGGVLAVSRAFGDKLLKQYVVADPEIKEEVVDSSLEFLILASDGLWDVVTNEAIMKLSGQSPKRMR

SEQ ID NO: 51632 - protein, 272 aa, Zea Mays
MGSRKGWFPVALLLLADSALWPPVAAAAAGGGEAEHAVQQHSERISGSAGDVLEDNPVGRLKVFIYDLPRKYNKKMVTKDSRCLSHMFAAEIFMHRFLLSSAVRTLNPKEADWFYTPVYTTCDLTNAGLPLPFKSPRVMRSAIQYISNKWPFWNRTDGADHFFVVPHDFAACFHYQEEKAIERGILPLLRRATLVQTFGQENHVCLKEGSIIIPPYAPPQKMQAHLISPDTPRSIFVYFRGLFYDTGNDPEGGYYARCASFAMGELQEQPSV

SEQ ID NO: 51633 - protein, 211 aa, Zea Mays
MSPSEPTREESVYMAKLAEQAERYEEMVEFMERVARYAGGAGGGDELSVEERNLLSVAYKNVIGARRASWRIISSIEQKEEGRGNEAHAASIRAYRSKIEAELARICDGILALLDSHLVPSAGGAESKVFYLKMKGDYHRYLAEFKSGAERKDAAESTMNAYKAAQDIALADLAPTHPIRLGLALNFSVFYYEILNSPDRACNLAKQGMGC

SEQ ID NO: 51634 - protein, 516 aa, Zea Mays
MQFALALDTNSGPHQIRSCEGDGIDRLEKLSIGGRKQEKALRNRCFGGRVAATTQCILTSDACPETLHSQTQSSRKNYADANRVSAIILGGGTGSQLFPLTSTRATPAVPVGGCYRLIDIPMSNCFNSGINKIFVMSQFNSTSLNRHIHRTYLEGGINFADGSVQVLAATQMPEEPAGWFQGTADSIRKFIWVLEDYYSHKSIDNIVILSGDQLYRMNYMELVQKHVEDDADITISCAPVDESRASKNGLVKIDHTGRVLQFFEKPKGADLNSMRVETNFLSYAIDDAQKYPYLASMGIYVFKKDALLDLLKSKYIQLHDFGSEILPRAVLDHSVQACIFTGYWEDVGTIKSFFDANLALTEQPSKFDFYDPKTPFFTAPRCLPPTQLDKCKMKDAFISDGCLLRECNIEHSVIGVCSRVSSGCELKDSVMMGADTYETEEEASKLLLAGKVPVGIGRNTKIRNCIIDMNARIGKNVVITNSKGIQEADHPEEGYYIRSGIVVILKNATINDGSVI

SEQ ID NO: 51635 - protein, 149 aa, Zea Mays
MQCLGAICGAGVVKGFQQGLYMGNGGGANVVAPGYTKGDGLGAEIVGTFILVYTVFSATDAKRNARDSHVPILAPLPIGFAVFLVHLATIPITGTGINPARSLGAAIIYNRDHAWNDHWIFWVGPFIGAALAAIYHQVIIRAIPFKSRS

SEQ ID NO: 51636 - protein, 96 aa, Zea Mays
MSLIVNLIHPFDELIDVVLAVTGITALHIVVPLLLQASQRRLQLEWPQEVVGLLEVWANSHDLVNKILNADDVVLAQALSMTWLLDRGILCLFSFP

SEQ ID NO: 51637 - protein, 409 aa, Zea Mays
MASQGSSVFAALEQAPEDPILGVTVAYNKDPSPVKVNLGVGAYRTEEGKPLVLNVVRRAEQMLINNPSRVKEYLPITGLAEFNKLSAKLIFGADSPAIQENRVATVQCLSGTGSLRVGGEFLARHYHERTIYIPQPTWGNHPKVFTLSGLNVRSYRYYDPATCSLHFEGLLEDLGSAPSGSIVLLHACAHNPTGVDPTIEQWEQIRQLMRSKSLLPFFDSAYQGFASGSLDKDAQSVRMFVADGGELLMAQSYAKNMGLYGERVGALSIVCKSADVAVRVESQLKLVIRPMYSNPPLHGASIVATILRDSEMFNEWTLELKAMADRIINMRQQLFNALKSRGTPGDWSHIIKQIGMFTFTGLNSEQVAFMRQEYHIYMTSDGRISMAGLSMRTVPHLADAIHAAVTQLK

SEQ ID NO: 51638 - protein, 58 aa, Zea Mays
MARIKVHELRGKSKTDLQAQLKELKSELSLLRVAKVTGGAPNKLSKMWCAPRSRACSQ

SEQ ID NO: 51639 - protein, 78 aa, Zea Mays
MEACDLLGGDACNGPMFPEAKPASAAAAASRSVVGVDRDYLSYDEPKTVFPGEACDDLGGEFCEAPYQDGVSKELAHA

SEQ ID NO: 51640 - protein, 257 aa, Zea Mays
MAHRVLLLLSLASAAAVAAAVDAEDPLIRQVVPGGDDNDLELNAESHFLSFVQRFGKSYKDADEHAYRLSVFKANLRRARRHQLLDPSAEHGVTKFSDLTPAEFRRTYLGLRKSRRALLRELGESAHEAPVLPTDGLPDDFDWRDHGAVGPVKNQGSCGSCWSFSASGALEGAHYLATGKLEVLSEQQFVDCDHECDSSEPDSCDSGCNGGLMTTAFSYLQKAGGLEIQNFSVVSVDEAQISANLIKHGPLAIDAIS

SEQ ID NO: 51641 - protein, 56 aa, Zea Mays
MVLQNDIDLLNPPAELEKLKHKKKRLVQSPNSFFMDVKCQGCFSIGCANSILVKFS

SEQ ID NO: 51642 - protein, 58 aa, Zea Mays
MGQYRSTKNQIRSLRYHCRCNYIIRKATVWEVFSIACLIFHWFVSLRYDHDYISQANT

SEQ ID NO: 51643 - protein, 55 aa, Zea Mays
MVPLLHGRNAFFLFNTLLDPVNRVSGFNVDLDLFPSESFDLDHGSTPKPEDQMKS

SEQ ID NO: 51644 - protein, 301 aa, Zea Mays
MISNHLLFKLASGEVFGQDQPIALKLLGSERSFQALEGVAMELEDSLYPLLREVSIGIDPYVVFQDVDWALLIGAKPRGPGMERAALLDINGQIFADQGKALNAVASRNAKVLVVGNPCNTNALICLKNAPNIPAKNFHALTRLDENRAKCQLALKAGVFYDKVSNVTIWGNHSTTQVPDFLNAKIDGRPVKEVIKDTKWLEEEFTLTVQKRGGVLIQKWGRSSAASTAVSIVDAIRSLVTPTPEGDWFSTGVYTTGNPYGIAEDIVFSMPCRSKGDGDYELASDVLMDDFLWERIKKLTL

SEQ ID NO: 51645 - protein, 172 aa, Zea Mays
MALPNQGTVDYPSFKLVIVGDGGTGKTTFVKRHLTGEFEKKYEPTIGVEVHPLDFTTNCGKIRFYCWDTAGQEKFGGLRDGYYIHGQCAIIMFDVTSRLTYKNVPTWHRDLCRVCENIPIVLCGNKVDVKNRQVKAKQVTFHRKKNLQYYEISAKSNYNFEKPFLYLARKLA

SEQ ID NO: 51646 - protein, 70 aa, Zea Mays
MRQVARAVPARLLLLQRPRRAQVLREPQAQGHRCPRRRRRDLRCHFQGGGRLYCPDGAALIGHQLAEAMR

SEQ ID NO: 51647 - protein, 66 aa, Zea Mays
MAASMISSSALAVAPQGLPPLGRRASSFAVVCSKKKIKTDKPYGIGGGLTVDVDANGRKGKIDRWS

SEQ ID NO: 51648 - protein, 62 aa, Zea Mays
MVVTSFLVERRKPRLRRHHHRHRWRRWSYTRICGLATMLNKRNALCCAFKLINCGNRRFCFT

SEQ ID NO: 51649 - protein, 365 aa, Zea Mays
MASTKAPGPGEKHHSIDAQLRQLVPGKVSEDDKLIEYDALLVDRFLNILQDLHGPSLREFVQECYEVSADYEGKGDTTKLGELGAKLTGLAPADAILVASSILHMLNLANLAEEVQIAHRRRNSKLKKGGFADEGSATTESDIEETLKRLVSEVGKSPEEVFEALKNQTVDLVFTAHPTQSARRSLLQKNARIRNCLTQLNAKDITDDDKQELDEALQREIQAAFRTDEIRRAQPTPQDEMRYGMSYIHETVWKGVPKFLRRVDTALKNIGINERLPYNVSLIRFSSWMGGDRDGNPRVTPEVTRDVCLLARMMAANLYIDQIEELMFELSMWRCNDELRVRAEELHSSSGSKVTKYYIVYLLAQ

SEQ ID NO: 51650 - protein, 91 aa, Zea Mays
MYKEAFESIEIPKYVDTVTPQYKPKFDAVIAELKEAEKEHQKESERIEKELAEMEEMRKKISTMTADDYFEKYPELRKKFDDEIRNDNWGY

SEQ ID NO: 51651 - protein, 131 aa, Zea Mays
MAEQTEKAFLKQPKVFLSSKKSGKGKKPGKGGNRFWKSIGLGFKTPREAIEGTYIDKKCPFTGTVSIRGRIIAGTCHSAKMNRTIIVRRNYLHFVKKYQRYEKRHSNIPAHISPCFRVKEGDHVIIGQCSM

SEQ ID NO: 51652 - protein, 334 aa, Zea Mays
MVQQLDGTSNEWGWCKQKLGANAILAVSLAVCKAGAMVKKIPLYQHIANLAGNKTLVLPVPAFNVINGGSHAGNKLAMQEFMILPTGASSFKEAMKMGVEVYHNLKSIIKKKYGQDATNVGDEGGFAPNIQENKEGLELLKAAIEKAGYTGKVVIGMDVAASEFFGEKDKTYDLNFKEENNDGSKKISGDSLKDLYKSFVSEYPIESIEDPFDQDDWSTYAKLTDEIGQKVQIVGDDLLVTNPTRVAKAINEKTCNALLLKVNQIGSVTESIEAVRMSKRAGWGVMASHRSGETEDTFIADLSVGLSTLLRIEEELGDAAVYAGAKFRAPVEPY

SEQ ID NO: 51653 - protein, 74 aa, Zea Mays
MNSTTNSVDDDAKYSDLPASYHCGALISPALVSTSGMSIPATPSMAHRPFTSSACRRGRRGREGRGATRPWPPP

SEQ ID NO: 51654 - protein, 77 aa, Zea Mays
MPNTDRPFKLNWASYSMGEKRSEVASDHSIFVGDLAADVTDEMLLELFSSKYRSVKGAKVIIDANTGRSRGYGFVRF

SEQ ID NO: 51655 - protein, 87 aa, Zea Mays
MPSAATKSSFWCLYLKGWRKVTLASGAPRPGSWITSVTTPLRYPLRSPKSRERNRAGPLRWWGWRKVTLASGAPRPGSWITSVTTPL

SEQ ID NO: 51656 - protein, 160 aa, Zea Mays
MLMPKDPNATVIMLATGTGIAPFRSFLWKMFLEEHEDYKFSGLAWLFLGVPTSDSLLYKEELEKMKEMAPDNFRLDFAVSREQTNAAGEKMYIQTRMAEYREELWELLKKDNTYVYMCGLKGMEKGIDDIMLNLAAKDGIDWMQYKKQLKKGEQWNVEVY

SEQ ID NO: 51657 - protein, 66 aa, Zea Mays
MHSLCNEAFDEAISELDSLGEESYKDSTLIMQLLRDNLTLWTSDTNEDGGDEIKDAAAPKESAEGQ

SEQ ID NO: 51658 - protein, 165 aa, Zea Mays
MPFGQVPALQDGDLYLFESRAICKYAARKNKPELLREGNLEEAAMVDVWIEVEANQYTAALNPILFQVLISPMLGGTTDQKVVDENLEKLKKVLEVYEARLTKCKYLAGDFLSLADLNHVSVTLCLFATPYASVLDAYPHVKAWWSGLMERPSVQKVAALMKPSA

SEQ ID NO: 51659 - protein, 145 aa, Zea Mays
MASLTELSFNWTGFINAMISNISFTYMSIYSKKAMFEGPQLMQHGFSDAIAKVGLTKFVSDLFLVGLFYHLYNQIATNTLERVAPLTHAVGNVLKRVFAIGFSIIVFGNKISTQTGIGTSIAIAGVAMYSYIKAKIEEEKRKKSA

SEQ ID NO: 51660 - protein, 82 aa, Zea Mays
MASGELHIVSRVGPEKELKAIQYLERRECEYDQKISIDFYKEGDPLKPAVTGVLVFVSTPDPIGNKYYLGPAPLQDMARPRR

SEQ ID NO: 51661 - protein, 335 aa, Zea Mays
MQSAAAFRPCPTRLLVSSPCRPLLSARPLRASAAGAVATRSSAVGPRGLGLGLLPASPDRDGKCRQRQVSCSAAGDAVAAPKAEEGGGLMKTLWLGSLFGLWYLFNIYFNIYNKQVLKVFPYPINITEVQFAVGTVAALFMWITGIIKRPKISGAQLVAILPLAIVHTMGNLFTNMSLGKVAVSFTHTIKAMEPFFSVILSAIFLGELPTIWVVSSLLPIVGGVALASLTEASFNWAGFWSAMASNVTFQSRNVLSKKLMVKKEESLDNLNLFSIITVMSFFLLAPVTFFTEGSECKPSPYKVSFRWTVFPCIPTGVLHDFGDGVSCHSFCGQLC

SEQ ID NO: 51662 - protein, 394 aa, Zea Mays
MRECISVHIGQAGIQVGNACWELYCLEHGIQPDGQVPGDKTAGHHDDAFSTFFSQTGAGKHVPRAIFVDLEPTVIDEVRTGTYRQLFHPEQLISGKEDAANNFARGHYTIGKEIVDLCLDRIRKLADNCTGLQGFLVFNAVGGGTGSGLGSLLLERLSVEYGKKSKLGFTVYPSPQVSTSVVEPYNSVLSTHSLLEHTDVSILLDNEAIYDICRRSLDIERPNYSNLNRLVSQVISSLTASLRFDGALNVDVNEFQTNLVPYPRIHFMLSSYAPVISSAKAFHEQLSVAEITSSAFEPASMMVKCDPRHGKYMACCLMYRGDVVPKDVNAAVATIKTKRTIQFVDWCPTGFKCGINYQAPTVVPGADLAKRAFVHWYVGEGLAALEKDYEEEEY

SEQ ID NO: 51663 - protein, 53 aa, Zea Mays
MKNKVAMIHKEAEEKRAMVEAKRGEEVLKAEEMAAKYRATGHAPKKLIGCFGA

SEQ ID NO: 51664 - protein, 55 aa, Zea Mays
MGKGTGSFGKRRNKTHTLCIRCGRRSFHLQKSTCSSCGYPAARIRKYFVYFLLNE

SEQ ID NO: 51665 - protein, 74 aa, Zea Mays
MDACIHRPRTRRRDVLRLRATGLASRSLDCQGRGKAKGEKESDPSKPSQGREEEEEEEEASAACRRGLPTAWTS

SEQ ID NO: 51666 - protein, 447 aa, Zea Mays
MAAAIVLSGQVRPLPSSLPLSLLLLLLLCCSGTSWGWSTSRGGAARECGFDGKLEALEPRHKVQSEAGSVQYFSRFNEADRELTCAGIFAVRVVVDAMGLLLPRYSNVHSLVYIVQGRGIIGFSFPGCQEETQQQQYGYGYGYGHHHHQHDHHKIHRFEQGDVVAMPAGAQHWLYNDGDAPLVAVYVFDENNNINQLEPSMRKFLLAGGFSKGQPHFAENIFKGIDARFLSEALGVSMHVAEKLQSRRDQRGEIVRVEPEHGFHQLNPSPSSSSFSFPSSQVQYQTCQRDVDRHNVCAMEMSAVRVDLYQDAIMSPFWNFNAHSAMYGIRGSARVQVASDNGTTVFDDVLRAGQLLIVPQGYLVATKAQGEGFQYIAFETNPDTMVSHVAGKNSVLSDLPAAVIASSYAISMEEAAELKNGRKHELAVLTPAGSGSYQQGQAGSAQQ

SEQ ID NO: 51667 - protein, 66 aa, Zea Mays
MAKQSSLLRIFAGISTVQVLNGRSFYLGTSIQLVLILVDILARTHEEFPTILRPMFSKLRLVGGQL

SEQ ID NO: 51668 - protein, 232 aa, Zea Mays
MFKGTYEAITKGNPMWNQLTVPEASLYSWDSKSTYIHEPPYFKDMTMSPPGPSTVKDAYCLLNFGDSITTDHISPAGSIHKDSPAAKYLMERGVDRKDFNSYGSRRGNDEVMARGTFANIRIVNKFLNGEVGPKTIHVPTGEKLSVFDAAMRYKSEGHATIILAGAEYGSGSSRDWAAKGPMLLGVKAVIAKSFERIHRSNLVGMGIIPLCFKAGCDCYYRQWEIFHLHRSL

SEQ ID NO: 51669 - protein, 97 aa, Zea Mays
MATEKLGIKVERNPPESRLSELGVRQWPKWGCEKSKFPWTYSAKETCYLLQGKVKVYPEGHGEEFVEIGAGDLVVFPKGMSCTWDVAEAVDKHYNFE

SEQ ID NO: 51670 - protein, 88 aa, Zea Mays
MPKGMMLVFAKNLPSTTGPFALENGLRNGTSRGSMGRFQDLSECTARDLQLDQSTSWPGSPTVPFCIPTSRIVNAFCPLLFNQSPQNC

SEQ ID NO: 51671 - protein, 127 aa, Zea Mays
MSTTQLKGSKEDAEAKQDQGFLYVKVSMDGAPYLRKIDLKTYKNYKDLSTALEKMFSGFSTGKDGLSEYRKDGEYVLTYEDKDGDWMLVGDVPWEMFADSCRRLRIMKGSDAIGLAPRAADKSKNRN

SEQ ID NO: 51672 - protein, 166 aa, Zea Mays
MDDPTLISRQQLFARIVGGLGGRAAEEVIFGEPEVTTGAAGDLQQITGLAKQMVVTFGMSEIGPWSLMEGGAQSGDVIMRMMARNSMSEKLAEDIDSAVKQLSDEAYEIALRHIRNNREAIDKIVEVLIEKETVTGDEFRAILSEFAEIPVENRVPPATPAAALPA

SEQ ID NO: 51673 - protein, 304 aa, Zea Mays
MRECISVHIGQAGIQVGNACWELYCLEHGIQGFLVFNAVGGGTGSGLGSLLLERLSVEYGKKSKLGFTVYPSPQVSTSVVEPYNSVLSTHSLLEHTDVSILLDNEAIYDICRRSLDIERPNYSNLNRLVSQVISSLTASLRFDGALNVDVNEFQTNLVPYPRIHFMLSSYAPVISSAKAFHEQLSVAEITSSAFEPASMMVKCDPRHGKYMACCLMYRGDVVPKDVNAAVATIKTKRTIQFVDWCPTGFKCGINYQAPTVVPGADLAKRAFVHWYVGEGMEEGEFSEAREDLAALEKDYEEEEY

SEQ ID NO: 51674 - protein, 180 aa, Zea Mays
MHSEADLQSKITNKVYFDISIGNPVGKNVGRIVIGLYGDDVPQTAENFRALCTGEKGFGYKGSSFHRVISDFMIQGGDFDKGNGTGGKSIYGRTFKDENFKLVHTGPGVVSMANAGPNTNGSQFFICTVKTPWLDGRHVVFGQVVEGMDIVRLIESQETDRGDRPKKKVVISECGELPVV

SEQ ID NO: 51675 - protein, 349 aa, Zea Mays
MIGCAKPLAAPLQAWARPPSPAGRRLPPSFCAPDTSPALTRAVESPGQSQSDDAPPPRSGEAIYIVSDGTGWTAEHSVNAALGQFENCLADRGCAVNTHLFSLIDDMDRLIEVIKQAAKEGALVLYTLADPSMAEATKKACDFWGVPCTDVLRPTVEAIASHIGVAPSGIPRSSPSRNGRLSEDYFQRIDAIDFTIKQDDGALPQNLYRADIVLAGVSRTGKTPLSIYLAQKGYKVANVPIVMGVDLPKSLFEINQDKVFGLTINPAILQAIRKTRAKTLGFDGRQSNYAEMDHVRQELVHANQIFAQNPSWPVIAVTGKAIEETAAVILGILHDRKQKCSMPRISKRY

SEQ ID NO: 51676 - protein, 265 aa, Zea Mays
MRLSSSSTTAESTPRRITLTRARTDGVMSTGKTPRLLLSTAMKMYQRTVRKVCRRQLRTSPSVLQLRLVAEHFSSTTRVSSQEPVETALDHGVTAVGYGTENGKDYWIVKNSWGSSWGESGYVRMERNIKASSGKCGIAVEPSYPLKKGANPPNPGPTPPSPTPPPTVCDNYYSCPDSTTCCCIYEYGKYCFAWGCCPLEGATCCDDHYSCCPHDYPVCNVKQGTCLMGKDSPLSLSVKATKRTLAKPHWAFPGNTAADGMKSSA

SEQ ID NO: 51677 - protein, 393 aa, Zea Mays
MSEWDDYPRYLNSDGVEIAPAVYGDIYGYGYAPYGAYSPATSPVPTVDGQMFGAQHYQYPTAYFQPPTPVPSTTQSDLQSSKNPEKPAAKADPAKTTNGVPNGTAHSNSGTVPLASSQQNSSLTPDGTYRAPLLGGVPSAGYLDTTYGYDSTGAHFAWYDGSAYANGQQRATTTNHFPSSTFGNGSPARYQNKSTTTPQMGMQNRRPTTTSPAPTYPNRMYPSSRPYTQYGNSIKTGLPYGSNGYDSRIYGRWGLGMDNRYRPRGRNGYYGYGNESQDGTIELNRGPRSGRFKNQKLYGHTVTIAVKGQSLPSGESKDDSAVPDRAQFNRDDFPVQYDAAKFFVIKSYSEDDIHKSVKYNVWASTTNGNKKLDAAYQEAQSKGSACPIFLFFS

SEQ ID NO: 51678 - protein, 124 aa, Zea Mays
MLQESNISKFKSQVQSSQENHFSLLQRETEKLRGDIDKMRSELKYEIDKVTAGQRLDLNLERGRIRDELAKQNEETTELTTKLDKEIHSLKAQLEAAKYDVIKYCIGTIVSISAVGLAVLRIVM

SEQ ID NO: 51679 - protein, 126 aa, Zea Mays
MKGAKSKGAAKADAKLAVKSKGAEKPAKGRKGKAGKDPNKPKRAPSAFFVFMEEFRKEFKEKNPKNKSVAAVGKAAGDRWKSLSESVSSIFCTKVVVDWTRNLVLINCFTRAFVWIVGQGSLCSQG

SEQ ID NO: 51680 - protein, 151 aa, Zea Mays
MAMLGVAGMLIPEVLTKAGLINAPQWYDAGKSEYFASSSTLFVIEFILFHYVEIRRWQDIKNPGSVNQDPIFKSYSLPPHECGYPGSVFNPLNFAPTLEAKEKELANGRLAMLAFLAFLIQHNVTGKGPFDNLLQHLSDPWHNTIIQTLSG

SEQ ID NO: 51681 - protein, 505 aa, Zea Mays
MASSTAASPLTCHHLGSVGARPRLPSLSISLRRRSSSSSKPTSLSHSLPSKHSLAPPPAASASSRRGLTPVPASASAAAAPAPDPVPVPAPAPAPAPAPAAPPKKPALQGAAIKPLLASIATGVLIWLIPPPAGVPRNAWQLLAIFLSTIVGIITQPLPLGAVALLAPAIPSVSARAGGIFLPLVKSLCEACGSRAGDGTERRLGAWLMLTCFQTSVVSSAMFLTAMAANPLSANLTAATIGEGIGWTLWAKAAIVPGLLSLVLVPLILYVIYPPEVKASPDAPRLAKERLAKMGPMSKEETIMAGTLLLTVGLWIFGGMLNVDAVSAAILGLAVLLISGVVTWKECLAESVAWDTLTWFAALIAMAGYLNKFGLISWFSETVVKFVGGLGMSWQLSFGVLVLLYFYSHYFFASGAAHIGAMFTAFLSVASALGTPSLFAAMVLSFLSNLMGGTTHYGIGSAPVFYGAGYVPLAQWWGYGFVISVVNIIIWLGVGGFWWKIIGLW

SEQ ID NO: 51682 - protein, 52 aa, Zea Mays
MMMMRGESYALVLLLPSLCAAIHPSPLDDRGENNAELCAPGLCLLPSRPFNL

SEQ ID NO: 51683 - protein, 154 aa, Zea Mays
MFQDITTLLLDPKAFRDTIDLFVERYKDQGITVVAGVEARGFIFGPPIALAIGAKFVPLRKPKKLPGEVISEEYSLEYGTDKIEMHVGAVQANDRALVVDDLIATGGTLCAAVKLIERVGAKVVECACVIELPELKGRDKLGDRPVFVLVEADA

SEQ ID NO: 51684 - protein, 137 aa, Zea Mays
MGVARGSVGTTIGRRDTSRRRGGEGSIGADDEGGGRRRRRRAGVDLLKDEIITNVQLQGSHLQLPPQLQPWAASPDSAAASTNSGAAFFSGATPRTTVACAAVLVSSSLSRSRSLIRSCKTSSTLWCKRSSISSRIN

SEQ ID NO: 51685 - protein, 136 aa, Zea Mays
MQSFKSKEYVRETFSWQYYYWYLTNDGIEHLRNYLNLPSEIVPATLKKSARPLGRPFGSGPPGDRPRGPGRFEDRPRFGDRDEYRGGPRGAPGDFGGDKSGAPAEFQPSFRSSGARPGFGRGGGSGFGAGPTSSME

SEQ ID NO: 51686 - protein, 140 aa, Zea Mays
MALASRAAAAAVACVLLALAASAAGAGSNSPAPAPAVDCISQAASLIDCIDYVQKGSSARRPSAACCGEVKTAVASPVIVGCLCSLAGSNSSNLGFPIDMKRVLALPGACGASNAAFSKCNISALPPTEEKKLMSCNTLK

SEQ ID NO: 51687 - protein, 411 aa, Zea Mays
MMALAVDVSRFEGVPMAPPDPILGVSEAFKADKSELKLNLGVGAYRTEELQPYVLNVVKKAENLMLEKGENKEYLPIEGLAAFNKATAELLLGADNPVINQGLVATLQSLSGTGSLRLAAAFIQRYFPEAKVLISSPTWGNHKNIFNDARVPWSEYRYYDPKTVGLDFEGMIADIEAAPEGSFVLLHGCAHNPTGIDPTPEQWEKIADVIQEKKHMPFFDVAYQGFASGSLDEDAFSVRLFVKRGMEVFVAQSYSKNLGLYSERVGAINVVCSAPEVADRVKSQLKRLARPMYSNPPIHGAKIVANVVGDPTMFGEWKQEMELMAGRIKNVRQKLYDSLSAKDKSGKDWSFILRQIGMFSYTGLNKAQSDNMTDKWHIYMTKDGRISLAGLSLAKCDYLADAIIDSFHNVN

SEQ ID NO: 51688 - protein, 127 aa, Zea Mays
MAAVEVQVPTAAPVEEAAQLAAASAVETPNEETAAPAVETEVVVAKEPEPVEAETETETKEAEAVAEPTEAEPKEAEPEAAAPAAETEANEEEEEAAPAVAATPEVAATEEEAAAPAPEAAVEKSVE

SEQ ID NO: 51689 - protein, 260 aa, Zea Mays
MAVGKNKRISKGKKGGKKKTVDPFSKKDWYDIKAPSVFSVRNIGKTLVSRTQGTRIASDGLKHRVFEVCLADLQGDEDQAYRKIRLRAEDVQGRNVLTNFWGMNFTTDKLRSLVKKWQTLIEAHVDVKTTDNYMLRLFCIGFTKRRPNQVKRTCYAQASQIRQIHRKMDEIMINQASTCDLKELVSKFIPEVIGKKIEKSTSSIFPLQNVFIRKVKILMAPKFDLGKLMEVHGDYKEDVGVKLERPVEGDEAMQEVAAAE

SEQ ID NO: 51690 - protein, 377 aa, Zea Mays
MAASSRPLVSVKALEGDMVTDAPGIALPPVFGAPIRPDVVRFTHKLLSCNKRQPYAVSRRAGHQTSAESWGTGRAVSRIPRVPGGGTHRAGQGAFGNMCRGGRMFAPTKIWRKWHRRVNVNLRRVAVASALAATAVPALVQARGHRIETVPEMPLVISDSAESIEKTSQALKILKQVGAYADAEKAKDSVGIRPGKGKMRNRRYINRKGPLVVYGTEGSKVVKAFRNLPGVDVANVERLNLLDLAPGGHLGRFVIWTESAFKKLEEVYGSFDAPSQKKKGFVLPRPKMANADLGRIINSDEVQSVVKPLNKEVKRREKRKNPLKNMAAVLKLNPYLGTARKMATLAEAARVKARKEKLDSKRTKLTSNVTEINVLIR

SEQ ID NO: 51691 - protein, 158 aa, Zea Mays
MNFTTDKLRSLVKKWQTLIEAHVDVKTTDNYMLRLFCIGFTKRRPNQVKRTCYAQASQIRQIRRKMVEIMINQASTCDLKELVSKFIPEVIGKEIEKSTSSIFPLQNVFIRKVKILKAPKFDLGKLMEVHGDYKEDVGVKLERPVEGDEAGQEVAAAE

SEQ ID NO: 51692 - protein, 89 aa, Zea Mays
MLFLNFSTGPFDSFKSAYSAAAEEFKDKEIKFLIGDIEASQGAFQYFGLKEDQTPLILIQDGDSKKFLKVHVEADQIVAWLKEYFVSAG

SEQ ID NO: 51693 - protein, 187 aa, Zea Mays
MVWLFGAVNDIFCLFQGHIENIANLKQHYGLSKTANEVTILIEAYRTLRDRGPVPASQVVRDLSGKFAFILYDTLSKSTFVAADADGSIPFFWGVDYENHLVFSDDVGILKTGCGNSYAPFPKGCFYTTSGGLQSFEHPLHEVKAVPRVDSQGQMCGSIFKVDSESKKKQDASIPRVGSAADWSNQF

SEQ ID NO: 51694 - protein, 276 aa, Zea Mays
MISSSWGAPAAFRTGFDLQHVQDGLYGRHLHVYDWPGGELKQTLDLGDTGLLPLEVRFLHDPSKDTGYVGCALTSNMVRFFKTADGSWSHEVAISVKPLKVRNWILPEMPGLITDFVISLDDRYLYFVNWLHGDIRQYNIEDPAKPFLAGQVWVGGLLQKGSDVVYVTDDGQEQQYNVPQVKGHRLRGGPQMIQLSLDGKRIYVTNSLFSRWDEQFFGDDLVKKGSHMLQIDVDTEKGGLAVNPNFFVDFGTEPDGPALAHEMRYPGGDCTSDIWI

SEQ ID NO: 51695 - protein, 179 aa, Zea Mays
MIIPKKNRNEICKYLFKEGVLYAKKDYNLAKHPQIDVPNLQVIKLMQSFKSKEYVRETFSWQYYYWYLTNDGIEHLRNYLNLPSEIVPATLKKSAKPPGRPFGSGPPGDRPRGPGRFDGDRPRFGDRDGYRGGPRGAPGDFGGDKSGAPAEFQPSFRRPGFGRGGGSGFGAGPTSSSME

SEQ ID NO: 51696 - protein, 74 aa, Zea Mays
MPKQIYEIKDFLLTARRKDARSVKIKRSKDVVKFKVRCSKYLYTLCVFDAEKANKLKQSLPPGSVPLKKILFDH

SEQ ID NO: 51697 - protein, 466 aa, Zea Mays
MSSSQRTKLNNSSPSILAKVMLVGWGGNNGSTLTAGVIANREGISWATKDKVQQANYYGSLTQASTIRVGSYNGEEIYAPFKSLLPMVNPDDLVFGGWDISSMNLADAMTRAKVLDIDLQKQLRPYMESMVPLPGVYDPDFIAANQGSRANNVIKGTKKEQVEQIIKDIREFKEKNKVDKVVVLWTANTERYSNVCAGLNDTMENLLASVDKNEAEISPSTLYAIACVTEGVPFINGSPQNTFVPGLIDLAIKNNCLIGGDDFKSGQTKMKSVLVDFLVGAGIKPTSIVSYNHLGNNDGMNLSAPQTFRSKEISKSNVVDDMVSSNAILYGPGEHPDHVVVIKYVPYVGDSKRAMDEYTSEIFMGGKSTIVLHNTCEDSLLAAPIILDLVLLAELSTRIQLKPEGTDKFHSFHPVATILSYLTKAPLVPPGTPVVNALAKQRAMLENIMRACVGLAPENNMILEYK

SEQ ID NO: 51698 - protein, 244 aa, Zea Mays
MVFPEPWCMPRLFTADIAAFYEAYYTNKGVKILKGTLAVGFDADANGDVTAVKLKDGTVLEADIVVVGVGGRPLTTLFKGQVAEEKGGIKTDASFETSVPGVYAIGDVATFPLKMYNELRRVEHVDHSRKSAEQAVKAIKGKESGEPVPEYDYLPYFYSRSFDLAWQFYGDNVGETILFGDSDPTSSKPKFGSYWIKDGKVLGAFLEGGSPDENKVIAKVAKTQPPVANLEELKKDGLQFASKI

SEQ ID NO: 51699 - protein, 71 aa, Zea Mays
MAPKFQEMSEKNLDVVFLKLDCNQDNKPLAKELGIKVVPTFKILKGGKVVKEVTGAKIDELAQAIDTVKSD

SEQ ID NO: 51700 - protein, 88 aa, Zea Mays
MSAHTFYAMFTVWGVCFFASMKDPFYDSETYRSQGGDGTVHWYYDRQEDLEASAREELLREELLEEIEQRVGGLRELEEASKEEQLTK

SEQ ID NO: 51701 - protein, 83 aa, Zea Mays
MEHKGEMKVVVRTVISLTKEEEKELKETLQDILGENKTILVEQKIDYSIMGGLVIEFGQKVLDISIRNRAKQMEAFLRQPLDF

SEQ ID NO: 51702 - protein, 550 aa, Zea Mays
MGGCHSAIAATKLKILRRGGRGAAAVLPVTNHDGPCCSSDHGSKEKKKKKKGARKGRKRASILGDAGTFDPDFSRRYRLGAELGRGEFGVTRRCEDAATGEALACKTIRRKRLLLRLAGPDATDVQREVEITRRMSEVSGGRVACLREACEDDDGVHLVMELCEGGELFDRIFERKHYSERAAAKLARTIVEVVQLCHENGVMHRDLKPENFLFVNKSEESPLKAIDFGLSVFFKPGDRFTEVVGSGCYMAPEVLKRSYGPEIDVWSAGVILHILLCGFPPFWGGSDEKIAQSILRGVINLQKDPWPKVSQSAKDLVTRMLDPDPCTRLTAKQVLEHPWLKNADKASNVSLGEVVRSRLKQLSSMNKLKKKALGVVAMNLPMEEIGKFKEMFHTMDKNKDGSLSLEELKEGFRINDHPVPEEEIKMLLQAGDIHGTDTLDCEEFVTVLLHIKKMSNDEYLPKAFEFFDKDGNGFIEMSELMETLSDGELKPDEQLVNDIIQEVDKDKDGRISYPEFELMMKSGSDWRNASRRYSTENFSSLSQKLCKDTL

SEQ ID NO: 51703 - protein, 353 aa, Zea Mays
MVQQLDGTKNEWGWCKQKLGANAILAVSLAVCKAGASIKRIPLYQHIANLAGNKQLVLPVPAFNVINGGSHAGNKLAMQEFMILPTGAASFKEAMKMGVEVYHHLKSVIKKKYGQDATNVGDEGGFAPNIQENKEGLELLKTAIEKAGYTGKVVIGMDVAASEFYSDKDQTYDLNFKEENNDGSQKISGDSLKNVYKSFVSEYPIVSIEDPFDQDDWVHYAKMTEEIGEQVQIVGDDLLVTNPTRVAKAIKEKSCNALLLKVNQIGSVTESIEAVKMSKRAGWGVMTSHRSGETEDTFIADLAVGLSTGQIKTGAPCRSERLAKYNQLLRIEEELGAIAVYAGAKFRAPVEPY

SEQ ID NO: 51704 - protein, 246 aa, Zea Mays
MFAGFATHFSPRLPQHGPYGKEREGGSGIDRGKPSLCFRDNSGDAMAMAALRREGRRLLLAPTVPNPSSAAASAAVTRSSAMSQPEMAPIGARSISTQVVRNRMKSIKNIQKITKAMKMVAASKLRAVQTRTENSRGLWQPFTALLGDTPSVDVKKNVIVAITSDKGLCGGINSTSVKVSRALHKLTSGPEKESKYVILGEKGKVQLLRDSKNSIEMTASELQKNPINYTQNHAVVFVLWAIELLE

SEQ ID NO: 51705 - protein, 145 aa, Zea Mays
MAAVETPNEETAAPAVETEVVVAKEPEPVEAETETETKEAEAVAEPTEAEPKEAEPEAAAPAAETEVKEAETEAAAPAAETEAAAAPVEAAEPEIAAETKEVAAVEANEEEEEAAPAVAATPEVAATEEEAAAPAPEAAVEKSVE

SEQ ID NO: 51706 - protein, 122 aa, Zea Mays
MEGKEEDVRLGANKFSERQPIGTAAQGAADDKDYKEPPPAPLFEPGELKSWSFYRAGIAEFVATFLFLYITILTVMGVSKSTSKCATVGIQGIAWSFGGMIFALVYCTAGISDTCLISKHRT

SEQ ID NO: 51707 - protein, 63 aa, Zea Mays
MLLHRYRYGACNCCVCRVRPEELDGMELVACCSTSESHVILSRNFDLLLLKPLAKMPLGGLSF

SEQ ID NO: 51708 - protein, 138 aa, Zea Mays
MARPLPPNPSTSFVSSTITINLSDAASTIFSRRRAPPRPFTRLRSGADLVGTVDGEVDERVVVERGERDAERLRLLEGALGCGHADDLLELARGQERADLGDGEGGRGARPEPEHHPALHLLDGAHRHMARGGWVEAD

SEQ ID NO: 51709 - protein, 130 aa, Zea Mays
MVRVSVLNDALKSMYNAEKIGKRQVMIRPSSKVIIKFLTVMQRHGYIGEFEYVDDHRSGKIVVELNGRLNKCGVISPRFDIGVKDIEGWTARLLPSRQFGYIVLTTSAGIMDHEEARRKSVGGKVLGFFY

SEQ ID NO: 51710 - protein, 53 aa, Zea Mays
MAGIGPIRQDWEPVVVRKKAPTAAAKKDEKAVNAARRAGAEIDTMKKSGFAVR

SEQ ID NO: 51711 - protein, 149 aa, Zea Mays
MSSFEVADEPAPEKPAPAKQGGSNDRDLALARVETEKRNSLIKAWEENEKTKAENKAAKKVSAILSWENTKKANIEAELKKIEEQLEKKKAEYAEKMKNKVAMIHKEAEEKRAMVEAKRGEEVLKAEEMAAKYRATGHAPKKLIGCFGA

SEQ ID NO: 51712 - protein, 127 aa, Zea Mays
MFICCGLPRICIAPVGVLQGKHHTGDVREFLLDGRLDTAADGFRPVVPHQAVLAIDGQHIHAPAVVRDRWPQYVQVPVHRLGRCLRRRLVPVEHLTDFLESVAELLLEHTLDAHIHRRRRAGAAAAS

SEQ ID NO: 51713 - protein, 382 aa, Zea Mays
MHVIAHDPYAPADRARALGVELVSFDEAIARADFISLHMPLIPTTSKIFNDESFAKMKTGVRIINVARGGVIDEDALVRALDSGKVAQAALDVFTVEPPPKDSKLVLHENVTVTPHLGASTVEAQEGVAIEIAEAVVGALRGELAATAVNAPMVPAEILSELAPYVSLAEKLGRLAVQLVAGESGIKGVKVVYTTARGPDDLDTRLLRAMVTKGLVEPVSSTFVNLVNADYTAKQRGLRLTEERVAHDSPAAEAPLESVQVRLSHVQSKFAGAISDGGDDIVLEGRVKYGVPHLTLVGPYEVDVSLEGNLILCRQIDQPGMIGKVGNILGDTNVNINFMSVGRTFRGKQAIMAIGVDEEPDKDTLEKIGAIPAIEEFVFLEL

SEQ ID NO: 51714 - protein, 158 aa, Zea Mays
MNFTTDKLRSLVKKWQTLIEAHVDVKTTDNYMLRLFCIGFTKRRPNQVKRTCYAQASQIRQIRRKMVEIMINQASTCDLKELVSKFIPEVIGKEIEKSTSSIFPLQNVFIRKVKILKAPKFDLGKLMEVHGDYKEDVGVKLERPVEGDEAVQEVAAAE

SEQ ID NO: 51715 - protein, 67 aa, Zea Mays
MSASSTPVDALGEPIPTSSVLMAASKHIAVRCRPENVAFLNCKKKDPNPEKCLEKGRQVTSCVLSRF

SEQ ID NO: 51716 - protein, 100 aa, Zea Mays
MVAFRFHQYQVVGRALPTPGDEHPKIYRMKLWATNEVRAKSKFWYFLRKLKKVKKSNGQVLAINESSSVTRRRSRTTASGCATRAEPATTTCTRSTATQP

SEQ ID NO: 51717 - protein, 110 aa, Zea Mays
MNAYKAAQDIALADLAPTHPIRLGLALNFSVFYYEILNSPDRACNLAKQAFDEAISELDSLGEESYKDSTLIMQLLRDNLTLWTSDTNEDAGDEIKEAAAAPKESAPEGQ

SEQ ID NO: 51718 - protein, 62 aa, Zea Mays
MDEVLTIKNTEIAKHLSLPPVKLHCSMLAEDAIKAAVKDYEAKKSKMGQKGEDSPSEKAAEA

SEQ ID NO: 51719 - protein, 109 aa, Zea Mays
MTFPQNYPNSPPSVRFTSEMWHPNVYPDGRVCISILHPPGEDPNGYELASERWTPVHTVESIVLSIISMLSSPNDESPANIEAAKDWREKRDEFKKKVRQCVRKSQEML

SEQ ID NO: 51720 - protein, 56 aa, Zea Mays
MGEIGKEKYSRWRALVGLILAHGSHHILLNCFREHVVLYAVTMLLRLHSKPFLRTV

SEQ ID NO: 51721 - protein, 811 aa, Zea Mays
MASQGEPSASASDPKEKKDFSTAILERKKSPNRLVVDEATNDDNSVVALHPDTMERLQLFRGDTVLLKGKKRKDTICIVLADETCEEPKVRMNKVVRQNLRVRLGDVVSVHQCQDVKYGKRVHILPIDDTVEGITGNLFDAFLKPYFLEAYRPLRKGDLFLVRGGMRSVEFKVIETDPAEYCIVAPDTEIFCDGEPIKREDEERLDEVGYDDVGGVRKQMAQIRELVELPLRHPQLFKSIGVKPPKGILLYGPPGSGKTLIARAVANETGAFFFLINGPEIMSKLAGESESNLRKAFEEAEKNAPSIIFIDEIDSIAPKREKTNGEVERRIVSQLLTLMDGLKSRSHVIVMGATNRPNSIDPALRRFGRFDREIDIGVPDEVGRLEVLRIHTKNMKLAEDVNLELISKDTHGYVGADLAALCTEAALQCIREKMDIIDLEDETIDAEILNSMAVTNDHFKTALGTSNPSALRETVVEVPNVSWEDIGGLENVKRELQETVQYPVEHPEKFEKFGMSPSKGVLFYGPPGCGKTLLAKAIANECQANFISVKGPELLTMWFGESEANVREIFDKARQSAPCVLFFDELDSIATQRGSSVGDAGGAADRVLNQLLTEMDGMNAKKTVFIIGATNRPDIIDPALLRPGRLDQLIYIPLPDEQSRLQIFKACLRKSPVAKDVDLNALAKYTQGFSGADITEICQRACKYAIRENIEKDIERERRRKDNPEAMEEDEVDEIAEIRAPHFEESMKYARRSVSDADIRKYQAFAQTLQQSRGFGSEFRFSDQPATAGAAAAADPFASAGAAADDDDLYS

SEQ ID NO: 51722 - protein, 168 aa, Zea Mays
MLLKYRPEDKAAKKERLLKRAQAENEGKTVESKKPIVVKYGLNHVTYLIEQNKAQLVVIAHDVDPIELVVWLPALCRKMEVPYCIVKGKARLGSIVHKKNASVLCLTTVKNEDKLEFSKILEAIKANFNDKFDEVRKKWGGGIMGSKSQAKTKAREKLLAKEAAQRMT

SEQ ID NO: 51723 - protein, 99 aa, Zea Mays
MAVPLLTQKIVKKRVKQFKRPHLDRYKCLKPSWRRPKGIDSRVRRKFKGCTLMPNIGYGSDKKTRHYLPNKFKKFVVHNVSELELLLMHNRTTLFILCF

SEQ ID NO: 51724 - protein, 444 aa, Zea Mays
MLTPIGVLEVGDGVFEVLSTSGDTHLGGDDFDKRIVDWLAGNFKNDEGIDLLKDKQALQRLTEAAEKAKMELSSLTQTNMSLPFITATADGPKHIETTLTRAKFEELCSDLLDRLRTPVDNALRDAKLQFKDIDEVILVGGSTRIPAVQELVKKMTGKDPNVTVNPDEVVALGAAVQAGVLSGDVSDIVLLDVTPLSLGLETLGGVMTKIIPRNTTLPTSKSEVFSTAADGQTSVEINVLQGEREFVRDNKSIGSFRLDGIPPAPRGVPQIEVKFDIDANGILSVSAVDKGTGKKQDITITGASTLPKDEVERMVGEAEKFAKEDKEKRDAIDTKNQAESVIYQTEKQLKELGDKVPGDVKGKVESKLQELKDAVAGGSTQTMKDAMSALNQEVMQIGQALYSQQGAPGAGPGAADASSAGSAGTSEKPGDGGDVIDADFTDSK

SEQ ID NO: 51725 - protein, 145 aa, Zea Mays
MDSTGTGAGGKGKKGAAGRKAGLQFPVGRIGRYLKKGRYAQRVGTGAPVYLAAVLEYLAAEVLELAGNAARDNKKTRIIPRHVLLAIRNDEELGKLLGGVTIAHGGVLPNINPVLLPKKTAEKASSVGSKEAKSPKKAAKSPKKA

SEQ ID NO: 51726 - protein, 50 aa, Zea Mays
MAAPKVRFLTKIYHPNIDKLGRICLDILKDKWSPALQIRTVLLSISVCYH

SEQ ID NO: 51727 - protein, 256 aa, Zea Mays
MAGSGKFFVGGNWKCNGTKDSVSKLVSELNAATLETDVDVVVAPPFIYIDQVKNSLTGRIEVSAQNVWIGKGGAYTGEISAEQLVDIGCQWVILGHSERRHIIGENDEFIGKKAAYALSQNVKVIACIGELLEEREAGKTFEVCFEQMKAFADSISNWADVVIAYEPVWAIGTGKVATPEQAQEVHAAVRDWLTTNISPDVASSTRIIYGGSVNAANCAELAKKEDIDGFLVGGASLKAPDFATIINSVTAKKVAA

SEQ ID NO: 51728 - protein, 305 aa, Zea Mays
MVYLNNVVKGSVANVAAKLEIMEPCCSVKDRIGYSMINDAEQKGLITPGKSVLVEATSGNTGIGLAFIAASKGYKLILTMPSSMSMERRVLLRAFGAELVLTDAAKGMKGALDKATEILNKTPNSYMLQQFDNPANPQVHYETTGPEIWEDSKGKVDIFIGGIGTGGTISGAGRFLKEKNPGIKVIGIEPSESNILSGGKPGPHKIQGIGAGFVPRNLDSDILDEVIEISSDEAVETAKQLAVQEGLLVGISSGAAAAAAIKVAKRPENAGKLIVVVFPSFGERYLSSVLYQSIREECENMQPEP

SEQ ID NO: 51729 - protein, 329 aa, Zea Mays
MMMQLLIRNEKDGILCPIPQYPLYSASIALHGGALVPYYLDEKTGWGLEISDLKKQLEDARSKGIDVRALVVINPGNPTGQVLAEDNQYDIVKFCKNEGLVLLADEVYQENIYVDNKKFNSFKKIARSMGYGEDDLPLVSFQSVSKGYYGECGKRGGYMEITGFSAPVREQIYKVASVNLCSNITGQILASLVMNPPKVGDESYASYKAEKDGILQSLARRAKALEDAFNTLEGFSCNKAEGAMYLFPQIHLPHKAIEAAKAAKKAPDAFYALRLLESTGIVVVPGSGFGQVPGTWHVRCTILPQEDKIPAVITRFKAFHEAFMAEYRD

SEQ ID NO: 51730 - protein, 226 aa, Zea Mays
MRECISVHIGQAGIQVGNACWELYCLEHGIQPDGQVPGDKTAGHHDDAFSTFFSQTGAGKHVPRAIFVDLEPTVIDEVRTGTYRQLFHPEQLISGKEDAANNFARGHYTLARRLLICALTVSASLLTTAPASRASWSSMPLVVALALALVLSSLSACLWSTARNPSWASLCTHLPRCQPLLWSLTTACSPLTHSWSTLMSPSCSTTRPSMTSAGAPSTLRGPTTPT

SEQ ID NO: 51731 - protein, 55 aa, Zea Mays
MPQHLFTWTGCSARTRIIARQRPLRRKKGKICRLWKLLSKTGDRVSLMEGDMDAP

SEQ ID NO: 51732 - protein, 110 aa, Zea Mays
MNVEKLKKMAGAVRTGGKGSMRRKKKAVHKTTTTDDKRLQSTLKRIGGNTIPGIEEVNIFKDDVVIQFQNPKVQASIPANTWVVSGVPQTKSLQDLLPSIINQLASSSSS

SEQ ID NO: 51733 - protein, 80 aa, Zea Mays
MARMRQILLKLKHTPPPHMKPPPPPAAATGKDGAPAAAGKDGAKPATVANGSVPEMEKAAAEASVPAAAPPAATEPIAAA

SEQ ID NO: 51734 - protein, 375 aa, Zea Mays
MPQMEGSTDQIAAGWFAKEPASERPVGLPRTGSSSRLNAQAPEFVPRGPPPPAPAVVLPPPPQVIRMFAAPPPPPRGGFFSAPQPRPFEYYAPIGERSGFAAKEQQAPELEAEMLPPAAVKTEPVVDGLDDEVVHKITKQVEYYFSDINLATTEHLMRFITKDSEGFVPISVIAGFKKVKTSVRNNVMLAAALRTSSKLVVSDDGKRVKRQQPFTESDLQELQSRIVVAENLPGDPSYQNLKKIFSAVGSLISIRTCYPQTPNGTGPATNRSSKLDMLFANKLHAFVEYETPEDAAKAILELNDEKNWRNGLRVRLLNTCTVKGAGKGKNGMNETDGNSEEDVSTLNHSNEKQFEQSSQLLDVLPEHLVIKLPDN

SEQ ID NO: 51735 - protein, 178 aa, Zea Mays
MLTSRIRNTNADGKPFSFTFAYHTYFKISDISEVRVEGLETLDYLDNLQDRARSTEQGDAIVFESELDRIYLGTPSKIAIIDHEKKRTFVVRKGGLPDAVVWNPWDKKAKAMSDFGDDEYKRMVCVEAAAIEKTVTLKPGEEWTGKLELSAVPSSYYSGQLDPDRVIQDSTVPEDSIS

SEQ ID NO: 51736 - protein, 154 aa, Zea Mays
MSEASWDGCIVCPSTDSTFDLRTGEIKEWYPKNPVLRALTPALRKLFTYRVKTDEENIYISFSGADGAGSAEIIFSGKAQPGVTASDVNVEEVRMVVDEDVGGFGFTSDNELINGKAAIIGFLLLIDFELLTGKGLLKGTGFLDFIYAVSGAFN

SEQ ID NO: 51737 - protein, 104 aa, Zea Mays
MASKRILKELKDLQKDPPTSCSAGPAGEDMFHWQATIMGPPDSPYAGGVFLVNIHFPPDYPFKPPKVSFKTKVFHPNINSNGSICLDILKEQWSPALTISKLHH

SEQ ID NO: 51738 - protein, 105 aa, Zea Mays
MTAPTTVSLFLTSTPRSYPSTAASGEDLKNWDADFVKVDQATLFDLILAANYLNIKGLLDLTCQTVADMIKGKTPEEIRKTFNIKNDFTPEEEEEIRRENQWAFE

SEQ ID NO: 51739 - protein, 71 aa, Zea Mays
MAAAGGGAGGKVQRARGGALYRGAQVRRGGVQGPAPDQRHHHQRWNWHQPPAKCRQRVSETWFGAASHPSR

SEQ ID NO: 51740 - protein, 235 aa, Zea Mays
MSSARDKVGYVYPNVNSVGAGLFLNEMFKAPTNNLADGGYHMYKDMLEWIGRPAKNVPQQPTQPLRVSISKKLRAYVEDKYSRAGVEKGKYVVIHGIASDSVANMKSRGDDDCLLPLGHWAQIAKEISSGDRGLKPLFVIPHEKHRDEIEEEVGDDTSILFITTPGQLANARDKPCVALFSSAEKARLFLPYVEGKSSCTVISSATGNLIDIDLNAVKNVVKDLEPAPSFALAQK

SEQ ID NO: 51741 - protein, 126 aa, Zea Mays
MLRSSRRRLFNRRKVHNLLNRSPVMTAALRAPQTMNLPKNQLPVQKSLLPVVAAVMIAVTVMIAALMRNQQRSPRSFQRSPLSFQRSPLSFQKNLSQQSVMVQNRLNLIAAALTVAQMRMKNLLLA

SEQ ID NO: 51742 - protein, 277 aa, Zea Mays
MGTNDRAVISLVLLVCIASRSSLGAAETDVEQKRLSVPLMFVFGDSLVDVGNNNFLPPPAPRAASPYGIDFHAGTAGAVSGRFTNGYNLADLVARRLGFKMSPPAYLSLTPVSKFDLFTCRIGANYASGGSGILNTTGNGTLTLQKQITLFSKTQARMSWARCKLRSMVSRSLFLVSAGGNDFSAFSEMGMGEQDAPAYISSMVSTYVQHIDALYKLGARRLGILDVPAIGCTPGSRVPMANGGCNDAANSMAQNFNRLLRLEGSGWSTGHAADREN

SEQ ID NO: 51743 - protein, 299 aa, Zea Mays
MGTLLISKIREEYPDRMMLTFSVFPSPKVSDTVVEPYNATLSVHQLVENADECMVLDNEALYDICFRTLKLTTPSFGDLNHLISATMSGVTCCLRFPGQLNSDLRKLAVNLIPFPRLHFFMVGFAPLTSRGSQQYRALTVPELTQQMWDAKNMMCAADPRHGRYLTASAMFRGKMSTKEVDEQMINVQNKNSSYFVEWIPNNVKSSVCDIPPRGLSMASTFIGNSTSIQEMFRRVSEQFTAMFRRKAFLHWYTGEGMDEMEFTEAESNMNDLVSEYQQYQDATADEEAEYEDEEAIQDE

SEQ ID NO: 51744 - protein, 127 aa, Zea Mays
MHLLASCCFTRGSRVSARNPLMSRNLERNGRITCMTFPRDWLRRDLSVIGFGLIGWMGPSSVPAINGNSLTGLFFSSIGQELAHFPTPPPVTSQFWLWLVTWHLGLFIVLTFGQIGFKGRTEDYFEK

SEQ ID NO: 51745 - protein, 55 aa, Zea Mays
MADCKQTKTTYTSNSWEYGIVLYVPAKNRRRAWTWSKGIGMAGARQRCTKPSKDR

SEQ ID NO: 51746 - protein, 53 aa, Zea Mays
MRDEFWDTAPHYGGQKEIWDALRAAADSDLALAQTIVDSAGIIVSNLTDESLE

SEQ ID NO: 51747 - protein, 367 aa, Zea Mays
MFGSKSVLSMSRLKCALRGFDLRVLLILLIGVPILIFAIYVHGQKVTYFLRPIWEKPPKPFTILPHYYHENVSMGNLCKLHGWKVRETPRRVFDAVLFSNELDILDIRWHELSPYVSEFVLLESNSTFTGIKKDLHFKENRQRFGFAESRLTYGMIGGRFVKGENPFVEESYQRVALDQLIKIAGITDDDLLIMSDVDEIPSGHTIDLLRWCDDVPEILHLQLRNYLYSFQFLLDDKSWRASVHRYRAGKTRYAHFRQTDDLLADSGWHCSFCFRYINDFIFKMKAYSHVDRIRFKYFLNPKRIQHVICEGADLFDMLPEEYTFQEIIAKLGPIPSTFSAVHLPAYLLEQFDRYRYLLPGNCVRESG

SEQ ID NO: 51748 - protein, 459 aa, Zea Mays
MVTWGPILLEDYHLIEKLAQFDRERIPERVVHARGASAKGFFEVTHDVSHLTCADFLRAPGVQTPVIVRFSTVVHERGSPETLRDPRGFAVKFYTREGNFDLVGNNMPVFFIRDGMKFPDMVHAFKPNPKTNLQENWRIVDFFSHHPESLHMFTFLFDDVGIPLNYRHMEGFGVNTYTLINRDGKPHLVKFHWKPTCGVKCLLDNEAVTVGGTCHSHATKDLYDSIAAGNYPEWKLYIQTIDLDHEDKFDFDPLDVTKTWPEDIIPLQPVGRMVLNKNVDNFFAENEQIAFCPAIIVPGIHYSDDKLLQTRIFSYADTQRHRLGPNYLMLPVNAPKCAHHNNHHDGFMNFMHRDEEVNYFPSRFDPARHAEKVPIPPRVLTGCREKCIIQKENNFKQAGERYRSFDPARQDRFIQRWVDALTDPRVTHEHRTIWISYWSQCDAALGQKLASRLNLKPSM

SEQ ID NO: 51749 - protein, 667 aa, Zea Mays
MAIFAVVIFLFLGSVEGFSTKSQPCTYSKDKYCKPALFTALFSTVSFLLGAITSLVSGFLGMKIATYANARTTLEARKGVGKAFITAFRSGAVMGFLLASSGLVVLYITINVFKLYYGDDWEGLFESITGYGLGGSSMALFGRVGGGIYTKAADVGADLVGKVERNIPEDDPRNPAVIADNVGDNVGDIAGMGSDLFGSYAESSCAALVVASISSFGIDHDFTGMCYPLLVSSVGIIVCLITTLFATDFFEVKAVKEIEPALKKQLIISTVLMTFGIALISWLALPAKFTIYNFGTQKEVSNWGLFFCVSIGLWAGLIIGFVTEYYTSNAYSPVQDVADSCRTGAATNVIFGLALGYKSVIIPIFAIAVSIYVSFSIAAMYGIAVAALGMLSTIATGLAIDAYGPISDNAGGIAEMAGMSHRIRERTDALDAAGNTTAAIGKGFAIGSAALVSLALFGAFVSRAGVKVVDVLSPKVFIGLIVGAMLPYWFSAMTMKSVGSAALKMVEEVRRQFNTIPGLMEGTAKPDYATCVKISTDASIKEMIPPGALVMLTPLIVGTLFGVETLSGVLAGALVSGVQIAISASNTGGAWDNAKKYIEAGASEHARTLGPKGSDCHKAAVIGDTIGDPLKDTSGPSLNILIKLMAVESLVFAPFFATQGGLLFKYL

SEQ ID NO: 51750 - protein, 111 aa, Zea Mays
MQLASKGSPVVQNVALPQPSAAAAVTTDKAVLDPVISLAAAKKPARTNASDMPIMRKASLHRFLEKRKDRLNAKTPYQTAPSDAAPVKKEPESQPWLGLGPNAVDSSLNLS

SEQ ID NO: 51751 - protein, 292 aa, Zea Mays
MRLLDHPNVVALKHCFFSTTEKDELYLNLVLEYVPETVHRVVKHHNKMNQRMPLIYVKLYMYQICRALAYIHGTIGVCHRDIKPQNLLVNPHTHQLKLCDFGSAKVLVKGEPNISYICSRYYRAPELIFGATEYTTAIDIWSAGCVLAELMLGQPLFPGESGVDQLVEIIKVLGTPTREEIKCMNPNYTEFKFPQIKAHPWHKVFHKRMPPEAVDLVSRLLQYSPNLRCTAMEALVHPFFDELRDPNTRLPNGRFLPPLFNFKPHELKGVPSDIVAKLIPEHAKKQCSYVGL

SEQ ID NO: 51752 - protein, 209 aa, Zea Mays
MAALAPSKILGTKLNFAGSSRYATAAPTAGAQKIVSLFSKKPAQKPKPSAVSSSSPDISDELAKWYGPDRRIYLPDGLLDRSEVPEYLTGEVPGDYGYDPFGLGKKPEDFAKYQAYELIHARWAMLGAAGAVIPEACNKFGANCGPEAVWFKTGALLLDGNTLSYFGNSIPINLVDAQPVRTRHKPAAMPSHALLPSLILPGKELCVRV

SEQ ID NO: 51753 - protein, 332 aa, Zea Mays
MHWEDRMTRGLFRYDVTACETKPFDPAKFNFTKVGQEEVLFQFENSGGDDSYFLNNAPIIAVDRAPNVIAINVSPIEYGHVLLIPRVLDRLPQRIDPESFLLALQMAAEGGSPYFRLGYNSLGAFATINHLHFQAYYLSVPFPVEKAATHKIPLSEDTKKNGVTVSKLINYPVRGLVFEGGNTLDDLATVVSNACIWLQDNNVPYNVLISDCGKRVFLFPQCYAEKQALGEVSQELLDTQVNPAVWEISGHMVLKRRMDYEEASETSAWKLLAEVSLSEERFEEVKAYIFSAAGLVQYDEEEEEASDGEGPTAYVPVKVTPLPVAEGCLVLP

SEQ ID NO: 51754 - protein, 141 aa, Zea Mays
MAATALSMSILRAPPPCFSSPLRLRVAVAKPLAAPMRRQLLRAQATYNVKLITPEGEVELQVPDDVYILDYAEEEGIDLPYSCRAGSCSSCAGKVVSGSVDQSDQSYLDDGQIAAGWVLTCVAYPTSDVVIETHKEDDLIS

SEQ ID NO: 51755 - protein, 204 aa, Zea Mays
MWYINGANHLCSDWSDHIREKDGIWAVLAWLSIIAFKNKDNLGGDKLVTVEDIVRQHWATYGRHYYTRYDYENVDAGAAKELMANLVSMQSSLSDVNKLVKEIRSDVSEVVAADEFEYKDPVDGSVSKHQGIRYLFGDGSRLVFRLSGTGSVGATIRVYIEQYERDSSKTGRDSQDALAPLVDVALKLSKMQEYTGRSAPTVIT

SEQ ID NO: 51756 - protein, 55 aa, Zea Mays
MAEENNKSIAISQGVIFSCFAATFSCFQRSIEVWKLEERETGKRLGTATRRNGLW

SEQ ID NO: 51757 - protein, 349 aa, Zea Mays
MGLVKEGVDMEEGTLEIGMEYRTVSGVAGPLVILDKVKGPKYQEIVNIRLGDGTTRRGQVLEVDGEKAVVQVFEGTSGIDNKYTTVQFTGEVLKTPVSLDMLGRIFNGSGKPIDNGPPILPEAYLDISGSSINPSERTYPEEMIQTGISTIDVMNSIARGQKIPLFSAAGLPHNEIAAQICRQAGLVKTLEKGKHAEGGEDDNFAIVFAAMGVNMETAQFFKRDFEENGSMERVTLFLNLANDPTIERIITPRIALTTAEYLAYECGKHVLVILTDMSSYADALREVSAAREEVPGRRGYPGYMYTDLATIYERAGRIEGRTGSITQIPILTMPNDAGEGLPTSSDGPF

SEQ ID NO: 51758 - protein, 54 aa, Zea Mays
MHWMDARALRRKDAFRGERPWGERASVIHGSPIGKPYPSSVASLRSLDFSNLAN

SEQ ID NO: 51759 - protein, 193 aa, Zea Mays
MYEEFWRGTGDSASIFIPGWQTMSYFSDLGGICWFLEPGFEREVRRLHRLVGNAVVDGYHVLVGTGSTQLFQAVLYALSPASDGTPMNVVSPAPYYSSYPSVTNYLNSALYRWAGDANTFDGDTCIELVCSPNNPDGGLRKPVIKSKSSKPVYDFAYYWPQYTPITEAAAHDIMLFTVSKCTGHAGTRLGGHW

SEQ ID NO: 51760 - protein, 74 aa, Zea Mays
MAAKLAQLRTQVTRAAEFASKHGCSYYKEVMEKNKQYVVQPPTVEKCQELSKQLFYTRLARCMEHNAWLLGKTM

SEQ ID NO: 51761 - protein, 203 aa, Zea Mays
MAAAAAAATSFTTLAVARSAGQRSLLASKAAPSPLLSLRGARIPSQAVSFSGGLAASPSHSRARFATSASAEPKEADLQSKITNKVYFDISIGNPVGKNVGRIVIGLYGDDVPQTAENFRALCTGEKGFGYKGSSFHRVISDFMIQGGDFDKGNGTGGKSIYGRTFKDENFKLVHTGPGVVSMANAGPNTNGSQFFICTVKNW

SEQ ID NO: 51762 - protein, 155 aa, Zea Mays
MDIVSSLRRYEKERRVRVAVIHGLARMAAIMATTYRPYLGVGLGPLSFLTKLRIPHPGRVGGRFFIKYGMPAMLSWVLGGNSSKLEGRPLSCRLSDKAHDELYRWFDDDDALEQAMGGEWYLFATSEANNNSLQQPIRLIRDEQRSLSVGEFSFA

SEQ ID NO: 51763 - protein, 85 aa, Zea Mays
MSLWATVTEGLHRSKNIHHDMDYQCPTAKTGLFGGAAFLALDAALFWLVCQMLALNARADYLDEDDGKGEYGQIYAAQVDDGSKV

SEQ ID NO: 51764 - protein, 298 aa, Zea Mays
MGTLLISKIREEYPDRMMLTFSVFPSPKVSDTVVEPYNATLSVHQLVENADECMVLDNEALYDICFRTLKLATPTFGDLNHLISATMSGVTCCLRFPGQLNSDLRKLAVNLIPFPRLHFFMVGFAPLTSRGSQQYRALTVPELTQQMWDAKNMMCAADPRHGRYLTASAMFRGKMSTKEVDEQMLNVQNKNSSYFVEWIPNNVKSSVCDIPPTGLAMASTFVGNSTSIQEMFRRVSEQFTAMFRRKAFLHWYTGEGMDEMEFTEAESNMNDLVAEYQQYQDATAEEEEEYKEGDEVAA

SEQ ID NO: 51765 - protein, 370 aa, Zea Mays
MNCVGGLLSNGDFETAPSGGFVKSASVAEGASSIPGWTINGTVELISAGQHQGGMILIVPQGDHAVRLGNDASVGQVVDVEKGSEYAITFSAARTCAQLEALNVSVLGGVSQTVDLQTLYNIEGWDAYALAFQATEEQAHLQFMNPGMEDDPTCGPILDNVAVKKLFTPDKPKDNVVLNGDFEEGPWMFPNTSFGVLLPTNLDEQTSAIPGWMIESNRAVRYIDSDEYKVPQGKRAIELLSGKEGIISQMVETTPQKVYSLTFTLGTAGDSCQPPMAVMAFAGDQAQNFHYSPMGNATSQAANVTFTARAERTRVAFYSVYYNTRSDDHSSLCGPVIDDVRVWALNAAAGLKASIGLVLGIVGVVGMVLF

SEQ ID NO: 51766 - protein, 59 aa, Zea Mays
MPRRVLSHLQRIQHAARWEGSFEAAPPGGSAGRAEPMARGPPNALTWVGAGGEQRRTNL

SEQ ID NO: 51767 - protein, 300 aa, Zea Mays
MICCCNKMDATTPKYSKARYDEIVKEVSSYLKKVGYNPDKIAFVPISGFEGDNMIERSTNLDWYKGPTLLEALDQITEPKRPSDKPLRLPLQDVYKIGGIGTVPVGRVETGVIKPGMVVTFGPTGLTTEVKSVEMHHEALQEALPGDNVGFNVKNVAVKDLKRGFVASNSKDDPAKEAASFTSQVIIMNHPGQIGNGYAPVLDCHTSHIAVKFAELITKIDRRSGKELEKEPKFLKNGDAGMVKMIPTKPMVVETFSAYPPLGRFAVRDMRQTVAVGVIKSVEKKDPTGAKVTKAAAKKK

SEQ ID NO: 51768 - protein, 70 aa, Zea Mays
MSVGQLLGYCRISSTIVPDWCIGSNEIVSNCLFLWLHESYVGLRSWHTVRSKTRRPTIVCVHLSFSACLL

SEQ ID NO: 51769 - protein, 351 aa, Zea Mays
MHHQQRMKQAAAAAAAAQQQQLMQQALLLQQQQQSQAQPPLFPGHHPHPGLLAAPQIEPIVSGNLPPGFDSSTCRSVYVGNIHLQVTDTVLQEVFQSIGPVEGCKLIRKEKSSFGFIDYYDRRYAALAILSLNGRQLYGQPIKVNWAYTSTPREDTSGHFNIFVGDLCPEVTDATLFAFFSGYSTCSDARVMWDQKTGRSRGFGFVSFRNQQDAQSAINDLNGKWLGNRQIRCNWATKGANAGEEKQILDTKVDLSNGSSESGKENPNEDGPENNPQFTTVYVGNLPHEATMNDVHLFFHSLGAGSIEEVRVTRDKGFGFVRYSTHEEAALAIQMGNGQLIGGRQIKSCAS

SEQ ID NO: 51770 - protein, 55 aa, Zea Mays
MCRGRLRSDSRTVHSTLILKSNLAVGDCWPAFLPVLGSVAELMATSLRVKSSSST

SEQ ID NO: 51771 - protein, 696 aa, Zea Mays
MRDAMAKLGSDANKINPLVPVDLVIDHSVQVDVARSQNAVQANMELEFSRNKERFGFLKWGSSAFQNMLVVPPGSGIVHQVNLEYLGRVVFNTDGILYPDSVVGTDSHTTMIDGLGVAGWGVGGIEAEATMLGQPMSMVLPGVVGFKLTGKLRSGVTATDLVLTVTQMLRKHGVVGKFVEFYGEGMGKLSLADRATIANMSPEYGATMGFFPVDHVTLDYLKLTGRSDETVSMIEAYLRANKMFVDYNEPPTERIYSSYLELNLDEVEPSMSGPKRPHDRVPLKEMKSDWHACLDNKVGFKGFAVPKEQQDKVVKFDFHGQPAEMKHGSVVIAAITSCTNTSNPSVMLGAGLVAKKACELGLEVKPWVKTSLAPGSGVVTKYLLQSGLQEYLNQQGFHIVGYGCTTCIGNSGDLDESVSTAITENDVVAAAVLSGNRNFEGRVHPLTRANYLASPPLVVAYALAGTVDIDFEKEPIGFGKDGKEVYFRDIWPSTEEIAQVVQSSVLPDMFKGTYEAITKGNPMWNQLTVPEASLYSWDSKSTYIHEPPYFKDMTMSPPGPSTVKDAYCLLNFGDSITTDHISPAGSIHKDSPAAKYLMERGVDRKDFNSYGSRRGNDEVMARGTFANIRIVNKFLNGEVGPKTIHVPTGEKLSVFDAAMRYKSEGHATIILAGAEYGSGSSRDWAAKGPMLLELKL

SEQ ID NO: 51772 - protein, 491 aa, Zea Mays
MALQAAYEYLQQAVGHGAWSSTQTLTLLLIAVPTVLLLLASLAKSTSSSGRGKPPLPPSPPGTLPIVGHLHHIGPQTHIFASRPWSMASHILRYNTCDVAFSPLGEYWQQTRKLMNTHLLSNKKVYSFRHGREEEVCLVVDNLREAAAKSPSTAVDMSEVLAAYTNDVVSRSVLGSTHRKKGRNTLFREMTMTNVDLLVGFNLEYYIPRWPLTDLLFRLVCWKVTRHLKRWDALLEEVIHEHVEMRKLSGDKEKESDDFIDIFLSRYEEYGFTMDNVKSLLMNVFEAAIETSYLVLESAMAELMNHRRVMKKLQAEVRAYGAEKKLDMIREDDLSSLPYLKASMKEALRLHPPGPLLLPHYSTADCQIDGYHIPANTRVLVNGWAIGRDPAVWEKPEEFMPERFMRDGWDKSNSYSGQDFRYLPFGSGRRICPGANFALATMEIMLANLMYHFDWEVPNEKEDGGGKVSMDETFGLMLRRNEPLYLVPRAV

SEQ ID NO: 51773 - protein, 94 aa, Zea Mays
MNKERLMKMAGAVRTGGKGTMRRKKKAVHKTVTTDDKRLQGTLKRVGVNTIPAIEEVNIFKDDLVIQFLNPKVQASIAANTWVVSGSPQTKRFC

SEQ ID NO: 51774 - protein, 130 aa, Zea Mays
MFDVTSRLTYKNVPTWHRDLCRVCENIPIVLCGNKVDVKNRQVKAKQVTFHRKKNLQYYEISAKSNYNFEKPFLYLARKLAGDQNLHFVEAVALKPPEVQIDMAMQQQHEAELAAAAAQPLPDDDDDLIE

SEQ ID NO: 51775 - protein, 157 aa, Zea Mays
MAAAARQRGTVKWFNDTKGFGFISPEDGSEDLFVHQSSIKSEGFRSLAEGEEVEFSVSEGDDGRTKAVDVTGPDGSFVRGGGGGGGGGGGYGGGGYGGGGGGGGGCFKCGEPGHMARDCPSGGGGGGGRFGGGGGGGGDRSCYNCGEAGHIARDCPT

SEQ ID NO: 51776 - protein, 246 aa, Zea Mays
MEAANPFEYCDVVTTTTHKSLRGPRAGMIFYRKGPKPPKKGQPEGAVYDYEDKINFAVFPSLQGGPHNHQIAALAVALQQTMSPGFKAYAKQVKANAVAIGNYLMSKGYKMVTDGTENHLVLWDLRPLGLTGNKVEKLCDLCHITLNKNAVFGDSSALSPGGVRIGAPAMTSRGLLEKDFEQIGEFLHQAVTICLNIQKEYGKLLKDFNKGLVNNKDIENLKVQVEKFADSFDMPGFTLESMKYKE

SEQ ID NO: 51777 - protein, 88 aa, Zea Mays
MSFLMMTMCMKTLTSNQPISCQGWPMEGRNSSTSPYLRRSTRKATIQGLMGMGQRHPLQEELKTKMILSHNHGSNVTRRYPTISQLFQ

SEQ ID NO: 51778 - protein, 111 aa, Zea Mays
MAAAVARSGFRRMFSVSAFAPPKAPAARPKADPSPNLFVSGLSKRTTSEGLREAFAEFGEVLHARVVTDRVSGFSKGFGFVRYATTEEAAKGIEGKDGKMPIAPLVVRLPH

SEQ ID NO: 51779 - protein, 89 aa, Zea Mays
MLDGYIDLYGPYDKVLLNCSGGGVCGTCIVEVVEGKEMLSPKTDVEKELLKRKPKTWRLACQATVGNADSTGQMIIQQLPEWKIHEWDK

SEQ ID NO: 51780 - protein, 51 aa, Zea Mays
MTSELMSSITFSLKSHITISLRRPRQQNRFLASTTKNQRSRVLSRGTCLGC

SEQ ID NO: 51781 - protein, 585 aa, Zea Mays
MCNLVLSDAKRLIGRRFSDPSVQSDMKLWPFKVIPGPGDKPMIVVNYKGEEKQFAAEEISSMVLIKMKEIAEAYLGSTIKNAVVTVPAYFNDSQRQATKDAGVIAGLNVMRIINEPTAAAIAYGLDKKATSSGEKNVLIFDLGGGTFDVSLLTIEEGIFEVKATAGDTHLGGEDFDNRMVNHFVQEFKRKNKKDISGNPRALRRLRTACERAKRTLSSTAQTTIEIDSLFEGIDFYSTITRARFEELNMDLFRKCMEPVEKCLRDAKMDKSSVHDVVLVGGSTRIPKVQQLLQDFFNGKELCKSINPDEAVAYGAAVQAAILSGEGNEKVQDLLLLDVTPLSLGLETAGGVMTVLIPRNTTIPTKKEQVFSTYSDNQPGVLIQVYEGERARTKDNNLLGKFELSGIPPAPRGVPQITVTFDIDANGILNVSAEDKTTGQKNKITITNDKGRLSKEEIEKMVQEAEKYKAEDEEVKKKVDAKNALENYAYNMRNTIKDDKIASKLPAEDKKKIEDAVDGAISWLDSNQLAEVEEFEDKMKELEGICNPIIAKMYQGEGAGMGAAAGMDEDAPSGGSGAGPKIEEVD

SEQ ID NO: 51782 - protein, 54 aa, Zea Mays
MERREVFPYGLLKFSCLFFSSLMCCWIVLYFAYLDTVLRQKTYSVATFCVLYEY

SEQ ID NO: 51783 - protein, 70 aa, Zea Mays
MLGLTSSDCYHSSVFFSAKQLHLLLLWMLACITGQLSLVVRPPGTVFGLFVERIVVPFYKCYVDFHKHKK

SEQ ID NO: 51784 - protein, 178 aa, Zea Mays
MAYVSGNPIMTDDEFDQLKLRLKKEGSDIVQEGPRCSLRSRKVYSDLTVDYLKMLLLNVPAAVVALALFFFLDDFTGFEITYLLELPEPFSFIFTWFAALPLIFWVAQAITNVIVKDFLILKGPCPNCGNENLSFFGTILSVPSGGSKNSVKCASCGTELEYDSSTRLITLPEPAEAK

SEQ ID NO: 51785 - protein, 169 aa, Zea Mays
MRLRRFRTQSRARSHYRPKFSPYPLSHPRDHKPHQTRVHRRTSSPARERLRWRRRQRRPAWSWAPRSPRSRRRRRWRRPGCRSPTAISARTSSSRSTSAASPSSTSPGSASPSATPTRSASTSSSWSGCSRCRRSARRRRPRSRAAPPLASSRPPPSSPDTGPRPIRLI

SEQ ID NO: 51786 - protein, 78 aa, Zea Mays
MLLTCEVMKNMGEILKASGANYSSVVKTTIMLADLQDFNKVNEIYGKYFPVPAPARSTYQVAALPLNARIEIECIAAL

SEQ ID NO: 51787 - protein, 338 aa, Zea Mays
MEVLADILQNSNLDQARIEREREVILREMEEVEGQSEEVIFDHLHATAFQYTSLGRPILGSADNVKSITKEDLENYIATHYTASRMVITAAGNVKHEDIVEQAKKLFSKLSTDPTTTNMLVSKQPASFTGSEVRIIDDDMPLAQFAVAFNGASWVDPDSVALMVMQTMLGSWNKSAGGGKHMGSELVQRAAINDIAESVMGFNTNYKDTGLFGVYAVAKADCLDDLAFAIMHEMSKLSYRVTEEDVIRARNQLKSSIQLHLDGSTAVVEDIGRQLLTYGRRIPTPELFARIDAVDASTVKRVANRFIFDQDVAIAAMGPIQGLPDYNWFRRRTYMLRY

SEQ ID NO: 51788 - protein, 85 aa, Zea Mays
MACADTGEWGVQSRVQPPERGHGGRGRSPPPRRGYGGGRGDHGSVSLLVRNIPLRCRPEELRVPFERFGPVRDVYLPRDYHTGTA

SEQ ID NO: 51789 - protein, 77 aa, Zea Mays
MLLAASEALAAQATQENFDKGSIFPPFTNIRKISARIAAAVAAKAYELGLATRLPPPRDLVKYAQSCMYTPVYRNYR

SEQ ID NO: 51790 - protein, 66 aa, Zea Mays
MYDPSTGIYGMDFYVVLERAGYRVARRRRCKSRVGIQHRVTKEDAMKWFQVKYEGVILNKAQGNTS

SEQ ID NO: 51791 - protein, 212 aa, Zea Mays
MEYVDLYMVHWPVTMKAGRFTAPFTPEDFEPFDMRAVWEAMEECHRLGLAKAIGVCNFSCKKLETLLSFATIPPVVNQVEINPVWQQRKLREFCRAKGIQLCAYSPLGAKGTHWGSDSVMDSGVLHEIAKSKGKTVAQVCLRWVYEQGDCLIVKSFDEGRMKENLDIVDWELSEEERQRISKIPQRKINQGRRYVSEHGPYKSFEELWDGEI

SEQ ID NO: 51792 - protein, 104 aa, Zea Mays
MGSDTETEKKASVALMSIAKPLAGKKLCKRTLKLVRRASEAKCLKRGVKEVVKSIRRGNKGLCVIAGNISPIDVITHVPILCEEANVPYVYVPSKELFIHTGCL

SEQ ID NO: 51793 - protein, 84 aa, Zea Mays
MAGRANIPTNNSALIAIIADEDTVTGFLMAGVGNVDLRKKTNYLLVDNKTTVKQIEDAFKEFTTREDIAIVLISQYINLLNLSS

SEQ ID NO: 51794 - protein, 194 aa, Zea Mays
MRYKKTYQYDAVFALGFVTVYDQLMEGYPSNEDRDSIFKAYITALNEDPDQYRADALKMEEWARSQNGSSLVDFSSRDGEIEAILKDISERAKGKGNFSYSRFFAVGLFRLLELSNATEPTILDKLCAALNVSKRSVDRDLDVYRNILSKLVQAKELLKEYVDREKKKREERSEAPKPNEAVTKFDGNLYSTRH

SEQ ID NO: 51795 - protein, 276 aa, Zea Mays
MKPNSILGLSHGFLLGHLQSLGFDFPKSISVIAVCPKGMGPSVRRLYVQGKEINGAGINASFAVHQDVDGRATDVALGWSVALGSPFTFATTLEQEYRSDIFGERGILLGAVHGMVEALFRRYTEQGMDEDSAYKNTVESITGIISKTISKKGMLEVYNSLTEEGKKQFIEAYSAAYYPCMDILYECYEDVSSGSEIRSVVLAGRRFYEKEGLPAFPMGKIDQTRMWKVGERVRSTRPQGDLGPLHPFTAGVYVALMMAQVRSHIQKGNSVSLHAG

SEQ ID NO: 51796 - protein, 166 aa, Zea Mays
MSSFGLQVSALIDEKILCMHGGLSPELNKLEQILNLNRPTDVPDTGLLCDLLWSDPSNEATGWAINDRGVSFTFGPDKVSEFLEKHDLDLICRAHQVVEDGYEFFASRQLVTIFSAPNYCGEFDNAGAMMSVDDTLMCSFQILKPARKMMGGSTNNKSGFKSFRGW

SEQ ID NO: 51797 - protein, 161 aa, Zea Mays
MRLKEELLDAIAPLDRGAEATPEDKERVEQIVQQLEAVNQVKEPLKSDLLNGKWELLYTTSTSILQPQRPKYLRPFGKIYQSINADNLRAQNMETWPYFNQVTANLVPLNSRRVAVKFDYFKIFGLIPIKAPGSGKGELEITYLDEELSNAWALLIGFAKL

SEQ ID NO: 51798 - protein, 102 aa, Zea Mays
MAGVGNVDLRKKTNYLLVDNKTTVKQIEDAFKEFTTREDIAIVLISQYIANMIRFLVDSYNKPVPAILEIPSKDHPYDPAHDSVLSRVKYLFSAESVASDRR

SEQ ID NO: 51799 - protein, 60 aa, Zea Mays
MTAQAARRGLHACKGTIEMPSASAAASAPASPPAINPSHPPTHLPCQCSHLRTRSPSSCQ

SEQ ID NO: 51800 - protein, 498 aa, Zea Mays
MLKNLLRLYIYRWFEVIGRTTQAKMASVHKATTLVLMFCLLALGRAEYLKYKDPKQPVAVRIKDLLGRMTLAEKIGQMTQIERENATADALAKYFIGSVLSGGGSVPAPQASAQAWAAMVTEMQKGALSTRLGIPIIYGIDAVHGHNNVYKATIFPHNVGLGATRDPDLVKRIGEATALEVRATGIPYAFAPCIAVCRDPRWGRCYESYSEDPKVVQSLTSLISGLQGDAPADSAGRPYVGGSKKVAACAKHYVGDGGTHNGINENNTIIDTHGLLSIHMPPYYNSIIRGVSTVMVSYSSWNGVKMHANHFLVTDFLKNKLKFRGFVISDWEGIDRITTPPHANYSYSIEAGVGAGIDMIMVPFRYTEFIDDLTTQVQNKVIPMSRIDDAVYRILRVKFTMGLFENPYPDSSLAGELGKQEHRELAREAVRKSLVLLKNGKSSYAPLLPLPKKAGKILVAGSHANDLGNQCGGWTITWQGSSGNTTAGFVSNDRPGME

SEQ ID NO: 51801 - protein, 241 aa, Zea Mays
MVIINPNNPCGSVYTREHLAKVAEVARKLGILVIADEVYGNLVFGDTPFVPMGVFGHIAPVLTIGSLSKRWIVPGWRLGWVAVCDPNKVLQETKIIASITNFLNVSTDPATFVQGALPHILKNTKEDFFKRIIGLLAETSEICFSGIKDIKCITCPHKPEGSMFVMVKLNLYLLESIHDDIDFCCKLAKEESVILCPGSVLGMENWIRITFAIDSSSLLDGLERLKSFCQRHKKKNLLNGH

SEQ ID NO: 51802 - protein, 76 aa, Zea Mays
MADSATNDAPLVASNQPTEEEVTVERAAATEEQEEERLRYLEFVQPSSAPSTTVSTPSRSTSSSSSTARLVSPLRR

SEQ ID NO: 51803 - protein, 600 aa, Zea Mays
MRQQANVPSSVISSHSMHLGVLATAWHAVNTGTMFTVYYKPRTSPAEFVVPCDRYMESLKRNYPIGMRFKMRFEGEEAPEQRFTGTIVGNVDPDQAGWAESKWRYLKVRWDEASSIPRPERVSPWQIEPAVSPPPINPLPVHRPKRPRSNAVASLPESSAPTKEAAPKVTLETQQHALQRPLQTQDNVAPKSVFGDNSELDSAHKSSLRPSGFDLDKSTIGMQRKLGSDIWMRMNRPDGYSEMLSGYQPPNEGARNSQGFCSLPDQIAAGRPNFWHTVNAHYQDQQGNHNLFPGSWSMMPSSTGFGMNRQSYPMIQEVGGMSQSCTNTKFGNGVYAALPGRGIDRYPSGWFGHTTPGGRVDDAQPRVIKPQPLVLAHGEALKMKGNSCKLFGIHLDSPAKSEPLKSPPSVATPAAEKWMADGIDADKSPEPHKTPKQLGATQVDPVPERCPQASRGTQCKSQGGSTRSCKKVHKQGMALGRSVDLTKFNGYTELVAELDEMFDFNGELKGCSKEWMVVYTDYEGDMMLVGDDPWNEFCSMVHKIFVYTREEVQRMNPGALNSRPEDSGLANSTERGSASTAAAREAPGYQSASSLNSDNC

SEQ ID NO: 51804 - protein, 183 aa, Zea Mays
MSAAEAKAAAVPESVLRKRKREEQWAADKKEKALADRKKALESRKIIFARAKQYAEEYHAQEKELVQLKREARLKGGFYVSPEAKLLFVVRIRGINAMHPKTRKILQLLRLRQIFNGVFLKVNKATINMLRRVEPYVAYGYPNLKSVRELIYKRGYGKLNKQRIPLSNNSVIEESLFYFLCVL

SEQ ID NO: 51805 - protein, 353 aa, Zea Mays
MYVTMDRYENDWDVVKRGWDAQVLGEAPYKFKSALEAVKTLRAQPNANDQYLPPFVIVDDSGKAVGPVLDGDAVVTINFRADRMVMLAKALEYADFNNFDRVRVPKIRYAGMLQYDGELKLPSRYLVSPPEIDRTSGEYLVKNGIRTFACSETVKFGHVTFFWNGNRSGYFDETKEEYVEVPSDSGITFNVAPKMKALQIAEKARDALLSGKFDQVRVNLPNGDMVGHTGDIEATVVACKAADEAVKIILNAVEQVGGIYLVTADHGNAEDMVKRNKSGKPLLDKNGGIQILTSHTLQPVPVAIGGPGLHPGVKFRNDIQIPGLANVAATVMNLHGFEAPADYEQTLIEVADN

SEQ ID NO: 51806 - protein, 461 aa, Zea Mays
MASATTSISSHPAALRDVKAARIGGLRQQQASVAPSAAAARGQRARAVRSLRAAEPARQPVAASAAAAAPAAPVADEAAALAAVDYEALARELEGASPLEIMDRALAMFGSEIAIAFSGAEDVALIEYAKLTGRPFRVFSLDTGRLNPETYQLFDKVEKHYGIRIEYMFPDASEVQELVRTKGLFSFYEDGHQECCRVRKVRPLRRALKGLRAWITGQRKDQSPGTRASIPLVQVDPSFEGLDGGAGSLVKWNPVANVDGKDIWTFLRTMDVPVNTLHAQGYVSIGCEPCTRPVLPGQHEREGRWWWEDAKAKECGLHKGNIDKDAQAAAPRSANGNGSAGAPDIFESPAVVSLTRTGIENLLRLENRAEPWLVVLYAPWCPFCQAMEASYVELAEKLAGSGVKVAKFRADGEQKPFAQAELQLQSFPTVLLFPGRTARPIKYPSEKRDVDSLLAFVNSLR

SEQ ID NO: 51807 - protein, 166 aa, Zea Mays
MSVVILRRDYKDEKVEVTVSMPNLEGGPEFGDEDGEGDGESAVKDDGEAEEDDESAGDSSISLKVVVSKDSGPKLEFTCTAFREEITIDDMLIVEKTDDDDGEEKFPYEGPEFTELPVNVQKGLFKYLEQRGVTLSATNYMHDYMVTKQAQEYIRWMTKLKDFVTQ

SEQ ID NO: 51808 - protein, 744 aa, Zea Mays
MPERHQSIDAQLRLLAPGKVSEDDKLVEYDALLVDRFLDILQDLHGPHLREFVQECYELSAEYENDRDEARLGELGSKLTSLPPGDSIVVASSFSHMLNLANLAEEVQIAHRRRIKLKRGDFADEASAPTESDIEETLKRLVSQLGKSREEVFDALKNQTVDLVFTAHPTQSVRRSLLQKHGRIRNCLRQLYAKDITADDKQELDEALQREIQAAFRTDEIRRTPPTPQDEMRAGMSYFHETIWKGVPKFLRRIDTALKNIGINERLPYNAPLIQFSSWMGGDRDGNPRVTPEVTRDVCLLARMMAANLYFSQIEDLMFELSMWRCSDELRIRADELHRSSRKAAKHYIEFWKQVPPNEPYRVILGDVRDKLYYTRERSRHLLTSGISEILEEATFTNVEQFLEPLELCYRSLCACGDKPIADGSLLDFLRQVSTFGLALVKLDIRQESDRHTDVLDSITTHLGIGSYAEWSEEKRQDWLLSELRGKRPLFGSDLPQTEETADVLGTFHVLAELPADCFGAYIISMATAPSDVLAVELLQRECHVKHPLRVVPLFEKLADLEAAPAAVARLFSIDWYMDRINGKQEVMIGYSDSGKDAGRLSAAWQMYKAQEELIKVAKHYGVKLTMFHGRGGTVGRGGGPTHLAILSQPPDTIHGSLRVTVQGEVIEHSFGEELLCFRTLQRYTAATLEHGMHPPISPKPEWRALMDEMAVVATKEYRSIVFQEPRFVEYFRSWTAIKLVLEV

SEQ ID NO: 51809 - protein, 426 aa, Zea Mays
MALRRGVDIVVGTPGRIKDFIVKGTLNLKCLKFRVLDEADEMLNMGFVDDVELILGKVEDATKVQTLLFSATLPDWVNKLSMRFLKVDRKTVDLVGNEKLKASASVKHLALPCNKAARAQLIPDIIRCYSHGGRTIIFTETKDSASELSGLIPGSRALHGDVVQAQREVILAGFRSGKFQVLVATNVAARGLDINDVQLIIQCEPPRDVEAYIHRSGRTGRAGNTGVAVMLYEPRYKYSVSRLERESGVKFEHISAPQPTDVAQSAGSEAADAIASVSDSVIPVFRQQAEQLLSSSTLSAADLLAKALAKAVGYTDIKKRSLLSSMEDYATLHLQTGRQMWSPGFAFTILKRFMPEEKLADVKGATLTADGTGVVFDVPAADVEDYIQASENAAQVTIDEVQQLPPLQEKQLAAGGGGGNRFNRRN

SEQ ID NO: 51810 - protein, 723 aa, Zea Mays
MVNLLESMHKCCLPSGVSTESQSAYDKSLVHKIFGGRLRSQVKCTRCLHCSNKFDPFLDLSLEIAKATTLVRALENFTEDELLDEGQKEYECERCRQKVVAKKRLTIDKAPNVLTIHLKRFSPFNPREKIDKKVDFQSILDLKPFVSDSKGTDFKYSLYGVLVHTGWSTQSGHYYCYVRTSSGMWHNLDDKEVRQVREADVLKQKAYMLFYVRNSIGKSVVCKDNNAANLLKKKTSEKISSLNGIAQTNVRAQNLNGVSPFGDKTHGTIIGYSTISSKTKTIHCSKNEVKAEDAPASQNNALPSTQAPIARNDVGILPTKPMQFAVKNEEKTSSHQPAPFTNTCGEQTVVGRPLQEMEPKAGAGENTSVVSAVANDAATLSKADKLTSQPQTAPSSKPTANVKDTATEFATLSLSKKDSVVSNGAVLSIGCLTSGEKAMNLSESVDQANEITKALPTSQNNTAPVIAQADCGVEISSGVIMHVAVSASCNGTTEKKVNSKSKKFVRYPVVNMWLGSRHLKPGKKANRKRSKMIRRVVACKDAANLSCLSEQLTSTSSTACSETVECTSSHQKRSHASARSKDDAQSSQNKQKVDGARVGAGTSAPSCSAGVPKSDPNPSTDAKVVATQPASIRATDLMEATVPRWDDVDMPNIKVAEPQSKRKSGGYILDEWDEEYDRGKTKKVRRSKQDFGGPNPFQEEADYVSQRRTKQKSYRGKSWNKRA

SEQ ID NO: 51811 - protein, 141 aa, Zea Mays
MRPPGGVLAPGESIIATVFKFVEHPENNEKPMDKCKVKFKIVSLKVKGPVEYVPELFDEQKDQVAVEQILRVVFLDAERPSPQMDKLKRQLAEAEAALEARKKPPEDNGPRIVGEGLVIDEWKERRERYLARQQIEGVDSV

SEQ ID NO: 51812 - protein, 205 aa, Zea Mays
MGRKGRKKGLLYPLTSLSPRPSAPSSLYLALASLPVARQRWLPLPPPRRRRRQRCCCCSSCRSPRRRTCRSCPTGSAATRRRGGCTRSGWRRTAGPTTPSARRSGGTRCSGTTSATSTRTTPPPTRASTPSASASTASPTSPTTSTAPPTSAPGPGRRGRGSSAPGTTPPTTRTCRSPSTGGPRAPSPRSRTRAAALEHGKLLQP

SEQ ID NO: 51813 - protein, 84 aa, Zea Mays
MRYAMPNARVMIHQPQGGSEGNVEEVRRQVGETIYARDKVDKMFAAFTGQPLDMVQQWTERDRFMSSSEAMDFGLLDALLETRY

SEQ ID NO: 51814 - protein, 148 aa, Zea Mays
MSSVFSGDETAPFFGFLGAAAALVFSCMGAAYGTAKSGVGVASMGVMRPELVMKSIVPVVMAGVLGIYGLIIAVIISTGINPKAKPYYLFDGYAHLSSGLACGLAGLAAGMAIGIVGDAGVRANAQQPKLFVGMILILIFAEALALTL

SEQ ID NO: 51815 - protein, 198 aa, Zea Mays
MEVEQKYSEIRRPVYLKRGDIIKTIPDFWLTAFMSHPLLSELLTEEDQKIFKYLDSIDVDDSDVKAGYSIHLNFSENPYFEDTKLAKTYIFADDGTTTIKASEIKWKEGMGPANGNGINKKGSKRPLVEESFFSWFGDTELKSLADGVQDEVAEIIKEDLWPNPLKYFNNEVDDEFEGDEDDDDLDGDDDDEGDDLEN

SEQ ID NO: 51816 - protein, 50 aa, Zea Mays
MSVLSDVLQRSNYDAEPMLKACGITIARNFTEVDGRVLQPPKAQILNLSS

SEQ ID NO: 51817 - protein, 78 aa, Zea Mays
MSFAVPSVRYKQMSSQTFCTGCVRLHSFIFLPWDFVFVKGCKQKYMIWLGSHTEWTFATLQSLTSIHVYLPCLFCSHF

SEQ ID NO: 51818 - protein, 281 aa, Zea Mays
MAEQIASDPVFNQMAEQLQKSAQGAGEQGIPALDPQQYMETMQQVMQNPQFVSMAERLGNALMQDPAMSSMLENLTSPAHKEQLEERMARIKEDPSLKPILDEIENGGPSAMVKYWNDPEVLQKIGQAMGVNLPGDSSVSTVLSGPEETEEEGGDDDESIVHHTASVGDEEGLKKALEGGADKDEEDAEGRRALHFACGYGELKCAEILLEAGAAVDALDKNKNTPLHYAAGYGRKECVDLLLKYGAAVTLQNLDGKTPIEVAKLNSQDEVLKLLEKDAFL

SEQ ID NO: 51819 - protein, 369 aa, Zea Mays
MLTAFCIHNISYQGRFAFSDYPELNLPERFKSSFDFIDGYEKPVEGRKINWMKAGILEADRVLTVSPYYAEELISGIARGCELDNIMRLTGITGIVNGMDVSEWDPSRDKYIAVKYDVSTCTYVRATVVWCPVQAVEAKALNKEALQAEVGLPVDRNIPLVAFIGRLEEQKGPDVMAAAIPQLMEMVEDVQIVLLGTGKKKFERMLMSAEEKFPGKVRAVVKFNAALAHHIMAGADVLAVTSRFEPCGLIQLQGMRYGTPCACASTGGLVDTIIEGKTGFHMGRLSVDCNVVEPADVKKVATTLQRAIKVVGTPAYEEMVRNCMIQDLSWKGPAKNWENVLLSLGVAGGEPGVEGEEIAPLAKENVAAP

SEQ ID NO: 51820 - protein, 68 aa, Zea Mays
MPGYSLYLVRHAAHYTSQVFTLDVVCPDKFPSLIFFCPFQALISHVCSIGASDVILLLCSLKMVGLVH

SEQ ID NO: 51821 - protein, 393 aa, Zea Mays
MTRVFWQSIKDKLILPFLDLDIKYYDLGILHREATDDKVTVEAAEATLKYNVAIKCATITPDETRVKEFNLKHMWKSPNGTIRNIINGTVFREPIICKNVPRLVPGWTKPICIGRHAFGDQYRATDAVLKGPGKLKLVFEGKEEQIDLEVFNFTGAGGVALSMYNTDESIRAFAEASMTTAYEKKWPLYLSTKNTILKKYDGRFKDIFQEVYEADWKSKFEAAGIWYEHRLIDDMVAYALKSEGGYVWACKNYDGDVQSDFLAQGFGSLGLMTSVLVCPDGKTIEAEAAHGTVTRHFRVHQKGGETSTNSIASIFAWTRGLAHRAKLDDNARLLDFALKLEAACVETVESGKMTKDLAILVHGSSSVTRSHYLNTEEFIDAVATELRSRLGAN

SEQ ID NO: 51822 - protein, 117 aa, Zea Mays
MQSSSMKREISEAHDTIRFGINAGVKADLAPPHPLQSTIQSETKFWADKKKFGTDAIYGSALNIRKDLDAQILSRFQRPPGALPSSLLGYEALTGSLDDFGFEDYLNSTAARGMSDG

SEQ ID NO: 51823 - protein, 114 aa, Zea Mays
MAQKTAQIAKKTAHQTSGLKKVAKALAEATLPGTNDAAQPVPTKPAAPPMASAAARSGLRSLAVRAGPLRRRMSSSVHDDAYETAKWEKITYAGIVTCTLLAAYNLSKGHPPLR

SEQ ID NO: 51824 - protein, 131 aa, Zea Mays
MAYEANRRHKDCIALYKELESSHPMINIRRQAAELRYILEAPKLKISNDEVVTIPQIGSSWDWYAGTWSDKIKEQEDKKRKMSAASNQVQPSPNIFGDLSFLRPPNEWKKSAWVVVTLWILLIGTAIYLQS

SEQ ID NO: 51825 - protein, 215 aa, Zea Mays
MAAPPARARADYDYLIKLLLIGDSGVGKSCLLLRFSDGSFTTSFITTIGIDFKIRTIELDGKRIKLQIWDTAGQERFRTITTAYYRGAMGILLVYDVTDESSFNNIRNWIRNIEQHASDNVNKILVGNKADMDESKRAVPTAKGQALADEYGIKFFETSAKTNLNVEQVFFSIARDIKQRLAETDSKPEDKAIKINKPDQGSEAPAAQRSACCGS

SEQ ID NO: 51826 - protein, 225 aa, Zea Mays
MDFLQEQSVETTVAVAVAVAAVAAGGAFLLLRSRKPKGCLDPENFRKFKLVEKKQISHNVARFKFALPTPTSVLGLPIGQHISCRGQDATGEEVIKPYTPTTLDSDLGYFELVIKMYPQGRMSHHFREMKVGDYLSVKGPKGRFKYHVGQVRAFGMLAGGSGITPMFQVARAILENPNDNTKVHLIYANVTYEDILLKDELDDMAKTYPGRFKIYYVLNQCFYLC

SEQ ID NO: 51827 - protein, 323 aa, Zea Mays
MWKSPNGTIRNILNGTVFREPIICKNIPRLVPGWTKPICIGRHAFGDQYRATDAVIKGPGKLKLVFEGKEEQVELEVFNFTGAGGVALSMYNTDESIHAFADASMATAYEKKWPLYLSTKNTILKKYDGRFKDIFQEVYEAGWKTKFEAAGIWYEHRLIDDMVAYALKSEGGYVWACKNYDGDVQSDFLAQGFGSLGLMTSVLVCPDGKTIEAEAAHGTVTRHYRVHQKGGETSTNSIASIFAWTRGLAHRAKLDDNARLLDFTQKLEAACVGAVESGKMTKDLALLVHGSSNITRSHYLNTEEFIDAVADELRSRLAANSNL

SEQ ID NO: 51828 - protein, 64 aa, Zea Mays
MPCRSKGDGDYELASDVLMDDFLWERIKKSEAELLAEKKCVAHLTGEGNAFCDLPEDTMLPGEV

SEQ ID NO: 51829 - protein, 111 aa, Zea Mays
MKPADIVFIIDEKPHDVFTREGNDLVVTEKISLVEALTGYTARVTTLDGRSLSLHINSIIHPKYEEVMPGEGMPVPKDPTKKGNLRIKFNIMFPSRLTSDQKAGIKRLLGS

SEQ ID NO: 51830 - protein, 83 aa, Zea Mays
MAFTMRAVKVPPNSASLEEARHRVFDFFKQACRSIPTVMEIYNLDDVVTPSQLRSTIAKEIRKNQNVTNPKRRAPRKSGISDT

SEQ ID NO: 51831 - protein, 95 aa, Zea Mays
MKRFHLPEAEKLNGRAAMVGFFMAYFVDSLTGVGLVDQMGNFFCKTLLFVAVAGVLLVRKNEDVESLKKLIDETTFYDRQWQATWQDDPTEGPKN

SEQ ID NO: 51832 - protein, 93 aa, Zea Mays
MFQNGESWKTRLETTTSVEYMSSSRCGLVKGSVRFFHMSHHTPPWPSMVPFSPVMKTSCRPWPWIKLMYLPPGSSRPLPYDGSGSMSGQLDVS

SEQ ID NO: 51833 - protein, 89 aa, Zea Mays
MSDDTGGRALPKFGEWDVNNPASADGFTVIFSKARDEKKAPPTQGHIRNNRSVSADSKDSRAEKMTSYNARTNASKKWFCCVSPSPTQS

SEQ ID NO: 51834 - protein, 74 aa, Zea Mays
MMNWLTQALFERKQNTKACCCIHCWTYSTPGPSHGSCWSYRGRRKGYCPGQNQGTQRGRCYRCRVTSEDWLYHV

SEQ ID NO: 51835 - protein, 189 aa, Zea Mays
MAAIPAAIPGCCSSSRLPQLAGLPASTSRRRFKVTAMAPKKKVNRYDESWSKQWFGAGIFAEGSEEVSVDVFKKLERRKVLSTVEKAGLLSKAEELGLTLSSLEKLGLLSKAEDLGLLSLVETAAGTSPSVLASISLPLLVAAVAAVVVVPDDSVALVALQAVVAAVLAAGAAGLFVGSVVLAGLQESD

SEQ ID NO: 51836 - protein, 614 aa, Zea Mays
MDMVAIPDFAAGAMENYGLVTYRETALLFDEMHSAAANKQRVAVVVAHELAHQWFGNLVTMEWWTHLWLNEGFATWVSYLAADQFFPEWNVWTQFLEESTVGFKLDALAGSHPIEVDINHVDEIDEIFDAISYRKGASVIRMLQNYLGAEVFQNSLAAYIKRFAYSNAKTEDLWAALEEGSGEPVRTLMHSWTKQQGYPVINVKLKDGKFQLEQTQFLSSGSTGVGQWVVPITLCCCSYSRQAKFLFHGKQEDFDLSASGFTDCQKKDGFWIKLNVNQTSFYRVSYDEELAARLRYAIETNKLGAADRYGVLDDAYALCMAGKQKLVSLLHLISVYKDETEYTVLAHIITTSLHIAEMMVIAAPEELVHLKKFLIDFLEPFALKLGWDAKSDEGHLNALLRGTLLTALAELGHEATINEAVRRFNVFLEDRETPLLPPDVRKAAYVALMQTVSKSNKTGYESLLRIYRETDLSQEKVRVLGSLASSPDHDVVREVLNFILSPEVRNQDAIFLLRGVSSGAHEVAWQWLKENWDYILGAYSGTLLTYFVNITVSPLATDEHGDEAEEFFKSRTKANIARTVRQSIERVRINAQWVKNIKAEADLGNVLKKLAYKH

SEQ ID NO: 51837 - protein, 71 aa, Zea Mays
MEEPAVIESYYNKRIVGCPGGEGEDEHDVVWFWLKKDEPHECPVCSQYFVLKVIGDGGDPDGHDDEDDGHH

SEQ ID NO: 51838 - protein, 384 aa, Zea Mays
MVADVKRIIETTQGQSTYRADQQMLIYQGKILKDETTLESNGVAENSFLVIMLSKAKASSSGASTATTAKAPATLAQPAAPVAPAASVARTPTQAPVATAETAPPSVQPQAAPAATVAATDDADVYSQAASNLVSGNNLEQTIQQILDMGGGTWERDTVVRALRAAYNNPERAIDYLYSGIPENVEAQPVARAPAAGQQTNQQAASPAQPAVALPVQPSPASAGPNANPLNLFPQGVPSGGSNPGVVPGAGSGALDALRQLPQFQALLQLVQANPQILQPMLQELGKQNPQILRLIQENQAEFLRLVNESPEGGPGGNILGQLAAAVPQTLTVTPEEREAIQRLEGMGFNRELVLEVFFACNKDEELTANYLLDHGHEFDEQQQ

SEQ ID NO: 51839 - protein, 349 aa, Zea Mays
MDEGQGVRYWCHMCQEVIDPMPEMKCPGCEGGFVEEMDSEDFEPAANARSRLRREAMVEADADQDDEEDDSDHELELSRRRRRRRRSSALFSVLEAMRDRDEVRGSDDTDSDTERDLERGRRERMERQRERLRQIERVSARGRERTESLILINSNNEAIILQGTFGSDDNQEDSSNTSSGVSLGDYFLGPALDTLLQRLAESDLSRSGTPPAKKEAVAALPTVNIEEALGCSVCLEDFEMGGEAKQMPCQHKFHSHCILPWLELHSSCPICRFQLPTEETKNNPCESASTAGTVNGGGDNAAASGSDTESTNHNEDDHSDSPIFSALSTLFSDPFSSDDDESVPHSYEN

SEQ ID NO: 51840 - protein, 95 aa, Zea Mays
MMSPSEVELLPGLDGICNELLQEDGITDVQFGRQALEKRVVSQDLELWISNVQAKDNRFTLLARAGRQVQEVYLTTSLDQEGIKKAVQRVLGRVP

SEQ ID NO: 51841 - protein, 148 aa, Zea Mays
MYTWVWNKVGLELGDIHIDSTIKPVQVGVGWPFDVKGPPAYVIDSLVVQEDCNISVLKQGVGGEDTVVWRSNKSDPSPEPVPPPTALNTKNPCSPVQLSASLRTRSRHRSTISFPTAFHIIRIEHIHSHRSIIPTPITYSHTHGELPV

SEQ ID NO: 51842 - protein, 70 aa, Zea Mays
MPFQWYDPSTGIYGMDFYVVLERAGYRVARRRRCKSRVGIQHRVTKEDSMKWFQVKYEGVILNKAQANTL

SEQ ID NO: 51843 - protein, 347 aa, Zea Mays
MAHRVLLLLSLASAAAVAAAVDAEDPLIRQVVPGGDDNDLELNAESHFLSFVQRFGKSYKDADEHAYRLSVFKANLRRARRHQLLDPSAEHGVTKFSDLTPAEFRRTYLGLRKSRRALLRELGESAHEAPVLPTDGLPDDFDWRDHGAVGPVKNQGSCGSCWSFSASGALEGAHYLATGKLEVLSEQQFVDCDHECDSSEPDSCDSGCNGGLMTTAFSYLQKAGGLEIQNFSVVSVDEAQISANLIKHGPLAIGINAAYMQTYIGGVSCPYICGRHLDHGVLLVGYGASGFAPIRLKDKPYWIIKNSWGENWGENGYYKICRGSNVRNKCGVDSMVSTVSAVHASKE

SEQ ID NO: 51844 - protein, 70 aa, Zea Mays
MSRHTHTLPDLFWVFTVLMKLLYELCAMFLSICFFDSYLCHCLLYGQYLTTVCREEESSWYLGMQGLWEG

SEQ ID NO: 51845 - protein, 68 aa, Zea Mays
MIIPVRCFTCGKVIGNKWDLYLDLLQADYSEGDALDALELFRYCCRRMLMTHVDLIEKLLNYNNVSIF

SEQ ID NO: 51846 - protein, 155 aa, Zea Mays
MMKPMLPPTPTLVATSASLAVPSAPRTTPTPTASARSSSSMAATTTNPGRAAGPRAVSCELAYPCMHVWWCRSLVLPFSVLVFRLVENKQFKLSLISCMSCVRFSVYASYILWSYVCVDMLVSLSMCVCLFVCVSISVCKGRFGKFYLILILREN

SEQ ID NO: 51847 - protein, 801 aa, Zea Mays
MRTVLSCAGAPGKVLVPGGGSDDLLSSAEPVVDTQPEELQIPEAELTVEKTSSSPTQTTSAVAEASSGVEAEERPELSEVIGVGGTGGTKIDGAGIKAKAPLVEEKPRVIPPPGDGQRIYEIDPMLEGFRGHLDYRYSEYKRLRAAIDQHEGGLDAFSRGYEKLGFTRSAEGITYREWAPGAYSAALVGDFNNWNPNADAMARNEYGVWEIFLPNNADGSPAIPHGSRVKIRMDTPSGVKDSIPAWIKFSVQAPGEIPYNGIYYDPPEEEKYVFKHPQPKRPKSLRIYESHVGMSSPEPKINTYANFRDEVLPRIKKLGYNAVQIMAIQEHSYYASFGYHVTNFFAPSSRFGTPEDLKSLIDKAHELGLLVLMDIVHSHSSNNTLDGLNGFDGTDTHYFHGGPRGHHWMWDSRLFNYGSWEVLRFLLSNARWWLEEYKFDGFRFDGVTSMMYTHHGLQVTFTGNYGEYFGFATDVDAVVYLMLVNDLIRGLYPEAVSIGEDVSGMPTFCIPVQDGGVGFDYRLHMAVPDKWIELLKQSDEYWEMGDIVHTLTNRRWLEKCVTYCESHDQALVGDKTIAFWLMDKDMYDFMALDRPSTPRIDRGIALHKMIRLVTMGLGGEGYLNFMGNEFGHPEWIDFPRGPQSLPNGSVIPGNNNSFDKCRRRFDLGDADYLRYRGMQEFDQAMQHLEGKYEFMTSDHSYVSRKHEEDKVIIFERGDLVFVFNFHWSNSYFDYRVGCFKPGKYKIVLDSDDGLFGGFSRLDHDAEYFTADWPHDNRPCSFSVYAPSRTAVVYAPAGAEDE

SEQ ID NO: 51848 - protein, 140 aa, Zea Mays
MHGGLSPDLAHLDEIKNLQRPTDVPDQGLLCDLLWSDPGKDAQGWGMNDRGVSYTFGADKVSEFLQKHDLDLICRAHQVVEDGYEFFADRQLVTIFSAPNYCGEFDNAGAMMSVDETLMCSFQILKPAERKNKFMGSNKM

SEQ ID NO: 51849 - protein, 262 aa, Zea Mays
MVTEEALPTYQTMLNTLDGVRDETGASPTTWAVWTRAWTAEENRHGDLLNKYMYLTGRVDMKQIEKTIQYLIGSGMDPGTENNPYLGFLYTSFQERATFVSHGNTARHAKEYGDLKLAQICGTIAADEKRHETAYTKIVEKLFEMDPDYTVLAFADMMRKKITMPAHLMYDGKDDNLFEHFSAVAQRLGVYTAKDYADILEFLVQRWKVAELTGLSGEGRSAQDFVCTLAPRIRRLDDRAQARAKQAPVIPFSWVYDRKVQL

SEQ ID NO: 51850 - protein, 520 aa, Zea Mays
MGNCCPGSGDAEPAPAASADPSSRLHSGGTSLKAGASVSSAPTPTKPPAPIGPVLGRPMEDVRSIYTVGKELGRGQFGVTSLCTHKATGERFACKTIAKRKLSTKEDVEDVRREVQIMYHLAGQPNIVELKGAYEDKQSVHLVMELCAGGELFDRIIAKGKYTERAAASLLRTIVEIVHTCHSMGVIHRDLKPENFLLLSKDDNAPLKATDFGLSVFFKQGEVFKDIVGSAYYIAPEVLKRNYGPEADIWSIGVIVYILLCGVPPFWAESEHGIFNSILRGQVDFTSDPWPRISPSAKDLVRKMLTSDPKKRISAYDVLNHPWIKEDGEAPDTPLDNAVMNRLKQFKAMNQFKKAALRVIAGCLSEEEIRGLKEMFKSMDADNSGTITVDELRRGLAKQGTKLSEAEVEQLMAAADADGNGTIDYEEFITATMHMNRMDREEHLYTAFQYFDKDGSGCISKEELEQALKEKGLLDGRDIKDIISEVDADNDGRIDYSEFVAMMRKGTAEQNPKKRRDVVL

SEQ ID NO: 51851 - protein, 94 aa, Zea Mays
MTTTKLGLPIIEPVLCTRRNFRPHLVLISMLDSPPARELIVSREVETKGRVELQRISLYMEATCEQERRGGRLYRSEEPKEKQSEYLLEHIYLP

SEQ ID NO: 51852 - protein, 89 aa, Zea Mays
MRTGESPPAGRPTDIWGPATPSASRQPPAASQSLPVSIYSSARAPPHACTHSAHTPAAANAFAVASRSSARPTRPLGPGERGRHGCRRG

SEQ ID NO: 51853 - protein, 99 aa, Zea Mays
MSLRRLSSLLTRARIRRAASCWRTCLPTPKALVSAPMVSTGARIPSSPKAPPKFKEVNLRSVPLYLGSLVLSIQCHVKDTVCIRWSISLALRIVSDTVV

SEQ ID NO: 51854 - protein, 118 aa, Zea Mays
MNPHQEHQGVVVAAAAAALSIQLTRSTWGTLRGALTTRLWRTCSVSKGKCLMLRSSTTGIAAGQGGLVSSPMAPPKRSTMPYQTSMASTWMVDRSESRLRSQSRDVNFEIIFLWGFRG

SEQ ID NO: 51855 - protein, 90 aa, Zea Mays
MLLQRCIDIAEFYPCVSGFSFSKLHKNCCKSGSEELQCLYFQLLGITIAEVHLPRQTILEDHTHIHQEDYNGKGAKQSRWNPLQHHIVCT

SEQ ID NO: 51856 - protein, 232 aa, Zea Mays
MVRRLAMEIRQLANSQPITVLNGGSGQSGVSGLIVPAATVGALGYGYMWWKGISFSDLMYVTKRNMANAVSSMTKHLEQVQSSLAAAKRHLTQRIEKLDDKLDQQKALSGQIRDDVTDARLKLENIGSEIKNIKELVWGLDGKIDSMEAKQDFSCAGVMYLCQFMEQNGGKLPDRLEGSKMTTKRFGGQKFLQGLQLAIESGNCGKDTIDMLLKDADSSDKINRTSSIKSAS

SEQ ID NO: 51857 - protein, 152 aa, Zea Mays
MLRNATWTLSNFCRGKPQPNFDQVKPALPALQHLIHSQDEEVLTDACWALSYLSDGTNDKIQAVIESGVFPRLVELLMHPSASVLIPALRTVGNIVTGDDMQTQCVIDNQALPCLLNLLTTNHKKSIKKEACWTISNITAGNKEQIQSQQLQ

SEQ ID NO: 51858 - protein, 112 aa, Zea Mays
MNRYGLLGEGQNKLDYVLALTVENFLQRRLQTIVFKNGMAKSIHHARVLIRQRHIRVGRQLVNIPSFMVRVESEKHIDFSLTSPLGGGPAGRVKRKNQKKASGGGDAEEDEE

SEQ ID NO: 51859 - protein, 269 aa, Zea Mays
MAASGRSVACCAAALLAAALLLSAPTATVTWNVTCTYSQFLAQKTPSCCVSLSSFYNDTIVNCPTCSCGCQNPSGSNCVNEDSPNLQAAIDGPGKWTGQPLVQCTSHMCPIRIHWHVKLNYKDYWRVKITITNFNFRMNYTQWNLVAQHPNFDNITQLFSFNYKPLTPYGGGINDTAMFWGVKFYNDLLMQAGKLGNVQSELLLRKDSRTFTFEKGWAFPRRVYFNGDNCVMPSPENYPWLPNASPLTKPLALPFLVFWVALAALLAYA

SEQ ID NO: 51860 - protein, 74 aa, Zea Mays
MYVEVFNRGVIPLAYSIRKRNSRTGLPSTYYDGIYLLITYFTKPESMDALQLKLNADDDVIRSTSFKVRQRKAV

SEQ ID NO: 51861 - protein, 75 aa, Zea Mays
MHRSAGFLCCSGVTLPLPLALSLIRGSFCSSARCKTVVADHLGVCLARHLFNFHPWVKLLYTVVSTVFCIAMDLW

SEQ ID NO: 51862 - protein, 252 aa, Zea Mays
MHRSALQRERLRAEVFLDRPHLPPRKKFSPSRAVEHHPLTGDRCEVSQLQHHEHDGPRARHDPTRASRPCPALDLRLPVLAAAAPAPRVARPRLPLPPPHHRGRRDQGTRARRRRIGGRRRCRRERRRQRPEGRRAGRRRGGREDGAGPVHVAETHPRLRRARRSWWCNGIYEEWKPEILGCRRHISPGPVRRPHSTPSETCPRIIDRFRYIGRATVSDGVALQEVREGIPCRRRVPCIPGYGRRLLPRDLA

SEQ ID NO: 51863 - protein, 406 aa, Zea Mays
MNALAATSRNFKQAAKLLGLDSKLEKSLLIPFREIKVECTIPKDDGTLASYVGFRVQHDNARGPMKGGIRYHHEVDPDEVNALAQLMTWKTAVANIPYGGAKGGIGCSPGDLSISELERLTRVFTQKIHDLIGIHTDVPAPDMGTNSQTMAWILDEYSKFHGYSPAVVTGKPVDLGGSLGRDAATGRGVLFATEALLAEHGKGIAGQRFVIQGFGNVGSWAAQLISEAGGKVIAISDVTGAVKNVDGLDIVQLVKHSAENKGIKGFKGGDAIAPDSLLTEECDVLIPAALGGVINKDNANDIKAKYIIEAANHPTDPEADEILSKKGVLILPDILANSGGVTVSYFEWVQNIQGFMWDEEKVNAELRTYMTRAFGDVKQMCRSHSCDLRMGAFTLGVNRVARATSD

SEQ ID NO: 51864 - protein, 472 aa, Zea Mays
MVVMPRYLNGTSDKNYANAFYTEKHIRIPCFGGEHEVTFFHEYRDSVDWVFVDHPSYHRPGNLYGDKFGAFGDNQFRYTLLCYAACEAPLVLELGGYIYGQNCMFVVNDWHASLVPVLLAAKYRPYGVYKDSRSILVIHNLAHQGVEPASTYPDLGLPPEWYGALEWVFPEWARRHALDKGEAVNFLKGAVVTADRIVTVSKGYSWEVTTAEGGQGLNELLSSRKSVLNGIVNGIDINDWNPATDKCIPCHYSVDDLSGKAKCKGALQKELGLPIRPDVPLIGFIGRLDYQKGIDLIQLIIPDLMREDVQFVMLGSGDPELEDWMRSTESIFKDKFRGWVGFSVPVSHRITAGCDILLMPSRFEPCGLNQLYAMQYGTVPVVHATGGLRDTVENFNPFGENGEQGTGWAFAPLTTENMLWTLRTAISTYREHKSSWEGLMKRGMSKDFTWDHAAEQYEQIFQWAFIDRPYVM

SEQ ID NO: 51865 - protein, 65 aa, Zea Mays
MRGILLHITRQRTRSMLCSRTKQSLMTFSRPLFMHMCYCILSMLHMLTGMHGSARTPICHTSITH

SEQ ID NO: 51866 - protein, 233 aa, Zea Mays
MCWDTWLPPGVKKVLHPIISCALCADFAALAYGYISGFGLDAVLGAYLTKVPSNPGAGDVLMTFLGSVIISFAFSIFKQRKLVKRHATEIFTSIAIASTFSLYSTAIIGRLIGLEPSLTISILPRCITLALALSIVSFFEGVNSSVTAVVVVLTGLIGANFVLAAMEKLGLNDPISRGVGTASSAQGLGTAALAAKEPEALPFCAIAYSFTGIFGTLICSVPAVRQSLIFIAG

SEQ ID NO: 51867 - protein, 193 aa, Zea Mays
MRLLEKGKIKIGINGFGRIGRLVARVALQSEDVELVAVNDPFITTDYMTYMFKYDTVHGQWKHSDIALKDSKTLLFGEKPVTVFGIRNPEEIPWGEAGAEYVVESTGVFTDKDKAAAHLKGGAKKVVISAPSKDAPMFVVGVNEDKYTSDVNIVSNASCTTNCLAPLAKVIHDNFGIIEGLMTTVHAITARCL

SEQ ID NO: 51868 - protein, 138 aa, Zea Mays
MGAAYGTAKSGVGVASMGVMRPELVMKSIVPVVMAGVLGIYGLIIAVIISTGINPKAKPYYLFDGYAHLSSGLACGLAGLAAGMAIGIVGDAGVRANAQQPKLFVGMILILIFAEALALYGLIVGIILSSRAGQSRAD

SEQ ID NO: 51869 - protein, 133 aa, Zea Mays
MIVVKCQNHLNLVVVNNVPLFFNIRDGPYMPTLRLLHQYPDIMKKFQVDRGAIKFVLSGANIMCPGLTSPGGALDDEVEEETPVAIMAEGKQHALAIGYTKMSAKDIRTINKGIGVDNMHYLNDGLWKMERLE

SEQ ID NO: 51870 - protein, 81 aa, Zea Mays
MWNITGGVENFFHCDKCGCCYSNVLKDSHHCVERAMHHNCPVCFEYLFDSTKDISVLQCGHTIHLECMNEMRAHHHPVWSL

SEQ ID NO: 51871 - protein, 204 aa, Zea Mays
MHSLCPAIWSKHRKWMLMSMMCLNPVACSFMDVQFPNGQMTYVAGEGITASGFIPLFGGLLQAHAKCPGDTRVSFSFKNKQGTRFSPTFQWPDNSVSFGVAQAVAWKRSGLMVRPSIQISVCPTFGGTDPGICTEFVHSLKEEVSVMCGFSCSRHPSAFTALSLGRSKWNGQVGSSGLVITLETPLDNMARPSLSVQLNGGFEF

SEQ ID NO: 51872 - protein, 51 aa, Zea Mays
MASSASQASLLLQKQLKDLAKNPVDGFSAGLVDDSNIFEWQVTIIGPPDTL

SEQ ID NO: 51873 - protein, 59 aa, Zea Mays
MNPGPIPEKRTSPQSTPLLLFTNKPLSFRNERRNPQLMVLLLVHGLRLLVFVLVSVITN

SEQ ID NO: 51874 - protein, 61 aa, Zea Mays
MLLYISRCNGQNDLYFSFLGIYVRCAQTVSARHQSSWLSSDEARRNSAMESRTVALTNSTM

SEQ ID NO: 51875 - protein, 756 aa, Zea Mays
MAVLVAEFILRFTVMLMDLEVITGILKNKLLRHAIILIPNWIYDESNNDKRFDKYSGKVASEKQGSSNDRALREELAIFSKEVIRFGNLCKDPIWHNLGRYFDKYASEKLATDNTPQDHSKGSMEAIVQQLINLAQNTSIIQFFPIRFMLQSNFIVILIGLTNSILQADEELLSDLGTDVKDECTKFDLVDNVKVNYAGAFVMMINCNLCLSIGVICLMDAFFINTMGISYTSNEALGTPPWPTQPLPSPAMERVLKDDAVEEKGERARMASFVGAMAISDLVKTTLGPKGMDKILQSTGRGRNVTVTNDGATILKSLHIDNPAAKVLVAGELLKEAEKLINMKIHPMTIIAGYRMALECARDSLLKKTMDNKENTDKFRSDLMNIAMTTLSSKILSQDKEYFAELAVDAVLRLKGSTNLESIQILKKPGGSLKDSFLDEGFILDKKIGIGQPKRIENAKILVANTAMDTDKVKIYGARVRVDSMSKVADIEAAEKQKMREKVQKIIAHGINCFVNRQLIYNFPEELFADAGILAIEHADFEGIERLALVTGGEIASTFDNPESVKLGQCKVIEEIMIGEDRLIHFSGVAMGQACTIVLRGASEHVLDEAERSLHDALCVLSQTVNDTRVLFGGGWPEMVMAKEVDELARKTPGKKSHAIDAFSHALQAIPTIIADNAGLDSADLISQLRAEHHKENSTAGIDVITGTVGDMQKLGIQESFKVKQAILLSATEAAEMILRVDEIITCAPRRREDRM

SEQ ID NO: 51876 - protein, 115 aa, Zea Mays
MGKIINIASVVGLTGNVGQANYSAAKAGVIGFTKTVAREYASRNINVNAIAPGFIASDMTAELGEELEKKILSTIPLGRYGQPEEVAGLVEFLALNPAASYMTGQVLTIDGGMVM

SEQ ID NO: 51877 - protein, 113 aa, Zea Mays
MRSLGQNPTEAELQDMINEVDADGNGTIDFPEFLNLMARKMKDTDSEEELKEAFRVFDKDQNGFISAAELRHVMTNLGEKLTDEEVDEMIREADVDGDGQINYDEFVKVMMAK

SEQ ID NO: 51878 - protein, 157 aa, Zea Mays
MGRPLRIDMATERGAYTPSSGKDNGSFKKFAPRSGNTVFIKGFDTSGGEDQIRTALEEHFGSCGDITRISIPKDYDTGVSKGMAYMDFKDPDSLNKAYELNGTDLGGYSLYVDEAKPRPDNSGGFSGDRGRGGRGTPFRQTAGTASTGKKTTFGDDD

SEQ ID NO: 51879 - protein, 180 aa, Zea Mays
MGKYFCKVCKFFDDDVSKGQYHCDGCGICRTGGVENFFHCDKCGCCYSNVLKDSHHCVERAMHHNCPVCFEYLFDSTKDISVLQCGHTIHLECMNEMRAHHHFSCPVCSRSACDMSATWRKLDEEVAATPMPDIYQKHMVWILCNDCSATSSVRFHVLGHKCPACSSYNTRETRAACPRI

SEQ ID NO: 51880 - protein, 91 aa, Zea Mays
MKGDYHRYLAEFKTGPERKESAESTMMAYKAAQAFDEAISQLDTLGEESYKDSTLIMQLLRDNLTLWTSDLTEDGADEGKEAPKGEAGDGQ

SEQ ID NO: 51881 - protein, 158 aa, Zea Mays
MPAGHGLRSRTRDLFARPFRKKGYIPLTTYLRTYKIGDYVDVKVNGAVHKGMPHKFYHGRTGRVWNVTKRAIGVEINKQVNGRIIRKRIHVRVEHVQPSRCTEEFRLRKVKNDQLKADAKERGEVISTKRQPLGPKPVFMVEGTTIETVTPIPYDVGR

SEQ ID NO: 51882 - protein, 188 aa, Zea Mays
MCLTRDFPPEGTMWMLMGGGGSFSAGGPGKGMHSRLYLRVLTNFQQIESFSAFNSVYNNSGLFGIYAVTSPDFSSKAVDLAAGELLEIATPGKVTQEQLDRAKEATKSAVLMNLESRSIASEDIGRQVLTYGERKPIEYFLKTVEEITLNDILSTAKEMMSTPLTMASWGDVIHVPSYESVSRKFHSK

SEQ ID NO: 51883 - protein, 173 aa, Zea Mays
MWVNLKAVKRLVEAEALKMEIIPNPKEVDGVKVLQLETAAGAAIRFFDKAIGINVPRSRFLPVKATSDLLLVQSDLYTLVDGFVIRNPSRANPANPSIELGPEFKKVANFLARFKSIPSIVELDSLKVSGDVWFGSGITLKGKVTITAKSGVKLEVPDGAVFENKDVNGPEDL

SEQ ID NO: 51884 - protein, 405 aa, Zea Mays
MGADEYGFGSVAMIATGCVMARICHTNNCPVGVASQREELRARFPGVPGDLVNYFLFVAEEVRAALAQLGYEKLDDIIGRTDLLKPKHISLVKTQHIDLGYLLSNAGLPEWSSSQIRSQDVHTNGPVLDETILADPEIADAIENEKEVSKAFQIYNVDRAVCGRVAGVIAKKYGDTGFAGQLNITFNGSAGQSFGCFLTPGMNIRLVGEANDYVGKGMAGGELVVVPVDKTGFVPEDATIVGNTCLYGATGGQVFVRGKAGERFAVRNSLCQAVVEGTGDHCCEYMTGGCVVVLGKAGRNVAAGMTGGLAYILDEDDTLVPKVNKEIVKMQRVNAPAGQMQLKGLIEAYVDKTGSEKGIAILREWEAYLPLFWQLVPPSEEDSPEACAEFERVLAKQATTQLSAK

SEQ ID NO: 51885 - protein, 75 aa, Zea Mays
MGLLPSPPRKKHPAGRVPTRTRIPFLPPLFPFHAFPPLPDRPPFPSLLGLLDHSDAHSASGELHLSTGGSEGRGG

SEQ ID NO: 51886 - protein, 572 aa, Zea Mays
MLRQAKVFRDNQVVQERIMDSNDLERERGITILSKNTSITYKGTKINIIDTPGHSDFGGEVERVLNMVEGVLLVVDSVEGPMPQTRFVLKKALEFGHAVVVVVNKIDRPTARPEFVVNSTFELFIELNATDEQCDFQTVYASGIKGKASLSPDNLADDLGPLFEAILRCIPEPRVEKDGALQMLVSNTEYDEHKGRIAIGRLHAGELQRGMEVKVCTPDDACRVGKVSELFVYQNFSRAPVESVSAGDICAVCGIDDIMIGETIADKVTGTPLPTIKVEEPTVRMSFSINTSPFVGREGKYVTSRNLRDRLYRELERNLAMKVEDGETADTFLVSGRGTLHLTILIENMRREGYEFMIGPPKVINKTVDGKLLEPYEIAAVEVPEESMGSVVELLGKRRGQMVDMEANGTEGTTLLKYKIPTRGLIGLRNAILTASRGRAILNTIFDSYGPWAGDLSSRDQGSLVAFEDGSTTSYALLNAQERGMLFVQPGQDVYKGQIVGIHQRPGDLAINVCKKKAATNVRSNKETTVVLDEPLSYSLDDCIEFIQEDEIVEVTPASIRMCKNPKVSKKK

SEQ ID NO: 51887 - protein, 383 aa, Zea Mays
MAMLSRAASSAARRPLLPPPRLLAVRAMASSLFGHVEPAPKDPILGVTEAFLADPSSDKVNVGVGAYRDDNGQPVVLSCVREAERRIAGNLNMEYLPMGGSVKMIEESLKLAYGEDSDFIKDKRIAAVQALSGTGACRLFADFQKRFLPDSQIYIPTPTWSNHHNIWRDAQVPQKTFTYYHPESRGLDFSGLMNEIKNAPDGSFFLLHACAHNPTGVDPTEEQWREISHQFKVKKHFPFFDMAYQGFASGDPERDAKAIRIFLEDGHQIGCAQSYAKNMGLYGQRAGCLSILCEDEMQAVAVKSQLQQIARPMYSNPPVHGALVVSIILSDPELKSLWLKEVKGMADRIIGMRKALKENLEKLGSPLSWDHITNQQKMSLKHV

SEQ ID NO: 51888 - protein, 75 aa, Zea Mays
MSLARAREMLADVLPVVSLGSKAKAVNLRGKHHRRSKRAPQDVAVPFPLYWQHNLSTPNKRLIHDQRALFMPFCI

SEQ ID NO: 51889 - protein, 90 aa, Zea Mays
MAENLAPEKRHSFVHNGQKVFEWDQTLEEVNMYIELPKGVPTKLFHCSIQASHVEVGIRGNPPYLNHDLTHPVKTDSSFWTIVLLTLSGR

SEQ ID NO: 51890 - protein, 316 aa, Zea Mays
MAAVATPPAPAPAAPAPAPAPAAAPAPVTVAPAADQTTDLLQKLSLDSQPKAAGATEPAAAAAKEGAVTSQPLSVAIPPERSITPVLQDFMDPNLFYLPAYYYGGYDSSMSEWDDYPRYLNSDGVEIAPAVYGDIYGYGYAPYGAYSPATSPVPTVDGQMFGAQHYQYPTTYFQPPTPIPSTTQSNLQSSNNPEKPAAKADPAKATANGVPNGTGHTHSYSGTVPSQQSSALTPDGTYRAPLLGGVPSAGYLDTTYYGYDSTGAQFAWYDGSAYANGQQRTTTTNRFPSSSFSGNGSSAIYQNKSSTTQQMFKLGW

SEQ ID NO: 51891 - protein, 177 aa, Zea Mays
MIISKKNRREICKYLFHEGVLYAKKDYNLAKHPKLDVPNLEVIKLMQSFKSKEYVRETFSWQYYYWYLTNDGIEHLRSFLNLPSEVVPNTLKKSSKPPSRPFGSGPPGDRPRGPPRYEGDRPRFGDRDGYRGGPRGAPGDFGGDKGGAPADFQPSFRGSRPGFGRGGGGAFGAAKKK

SEQ ID NO: 51892 - protein, 92 aa, Zea Mays
MALIKKLRKAKKDAPVGEKPEPVKTHLRNMIIVPEMIGSIVGVYNGKTFNQVEIKPEMIGHYLAEFSISYKPVKHGRPGIGATHSSRFIPLK

SEQ ID NO: 51893 - protein, 546 aa, Zea Mays
MHTRATRYWRRGAMPGMDAFAAVSLLATLFLVRAAAAHPPAAAADAMTPTDYWRAVLPETPMPRAILDLLTTSTVGEGSRKVTTSNGYQGHDLRTVSTSYASQDGDNSWKATMSYGFQSGEGSRKVTTSYPYRGQDLRMVSTSYVSQDEDNSWKVTTSYPYRGQDLRMVSTSYVSQDEDNSWKVSMPSRFQVGEGSRKLTTPFESQREDSRKATASYGIQDDEDTRKATTSYGIHGEDPRKATTSYGSQDEKGSRKVIMSYGSNGEDDPRKATTSYGIQDKEYPRKATTSYGVQGDIHHHDHAAVHIHSSGNKLVADVFFFHDVLRPGSVITPIIPPTITLPPLLPLREADALPFSTGRFADILAMFAPTTSDAMGEEIRSTLDTCENTRPLPGEKAACATSLESLARIPAVLLGTRNVRAFSGDMPTDPAGTSAKRGRYNVTAVQKLSESLTAAACHDLTYPYVVFYCHTTNPAATYLVKLAAQDGGTPDMEALVVCHLDTSLWSPRHPFLVAHSLKPGDDAVVCHFLSKLSIVWVPAGEQGWRA

SEQ ID NO: 51894 - protein, 508 aa, Zea Mays
MSEQGRNVVLDEFGTPKVVNDGVTIARAIELADPMENAGASLIREVASKTNDSAGDGTTTASVLAREIIKLGMLSITSGANPVSVKKGIDKTVQKLVEELEKKSRPVKGSGDIKAVAAISAGNDEFVGTMIAEAIDKVGPDGVLSIESSSSFETTVEVEEGMELDRGYISPQFVTNLEKSIVEFENARILVTDQKISSIKEIIPLLEQTTQLRAPLLIIAEDVSGEALATLVINKLRGILNVAAIKAPGFGERRKALLQDIAIVTGAEYQSKDLGLLVEDTTVEQLGIARKVTISSSSTTIIADAASKDDIQARIAQLKRELSQTDSTYDSEKLAERIAKLSGGVAVVKVGASTEAELEDRKLRIEDAKNATFAAIEEGIVPGGGAAYVHLSTFVPAIKETLDDPEERLGADIIQKALVAPAALIAHNAGVEGEVIVDKIRESEWEFGYNAMADKHENLVEAGVIDPAKVTRCALQNAASVAGMVLTTQAIVVEKPKKAPAAAAAAAP

SEQ ID NO: 51895 - protein, 127 aa, Zea Mays
MGFKGDGEKSCEDIDECQEKLYCQCKGCSCKNTWGSYECSCGDDNMLYMREHDTCISKEGTATTVGWSFLWVIFFGLVFAGVGAYAVYKYRLRSYMDSEIRAIMAQYMPLDNQEGANQHQVVHANDI

SEQ ID NO: 51896 - protein, 103 aa, Zea Mays
MKLLLQIRRLKRRPLKELKERGRLEKKRKHGGHGRKGRDEGGRGIGTAAGTDTRIDISVIGTTTTMTSYRSCILLKSARYWMSVYGERTCKTCMLYSRMKLNL

SEQ ID NO: 51897 - protein, 371 aa, Zea Mays
MATNSPALTKRPSRHAPTHQTDRGEEKGQKATPPATTTMAASLQVQAAATLMQPAKIGGRAPSASLPSSRPSSQLARAFGVDAGAARITCSLQSDVRDVASKCVDAAKLAGFALATSALLGASAEGTPKRLTYDEIQSKTYLEVKGTGTANQCPTIDGGVDSFPFKPGKYQMKKLCLEPTSFTVKAEGIAKNAPPEFQKTKLMTRLTYTLDEIEGPLEVASDGTLKFEEKDGIDYAAVTVQLPGGERVPFLFTVKQLVATGKPDSFGGPFLVPSYRGSSFLDPKGRGGSTGYDNAVALPAGGRGDEEELQKENIKNAASSTGNITLSVTKSNPDTGEVIGVFESVQPSDTDLGAKAPKDVKIQGVWYAQLE

SEQ ID NO: 51898 - protein, 201 aa, Zea Mays
MPQDPGKTDEASSYENMGEELGDLTPQAEEYIIQMQSHLNAMKKELHDLRRKNSALQMQQFVGEEKNDLLDYLRSLTPEKVAELSESTSPGVQETIHSVVHGLLATLSPKVHSKAPPPLDNISGGVLNLGGEDDDRAELVENASLPFQPLISVPRDYLARLLFWCMLLGHYIRGLEYRLELARLLRISSVGSFSGGDDHVV

SEQ ID NO: 51899 - protein, 73 aa, Zea Mays
MQPVVLTRVNVFYGSGYVLPKLYAKVHHCVSCAIHAHIVRVRSREKRRDRKPPERFRRRSDLTCHISGTSTLP

SEQ ID NO: 51900 - protein, 400 aa, Zea Mays
MVRVDDLTGTTAAANNMMDIHSLIMSLNFTQIEIKTANFVNSWGDGVLVMVSGLVQTKEYSHQRKFIQMFFLAPQEKGYFVLNDYFHFVDQEHVQPAPVIAQEDYESNLAPNTVVETAPEYVHEEEAQQIAPEVHDVVENYTYSEPQQQVVSDNWGEEPLPEEPPSFSNEMAVAPEEPVQAPPVPLPHVDEPVCEPVKKTYASILKTAKAPAFPVAQQVPVSKTSHPTTESNQTQHSVMASSMGTEKPRSDVFGEGASHDDEESKSVYVGNVPSSVSEADLENEFKKFGRLIPDGVAIRSRKETGGYYAFVEFEELSGVHNALKASPIEINGRQIYVEERKPNSGIRGGRRGGRGRFSGGGRGYSRGGGDEYNSNRGRSNGYGRAPHQERGILGSHTPRN

SEQ ID NO: 51901 - protein, 303 aa, Zea Mays
MVACPASVSGMPTFALPVHDGGVGFDYRMHMAVADKWIDLLKQSDETWKMGDIVHTLTNRRWLEKCVTYAESHDQALVGDKTIAFWLMDKDMYDFMALDRPSTPTIDRGIALHKMIRLITMGLGGEGYLNFMGNEFGHPEWIDFPRGPQRLPSGKFIPGNNNSYDKCRRRFDLGDADYLRYHGMQEFDQAMQHLEQKYEFMTSDHQYISRKHEEDKVIVFEKGDLVFVFNFHCNNSYFDYRIGCRKPGVYKVVLDSDAGLFGGFSRIHHAAEHFTADCSHDNRPYSFSVYTPSRTCVVYAPVE

SEQ ID NO: 51902 - protein, 83 aa, Zea Mays
MSYQERLSNWESTGIKIIPVLSQPDDSWKGERGYVQDAFFRNKNIVNPSSTGAILCGPNEMQEELTLSLVADGVSRDKILTNY

SEQ ID NO: 51903 - protein, 317 aa, Zea Mays
MRSSMDDIDDDGDDDDDLDMRDPTPERDELDEEIVESDLELEGEIVQSDHDDPPQKMGNPSVEVTEENRDASQEAKGKAMEAISEGKLEDAIEHLTNAIVLNPLSAIMYGTRASVFIKMKKPAAAIRDANAALEINPDSAKGYKTRGMAYAMLGKWEEAAHDLHTASNMDYDEEINAVLKKVEPNAHKIVEHRRKYERLRKEREEKRAQRDRLRQRAEAQAAYDKAKRKEQSSSRSSGGASPRGFPGGMPGGGFPRGMPGGGFPGGGMPGGFPGGGMPGGFPGGVPGNVDMSKILNDPDLMAAFSDPEVMAALQDGM

SEQ ID NO: 51904 - protein, 67 aa, Zea Mays
MGYLQEARENHVKKKVEEALRSKMKQKALQECDFYCSKYAECARGRTFSVVWQCRKQAKELNECLHQ

SEQ ID NO: 51905 - protein, 125 aa, Zea Mays
MSSVEEVEVLDGRSLRVNSGPPPPRDRSSPSPQRPRGDANRVYVGNLSWGVDNSALANLFSEQGEVLEARIIYDRESGRSRGFGFVTYGSAEEVENAISNLDGADLDGRQIRVTVAESKPPRQQY

SEQ ID NO: 51906 - protein, 875 aa, Zea Mays
MIMHIVWKRVSDTGKNWRHVYKGLIVLDYLVAHGTERVIDDIREHAYQISALADFQYIDSSGRDQGSNVRRKSQSLVSLVNDKERIQEVREKALSTKDKYRSAFAPSGRSPGGYGGGYDNDRYEGSYGSRYDNRNGNGRGDYGYRDDDRYGGPGGTPNREGDRYSRDSNERYGRDYREDEYKGSHSNHEYAEGAGRRSYGQERDSYGDGEAYSSRGRGSNADDPTQDDRPIERKLSNQQISSPPPNYEDVTRDGQDNLHDDRNGGSVPAAVSRVPSPSVPATTVPAVQVNGVHDSTVEDVPAPPTAHAEPNGFDEFDPRGSVPDSSPPVNPASVANSLEMDLFGSDPISSLALVSVPQPTTTSNVEAPANSGFETNSFVGMPPASTGFGEIDASNPFGDPTPFKAVLDESPALPQTHAAPAGSFQPTGPGTDVNPFQPASAASFGFGDTLGDLTFAPNAAPELQDMFANTASLPSEVAPANPSVVLQQPVPTNFSSQVSQPVAGTLHAAPTAFAPSQAPPTSFAHSQAPQAAPAFSYSQGPHPGAAIQSQFPQTVAPSFPPSQVPQSVTPNLPPGQSNFFLQSASGSGIDSLSGVPTQNGAPSYIPPQNSQFTAPANQQPLQPSFIPQTSTPALQPALISRGASQPLGVPNSVPTSGSFPLQSSSSAPPETIVSALQVNQTEPVKKFEPRSKLWSDTLSRGLVNLDISGPKANPHADIGVDFDSINRKEKRQEKKINQAPVVSTVTMGKAMGAGSGIGRAGVGAMAPPPNQMGAGRGMGPGAGAGYGGGMGMNRPMGMGMGMNQQQMRMGMNQQPMGMGMGMNQQPMGGMNMGMGMNQGMPMRPPMGMGPGGMPGAGYNQMGAAYGGQQPYGGYR

SEQ ID NO: 51907 - protein, 159 aa, Zea Mays
MQLNASRIKVLQAQDDLVNKMKDDAMKELLLVSHNHHEYKNLLKDLIVQGLLRLKEPAVLLRCRKEDHHHVESVLHSAKHEYASKADVHEPEIFVDHDVYLPPAPSHHDAHGQFCSGGIVLASRDGKIVFESTLDARLEVVFRKKLPEIRKLLFGQTAA

SEQ ID NO: 51908 - protein, 350 aa, Zea Mays
MLREELQLLQEPGSYVGEVVKVMGKSKVLVKVHPEGKYVVDIDKSIDITKITPSTRVALRNDSYMLHLILPSKVDPLVNLMKVEKVPDSTYDMIGGLDQQIKEIKEVIELPIKHPELFESLGIAQPKGVLLYGPPGTGKTLLARAVAHHTDCTFIRVSGSELVQKYIGEGSRMVRELFVMAREHAPSIIFMDEIDSIGSARMESGTGNGDSEVQRTMLELLNQLDGFEASNKIKVLMATNRIDILDQALLRPGRIDRKIEFPNPNEDSRFDILKIHSRKMNLMRGIDLKKIAEKMNGASGAELKAVCTEAGMFALRERRVHVTQEDFEMAVAKVMKKDTEKNMSLRKLWK

SEQ ID NO: 51909 - protein, 181 aa, Zea Mays
MNRLKQFTAMNQFKKAALRVIAGCLSEEEIRGLKEMFKGMDSDNSGTITVDELRRGLAKQGTKLSEAEVEQLMAAADADGNGTIDYEEFITATMHMNRMDREEHLYTAFQYFDKDGSGCISKEELEQALKEKGLLDGRDIKDIISEVDADNDGRIDYSEFVAMMRKGTAEPNPKKRRDVVL

SEQ ID NO: 51910 - protein, 231 aa, Zea Mays
MAAAAVTSNGGAVAANGPAPGRLASVYSEVQTSRLLHTLPLPSVLRSNFSVVDGPASSAAGNPDEIAKLFPNLFGQPSASLVPSAEPAATRPLKVGVVLSGGQAPGGHNVICGIFDYLQERAKGSTLLGFKGGPAGIMKCKYVELTSDFVYPYRNQGGFDMICSGRDKIETPEQFKQAEDTANKLDLDGLVVIGGDDSNTNACLLGEYFRSRNLKTLVIGCPKTIDGDLKM

SEQ ID NO: 51911 - protein, 72 aa, Zea Mays
MTKMYIHKRQDIICDVFRLQAKKDLTEVTHKVYFDVEIDSKPAGRIVMGLFGKTVPKTAENFRALCTGMFYA

SEQ ID NO: 51912 - protein, 198 aa, Zea Mays
MYVANRASDKITQLTDNVYVCRSGSAADTQVISDYVRYFLHQHTIQLGQPATVKVAANLIRLLAYQNKNMLQAGMIVGGWDKYEGGQIFSVPLGGTILKQPFAIGGSGSSYLYALLDHEWKEGMSQEEAEKFVVKVVSLAMARDGASGGVVRTVTINADGVKRNFYPGDKLPLWHDELEPQNSLLDILAAGNPDPMVQ

SEQ ID NO: 51913 - protein, 370 aa, Zea Mays
MKLVVKPDMLFGKRGKSGLVALNLDLAQVRQFVKERLGVEVEMGGCKAPITTFIVEPFVPHDQEYYLSIVSERLGNTISFSECGGIEIEENWDKVKTIFLPTEKQMTPDACAPLIATLPLEVRTKIGGFIRAVFSVFQDLDFSFLEMNPFTLVNGEPYPLDMRGELDDTAAFKNFNKWGNIVFPLPFGRVLSPSESFIHELDEKTSASLKFTVLNPKGRIWTMVAGGGASVIYADTVGDLGYASELGNYAEYSGAPKEEEVLQYARVLLDCATSDPDGRKRALLIGGGIANFTDVASTFSGIIRALREKESKLKAARMNIYVRRGGPNYQTGLAKMRTLGAELGVPIEVYGPEATMTGICKEAIDCIMAA

SEQ ID NO: 51914 - protein, 121 aa, Zea Mays
MTSYCVVAVESVGRQIPIAFLDRVKEDFTKKYGGGKAATAAANSLKREFGPKLKEHMQYCVDHPEEVSKLAKVKAQVSEVKGVMMENIEKVLDRGEKIELLVDKTENLRSQAACLRIYVVP

SEQ ID NO: 51915 - protein, 145 aa, Zea Mays
MTGANAGISCVMRRIRGKEDIQGSMAAAFGSGALFSIVSGMGTPNPVANAVTTGVAFAVFQGGFFMIGQKFSKPPSEDTYYSRTRSMLHKLGLEKYEKNFKRGLLNDQTLPLLTDSALRDVKIPPGPRLLILDQIKRDPELVQAK

SEQ ID NO: 51916 - protein, 225 aa, Zea Mays
MEVTPKTLADVKGGTLISYEGRVQLLEIAQVPDEHVNEFKSIEKFKIFNTNNLWVNLKAVKRLVEAEALKMEIIPNPKEVDGVKVLQLETAAGAAIRFFDKAIGINVPRSRFLPVKATSDLLLVQSDLYTLVDGFVIRNPSRANPANPSIELGPEFKKVANFLARFKSIPSIVELDSLKVSGDVWFGSGITLKGKVTITAKSGVKLEVPDGAVFENKDVNGPEDL

SEQ ID NO: 51917 - protein, 132 aa, Zea Mays
MFTEEQNELVESAAEMLYGLIHARYILTSKGLAAMLEKYKNYDFGRCPRVYCCGQPCLPVGQSDIHRSSTVKIYCPKCEDIYYPRSKYQDIDGAYFGTTFPHLFLMTYEHLKPQKLSQRYVPRVFGFKLHKP

SEQ ID NO: 51918 - protein, 195 aa, Zea Mays
MDGRQRHWCGDRAGGNNPISWKLRRFYSSNEKHLPAISDPEIESAFKDLLAASWNELPDSLVAEAKKAASKATDDSAGQEALKNVFRAAEACEEFSGTLVTLRMALDDLCGLTGENVGPLPGYIEDAVKAAYNRYMTYLESFGPEENYLRKKVETELGTKMIHLKMRCSGIGSEWGKISLIGTSGISGSYVELRA

SEQ ID NO: 51919 - protein, 203 aa, Zea Mays
MESTEEFCFFVAAVFHYGSISLIAEPCRTAHLRAMEIAKEAGALLSYDPNLREALWPSREEARTQILSIWDQADIVKVSEVELEFLTGIDSVEDDVVMKLWRPTMKLLLVTLGDQGCKYYARDFHGAVPSFKVQQVDTTGAGDAFVGALLQRIVKDPSSLQDEKKLVESIKFANACGAITTTKKGAIPSLPTEAEVLQLIEKA

SEQ ID NO: 51920 - protein, 315 aa, Zea Mays
MELINNVAKAHGGFSVFAGVGERTREGNDLYREMIESGVIKLDDKQSESKCALVYGQMNEPPGARARVGLTGLTVAEHFRDAEGQDVLLFIDNIFRFTQANSEVSALLGRIPSAVGYQPTLATDLGGLQERITTTKKGSITSVQAIYVPADDLTDPAPATTFAHLDATTVLSRQISELGIYPAVDPLDSTSRMLSPHVLGEDHYNTARGVQKVLQNYKNLQDIIAILGMDELSEDDKLTVARARKIQRFLSQPFHVAEVFTGAPGKYVELKESVKSFQGVLDGKYDDLPEQSFYMVGGIEEVIAKAEKIAKESAS

SEQ ID NO: 51921 - protein, 121 aa, Zea Mays
MAKMLRCAGNEDIITIKADDGSDTVTFMFESPKQDKIADFEMKLMDIDSEHLGIPDSEYQAIVRMPSAEFMRICKDLSSIGDTVVISVTKEGVKFSTSGEIGSANIVCRQNQTIDKKRLPL

SEQ ID NO: 51922 - protein, 199 aa, Zea Mays
MITRILDPNPTTRITISQILEHPWFKKGYKPPVFDEKYQTSLDDVDAAFGDSEDRHVKEETEDQPTSMNAFELISLNQALNLENLFEAKEEYKRETRFTSQCPPKEIITKIEEAAKPLGFDVQKKKYKMRMENPKAGRKGNLNVATEVFQIAPSLHVVELKKAKGDTLEFQKFYRSLSTQLKDVVWKCDGEVDGNSAAA

SEQ ID NO: 51923 - protein, 168 aa, Zea Mays
MLLVPLVSAYRYDGPEVNTSLAHSEAKILHEKIHKKAYSDEEIIRILTTRSKAQLLATFNSYKDQFTHAINKDLKADPKDEFLSTLRAIIRCFTCPDRYFEKVIRLALGGMGTDEDDLTRVVTTRAEVDLKLIKEAYQKRNSVPLERAVAKDTTRDYEDIMLALLGAE

SEQ ID NO: 51924 - protein, 316 aa, Zea Mays
MATLNPFELLGADDNDDPTQLIAAAAAAAQKAEAKKSAVAPAGKAAQPAATTKFPTKPAPPSQTVRDARGGGSSARGGFGRGERGRGRGGRGYGQNRGFSGDNGNEFQGGYGGGGYGDGAVTGGSEGERERETRPPYRGGGRRGGYRNVEFADDSERPPRRNYERHSGTGHGYEMKRDGAGRGNWGTATDELIAQDAEDSPKMEEAAPVAEKQGEQNDAPAADENKDNKDATANEEEEKEEDKEMTLEEFEKIREEKRKALLALKAEERKVEVDKDLQSLQPLSNKKENDEVFIKLGSDKDKKKENAERDERAKKI

SEQ ID NO: 51925 - protein, 193 aa, Zea Mays
MPLTGSSSGGRSSGGSRSTWTSTTLTTASSSVTWSCRRGGRRCVRRRTATSRTETGGPGWTPSSSWLGRARPSSGWHPRCTRLSTLGSTHTPGTSRTGRRPAGARCRSQAATTTRSWERGRRRRTWCSSAPSPASSRPSWASRSSRSSPSTPPTRCTSASVTSLIAGRQTPRRWMRSKDSGAGWCRLRIGSRR

SEQ ID NO: 51926 - protein, 86 aa, Zea Mays
MTSVTEGIDAIATTRVVVTGDVSNNAKHALTGQSFNRSFSGSGASMDIVVSSVRAYLSALNKICSFAGAVKASSDVAETASVPSTE

SEQ ID NO: 51927 - protein, 96 aa, Zea Mays
MIHAERSNENLVEAFKNMHVQEEMVPDDNEEYVHEVIEDGGVEESQEDAVEVDAEDDGVEESQDEAVEVEAEDSTDGAVLVNGNNSEEQWVLTPEQ

SEQ ID NO: 51928 - protein, 140 aa, Zea Mays
MRRGRPRCPTLRCAAASDIVSSSPRATDNPPALRCWFIKTSYLWVTQGPVDVDIGANPSAEGGEDESVDDTAVKVVDIVDTFRLQEQPPFDKKSFVSYIKKYIKNLTAVLEPEKADEFKKGVEGATKFLLSKLKDLQFPF

SEQ ID NO: 51929 - protein, 189 aa, Zea Mays
MRELGVSWDVELYGELLRIGGGKERMTAYFNQTGWPAKAPKTDDKRKEFIASLHKRKTELFMALIEKKLLPLRPGVQRLIDEALGKAVKVAVCSTSNEKAVSAIVSYLLGPDRADKITIFAGDVVPHKKPDPAIYILAATTLGVDPQSCVVIEDSTIGLAAAKAAGMKCIVTKSGRGLRDSRCSVRLHW

SEQ ID NO: 51930 - protein, 384 aa, Zea Mays
METNQSPPCKRPRRDRNREKAPSSNKIEVMEQEIWRDFPEDLFETVIARLPVAAIFRFRTVCRRWSSLLGSDSFSRQYSEAPHGLPWFYTITHENSNNNVAMYDPLLKKWHHQSVPLNHTKIVIPVASVGGLVCLLDLSHRNFYICNPLTQSLKEIPPRSVHGWSRVVVGMVLNGRSSSDGYKVMWLDIDGTCEVYDSTKNVWSCPGTFPPSIKLPLALNLRSQPVAVGSMIYFMCAEPDGVLSYDVSTGIWRQFAIPLPLHLTDHTLAEFQGRVMLVGLLCKNAATCICIWELQKMTLLWKEVDRMPNLWCLEFYGKHMKMKCLGNSGLLMLSLKAKHMNRLVTYNLLKREWQKVPDCMLPWSRKRQWITCGTAFDPVPCALV

SEQ ID NO: 51931 - protein, 159 aa, Zea Mays
MAAFPSASPSPAISASTWSMASLQNSSFEHRLFGIDARGRIVAMRHGRRVPKLNRPPDQRKALLRGLTTQLLKHGRIKTTKPRAKAMRKYVEKMITLAKDGSLHKRRQALAFIYEKHIVHALFAEVADRYGDREGGYTRIIPTFPRRGDNAPMAYIELV

SEQ ID NO: 51932 - protein, 91 aa, Zea Mays
MVYDVSRRETFTNLSDIWAKEIDLYSTNQDCVKMLVGNKVDKESERAVTKKEGIEFAREYGCLFLECSAKTKVNVEQCFEELVLKYWPVCT

SEQ ID NO: 51933 - protein, 292 aa, Zea Mays
MFKYDTVHGHWKHSDITLKDSKTLLFGDKPVTVFGIRNPEEIPWGEAGAEYVVESTGVFTDKDKAAAHLKGGAKKVVISAPSKDAPMFVVGVNEDKYTSDVNIVSNASCTTNCLAPLAKVIHDNFGIVEGLMTTVHAITATQKTVDGPSAKDWRGGRAASFNIIPSSTGAAKAVGKVLPDLNGKLTGMSFRVPTVDVSVVDLTVRIEKGASYEDIKKAIKAASEGPLKGIMGYAEEDLVSTDFLGDSRSSIFDAKAGIALNDHFVKLVSWYDNEWGYSNRVVDLIRHMFKTQ

SEQ ID NO: 51934 - protein, 67 aa, Zea Mays
MQHPRLQRPYLSSLRSKYRSGQTMLNRGCLRHTLTKSSGSPEAMAAASLCCSRREVLFYTEIQIPSP

SEQ ID NO: 51935 - protein, 123 aa, Zea Mays
MIQYHPESSSQLAMGATFGPEAPTEEVDVDIATHIDIYDDGPERSLLVVETADRPGLLVDLVKIISDISINVQSGEFDTEGLLAKAKFHVSYRGRTLTEALQQVLCNSLRYFLRRPTTEDASF

SEQ ID NO: 51936 - protein, 394 aa, Zea Mays
MQGAGAVIHSHGIETCIATMLIPGAKEFRVTHMEMIKGIKGHGYHDELVIPIIENTPYEYELTDSLSEAIAAYPKATAVLVRNHGIYVWGESWINAKTQAECYHYLLDACIKLYQLGIDWTTPEHGSINNPRRPHSILSPEICNGCHAADSSKCVVLDIEGTTTPISFVTDVMFPYARDNVRKHLTSTFDFEETKEDIKLLRIQIEDDLQNGVAGAVPVPPDEGGKEEVINSLVANVESMIKADRKITSLKQLQGHIWRIGFQKKELQGVVFEDVPVALKNWHASGIKVYIYSSGSREAQRLLFGNTTYGDLRKFLCGYFDTTTGNKRETRSYFEISQSLGVDSPSQILFITDVFQEAIAAKNAGFEVIISIRPGNAPLPDNHGFRTIKSFSEI

SEQ ID NO: 51937 - protein, 105 aa, Zea Mays
MRLNWQYKGTGGKSIYGRTFKDENFKLVHTGPGVVSMANAGPNTNGSQFFICTVKTPWLDGRHVVFGQVLEGMDVVSLIESQETDRGDRPKKKVVISECGELPVV

SEQ ID NO: 51938 - protein, 329 aa, Zea Mays
MAAVTAAAVSLPSSSSSPAAAKAKAEPVKKLEKVSKKQEEGLVTNKYKPKEPYVGRCLLNTRITGDQAPGETWHMVFSTEGEVPYREGQSIGVIADGEDKNGKPHKLRLYSIASSALGDFGDSKTVSLCVKRLVYTNDQGEVVKGVCSNFLCDLKPGAEVKITGPVGKEMLMPKDPNATIIMLATGTGIAPFRSFLWKMFFEEHEDYKYTGLAWLFLGVPTSDTLLYKEELEKMKEMAPDNFRLDFAVSREQTNAAGEKMYIQTRMAEYKEELWELLKKDNTYVYMCGLKGMEKGIDDIMLDLAAKDGINWLDYKKQLKKSEQWNVEVY

SEQ ID NO: 51939 - protein, 206 aa, Zea Mays
MFVVGVNEDKYTSDVNIVSNASCTTNCLAPLAKVIHDNFGIVEGLMTTVHAITATQKTVDGPSAKDWRGGRAASFNIIPSSTGAAKAVGKVLPDLNGKLTGMSFRVPTVDVSVVDLTVRIEKGASYEDIKKAIKAASEGPLKGIMGYAEEDLVSTDFLGDSRSSIFDAKAGIALNDHFVKLVSWYDNEWGYSNRVVDLIRHMFKTQ

SEQ ID NO: 51940 - protein, 247 aa, Zea Mays
MASLSCASTLPWTPASSPRPSADRRLTASRRAPSLVIVAQGKVKKHPQVILTDDIEEVGKKGDTMKVRAGFYRNSLLPKGKAALLTPAVHKQNTIVASENENPPLMPAIMTPGGALDLATVLLGNRIIFIGQYINSQVAQRVISQLVTLAAIDEEADILIYLNCPGGSLYSILAIYDCMSWIKPKVGTVCFGVVASQAAIILAGGEKGMRYAMPNARVMIHQPQGGSEGNVEEVRRQVGETIYARDV

SEQ ID NO: 51941 - protein, 53 aa, Zea Mays
MVQRLTYRKRHSYATKSNQTRVVKTPVHQEARERTEVPSHREEDPRNSTPETC

SEQ ID NO: 51942 - protein, 81 aa, Zea Mays
MPNIGYGSDKKTRHYLPNKFKKFVVHNVSELELLMMHNRTYCAEIAHNVSTKKRKEIVERAAQLDIVVTNKLARLRSQEDE

SEQ ID NO: 51943 - protein, 594 aa, Zea Mays
MDRARGSAFLLGVLLAGSLFAFSVAKEETKKLGTVIGIDLGTTYSCVGVYKNGHVEIIANDQGNRITPSWVAFTDSERLIGEAAKNQAAVNPERTIFDVKRLIGRKFADKEVQRDMKLVPYKIINKDGKPYIQVKIKDGENKVFSPEEISAMILGKMKDTAEAYLGKKINDAVVTVPAYFNDAQRQATKDAGVIAGLNVARIINEPTAAAIAYGLDKKGGEKNILVFDLGGGTFDVSILTIDNGVFEVLATNGDTHLGGEDFDQRIMEYFIKLIKKKYSKDISKDNRALGKLRREAERAKRALSNQHQVRVEIESLFDGTDFSEPLTRARFEELNNDLFRKTMGPVKKAMEDAGLEKSQIHEIVLVGGSTRIPKVQQLLRDYFDGKEPNKGVNPDEAVAFGAAVQGSILSGEGGDETKDILLLDVAPLTLGIETVGGVMTKLIPRNTVIPTKKSQVFTTYQDQQTTVSIQVFEGERSMTKDCRLLGKFDLNGIAPAPRGTPQIEVTFEVDANGILNVKAEEFAEEDKKEKVEEALKEALEWLDDNQSAEKEDYEEKLKEVEAVCNPIVSAVYQRSGGAPGGDADGGVDDDHDEL

SEQ ID NO: 51944 - protein, 353 aa, Zea Mays
MFEKGQSKRIWGELYKVIDSSDVVVQVLDARDPMGTRCYHLERHLKENCKHKHLVFLLNKCDLIPAWATKGWLRTLSKDYPTLAFHASINKSFGKGSLLSVLRQFARLKNDKQAISVGFVGYPNVGKSSVINTLRSKSVCKVAPIPGETKVWQYITLTKKIFLIDCPGVVYQNNDSETDIVLKGVVRVTNLADAAEHIGEVLRRVKKEHLQRAYKIQDWSDDNDFLVQLCRTTGKLLKGGEPDLTTAAKMILHDWQRGKIPFFVPPPQQSDGGASESAEPIGITKEDGVSSDRTAAAMKAIAGIISSQQNMNVPCHKENNADNEDTTENADNEDIESSDNEDNDDIEPAERSE

SEQ ID NO: 51945 - protein, 374 aa, Zea Mays
MDPSVSTIWDGNTLYNELEVVEGMKLDRGYISPYFITNSKAQKCELEDPLILIHDKKVTNMHAVVKVLEMALKKQRPLLIVAEDVESEALGTLIINKLRAGIKVCAVKAPGFGENRKANLQDLAILTGGEVITEELGMNLENVEPHMLGSCKKVTVSKDDTVILDGAGDKKSIEERADQIRSAVENSTSDYDKEKLQERLAKLSGGVAVLKIGGASEAEVGEKKDRVTDALNATKAAVEEGIVPGGGVALLYASKELDKLQTANFDQKIGVQIIQNALKTPVHTIASNAGVEGAVVVGKLLEQGNTDLGYDAAKDEYVDMVKAGIIDPLKVIRTALVDAASVSSLMTTTESIIVEIPKEEAPAPAMGGMGGMDY

SEQ ID NO: 51946 - protein, 258 aa, Zea Mays
MRRYSPPYRSPPRRGYGGRGRSPPPPRRGYGGRKEGSGSLLVRNIPLSVRAEDLRVPFERFGPVRDVYIPKDYYSGEPRGFAFVEFVDPYDASEAQYHMNRQVFFGREIAVVLAAESRKRPEEMRSRTRVRGYSGHEGRRSSYYGRSRSRSPRYRGRPRSRSYSPAPRRGNDYSASPRRQEAHRSSPPRRLPKEHDEDKKRRSYSPASRDDADNVYEKRSPPADSDGSPLHRRSPKEYSGSPPGSRSRSADDSPVASD

SEQ ID NO: 51947 - protein, 757 aa, Zea Mays
MERLQLFRGDTVLLKGKKRKDTVCIVLADETCEEPKVRMNKVVRQNLRVRLGDVVSVHQCQDVKYGKRVHILPIDDTVEGITGNLFDAFLKPYFLEAYRPVRKGDLFLVRGGMRSVEFKVIETDPSEYCIVAPDTEIFCDGEPIKREDEERLDEVGYDDVGGVRKQMAQIRELVELPLRHPQLFKSIGVKPPKGILLYGPPGSGKTLIARAVANETGAFFFLINGPEIMSKLAGESESNLRKAFEEAEKNAPSIIFIDEIDSIAPKREKTNGEVERRIVSQLLTLMDGLKSRSHVIVMGATNRPNSIDPALRRFGRFDREIDIGVPDEVGRLEVLRIHTKNMKLAEDVNLELISKDTHGYVGADLAALCTEAALQCIREKMDIIDLEDETIDAEILNSMAVTNDHFKTALGTSNPSALRETVVEVPNVSWEDIGGLENVKRELQETVQYPVEHPEKFEKFGMSPSKGVLFYGPPGCGKTLLAKAIANECQANFISVKGPELLTMWFGESEANVREIFDKARQSAPCVLFFDELDSIATQRGSSVGDAGGAADRVLNQLLTEMDGMNAKKTVFIIGATNRPDIIDPALLRPGRLDQLIYIPLPDEQSRLQIFKACLRKSPVAKDVDLNALAKYTQGFSGADITEICQRACKYAIRENIEKDIERERRMKDNPEAMEEDEVDEIAEIKAAHFEESMKYARRSVSDADIRKYQAFAQTLQQSRGFGSEFRFSEQSATAGAAAADPFASAGAAADDDDLYS

SEQ ID NO: 51948 - protein, 120 aa, Zea Mays
MMYDKISESFNAYFEDNSIEEVAEQFLIIHEECLQNNYSSIEKLRNSPVPGNAVSQSRQIVGDDDDDSDSSDDGDDTSMVADEEAGPEEMAVDRPRPPKPTPDADGWTVVPPRRGGRSKK

SEQ ID NO: 51949 - protein, 206 aa, Zea Mays
MKKKKKKPVDLDSTLDELGDGEDTQDDQAVEEQGEGIVLGSVPTYPWEGTDRDYKYEELLDRVFNILRENNPDLAGDRRRTVMRPPQVLREGTKKTVFVNFMDLCKTMHRQPEHVMMFLLAEMGTSGSLDGQQRLVIKGRFAPKNFEAILRRYINEYVICNGCKSPDTILSKENRLFFLRCEQCGSSRSVAPIKAGFVAQVGRRKA

SEQ ID NO: 51950 - protein, 99 aa, Zea Mays
MGFVSFVGRVLFVAAFLLSAYQEFNEFGADGGPAAKALRPKFNVFVKNVSAHLGVAVPHIELKHVIAATIGLKGLGSLLFILSSSLGAYLLLMKWFLSL

SEQ ID NO: 51951 - protein, 469 aa, Zea Mays
MGKEKSHINIVVIGHVDSGKSTTTGHLIYKLGGIDKRVIERFEKEAAEMNKRSFKYAWVLDKLKAERERGITIDIALWKFETTKYYCTVIDAPGHRDFIKNMITGTSQADCAVLIIDSTTGGFEAGISKDGQTREHALLAFTLGVKQMICCCNKMDATTPKYSKARYEEIVKEVSSYLKKVGYNPDKIAFVPISGFEGDNMIERSTNLDWYKGPTLLEALDQITEPKRPSDKPLRLPLQDVYKIGGIGTVPVGRVETGVIKPGMVVTFGPTGLTTEVKSVEMHHEALQEALPGDNVGFNVKNVAVKDLKRGFVASNSKDDPAKEAASFTSQVIIMNHPGQIGNGYAPVLDCHTSHIAVKFAELITKIDRRSGKELEKEPKFLKNGDAGMVKMIPTKPMVVETFSAYPPLGRFAVRDMRQTVAVGVIKSVEKKDPTGAKVTKTVAVGVIKSVEKKDPTGAKVTKAAAKKK

SEQ ID NO: 51952 - protein, 190 aa, Zea Mays
MQIFVKTLTGKTITLEVESSDTIDNVKAKIQDKEGIPPDQQRLIFAGKQLEDGRTLADYNIQKESTLHLVLRLRGGMQIFVKTLTGKTITLEVESSDTIDNVKAKIQKESTLHLVLRLRGGMQIFVKTLTGKTITLEVESSDIQDKEGIPPDQQRLIFAGKQLEDGRTLADYNIQKESTLHLVLRLRGGY

SEQ ID NO: 51953 - protein, 592 aa, Zea Mays
MNDTHPTLCIPELMRILMDVKGLSWSEAWSITERTVAYTNHTVLPEALEKWSLDIMQKLLPRHVEIIETIDEELINNIVSKYGTTDTELLKKKLKEMRILDNVDLPASISQLFVKPKDKKESPAKSKQKLLVKSLETIVDVEEKTELEEEAEVLSEIEEEKLESEEVEAEEESSEDELDPFVKSDPKLPRVVRMANLCVVGGHSVNGVAEIHSEIVKQDVFNSFYEMWPTKFQNKTNGVTPRRWIRFCNPALSALISKWIGSDDWVLNTDKLAELKKFADNEDLHSEWRAAKKANKMKVVSLIREKTGYIVSPDAMFDVQVKRIHEYKRQLLNILGIVYRYKKMKEMSTEERAKSFVPRVCIFGGKAFATYIQAKRIVKFITDVAATVNHDSDIGDLLKVVFVPDYNVSVAEALIPASELSQHISTAGMEASGTSNMKFAMNGCILIGTLDGANVEIREEVGEENFFLFGAEAHEIAGLRKERAEGKFVPDPRFEEVKEFVRSGVFGTYSYDELMGSLEGNEGYGRADYFLVGKDFPSYIECQEKVDEAYRDQKLWTRMSILNTAGSSKFSSDRTIHEYAKDIWDISPAILP

SEQ ID NO: 51954 - protein, 155 aa, Zea Mays
MTAEEKILYKLKLARKKEERLVVALKKIEPEDPSEPTHDPEVLTPEEHFYFLKMGQKCKNYVPVGRRGIYQGVILNMHLHWKKHQTLQVIVKTFTPEEVKEIAIELATLSGGIVLDIQDGNTIIMYRGKNYAQPPPEIMSPKVSLSRKKVTQKFS

SEQ ID NO: 51955 - protein, 141 aa, Zea Mays
MSKRQGPPKHQNRYAWKPNLGQKINETEPGGRFRPLSEITGVCQRCRDQIDWKRRYGKYKPIVEPAKCQKCNKRNVRQAYHNVCRDCSKDLGICAKCCTCVNELVGRDANEEESERKSLEEAVRGARERERRTLLRIALQR

SEQ ID NO: 51956 - protein, 92 aa, Zea Mays
MVRDGKLFVNGVVQDEDFVLEPHNYEMEPVLVPEGYVFVLGDNRNNSFDSHNWGPLPVRNIVGRSILRYWPPSKINDTIYEPDVSRLTVPSS

SEQ ID NO: 51957 - protein, 610 aa, Zea Mays
MLSRKDLFKDTLRKAAHAWKRIVELRLTEEEAGMLRLYVDQPGYVDLHWGMFVPAIKGQGTEEQQKKWLPMAYKFQIIGCYAQTELGHGSNVQGLETTATFDPKTDEFVIHSPTLTSSKWWPGGLGKASTHAVVYARLITEGKDYGIHGFIVQLRSLEDHSPLPGITLGDIGGKFGSGAYNSMDNGVLRFDHVRIPRDQMLMRLSQVTREGKYVHSDVPKQLLYGTMVFVRQTIVADASKALSRAVCIAVRYSAIRKQFGSQDGGPETKVLDYKTQQSRLFPLLASAYAFRFVGDWLKWLYMDVTQKLEAKDYSTLQEAHACTAGLKAVTTSATADAIEECRKLCGGHGYLNSSGLPELFAVYVPACTYEGDNIVLLLQVARILMKTLSQLTSGKQPVGTMAYMGNVQYLMQCKCAVNTAEDWLNPVAIQEAFEARALRMAVNCAQNIGQAANQEEGFYERSPDLLEAAVAHIQLVIVTKFISKVQQDIPGPGVKEQLQNLCNVYALYILHKHLGDFLATGCITPKQGALANEQLGKLYAQVRPNAVALVDAFNYTDHYLGSVLGRYDGNVYPALYEEAWKDPLNETVVPEGYHEYLRPLLKQQLKLSRL

SEQ ID NO: 51958 - protein, 467 aa, Zea Mays
MQFSSVLPLEGKACMSPVRRGSGGYGSERMRINCCSIRRNKALRRMCFSARGAVSSTQCVLTSDAGPDTLVVRTSFRRNYADPNEVAAVILGGGTGTQLFPLTSTRATPAVPIGGCYRLIDIPMSNCFNSGINKIFVMTQFNSASLNRHIHRTYLGGGINFTDGSVEVLAATQMPGEAAGWFQGTADAVRKFIWVLEDYYKHKAIEHILILSGDQLYRMDYMELVQKHVDDNADITLSCAPVGESRASDYGLVKFDSSGRVIQFSEKPKGAALEEMKVDTSFLNFAIDSPAEYPYIASMGVYVFKRDVLLDLLKSRYAELHDFGSEILPKALHEHNVQAYVFTDYWEDIGTIRSFFDANMALCEQPPKFEFYDPKTPFFTSPRYLPPTKSDKCRIKDAIISHGCFLRECAIEHSIVGVRSRLNSGCELKNTMMMGADLYETEDEISRLLAEGKVPIGVGENTKISPS

SEQ ID NO: 51959 - protein, 133 aa, Zea Mays
MNPGGASISLTYIASERAIPGYGGGMSSAKAALESDTRVLAFEAGRKGKIRVNTISAGPLGSRAAKAIGFIEKMIEYSYVNAPLQKELLADEVGNTAAFLVSSLASAITGSTVYVDNGLNTMGLAIDSPTITS

SEQ ID NO: 51960 - protein, 347 aa, Zea Mays
MPRRWYLSVNLLQSAIPDALVNTGLAKLGYEYVNIDDCWAESDRDYQGSFVANRQTFPSGIKALADYVHAKGLKLGIYSDAGTRTCSQKMPGSLDHEEQDVKTFSSWGIDYLKYDNCNDAGRSVMERYTKMSNAMKTYGKGIFFSLCEWGRQNPATWAGGMGNSWRTTDDIADNWGSMTSRADQNDRWASYAGPGGWNDPDMLEVGNGGMSEAEYRSHFSIWALAKAPLLIGCDVRAMSQQTMGILSNSEVIAVNQDSQGAQGKKVQSSNGLEVWAGPLSNNRKAVVLWNRQGYQATITAQWSSIGLASSTAVTARDLWAHSSFSAQGQLSASVPPHDCKMYVLTPN

SEQ ID NO: 51961 - protein, 105 aa, Zea Mays
MKHEAETKTNAYWLGLLAHLQSSSVPRKDVSCIKELTTLYENATIEDLYIAYEHLKVDDSSLFACIGIAGAESGEDTNDDEPDVDLHGMGPMGGRGLSTMTRPTT

SEQ ID NO: 51962 - protein, 83 aa, Zea Mays
MRGRSAVLHAALELCFNLVVPLSNVSEEVYGKYPMSLVWLPFRLTCSHSAPHFLSHVRHVNANTKVSLHGQKCYQSVDCALII

SEQ ID NO: 51963 - protein, 331 aa, Zea Mays
MPLLQAISIVFERHPHLKLEGLDDQVLQWCVCRLEAWFAADADEISLKNWDQERVLTGGHGLMVNGYYPVIEALAQGLDIRLNQRVTEITRQHNGVKVTTEDGTSYLADACIISVPLGVLKANVIKFEPELPQWKSSAIADLGVGTENKIAMHFDRVFWPNVEVLGMVGPTPKACGYFLNLHKATGNPVLVYMAAGRFAQEVEKLSDKEAVGLVVSHLKKMLPDATEPTQYLVSRWGSDPNSLGSYSCDLVAKPADVCARFAAPVENLHFAGEAASAEHSGSVHGAYSSGIAAAEECRKRLLALKGIPDLVQVAAWEEMAGAVAPLQICRT

SEQ ID NO: 51964 - protein, 117 aa, Zea Mays
MPPPQSGMTLCRLPKATLGLPLSLPSLLYRPSLSLAARRTKAVSARASSSSPSPDSSFGSRMEDSVKKTVADNPVVIYSKSWCSYSMEVKSLFKRIGVQPHVIELDNLGAQGPQLQK

SEQ ID NO: 51965 - protein, 145 aa, Zea Mays
MGVKFLVLLGVVLASLVFQDVAFARELTEANNEDEGKNMKQGGMTELKDEKWGGGYNGGYGYGGGYGGGYGKPGYGGGYGGGYRPKYGRGYRSGYGYGGGYGGGYGGGYGGGYGGGGGYGEGGGFGGGHGGGRYPWWMELRSIAT

SEQ ID NO: 51966 - protein, 274 aa, Zea Mays
MSIQRLIREAHKKGAKIVLVQELFEGHYFCQAQRLDFFRRAKPYKGNPTIIRMQQLAKELEVVIPVSFFEEANNAHYNSVAIIDADGADLGLYRKSHIPDGPGYQEKFYFNPGDTGFKAFKTKYATIGVGICWDQWFPECARAMALLGAEILFYPTAIGSEPQDCNLDSREHWKRVMQGHAGANLVPLVASNRIGRETVDTEHGKSSITFYGNSFIAGPTGEIVKLANDKDEEVLVAEFDLDEIKSIRHGWGIFRDRRPELYKVLLTLDGEKQS

SEQ ID NO: 51967 - protein, 136 aa, Zea Mays
MSKRGRGGSAGNKFRMSLGLPVAATVNCADNTGAKNLYIISVKGIKGRLNRLPSACVGDMVMATVKKGKPDLRKKVMPAVIVRQRKPWRRKDGVYMYFEEHAIATRQQFSDGWTSMSFGLIVEQTKNVCIFPSKRQ

SEQ ID NO: 51968 - protein, 463 aa, Zea Mays
MMLDSRAADLDKEERPEILSLLPSYKGKSVLELGAGIGRFTGDLAKEAGHVLALDFIESVIKKNQSINGHHKNITFRCADVTSNDLKIEDNSVDLIFSNWLLMYLSDEEVQKLVGKMVKWLKVGGHIFFRESCFHQSGDSKRKVNPTHYREPRFYTKVFKEGHSFDQDGGSFELSLVTCKCIGAYVKNKKNQNQICWLWEKVKSTEDRDFQRFLDNVQYKTSGILRYERVFGEGFVSTGGIETTKEFVGMLDLKPGQKVLDVGCGIGGGDFYMAANYDVHVLGIDLSVNMVSFAIERAIGRKCSVEFEVADCTTKDYPENSFDVIYSRDTILHIQDKPALFRSFFKWLKPGGKVLISDYCKNPGKPSEEFAAYIKQRGYDLHDVKAYGQMLKDAGFHNVIAEDRTEQFLNVLQREIGEVEKNKDAFLADFTQEDYDDIVNGWNAKLKRSSAGEQRWGLFIATK

SEQ ID NO: 51969 - protein, 197 aa, Zea Mays
MHHFIEELSATGKFEFMDLNVDEAEHSMEMHLPYLAKVFQGHNVKVVPILVGALSSQNEALYGQLLSKYVDDPKNFFSVSSDFCHWGSRFSYTYYEKKHGAIHKSIEALDRMGMEIIETGDPVAFKEYLQEYENTICGRHPISVFLHMLKHCSTKIKIGFVRYEQSSQCKNMRDSSVSYASAAAKVAGASGEEDKQD

SEQ ID NO: 51970 - protein, 212 aa, Zea Mays
MGDSRSKVKELSSWESDLKRREADIKRREEALKNAGVPMEEKNWPPFFPIIHHDIANEIPANVQKLQYLAFASWLGIVLCLSWNFVAVIVCWIKEGDSKLFFLATIYALLGIPLSYLIWYRPLYRAMRTNSAFSFGWFFLCYLIHIGFCIIAAIAPPIVFHGKSLTGILAAIDTFSEHVIIGIFYFVGFALFCLETLLSIGVLQACLRGGVI

SEQ ID NO: 51971 - protein, 64 aa, Zea Mays
MVRRKCNHPSTLSEERGRERINQFVLNLTLLKTTYITTFIYINPSPSQPSTSPPAPPDPSQRLL

SEQ ID NO: 51972 - protein, 53 aa, Zea Mays
MPSIATVLYPFSYTRCHFPPSHKKKTSFALVISVLIRFRPNGPGEAEVETRAA

SEQ ID NO: 51973 - protein, 745 aa, Zea Mays
MAAAKEKASVCCRDAPARVAGAPVVPMRAIAASPVGKVVALAAGGGERVSASAAGSSGAVIEEIAAVQPTTAKASSKGIPIMTRAQRCHPLDPLSAAEIAVAVATVRVAGRSPEERDSMRFVEAVLLEPEKNVVALADAYFFPPFQPSLLPRSKGSAVIPSRLPPRRARLVVYNKQSNETSIWIVELSEVHAATRGGHHRGKVISSEVIPDVQPAMDAMEYAECEATVKSYPPFIEAMKRRGVDDMDLVMVDAWCAGYYSEADAPSRRLGKPLIFCRTESDSPMENGYARPVEGIHVVVDMQNNAVIEFEDRKLVPLPPPDHLRNYTPGETRGGVDRSDVKPLIINQPEGPSFRINGYFVEWQKWNFRIGFTPKEGLVIYSVAYVDGSRGRRPIAHRLSFVEMVVPYGDPSEPHYRKNAFDAGEDGLGKNAHSLKKGCDCLGYIKYFDAHFTNFTGGVETIENCVCLHEEDHGILWKHQDWRTGLAEVRRSRRLTVSFICTVANYEYGFYWHFYQDGKIEAEVKLTGILSLGALMPGESRKYGTTIAPGLYAPVHQHFFVARMDMAVDCKPNEAHNQVVEVNVKVESAGTHNVHNNAFYAEEKLLKSELQAMRDCDPSSARHWIVRNTRTVNRTGQPTGYRLVPGSNCLPLALPEAKFLRRAGFLKHNLWVTQYKRGEMFPGGEFPNQNPRIHEGLPTWVKNDRPLEETDIVLWYVFGLTHIPRLEDWPVMPVEHIGFMLMIKKK

SEQ ID NO: 51974 - protein, 136 aa, Zea Mays
MYDQIFRPSKLSGNADFHLFKAGVEPKWEDPECANGGKWTVPCNRKATFETMWLETLMALIGEQFDETEDICGIVASVRARGDKLALWTRTASNEAVQVNIGKKWKDVIDYNDKITYTFHDDSKRDKPSRGGRYTV

SEQ ID NO: 51975 - protein, 552 aa, Zea Mays
MTYFPEEVVEHIFSFLPSHSDRNTVSLVCKVWYEVERLSRRAVFVGNCYAVRPERVVLRFPNIKALTVKGKPHFADFNLVPPDWGGYAGPWIDAAARSCVGLEELRMKRMVVFDENLELLARSFLRFKVLVLISCEGFSTDGLAAIASHCKLLRELDLQENDVEDRGPRWLSFPDSCTSLVSLNFACIKGEVNSVDTLSKILLRAPNLEDLGTGNLTDEFQAESYSRLTSALEKCKKLRSLSGFWDASPICVPYIYPLCHQLTGLNLSYTPTLDYSDLAKMVSRCVKLQRLWVLDCISDKGLQVVASSCKDLQELRVFPSEFYVPGASAVTEEGLVAISSGCPKLTSLLYFCHQMTNEALITVANNCPNFIRFRLCILEPKKPDAMTGQPLDEGFGAIVRECKGLRRLSISGLLTDKVFMYIGKHAKYLEMLSIAFAGDSDKGMMDVMNGCKNLRKLEIRDSPFGDVALLGNVAKYETMRSLWMSSCNVTLKGCQVLASKMPMLNVEIMNELDGSSEMENHGDLSKVDKLYVYRTTAGARDDAPNFVKILQS

SEQ ID NO: 51976 - protein, 87 aa, Zea Mays
MCLSFLLISAMELALALEKLVNEKLHNLHGVATRCNDPQLTDFIESEFLEEQVEAINKISKYVAQLRRVGKGHGVWHFDQMLLEEEA

SEQ ID NO: 51977 - protein, 59 aa, Zea Mays
MGIPKDTIHMAMLGPLKILPCTPTQHIQGMEITSNSHHSSPRHNSNDVPRVIICKLVAK

SEQ ID NO: 51978 - protein, 254 aa, Zea Mays
MEPHLTEDKPVRIDQESSSTSNRDAEASTSTSMKPVKTEEAGADLLPKEMNIMTISDDKADGHNDKEGEGVTLDGTGTETGQIIVTTIGGHNGKPKQKVSYMAELVVGTGSFGIVFQAKCLETDETVAIKKVLQDKRYKNRELQTMQLHDHPNVVQLKHHFFSTTQKGEVYLNLVLEFVSETVYRVAKYYNRMNQRVPIIYVKLYAYQMCRALAYIHRVVGVCHRDIKPQNLLVNPHTHQLKICDFGSAKKLGS

SEQ ID NO: 51979 - protein, 73 aa, Zea Mays
MKEYVQKFIDCQVKDVAEFEVERDELIKVHEDKKLKLKKEYMDLELELEKEFDAALTGLMEKHKPDTFEASSS

SEQ ID NO: 51980 - protein, 181 aa, Zea Mays
MPDQLPKIYRNLGENFNERVLPSIIHETLKAVVAQYNASQLITQREAVSREIRKILTERANNFNIALDDVSITSLSFGKEFTHAIEAKQVAAQEAERAKFIVEKAEQDKRSAVIRAQGEAKSAELIGQAIANNPAFLALRQIEAAREISHTMAASSNKVFLDSRDLLLGLQQLNVGGKQKK

SEQ ID NO: 51981 - protein, 388 aa, Zea Mays
MNHFCPVKMADELRSTSVGQKFHGQSVLLSRISSYSAMNNPVFNNAYSAYNVPQRSYHGMNATAGLSSVMAPSPVFASAPKEKGFSGFMIDFMMGGVSAAVSKTAAAPIERVKLLIQNQDEMLKTGRLSEPYKGIGDCFGRTIRDEGFVSLWRGNTANVIRYFPTQALNFAFKDHFKRMFNFKKDKDGYWKWFAGNLASGGAAGACSLFFVYSLDYARTRLANDAKAAKKGGERQFNGLVDVYRKTLASDGIRGLYRGFNISCVGIIVYRGLYFGMYDSLKPVLLVGTLQDNFLASFLLGWGITIGAGLASYPIDTVRRRMMMTSGEAVKYNSSLDAFKQIVAKEGTKSLFKGAGANILRAVAGAGVLAGYDKLQVVVFGKKYGSGGG

SEQ ID NO: 51982 - protein, 60 aa, Zea Mays
MRSARFVAGLDSGGARAVGFDRTRTLSHSGLAGLGLGRRGEARSSGVSTRAALGWCRRER

SEQ ID NO: 51983 - protein, 215 aa, Zea Mays
MVYIKATGEQSAEMVTDEGAIYVTSNRGYNWKAAVQETVSATLNRTVSSGISGASYYTGTFNTVNRSADGRYVAVSSRGNFYLTWEPGQPFWQPHNRAVARRIQNMGWRADGGLWLLVRGGGLFLSRGTGITEDFEEVQVQSRGFGILDVGYRSQEEAWAAGGSGVLLKTTNGGKSWMRDKAADNIAANLYSVKFLDDRKGFVLGNDGVLLRYLG

SEQ ID NO: 51984 - protein, 88 aa, Zea Mays
MMIVGIEIPKYVDTVTPQYKPKFDAVIAELKEAEKEHQKESERIEKELAEMEEMRKKISTMTADDYFEKYPELRKKFDDEIRNDNWGY

SEQ ID NO: 51985 - protein, 182 aa, Zea Mays
MGRGKVELKRIENKISRQVTFAKRRNGLLKKAYELSLLCDAEVALIIFSGRGRLFEFSSSSCMYKTLERYRSSNYSQEVKTPLDTEIKYQDYLKLRTRVEFLQTTQRNILGEDLGPLSMKELEQLEDQIEISLKHISSRKNQMLLDQLFDLKSKEQELLDLNKDLRKQVMQWPPNISVYTYW

SEQ ID NO: 51986 - protein, 85 aa, Zea Mays
MQESNQEVPAWLLRYAARPSYGGGGGGRNRRSGGGSRFGGRDFRNDSSSFGKGGSRGGGDYYGGGSSGGYGGGGHGGAGAPSAWD

SEQ ID NO: 51987 - protein, 390 aa, Zea Mays
MAYIMDTNEEERVKGKTVEVGRAHFETEHTRFTILDAPGHKSYVPNMISGASQADIGVLVISARKGEFETGYERGGQTREHVLLAKTLGVAKLVVVINKMDEPTVKWSKERYDEIEAKMVPFLKSSGYNVKKDVQFLPISGLVGTNMKTRMDKSICSWWDGPCLFEVLDRIEIPLRDPKGPVRMPIIDKYKDMGTVVMGKIEAGTIREGDSLLIMPNKSHVKVIGLNLDESKVRRAGPAENVRVKLSGVEEEDVMSGFVLSSVANPVGAVNEFIAQLQILELLDNAIFTAGYKAVLHIHSVVEECEIVELIEEIDMKKKKGDPKKKKPKRKPLFVKNGAIVVCRIQVNNLICIEKFSDFPQLGRFTLRTEGKTVAVGKVVDVPPAGSPTF

SEQ ID NO: 51988 - protein, 534 aa, Zea Mays
MKKTLVFHRGRAPKGERTGWIMHEYRTTEPEFESGEQGGYVLYRLFRKQEEKTERSSPEEVDRSGYSPTPSRSSPDNLEANEEANTPLNKESPESALHESPIELPKSVETNGGSMTRWLADRNDNLMVTAPDVSHIPFHGHAAGVAKVDPSVGASGHLVNPHNGNDDYNKFVSDFTPILPLENAFFTDIQQGAFGFDGIMNPLDPLDAFLNQTLVDPDEHSSTTSKVQYDSDIPTEFENHWNMKVEPQDDQCWWANIGFEPDEPNPLLPCDTTDQDILSVDSGADSFNELFNSMEETGIIVRPQQLDSTVQPNHVFASQGNAARRLRLQVESREIITKDESEDEVSCVLTPDCLNDSVEESTAEKDVASDGDEAESTGIVIRSHHPAPRSSSESSFTQQGTAMQRLRLQSGLNKGQRPSTDDSSSCIIDEPGSQHKAEKAEIEEDASTNLAGSADDLPGNIHDDEQKNIPEHAKSVLRLRKTSEEGNKDVKQESCLEPHVRAPMQKGGFQSYIIWLVLPVALLLLLCVGTYGWV

SEQ ID NO: 51989 - protein, 61 aa, Zea Mays
MNHLLKAPFCIHPKTGRVCVPIDPSNCDDFDPAAVPTLSQLLGELNATGFQTDPENKVKAF

SEQ ID NO: 51990 - protein, 73 aa, Zea Mays
MRGAGAIVGYWSLPARCALPWSPPPRTGPRPPPPAVPPGLRSGLSCIWDCEMTRRAPRKNLWASSHFRAWQWH

SEQ ID NO: 51991 - protein, 157 aa, Zea Mays
MKNILMIPTISDVSTVEEWRVVAKDIVGRKGELGYRVTIVDWPGLGYSDRPSLNYNADVMESFLVELMNSPNSPVANADDELIIVGGGHAATIAVRAAGKDLIKPSAVAAVAPTWAGPLPIVFGRGSDMETRYIWCSILIGMKGIQNSVGCEAIKTI

SEQ ID NO: 51992 - protein, 255 aa, Zea Mays
MWITGILKRPKISGAQLFAILPLAIVHTMGNLFTNMSLGKVAVSFTHTIKAMEPFFSVLLSAIFLGELPTPWVVLSLLPIVGGVALASLTEASFNWAGFWSAMASNVTFQSRNVLSKKLMVKKEESLDNINLFSIITVMSFFLLAPVTLLTEGVKVSPAVLQSAGLNLKQIYTRSLIAACCFHAYQQVSYMILARVSPVTHSVGNCVKRVVVIVTSVLFFRTPVSPINSLGTGIALAGVFLYSQLKRLKPKPKAA

SEQ ID NO: 51993 - protein, 90 aa, Zea Mays
MRAGYWSMQSSQGLRAGRRTRRTARHTALLHLKPDPKASCQTRSPRRTRRPLGWSAAPAWRPWTGTGGGTARPRRRAAARRRAAPGAPAW

SEQ ID NO: 51994 - protein, 397 aa, Zea Mays
MAKLQAGYLFPEIARRRAAHLLKFPDAKIISLGIGDTTEPIPNVITNAMAERAHALSTIDGYSGYGAEQGEKKLRAAIAATYYADLGIEDSDIFVSDGAKCDISRLQVLFGSNVTIAVQDPSYPAYVDSSVIMGQTDLYQQDVQKYGNIEYMRCGPENGFFPDLSTVPRTDIIFFCSPNNPTGAAASRDQLTKLVKFAKDNGSIIVYDSAYAMYISDDSPKSIFEIPGAKEVAIETASFSKYAGFTGVRLGWTVVPKELLFSDGHPVAKDFNRIVCTCFNGASNIAQAGGLACLSPDGLKAMQDVVGFYKENTEIIVETFTSLGFNVYGAKNAPYVWVHFPGRNSWDVFAEILEKANVVTTPGTGFGPGGEGFVRVSAFGHRENIIEAARRLKQLYK

SEQ ID NO: 51995 - protein, 102 aa, Zea Mays
MIEEHDTSGGKSKGQGTGNVLIVTLVDAETESSINATMLEEGLARLERSKRWDTRERKTALQNLEQFQDKAKKERLRIWQYGDVESDEDEQAPPARKPGGRR

SEQ ID NO: 51996 - protein, 109 aa, Zea Mays
MDDADDIYMRSWTGTIIGPHNTVHEGRIYQLKLFCDKDYPEKPPSVRFHSRINMTCVNHETGMVDPRKFGLLANWQRDYTMENILTQLKKEMAASQNRKLVQPPEGTFF

SEQ ID NO: 51997 - protein, 123 aa, Zea Mays
MILNSTICSLPVRKDMYGDDEPSRQPERSNEAAGAYAQACIDVATELNHPVIDIWTKMQEFPDWQTSALSDGLHFTPVGNKILFEEVVKTLETSIGFSQERLPSDLPLFHEIDPKDPMKAFGA

SEQ ID NO: 51998 - protein, 116 aa, Zea Mays
MHSHANVQLMCGGTVVANATTSITGSFILTPVNATLGLFSSMLGGQCNVVVTTPLVACNASLAGATGTLTAPLQLLGSGTGIAGGGSSTIIATIAGQPFTIINEMIIFTTGLSSLA

SEQ ID NO: 51999 - protein, 172 aa, Zea Mays
MVIINPNNPCGSVYTREHLAKVAEVARKLGILVIADEVYGNLVFGDTPFVPMGVFGHIAPVLTIGSLSKRWIVPGWRLGWVAVCDPNKVLQETKIIASITNFLNVSTDPATFVQGALPHILKNTKEDFFKRIIGLLAETSEICFSGIKDIKCITCPHKPEGETKFVSFGEHP

SEQ ID NO: 52000 - protein, 150 aa, Zea Mays
MIPAFDVLGKKSFFLGEIGNGAKMKLVVNMVMGSMMNSLSEGLCLADKSGLSPQTLLDVLDLGAIANPMFKLKGPTMLQGSYSPAFPLKHQQKDMRLALALGDENAVAMPVSAAANEAFKKARSLGLGDQDFSAVYEVVKGAGGSGSGQP

SEQ ID NO: 52001 - protein, 106 aa, Zea Mays
MLLDRSNVAVMMRYVSSKDNLMILMNLLRDSSKNIQIEAFHVFKLFAANKNKPPEVVNILVTNRNKLLRFFAGFKIDKEDEQFEADKEHVIKDFFPLSMSEVVISH

SEQ ID NO: 52002 - protein, 108 aa, Zea Mays
MAGRLTAAGSRILGGGGARAAASALRHRAGMGLPVGRHIVPDKPLPVNDELVWDNGTPFPEPCIDRLAPHIGKYEALAWLCGGLGFFAALGMAAVVNDKASNIPYTPN

SEQ ID NO: 52003 - protein, 158 aa, Zea Mays
MQDFEAFQTAVESDKSYSATYTRSLSLVLDEFYNNLRSVGVSAISGSGVNTFFEAIEASAKEYMETYRADLDKRIAEKERLEEERRKENMEKLQKDMMKSKGQTVVLTTGLKEKNSVSDMMDGADEEEEEEALEDFGFSEDDEDEDEGEDEEVAHFGF

SEQ ID NO: 52004 - protein, 77 aa, Zea Mays
MKLTCSEEYAQMVQTWESSRTNHYLKHNFETRYSSEFPWDGPSQMIAIETQEYKGLQLSKGRRYCPRNVVLVQVEAY

SEQ ID NO: 52005 - protein, 95 aa, Zea Mays
MQIATSYCCHLMQFVLRFTVSHSLRSSICGVGVLSWLLTNQAELNKNQMEFSVLVSASNSMTCCTIYLGSSSRLCSCPRHPRPPASRRPGGPART

SEQ ID NO: 52006 - protein, 328 aa, Zea Mays
MSDLPTGLRQACEMGLVSSAQMVRYLSIFARPTNARSFSRALPGWLSRGLVGRTLADPSFPHKMSLEFIATIASSIWCEMNIRKERFKQEWDLVIVNALTAACCNLMVLGLLAPCRSYASTSRFDFQNAIEKLPNNIFEKSYPLREFDLAKRISAFFYKAAELSLVGFVAGSVQGGMSIVLSARKERRLSVTIPSISTNALGYGAFLGLYANLRYQLLCGVDQYMVKRFDVLGVAIFFSTAARLMNIQIGEASRRTWLGEEADPQYSDRLLRAYKRPVEVDADQSRWFISKDAIVSGLGLLGIKQGGPEATFSKSRRKRVIRKKVTSG

SEQ ID NO: 52007 - protein, 135 aa, Zea Mays
MSCPAMAQLLSNTLYYKRFFPYYAFNVLGGLDSEGKGCVFTYDAVGSYERTGYSAQGTGSTLIMPVLDNQLKSPSPLLLPVRDAVTPLSESEAIDLVKDVFASATERDIYTGDKLEIVVINKAGTMREYIDLRKD

SEQ ID NO: 52008 - protein, 143 aa, Zea Mays
MPRRSSGRSAPRPAPRAAPVRNPPQPARQAPPPAPVRDGGGSMFGGIGSTIAQGMAFGTGSAMAHRAVDAVLGPRTIQHETVASEAAAAAPAPPVMNADACSIHSKAFQDPRSFVLTWATVPLCMCGAVVLGFSTMSGLPYNP

SEQ ID NO: 52009 - protein, 211 aa, Zea Mays
MAASIAASPFFPGSPAPAAPKNGLGERPESLDVRGVAAKPGASSNAVRAGKTRAHAAVPKVNGGKSAVADVEHETVTVPSSVPRTFYNQLPDWSMLLAAITTIFLAAEKQWTMLDWKPRRPDMLTDTFGFGRIIHDGLMFKQNFSIRSYEIGADRTASIETMMNHLQETALNHVKTAGLLGDGFGSTPEMSKRNLFWVVSQMQAIVERYPC

SEQ ID NO: 52010 - protein, 578 aa, Zea Mays
MQFLVQYQMHVAEMETLRAGMPPVYVNHSNDGGPAVRDIHMENFSVTVGGRDLIQEATITLAFGRHYGLVGRNGTGKTSFLRAMALHAIDGIPKNCQILHVEQEVVGDDTTALQCVLNADVERVQLLQEEARLVQQQKDLEIEAEFGQSSDKGKDGFDKDSISKRLEEIYKRLELIDADAAEARAASILAGLSFTPEMQRKRTKQFSGGWRMRIALARALFIEPDLLLLDEPTNHLDLHAVLWLETYLLKWPKTFIVVSHAREFLNTVVTDILHLHGRKLHAYKGDYDTFERTREEHLKNQQKAFETNEKARQHMQTFIDKFRYNAKRASLVQSRIKALERMEHVDAVVSDPDYKFEFPTPDDRPGPPIISFSDASFGYPGGPTLFKNLNFGIDLDSRIAMVGPNGIGKSTILKLISGDLQPTSGTVFRSPKVRMAVFNQHHVDGLDLTVNPLLYMMKCYPGVPEQKLRAHLGSFGVSGSLALQSMYTLSGGQKSRVAFAKITFKKPHIILLDEPSNHLDLDAVEALIQGLLIFQGGVLMVSHDEHLITGSVDELWVVSEGRVTPFSGTFKDYKKMLK

SEQ ID NO: 52011 - protein, 192 aa, Zea Mays
MSSMSKGMIFVNGEGVGRYWVSYRTLAGTPSQAVYHIPRPFLKSKDNLLVIFEEEMGKPDGILVQTVTRDDICLFISEHNPGQIKTWDTDGDKIKLIAEDHSRRGTLTCPPEKTIQEVVFASFGNPDGMCGNFTVGTCHTPNAKQIVEKECLGKPSCMLPVDHTVYGADINCQSTTATLGVQVRCGGGKKGA

SEQ ID NO: 52012 - protein, 87 aa, Zea Mays
MFIWDGWGQHVCTIIWSCFWNGRGLMSCLQHEMSFRSTFMVHSFSIIWDAILVLIHYLDASLSVHCNNNTHLNTPINKIPFFFFPSH

SEQ ID NO: 52013 - protein, 172 aa, Zea Mays
MSNYLKSQWYILSKTLAEEAAWKFSRDNGLEIVTINPAMVIGPLLQPTLNTSAEAILKLINGSSSTYPNFCFGWVNVKDVALAHILAYEVPSSNGRYCMVERVVHYSELVNIIRNMYPTLPLPDKCADDKPFVPPYQVSKEKIKSIGIELIPLETSVKETIESLKEKGFASF

SEQ ID NO: 52014 - protein, 683 aa, Zea Mays
MAHIDAGKTTTTERILYYTGRNYKIGEVHEGTATMDWMEQEQERGITITSAATTAFWNKHRINIIDTPGHVDFTLEVERALRVLDGAICLFDSVAGVEPQSETVWRQADKYGVPRICFVNKMDRLGANFFRTRDMIVANLGAKPLVIQLPIGSEDNFQGVVDLVRMKAIVWTGEELGAKFEYKDIPADLQEMAQDYRVQMLETIIELDDEVMEKYLEGTEPDEETVKKLIRKGAISASFVPVLCGSAFKNKGVQPLLDAVVDYLPSPLDLPSMKGTDPEDPEIIFERQPSDDEPFSGLAFKIMTDPFVGSLTFVRIYSGKLIAGSYVLNANKDKKERIGRLLEMHANSKEDIPVAVTGDIVALAGLKDTITGETLCDPDKPVVLERMEFPDPVIKVAIEPKTKADADKMATGLIKLAQEDPSFHFSRDEETNQTVIEGMGELHLDIIVDRLKREFKVEANVGAPQVNYRESISKVAEIQYVHKKQSGGSGQFADIIVRFEPLEAGSGYEFKSEIKGGAVPKEYVPGVMKGLEESLPNGVLAGYPVVDFRAVLVDGSYHDVDSSVLAFQIAARGAFREGMRKAGPRLLEPIMKVEVITPEEHLGDVIGDLNSRRGQVNSFGDKPGGLKVVDSFVPLAEMFQYVSTLRGMTKGRASYTMQLAKFDVVPQHIQNQISVAKTEEAAA

SEQ ID NO: 52015 - protein, 371 aa, Zea Mays
MAIDYGLTVDKKGFNASMEEARQKARNARNKSGGNSIAMDANATAQLRKLGLASTDDSPKFLWPKEHESVVKAIYTGSEYITTATGDGDFGLVLESTSFYAEQGGQIFDTGSIEGSFGTFNVNNVQVFAGYVLHIGSFTKGSKVLSLGDSVICKVDYNRRTLIAPNHTCTHMLNFALREVLGDHVDQKGSIVLPEKLRFDFSHGKPVQPEDLRKIEFIVNQQIKDELGVYALEIKLEDAKRINGLRAVFGEIYPDPVRVVSVGRKVEDLLADPDSKEWLSISTELCGGTHITNTRDAKAFALLSEEGIAKGVRRITAVTAGCATQAMELASSIDSDINKASQLEGALLEKILCPPVVTCEFKVEGEPHTCH

SEQ ID NO: 52016 - protein, 260 aa, Zea Mays
MHVVKLGVNVDTSDLELKPQGRLSVTVVKATSLRNKEMIGKSDPYVKLYVRPMFKVKTKVIDDDLNPEWNETFDLIVEDKETQSVIFEVYDEDKLQQDKRLGVAKLAVNTLESEITQDATLKLLHSLDPIKNKDTKDRGTLHLKVKYHPFTKEEQLEALEMEKQAIEERKRLKEAGIIGSTMDAVGSGVGFVGTGIGAGLGFVGSGIGAGAGLVTSGIGAVSSGLGKAGKFMGRTVTGPFSMSRKNGSSSTAPQHDQPSA

SEQ ID NO: 52017 - protein, 213 aa, Zea Mays
MSVPASAQVPHTIRSAGSCCFRSSHQLSAQNLGRHRRWRGTGKKKILSTRGVLESRNGAHPGGLMKRRKVVEHIILLRAKPNISDAEEKDMLDYLYTSQYQMRGILAVSLGRIEDPNSDNFTHAVFMRFQQKQDIAEFQSNAYYSKVVDEHVKPVSYGSVSVDFESEVEDDIIPLFRRGEVWPWPKSIDTVLSFFFFFSFFGNRKKKKNVAGF

SEQ ID NO: 52018 - protein, 437 aa, Zea Mays
MVYPLLVSSVGIIACLITTLFATDFFEIKAVDEIEPALKKQLIISTIVMTIGIALISWLGLPYTFTIFNFGVQKTVQSWQLFLCVAVGLWAGLVIGFVTEYYTSNAYSPVQDVADSCRTGAATNVIFGLALGYKSVIIPIFAIAFSIFLSFSLAAMYGVAVAALGMLSTIATGLAIDAYGPISDNAGGIAEMAGMSHRIRERTDALDAAGNTTAAIGKGFAIGSAALVSLALFGAFVSRAAISTVDVLTPKVFIGLIVGAMLPYWFSAMTMKSVGSAALKMVEEVRRQFNNIPGLMEGTTKPDYATCVKISTDASIKEMIPPGALVMLTPLIVGILFGVETLSGVLAGALVSGVQIAISASNTGGAWDNAKKYIEVLTLTRRLSLVTPLEILSRTRLALPSTSSSSLWRLNPLSSPPSSPPMVAFSSNGSKPARDAG

SEQ ID NO: 52019 - protein, 162 aa, Zea Mays
MYLAAIADSQPPQTAPLSQYPSNLMMQPGPRYMPPQSGQMMNPQSLMAARSSMMYAHPSLSPLQQQQAAHGQLGMAPGGGGGGTTSGFSILHGEASMGGGGAGAGAGNNMMNAGMFSGFGRSGSGAKEGSTSLSVDVRGGTSSGAQSGDGEYLKVGTEEEGS

SEQ ID NO: 52020 - protein, 614 aa, Zea Mays
MMTTHYFQILKKHKDPLLVKVNKLTSTKTQLPYSYYSLPFCKPNTIVDSAENLGEVLRGDRIENSPYVFEMGEPKMCQIICKAKIDDKQAKELKEKIEDEYRVNMILDNLPLVVPIARQDRGATVYQAGYHVGVKGQYTGNNDEKSFIHNHLAFLVKYHKDETTDLSRIVGFEVKPFSINHQFEGPWNDKNTRLITCDPHASKLVVNSDTPQEVEAGKEIIFTYDVGFEESDIKWASRWDTYLLMIDDQIHWFSIVNSLMIVLFLSGMVAMIMLRTLYRDISRYNQLETEEEAQEETGWKLVHGDVFRPPANSDLLCVCVGTGVQFFGMLLVTMIFAVLGFLSPSNRGGLMTAMLLTWVLMGLFAGYASSRLYKMLKGSEWRSITLRTAFLFPGIAFGIFFILNALIWGEKSSGAVPFTTMFALVLLWFGISVPLVFVGSYLGFKQPAIEAPVKTNKIPRQVPEQAWYMNPAFTILIGGILPFGAVFIELFFILTSIWLHQFYYIFGFLFLVFIILIITCAEITIVLCYFQLCSEDYLWWWRSFLTSGSSAIYLFLYAGFYFFTKLQITKVVSGMLYFGYMLLASFAFCVLTGTIGFYACFCFTRLIYSSVKID

SEQ ID NO: 52021 - protein, 167 aa, Zea Mays
MAGTVTVPGSSKPSTPLLKDELDIVIPTIRNLDFLEMWRPFFQPYHLIIVQDGDPTKTIKVPEGFDYELYNRNDINRILGPKASCISFKDSACRCFGYMVSKKKLPRTHQARISMLLSSTSRTSSARPHRSSSTPCTTPTVRVLTLCVDTPSASGRVPTLLSPTACG

SEQ ID NO: 52022 - protein, 131 aa, Zea Mays
MLFFSYFKELVGKEVTVELKNDLAIRGTLHSVDQYLNIKLENTRVVDQDKYPHMCGTASSGARWCGTCCSRRTAWTSTSSTTPPGGRRAEADPDAHPLPHLLAAASSPIVRSMHVRCVVDRCPSLVLWCLP

SEQ ID NO: 52023 - protein, 411 aa, Zea Mays
MPGGVNSPVRAFKSVGGQPVVFDSVKGSRMWDVDGNEYIDYVGSWGPAIIGHADDKVNAALIETLKKGTSFGAPCLLENVLAEMVISAVPSIEMVRFVNSGTEACMGALRLVRAFTGREKIIKFEGCYHGHADSFLVKAGSGVATLGLPDSPGVPKGATYETLTAPYNDVEAVKKLFEDNAGEIAAVFLEPVVGNAGFIPPQPGFLNALRDLTRQDGALLVFDEVMTGFRLSYGGAQEYFGITPDVTTLGKIIGGGLPVGAYGGRRDIMEMVAPAGPMYQAGTLSGNPLAMTAGIHTLKRLTEPGTYEYLDKITGELVRGILDVGAKAGHEMCGGHIRGMFGFFFTGGPVHNFGDAKKSDTEKFGRFYRGMLEEGVYFAPSQFEAGFTSLAHTSQDIEKTVEAAEKVLKRI

SEQ ID NO: 52024 - protein, 293 aa, Zea Mays
MSGYVNQKKFSGDTPYSLMFGPDICGTQTKKLHLILSYQGQNYPIKKDLECETDKLTHVYTFILRPDASYSLLVDNRERESGSMYTDWDILPPRKIKDVHAKRPKDWDDREYIEDPDEVKPEGYDSIPKQIPDPKDKKPDTWDEDEDGIWKPRMVSNPAYKGPWKRKRIKNPNYKGKWKTPWIDNPEFEDDPDLYVLKPLKYIGIEVWQVKAGSVFDNILICDDPEYARKVVEETWGANREAEKEAFEEAEKERKAREDREGQKAKDDGGRHRIHRRHKKHYRDHWDDYHDEL

SEQ ID NO: 52025 - protein, 62 aa, Zea Mays
MDEVLTIKNTEIAKHLSLPPVKLHCSMLAEDAIKAAVKDYEAKKAKMGQKSEDSPSEKAAEA

SEQ ID NO: 52026 - protein, 108 aa, Zea Mays
MMFYGPGAAYALFAGKDASRALAKMSFESQDLNGDISGLTPMELGALNDWEYKFATKYAKVGTIRRAAPVEVVYGNISPEMREEVSEPVVEPELEPEPEPEPHDDDAP

SEQ ID NO: 52027 - protein, 91 aa, Zea Mays
MSAGLVLCASTEDHAAVEPLIPPEGAKIGERISFAGFDGKPEDVLNPKKKQLDKITPHLRTDENGIAMFKGVPFTTSAGPCRSSIHNGNVK

SEQ ID NO: 52028 - protein, 76 aa, Zea Mays
MQAASGTKGGSSGSPVVDCQGRAVALNAGSKSSSASAFFLPLERVVRALDLIRDSWDAFGTKTESVYIPRGTLQDK

SEQ ID NO: 52029 - protein, 130 aa, Zea Mays
MDTAASCRLLSPASSSPPPCPKQLPKRRPTFAASQQQSPSSSAKFRLLCLLHDKSASPTTSVQMQSSQSQLQRLATVLQCGAVWAAVEAPAALAVTGEEDIDLLGILPPLAVFAFFYFLVAPCACVCVCA

SEQ ID NO: 52030 - protein, 110 aa, Zea Mays
MSRPPNRSDAHLSAEDEAALEAEVREYYDDAAPKRHTKPSRSEHSAVYVDALVPDVGGNSHPELDKFQELEAHTERLVYEGANVGDEFVETEYYKDLGGVGEQHHTCVLI

SEQ ID NO: 52031 - protein, 178 aa, Zea Mays
MQVVAMNLPMEEIGKFKEMFHTMDKNKDGSLSLEELKEGFRINDHPVPEEEIKMLLQAGDIHGTDTLDCEEFVTVLLHIKKMSNDEYLPKAFEFFDKDGNGFIEMSELMETLSDGELKPDEQLVNDIIQEVDKDKDGRISYPEFELMMKSGSDWRNASRRYSTENFSSLSQKLCKDTL

SEQ ID NO: 52032 - protein, 361 aa, Zea Mays
MYLSDEEVQKLVGKMVKWLKVGGHIFFRESCFHQSGDSKRKVNPTHYREPRFYTKVFKEGHSFDQDGGSFELSLVTCKCIGAYVKNKKNQNQICWLWEKVKSTEDRDFQRFLDNVQYKTSGILRYERVFGEGFVSTGGIETTKEFVGMLDLKPGQKVLDVGCGIGGGDFYMAANYDVHVLGIDLSVNMVSFAIERAIGRKCSVEFEVADCTTKDYPENSFDVIYSRDTILHIQDKPALFRSFFKWLKPGGKVLISDYCKNPGKPSEEFAAYIKQRGYDLHDVKAYGQMLKDAGFHNVIAEDRTEQFLNVLQREIGEVEKNKDAFLADFTQEDYDDIVNGWNAKLKRSSAGEQRWGLFIATK

SEQ ID NO: 52033 - protein, 57 aa, Zea Mays
MKHLAFVKRISDFHLLLKLATFLDVKADMPTIAACVKTQSRVPEGYQLLIESFASQG

SEQ ID NO: 52034 - protein, 655 aa, Zea Mays
MDARCTRGIVPDLFICLYIYRWFEVIGRTTQAKMASVHKATTLVLMFCLLALGRAEYLKYKDPKQPVAVRIKDLLGRMTLAEKIGQMTQIERENATADALAKYFIGSVLSGGGSVPAPQASAQAWAAMVTEMQKGALSTRLGIPIIYGIDAVHGHNNVYKATIFPHNVGLGATRDPDLVKRIGEATALEVRATGIPYAFAPCIAVCRDPRWGRCYESYSEDPKVVQSLTSLISGLQGDAPADSAGRPYVGGSKKVAACAKHYVGDGGTHNGINENNTIIDTHGLLSIHMPPYYNSIIRGVSTVMVSYSSWNGVKMHANHFLVTDFLKNKLKFRGFVISDWEGIDRITTPPHANYSYSIEAGVGAGIDMIMVPFRYTEFIDDLTTQVQNKVIPMSRIDDAVYRILRVKFTMGLFENPYPDSSLAGELGKQEHRELAREAVRKSLVLLKNGKSSYAPLLPLPKKAGKILVAGSHANDLGNQCGGWTITWQGSSGNTTAGTTILSGIEATVDPSTQVVYSESPDSGVLADKYDYAIVVVGEPPYAETFGDNLNLTIPAPGPSVIQSVCGAAKCVVVLISGRPLVVEPYLGDMDALVAAWLPGSEGQGVADVLFGDYGFTGKLPRTWFKSVDQLPMNVGDAHYDPLFPFGFGLTTKGTK

SEQ ID NO: 52035 - protein, 379 aa, Zea Mays
MVNVSPSLLLELLQRIARVTKDYLGVLNEDSLRKNFILVYELLDEVIDFGYPQTTSTEVLKSYIFNEPIMVDAGRLPPLGPAAMFMQGTKRMPGTAVTKSVVATEPGGKKREEIFVDIIERISVTFSSSGYILTSEIDGTIQMKSYLTGNPEIRLALNEDLSIGRTGSSSYDYRSSSGGGTVILDDCNFHESVHLDSFDIDRTLTLIPPDGEFPVMNYRMTQEFKPPFRVTALIEEAGPARAEVLLKIRADFSASATANTIVVQMPVPAYTMRASFELEAGAVGQTTDFKEGSRRLEWNLKKIVGGSEHTLRAKLTFSQESHGNITKEAGPVNMNFTIPMYNASKLQVRYLQIAKKSKAYNPYRWVRYVTQANSYVARL

SEQ ID NO: 52036 - protein, 157 aa, Zea Mays
MSGTPRGQNPFSSREGFTVNLRTFAMDHEQYSKKRAFVHVLLKRKKTFVTVTDSSGNKKTGASAGCLEDRKGRSRLSRYASEAVAEQVGRSARKMGLSSIVMKVKGASFFKKKKKVILSFREGFRGERVRDQSPIMYIHDVTQLPHNGCRLPKQRRV

SEQ ID NO: 52037 - protein, 126 aa, Zea Mays
MLLLAHAEDEGKNMKQGGMTELKDEKWGGGYNGGYGYGGGYGGGYGKPGYGGGYGGGYRPKYGRGYRSGYGYGGGYGGGYGGGYGGGYGGGGGYGEGGGFGGGHGGGRYPGGGGHHGGGGHHGGWN

SEQ ID NO: 52038 - protein, 545 aa, Zea Mays
MRFAPTALIVGLLYFTGKRMQSGFNIGGGAGKGRGGIFNIGKATVMKMDKNSKNKVFFKDVAGCDEAKQEIMEFVHFLKNPKKYEDLGAKIPKGALLVGPPGTGKTLLAKATAGESGVPFLSISGSDFMEMFVGVGPSRVRNLFQEARQCAPSIVFIDEIDAIGRARGRGGFSGSNDERESTLNQLLVEMDGFGTTSGVVVLAGTNRPDILDKALLRPGRFDRQIAIDKPDIKGRDQIFRIYLKKLKLDNKPSFYSQRLAALTPGFAGADIANVCNEAALIAARSEETQITMQHFESAIDRIIGGLEKKNRVISKLERRTVAYHESGHAVAGWFLEHAEPLLKVTIVPRGTAALGFAQYVPNENLLMTKEQLFDMTCMTLGGRAAEEVLIGKISTGAQNDLEKVTKMTYAQVAVYGFSEKVGLLSFPQKDGGFEMSKPYSNQTASIIDDEVREWVGKAYKKTVELITEHKEQVAQIAELLLEKEVLHQDDLTRVLGERPFKALEPTNYDLFKKGFEDGGDNSQAPAENAELPDDSSPPVGDVVPT

SEQ ID NO: 52039 - protein, 180 aa, Zea Mays
MSVFKHADPTSPPPVTYLHFYGSSEFSFGIFCLPKSAIIPLHNHPGMTVFSKILFGSMHLKSYDWAKSLPAGSNDNALENSDGAGARLAKVNTDAVFDASSETVVLYPENGGNLHCFTALTPCAVLDVMGPPYNRAQGRDCAYYSESPYSCAGDAQYSWLKEVHSTFEMEGIKMEPNFIV

SEQ ID NO: 52040 - protein, 139 aa, Zea Mays
MPESDEERNLKEEINLLKVDLKEIEGKMSNGSEQTSVDAKDLSEKISMLESQLEQLSRELDDKIRFGQRPRSGAGRVTTLAPTSLGEEPQATVVDRPRSRGGMEPPPRQEERWGFQGSRERGSFGGSRNSDRPMARQRW

SEQ ID NO: 52041 - protein, 381 aa, Zea Mays
MMALAVDVSRFEGVPMAPPDPILGVSEAFKADKSELKLNLGVGAYRTEELQPYVLNVVKKAENLMLEKGENKEVATLQSLSGTGSLRLAAAFIQRYFPEAKVLISSPTWGNHKNIFNDARVPWSEYRYYDPKTVGLDFEGMIADIEAAPEGSFVLLHGCAHNPTGIDPTPEQWEKIADVIQEKKHMPFFDVAYQGFASGSLDEDAFSVRLFVKRGMEVFVAQSYSKNLGLYSERVGAINVVCSAPEVADRVKSQLKRLARPMYSNPPIHGAKIVANVVGDPTMFGEWKQEMELMAGRIKNVRQKLYDSLSAKDKSGKDWSFILRQIGMFSYTGLNKAQSDNMTDKWHIYMTKDGRISLAGLSLAKCDYLADAIIDSFHNVN

SEQ ID NO: 52042 - protein, 155 aa, Zea Mays
MENSFLRPLGHLELDLPDAPEKAPRPPAQAVDPFSKFGPKAEISHIFRAPEKRPPKELSLAFTGLTLLPFIGFLIGLVRLGVNLKNFPSLPGPAAFASLFHAGIGAVLMLYVLFWIKLDLFTTLKYLGFLGIFLVFVGHRALSYLSSVSTKQKTA

SEQ ID NO: 52043 - protein, 73 aa, Zea Mays
MTKRMPSYLGYALIEYEKFEEAQAAIKELDGAELYKQRMSVDWAFSSGPAKRRNTRKRSPPRARSRTPPRRRH

SEQ ID NO: 52044 - protein, 253 aa, Zea Mays
MTEVQKLPDNIPNKASTLINVVIRNVTILAPHDSPNTDGIDPDSSSNICIEDCYISTGDDSIAIKSGWDEYGIAYGRASSGITVRRITGSSPFAGFAVGSETSGGVENVLAEHLNFFNSGFGIHVKTNTGRGGFIRNITVSDVTLDNVRYGLRIVGDVGNHPDDSYNRSALPIVDALTVKNVQGQNVREAGLIKGIPNSAFSRICLSNVKFTGGAPVRPWKCEAVSGGALDVQPSPCTELTSTSGTSFCTNSL

SEQ ID NO: 52045 - protein, 350 aa, Zea Mays
MQVELDRRRPGQSRITTPRKETDTCKILSGTHDGMTTGTPIHVFVPNTDQRGGDYSEMSKAYRPSHADATYDFKYGVRAVQGGGRSSARETIGRVAAGALAKKILKLKSGVEILAFVSKVHQVVLPEDAVDYETVTLEHIESNIVRCPDPEYAEKMIAAIDTVRVRGDSIGGVVTCIARNVPRGLGSPVFDKLEAELAKAMLSLPASKGFEIGSGFAGTDFTGSEHNDEFYMDEAGNVRTRTNRSGGVQGGISNGEIIYFKVAFKPTATIGKKQNTVSREHEDVELLARGRHDPCVVPRAVPMVESMAALVLMDQLMAHIAQCEMFPLNLALQEPIGSASSASELSPNLS

SEQ ID NO: 52046 - protein, 428 aa, Zea Mays
MSEHDLTALMAAQLDRHLVFPLLEFLQERQLYSESEILEAKIRLLSGTNMVDYAMDIHKSLYGTDDVPEDMVKRRAEVVSRLRSLEEAAAPLVAFLQNPQLVQEFRPDKQYNIHMLQERYQIGPDQIEALYQYAKFQFECGNYSGAADYLYQYRALCTNSERNVSALWGKLAAEILMQNWDVALEELNRLKEIIDSKLQNRIWLMHWALFIFFNHENGRNGIIDLFFQDRYLNAIQTNAHHLIRYLATAVVVNKRRRNMLKELIKVIQQEHHSYKDPVTEFLECLYVNYDFDGAQQKLIECEQVILNDPFLGKRIEEGNFVSVPLRDEFLENARLFIFETYCRIHRCIDISMLAQKLNMSYDEAELWIMNLVRSSKLDARIDSVSGTLIMTTNHVNVHEQIVESLKGLNMRTYMLAKNIVEPAQQATR

SEQ ID NO: 52047 - protein, 98 aa, Zea Mays
MEQTWSSSLWPCRLLLKLSILYTRLPLENISRRQPCVASMPSVRRFYASCVTIYRGRTSCTRKKRSTLQSICGALFLTPNAAASALAMGRGAQVMEWN

SEQ ID NO: 52048 - protein, 221 aa, Zea Mays
MEHKNKTHKGRNTTIQGLGVPRTTLLCSLSCSLLCLYLSNIFINLSLLKFPETILLCHHCNLDVLPTTFNNLSKCTNSKLDGLLAGGLLVVLLQKLTHRVGVPSRGVRLPSREGTRRIGLVQRWLVGVGVEADNECGEAERADSTTLCILLLQPSDVAGDVLDGDGVLDGESVALALDPRAVDEHACVRLQPRACQSDVAVGGEDGDRAVVAGHRAGVAGG

SEQ ID NO: 52049 - protein, 216 aa, Zea Mays
MLEQFKAEALRMQALSMQAYDVYSERTREVLLEASEKLKIQADKAQKDLSVVATEIGQEGQEYLMMAARNSPDSIKDITTTFRALGKLNWPSEYEDYHVGIPFGTFLTVGGFLNFMLAGSTSALRFGIILGLALLALGISSLRSQRDGGRRPRLLVKGQAAIASVIFFREFSVLLQNGWFPKIFMVLLSGVVAGFYFYRIAAGSPKELSSNSDSVN

SEQ ID NO: 52050 - protein, 521 aa, Zea Mays
MVDVRLPMLVYVSREKRPGHNHQKKAGAMNALTRCSAVLSNSPFILNLDCDHYINNSQALRAGICFMLGRDSDTVAFVQFPQRFEGVDPTDLYANHNRIFFDGTLRALDGMQGPIYVGTGCLFRRITLYGFLPMPKKSYGKSDAFADTIPMASHPSPFAAASAASVVADEATIAEAVAVCAAAYEKKTGWGSDIGWVYGTVTEDVVTGYRMHIKGWRSRYCSIYPHAFIGTAPINLTERLFQVLRWSTGSLEIFFSRNNPLFGSTFLHPLQRVAYINITTYPFTAIFLIFYTTVPALSFVTGHFIVQRPTTMFYVYLAIVLGTLLILAVLEVKWAGVTVFEWFRNGQFWMTASCSAYLAAVCQVLVKVVFRRDISFKLTSKQPAGDEKKDPYADLYVVRWTWLMVTPIIIILVNIIGSAVAFAKVLDGEWTHWLKVAGGVFFNFWVLFHLYPFAKGILGRHGKTPVVVLVWWAFTFVITAVLYINIPHIHGPGGKHGGAIGRHGGDAHHHGKKFDGYYLWP

SEQ ID NO: 52051 - protein, 170 aa, Zea Mays
MATAARALVAARPARPLLPSRRLPSSSSIRPARQRAGVGCVRCMARRPDSTYSPLRSGQGGDRAPTEMAPLFPGCDYEHWLIVMDKPGGEGATKQQMIDCYIQTLAQVVGSEEEAKKRIYNVSCERYFGFGCEIDEETSNKLEGLPGVLFVLPDSYVDAENKDYGVIFLR

SEQ ID NO: 52052 - protein, 74 aa, Zea Mays
MHEAGYELGNLDATLILQKPKISPFKETIRLNLCNLLGADPSVVNLKAKTHEKVDSLGENRSIAAHTVVLLMRK

SEQ ID NO: 52053 - protein, 332 aa, Zea Mays
MPPHKIEIFKSLDDWARDNILTHLKPVEKCWQPQDFLPDPASEGFHDEVKELRERAKEIPDDYFVCLVGDMITEEALPTYQTMLNTLDGVRDETGASPTAWAVWTRAWTAEENRHGDLLNKYMYLTGRVDMRQIEKTIQYLIGSGMDPRTENNPYLGFIYTSFQERATFISHGNTARHAKDFGDLKLAQICGIIASDEKRHETAYTKIVEKLFEIDPDGTVVALADMMRKKISMPAHLMFDGQDDKLFEHFSMVAQRLGVYTARDYADILEFLVDRWKVVNLTGLSGEGNKAQDYLCTLASRIRRLEERAQSRAKKAGTLPFSWVYGRDVQL

SEQ ID NO: 52054 - protein, 463 aa, Zea Mays
MGKEKSHINIVVIGHVDSGKSTTTGHLIYKLGGIDKRVIERFEKEAAEMNKRSFKYAWVLDKLKAERERGITIDIALWKFETTKYYCTVIDAPGHRDFIKNYCTVIDAPGHRDFIKNMITGTSQADCAVLIIDSTTGGFEAGISKDGQTREHALLAFTLGVKQMICCCNKMDATTPKYSKARYDEIVKEVSSYLKKVGYNPDKIAFVPISGFEGDNMIERSTNLDWYKGPTLLEALDQITEPKRPSDKPLRLPLQDVYKIGGIGTVPVGRVETGVIKPGMVVTFGPTGLTTEVKSVEMHHEALQEALPGDNVGFNVKNVAVKDLKRGFVASNSKDDPAKEAASFTSQVIIMNHPGQIGNGYAPVLDCHTSHIAVKFAELITKIDRRSGKELEKEPKFLKNGDAGMVKMIPTKPMVVETFSAYPPLGRFAVRDMRQTVAVGVIKSVEKKDPTGAKVTKAAAKKK

SEQ ID NO: 52055 - protein, 175 aa, Zea Mays
MAFRLSNNLIGVLNFVTFLLSVPILGAGIWLGHRADGTECERYLSAPVIALGAFLLAVSLAGLVGACCRVTWLLWAYLLAMFVLILVLFCFTVFAFVVTNRGAGEAVSGRGYKEYRLGDYSNWLQKRVENTRNWDRIRSCLQDSKVCKSLQDKNETVAQFMSSSLSPIEWLRIVM

SEQ ID NO: 52056 - protein, 84 aa, Zea Mays
MLHISALHTLRRAIVLRQSLSFIVIKGTECTISRLRPKTSPLSMYSFHIVLWLIEIGTVWFWVAKMLTIFACGQYFNRLYQCLF

SEQ ID NO: 52057 - protein, 134 aa, Zea Mays
MAARCPYFAVEESSRGIRSGESPAAALRRILATPGAHQAPCCYDALGARLVERAGFPIGFMGGFCVSAARLGLPDVGLISYGEMVDQGRLINEAVSIPVIGDGDNGYGNSMNIKRTIKGYINAGFAGIMLEDQV

SEQ ID NO: 52058 - protein, 96 aa, Zea Mays
MRYGLVALCLLQPPNSTRLATQRQSTRSTVPASAERILSSKGCTDSERFPVADVVDDIHSKLKWGEVTVVVETGLSRGILIVGKHSRTSCTKEKRK

SEQ ID NO: 52059 - protein, 656 aa, Zea Mays
MAAQGQAAAGSASESGGSPAASAAAAAAAAFPATSLYVGDLHESVQDAQLFDVFSQVGGVVSVRVCRDINSRKSLGYAYVNYNNTSDAARALELLNFTPINGKPIRIMYSNRDPSSRKSGAGNIFIKNLDKSIDNKALYDTFCAFGNILSCKIATDPSGESRGYGFVQFEMDESAQSAIDKLNGMLINDKKVYVGPFVRKQDRENVSNNIKFSNVYVKNLSDTVTDDELKEMFGKYGTITSAVVMRDSDGNSRCFGFVNFENADAAAQAVQELNGKIFNDKELYVGRAQKKSEREMELKEKFEKNIQEVAEKFQNTNLYLKNLDDNIDDEKLREIFAEYGNITSCKVMRDSYGVSRGSGFVSFKSAEDANRALTEMNGKMVGSKPLYVALAQRKDDRKAKLQAQFSQMRPVAMAPSVGPRMPMFPPSVPGVGQQLFYGQPPPAFINPQAGFAFQQPMMPGMRPGGPMPNFMMPMVQQGQQPQRPAGRRAGSGGMQQPMPMGSQQQIFPRGGRGYRYATGRGMPDPGMHNVGAVMPSPYEMGGMAMRDAGVSQPVPIGALATALANASPDQQRLMLGENLYPLVEQLEREQAAKVTGMLLEMDQTEVLHLLESPDALKAKVAEAMEVLRSAQHLQQSNASTEQQLANLSLNDGVLSS

SEQ ID NO: 52060 - protein, 142 aa, Zea Mays
MSDDVSFLSKLVRDSMELQAQEALKDIGDQEVDIMKPLQVRVSDLVESNGNSSRMVAPEQSLSLSSRPDIKAIKPPVANGIPDMKVENDKTGYDFDRVDSENGVTYCLLESDDQSDEASSTSKEMIDQSADTRVNVNDKKIL

SEQ ID NO: 52061 - protein, 110 aa, Zea Mays
MMASWRMLSSQLRLWGSVSGTVWMVPRSSRSSWTQRRGTTQNTSWTPTLRSTAGCVGKMWSLSTLWPKMHKYDARISPFYFVESGCFFGVSTRLLRMYFKNHSFDAKVVA

SEQ ID NO: 52062 - protein, 177 aa, Zea Mays
MTLNMPGKGYTSRVRCREQQRRTTIVSMLGRKSTARATVVPDPDYRLPIAILGIASAFAYADNLLAAAPVGLLGLLLLFQTTRVRFVFDNEALEVKVGEQLQESGENVFVGGKNRWKYSTFVNWELWWPQFPVLVYFKETQTKPEGQIHFFPVIFDGRQLYDVMVERAGPSKTSGPK

SEQ ID NO: 52063 - protein, 128 aa, Zea Mays
MYRINDDLEYSVEIYEWSGTSWKPYVADDVQLQFFMMSPYVLKTMSTDNKGLYSTTFKVPDVYGVFQFKVEYQRLGYTGLSFTKQIPVRPYRHNEYERFITSAYPYYTASFSTMGAFFVFSFVYLYHK

SEQ ID NO: 52064 - protein, 195 aa, Zea Mays
MIAYRKLVSMKSDGSEDNIESDIERSLKQLQQVNSQMQTWVSSGGSEVLSHTLTRHMEILQDLTQEFYRLRSSLRAKQQHTSLLDLRDFDRAKFDVEEPSDSADQVLLREQAAIGRSTGQMDNVISQAQATLGSLMTQRSTFGGITTKISNVSSQLPTINHVLSSIRRKKSMDTIILSLVASVCTFLIFIYWLSK

SEQ ID NO: 52065 - protein, 273 aa, Zea Mays
MRHFAFCGTFSRHLITVNGVVFLSFPRIRNSVDTWVYPTLFRMNTATGAPPDYFDKNGQNWGFPTYNWEEMSKDNYGWWRARLTQMAKYFTAYRIDHILGFFRIWELPDHAATGLVGKFRPSIPLSQEELLSEGLWDFNRMSQPYIRQEILEEKFGSFWTVIAANFLNEYQKQCYEFKEDCNTEKKIIVKIKTSAEKSLWVEKEDNIRRGLFDLLQNIVLIRDPEDSTKFYPRSTWKTHQVLGTLMNTAKISSEDCIITIILFAKKISGAKMP

SEQ ID NO: 52066 - protein, 143 aa, Zea Mays
MLVKGVKQGRWTDKFISRIQFKDDIVISSPDVSLVELGPDVEFVLLATDGLWDYIKSSEAVAFVRDQLRQHGDVQLACEALGQKALDQRSQDNISIVIADLGRTNWKALPDERPNLFLELSQAVATVGVVSIGIWVSSFLGLQ

SEQ ID NO: 52067 - protein, 92 aa, Zea Mays
MQAAGVALVLIGPGSVEQAKAFCEQTKFKGEVYADPTHSSYDALEFAFGLFSTFTPAAGLKIIQLYREGYRQDWELSFEKNTRTKGGWSRYR

SEQ ID NO: 52068 - protein, 292 aa, Zea Mays
MRHGVKRFLVRKSGSWKGITKRFSVLYNGKWLKNMESTSPSAASSSSTQLSPRSGSAEKFCCLSREDVLRFLIGCLGALAPIPLTQISSLGAINPQYSYVEASAPAMEAIQKIPQDPCAVAVVETMPDGTRSILGDISTYKLWKCDYVSAAWALANLSAGQFVIGADENGSTPISVFPEPPISPSSPVEEISPGRSPRAKKFSSRSIGFLNNTQMSAWRTRSMYHRGRSTPLMCKTTSTLAAVMAQMLSHRATHVWVTDAESEEDGVVVGVVGYTEIFNAATRSTCPSPTAS

SEQ ID NO: 52069 - protein, 299 aa, Zea Mays
MGMNNKEKKKGMNRARPRSMAMAVGVAMAALPRRARARAGGPGLERRRRHAAGSPELLVPAEVEAPGAHHALLLGREPALEEAFERRLLLGAEEEGVAGHEVHGRDVEADGLHHVPRQLPEGEPHEPGRLDHQVRQPAPQLPPHPRRRRAVDLRLLRLHGPQLLLPRGVDLRGGGGGGVPHGDRVLDCLHDHVGPEEDGLSEHDDGSGLVERARDGGARVRAGGVAAEAVEVDPRECDADPEVPDPVGQGHEAVGRHGGAERRLLLQEPPEPERRRRRRRRRREALRHGLSSARPPLLL

SEQ ID NO: 52070 - protein, 57 aa, Zea Mays
MEWRKCLVWVSSTSSRRRGWKTSRASSSLPSTRVSSLPTGTRHLARLLTIDAPCIFV

SEQ ID NO: 52071 - protein, 76 aa, Zea Mays
MSNGDVYERTHDELDFEFLGNVRGKEWRVQTNVYGNGSTAAGREERYGLWFDPTEDFHRYAIHWTRDRIILSDDEY

SEQ ID NO: 52072 - protein, 106 aa, Zea Mays
MTQEERLTRYKNFKEGHKRILVATDLVGRGIDIERVNIVINYDMPDSADTYLHRVGRAGRFGTKGLAITFVSSASDSDVLNQVQERFEVDIKELPEQIDTSTYMPS

SEQ ID NO: 52073 - protein, 187 aa, Zea Mays
MASLLRPLVLVLLIASCAAQQSPPAQPPPTPNAPPANSPPQAPPAGNPPPAPTATPPPAPTTPPPAPTTPPPAPTTPPPAPTTPPPAPTTPPPSPPASPPPAPTTPPPSPPASPPPAPATPPPSPPMATPAASPKSPKTPSPAAATSPAPSLSPAGTPTNEDSGASARAVGFATVVALAGAGLAVLL

SEQ ID NO: 52074 - protein, 119 aa, Zea Mays
MRLAELLEEEGADIIQTEGGKCSSPTKPGVLGLIEKATPTLAAAYSISRAVSIPVMCSSGLSSVTAPMAVTAGAAGVGVGSAINKLNDVVAMIAEVRSIAQAMELAPRIVSETLRTISY

SEQ ID NO: 52075 - protein, 204 aa, Zea Mays
MSAITLYCIFSLQDVAYAETFSLWAVSDRSFGGLSFTTTDVGNVLAMSGLFLFLYQMLIYPFLAKTVDHITLVRAVALLTLPVLASYPFFPSLSGFGLMVVVNCASFLKNTFSVTTITVFNILMNEAVTQDVRAAANGIAVTLMSISKAVAPAVAGIIFSWAQRRQTAAFLPGDHLVFFILNIFTFIGFVFTFRPFFVRGSAKH

SEQ ID NO: 52076 - protein, 295 aa, Zea Mays
MPLLSGLIFTHTEHPDLINDMLNVLALRLDHTRVVDIMRKAGQLHLVKPYMVAVQSNNVSAVNEALNELYVEEEDYERLRESVDMHDNFDQIGLAQKLEKHELLEMRRIAAYIYKKAGRWKQSIALSKKDNMYKDCMETCSQSGDRELSEDLLVYFIEQGKKECFASCLFICYDLIRPDVALELAWMNNMVDFAFPYLLQFIREYTSKVDDLVKDKIESQNEERAKEKEEKDLVAQQNMYAQLLPLALPAPPMPGMGGPPPPMGGMGMPPMGGMGMPPMGPGPMPAFGMPPMGSY

SEQ ID NO: 52077 - protein, 358 aa, Zea Mays
MFAPSSLSAQEEKRMQTYSPQIIEFLNYKTNVGSYKENRNEDSKARPPQEVPLNDSVPDEHLKKIKLEDVSCPLCMEMLYQPAVLNCGHVYCVSCLSSLNEETLKCHVCGSLHPGDFPNVCLDLDHFLEEYFPAEYELRGQKVQFKKDQCNRETSSSGTSGRKGSTRALHAEDPSNIHIGVGCDSCGVYPIRGKRYKCQDCTELIGFDLCEACYNSSSKLPGRFNQRHTPNHRMEVDNSALVHRILRHHGIPEEGPEGLMMEVVGPDAMVQILIDNQGMEEGNDEGPGEAAIEEPVGSLGSMSRLSHLFMYNPEMEDGNDEDSGEEAAIEEPVGSLGAMAPLFMYDQEMEDNEEDQAH

SEQ ID NO: 52078 - protein, 76 aa, Zea Mays
MQRVNAPAGQMQLKGLIEAYVDKTGSEKGIAILREWEAYLPLFWQLVPPSEEDSPEACAEFERVLAKQATTQLSAK

SEQ ID NO: 52079 - protein, 399 aa, Zea Mays
MKPEKVPAAITTFPSSAQIVPEPLGVVLIISAWNYPFILSIDPVIGAIAAGNAVVLKPSEIAPATSSLLAKLLPEYVDNSCIKVVEGSVPETTALLEQRWDKIFYTGNGTVGRIVMAAAAKHLTPVALELGGKSPVIVDSNVDLHVAAKRIVVGKWGCNNGQACIAPDYIITTKSFAPELVASFKRVLERFYGEDPLESADLSRIVNSKQFKRLTNLIEEKRVADKIVYGGKADEKQLKISPTLLLDVPEDSEIMTGEIFGPLLPIVTVEKIEESFDLINAKPKPLAAYLFTKNRKLQEEFVASVPAGGMLVNDTALHLTNPYMPFGGVGDSGMGCYHGKFGFDCFSHKKGVLIRGFGGEANARYPPYTTEKQKILRGLINGSFIALILALLGFPREKR

SEQ ID NO: 52080 - protein, 558 aa, Zea Mays
MLFLFLPVARGSVLLRLIDIPFEHATRYHVWLGHLTMALFTLHGLFYVISWSMQGRLREELRQWKEIGVANLPGVISLAAGLLMWVTSLHPVRKRFFELFFYTHQLYVVFVVFLAFHVGDFIFSICAGAVFLFMLDRFLRFWQSRAKVDIISAACRPCGTVELVFSKPASLHYNALSFIFIQVRELSFLQWHPFSVSSSPMDGRYHMSVLIKVLGTWTEKLRSIITDVQEKNGGDSELQCGRMTACVEGPYGHESPYHLMYENLVLVAGGIGISPFLAILSDIIHRIEEGKQCMPKNVLVLWSVKKSKELSLLSAVDAQTISSSVSDRLQLDIQAFVTQEPHPPLEDGIVGDDQKVPGMFVKNGTAMSGLVGTGDNFWAAMYFLASTLGFLLAYALVQVYYVKPHNVVAWWYLGLLFMLCMVAGVALPGGLVVLLWHLSEKQRLEDDKWDASQSPRAEQTGPLAAAGGGDDDAAPSVSLAALRTTRYGCRPNFEAEFAAFAERAGDAADVGVLVCGPQGLQTSVARECRARNLRRGGLGAAKSRSGAVFHFNSHSFDL

SEQ ID NO: 52081 - protein, 74 aa, Zea Mays
MIDPIVGKLSKEYEGKLKCYKLNTDENPDIATQFGIRSIPTMMIFKNGEKKDAVIGAVPESTLVTCIDKYVGGR

SEQ ID NO: 52082 - protein, 165 aa, Zea Mays
MELSLVGLQNAGKTSLVNAVATGGYSEDMIPTVGFNMRKVTKGNVTIKLWDLGGQRRFRTMWERYCRGVSAILYVVDAADRDSVPIAKSELHDLLTKQSLAGIPLLVLGNKIDKSEALSKQALVDQLGLELIKDREVCCYMISCKDSVNIDVVIDWLIKHSRTAK

SEQ ID NO: 52083 - protein, 768 aa, Zea Mays
MVKFTAEELRAIMDKKNNIRNMSVIAHVDHGKSTLTDSLVAAAGIIAQEVAGDVRMTDTRADEAERGITIKSTGISLYYEMTDESLKNYKGVCVQTETVLRQALGERIRPVLTVNKMDRCFLELQVEGEEAYQTFSRVIENANVIMATYEDKLLGDVQVYPEKGTVAFSAGLHGWAFTLTNFAKMYASKFGVDESKMMERLWGENFFDPATKKWTTKNTGSPTCKRGFVQFCYEPIKQIIKTCMNDQKEKLWPMLQKLNVTMKADEKELIGKALMKRVMQTWLPASTALLEMMIFHLPSPAKAQKYRVENLYEGPLDDVYATAIRNCDPEGPLMLYVSKMIPASDKGRFFAFGRVFSGKVATGMKVRIMGPNYVPGQKKDLYVKSVQRTVIWMGKKQESVEDVPCGNTVAMVGLDQFITKNATLTNEKEVDACPIRAMKFSVSPVVRVAVQCKVASDLPKLVEGLKRLAKSDPMVLCTMEESGEHIIAGAGELHLEICLKDLQEDFMGGAEIIVSPPVVSFRETVLEKSCRTVMSKSPNKHNRLYMEARPLEEGLAEKIWCFGPETTGPNMVVDMCKGVQYLNEIKDSVVAGFQWASKEGALAEENMRGICFEVCDVVLHADAIHRGGGQVIPTARRVIYASQLTAKPRLLEPVYLVEIQAPENALGGIYGVLNQKRGHVFEEMQRPGTPLYNIKAFLPVIESFGFSSQLRAATSGQAFPQCVFDHWDMMGSDPLEAGSQAAQLVLDIRKRKGLKEQMTPLSEFEDKL

SEQ ID NO: 52084 - protein, 186 aa, Zea Mays
MNAFDQAMNALDERFSFLSSSKQIVSDMNDEEKVIVFERGDLVFVFNFHPKKTYEGYKVGCDLPGKYRVALDSDALVFGGHGRVGHDVDHFTSPEGVPGVPETNFNNRPNSFKVLSPPRTCVAYYRVDEAGAGRRLHAKAETGKTSPAESIDVKASRASSKEDKEATAGGKKGWKFARQPSDQDTK

SEQ ID NO: 52085 - protein, 407 aa, Zea Mays
MAMSVALHPERTAVENKKPDMKQRRVVVTGMGVVTPLGHDPDEFYNNLLRGISGISEIEAFDCSHYPTRIAGEIKSFSTDGWVAPKLAKRMDKFMQYLITAGKKALENAGITEEVMNELEKSRCGVLIGSAMGGMKVFSDAIEALRVSYKKMNPFCVPFATTNMGSAILAMDLGWMGPNYSISTACATSNFCILNAANHIRKGEADVMLCGGSDAPIIPIGLGGFVACRALSQRNSDPAKASRPWDVDRDGFVMGEGSGVLVLEELEHAKQRGAEIYAEFLGGSFTCDAYHMTEPHPEGKGVILCIENALADSGVTKEDINYINAHATSTQMGDLKEFEALNRCFGQNPQLRVNSTKSMTGHLLGAAGGIEAVAAIQAIRTGWVHPNLNLDNPEKTVDAGGPAEGEM

SEQ ID NO: 52086 - protein, 694 aa, Zea Mays
MADSERSSPSSRSSRRILCDRIGFCKTGLTLDNSTTVAEIFPKMDRTYKLQGEDVHGWFSLDFTAEQLVQNVTLIQNIFSRPSTFDASFGMYTLDDVVELHPPQIWLNVEYNSFFMEHKLSSEDYILELPKDFSLTYISSPEIGFLKSLSGKLRNAKTKLIFRFLNEDVEEPSTKKTYGELLKDLKSIKEFAAGVLVPKTYIWPLKKDQYLAPSTSLVKDAHALGLEVYASGFANDIILSYNYSYDPTAEYLQFIDNPDFSVDGVITDFPPTASGAVACLAHSKGNPLPPPGKDTRPLIITHNGASGMFAGSTDLAYQQAIKDAADVIDCTVQMSKDGTAFCMQSADMSSSTTASTAFASKASTVHEIQNKSGIFSFDLSWSEIATLKPDLISPFAQAGMKRNPQAKNAGKLMTVPQFLDLAKASNITGILIEIEHASYLAKRGIGVVEAVSSALTKAGYDKETKQQVFIQSDDSSVLAAFKKFTTFRRVLNIEAKISGASKPSVDDIKKFADTVRINRNSVAQVTGYFMTHFTDTVSSLQDANLTVFLGVLKNEFMNLGFDFFADPTIEIVTYSWAVLADGLVTDYPATAASYFRSPCSDMNLNLSYSILPAQPGALVNLAAPGTLAPAGAPAPLLQPSDVVDPPLPPVKAVITADAPAPEAADNTSSASSSNAGNGLLWAAIVALLSLSFLR

SEQ ID NO: 52087 - protein, 738 aa, Zea Mays
MAAADGRSGDFRVRGGSVGGRIDRLVVENFKSYKGEQTIGPFVDFTAIIGPNGAGKSNLMDAISFVLGVRSTHLRGAQLKDLIYALDDRDKEAKGRKASVRLFYCQPNQEELCFTRSITGAGGSEYRIDRNQVTWDVYNAKLRSLGILVKARNFLVFQGDVESIASKNPKELTALLEQISGSDELRREYDELEEQKARAEEKSALVYQEKRTIVMERKQKKVQKEEAEKHLRLQQDLKLLKTEHYLWQLYTIEKDIEKIEAELVEDRESLQQVQEENRSSDYELTAKKKEQSAFLKKITLSEKSITKKKLELDKKQPELLKLKEQISRLKSKIKSCKKEIDKKKDDHKKHLGELRRLQSDLVEVTEAIEELNEQGQDTSGKLLLADDQLQEYHRIKEDAGMKTAKLRDEKEVIEKKLNADAEAKKNLVENMQQLESRKDEISSQERELQTKLSKILHSIPKLENELTHLHEEHNKIAKERQSSGSEYQMLKQRLDEIETQLRELKADKHESERDARLKETVGRLKRLFPGVHGRMLELCRPSQKKYNLAVTVAMGKFMDAVVVEDENTGKECIKYLKEQRHPPQTFIPLQSVRVKPIIEKLRTLGGSAQLVFDVIHFDRVLEKAVLYAVGNTLVCDKLDEAKALSWSGERYKVVTVDGILLTKSGTMTGGTSGGMEARSNKWDDSTIESLKKKKNLLENKMSELGSPRELQRKELAISEKITGLEKKLHYSNVEQIFV

SEQ ID NO: 52088 - protein, 391 aa, Zea Mays
MGSTFPVIPTPSQLPGSSLPNIGGMFPNMLPFGVAGQFNPLVIQPQAMTQQATRHARRVYVGGLPPSANEQTVAIYFNQVMAAIGGNTAGPGDAVLNVYINHDKKFAFVEMRSVEEASNAMALDGIMFEGAPVKVRRPTDYNPSLAAALGPSQPSPNLNLAAVGLTAGSNGGLEGPDRIFVGGLPYYFTEAQVRELLESFGPLRGFDLVKDRETGNSKGYAFCVYQDLTVTDIACAALNGIKMGDKTLTVRRANQGASQPRPEQESILLQAQQQVQLQKLVYQVGALPTKVVCLTQVVTADELKDDEEYEDIMEDMRLEAGKYGNLVKVIIPRPDPSGQPVVGVGKVFLEYADIDGAAKAKTALHGRKFGGNPVVAVCYAEDKFANGEYDG

SEQ ID NO: 52089 - protein, 1472 aa, Zea Mays
MTGPLHSSSGHNAAAGGGGKTIEEMYQKKTQLEHILLRPDTYIGSVEKHTQTLWVYEDGAMVNRSVTYVPGLYKIFDEILVNAADNKQRDPKMDALRVEIDVDGCSISVYNNGDGIPVEVHQEEGVYVPEMIFGHLLTSSNYNDNEKKTTGGRNGYGAKLTNIFSTEFVIETADGRRQKKYKQVFSENMGKKSEPQITKCKQGENWTRVTFKPDLAKFNMIHLEDDVVALMRKRVVDMAGTLGKTVKVELDGHRVPIKSFCDYVDLYMKSANCDRPDNFKKIYEQVNDRWEVCVSQSEGQFQQVSFVNRIATIRGGTHVDYVTNQIATHVMAFVNKKNKNANMKLHNVKSHLWVFVNALIDNPAFDSQTKETLTTRQGSFGSKCELSSDFLKKVEKSSVIDNVLSWADFKLSKELKKTDGSKKSRISGIPKLEDANEAGGKDSHKCTLILTEGDSAKALAMSGIAVVGRDYYGVFPLRGKLLNVREANHKQIMDNAEIQNIKQILGLQHGKQYDSTKGLRYGHLMIMTDQDHDGSHIKGLLINFIHSFWPSLLKVPSFLVEFITPIIKATRGQTTKSFYTLPEYEEWRNNLGASASSWTIKYYKGLGTSTAKEGRKYFEDITEHKKDFLWVDDQDGNHIELAFSKKRIADRKQWLTNFQPGTYIDQRDKHVKYSDFINKELILFSMADLQRSIPSMVDGLKPGQRKILFCSFKRNFVKEAKVAQFSGYVSEHSAYHHGEQSLAGTIIGMAQNFVGSNNINLMYPSGQFGTRAQGGKDAASPRYIFTKLSHITRSIFPKDDDILLNYLNEDGQSIEPTWYMPILPMVLVNGSEGIGTGWSTYIPNYNPRDILANLRRLLNGESTVPMHPWYRGFKGSIEKTVNTKVAGSTYTVTGIIEVLDNTTLRITELPIRRWTQDYKDYLESLAPDTKNKDKVPFIEDVTCQGDNEDVYIQFTLSEKNMNIAMEEGLVKKFKLTTTIGTSNMHLFDSDGKIRKYDTPEQILEEFCHLRLEFYCKRKEALLKSIKLDLKKLENKVRFIRCVVDNEIIVNNRKRADLFLELRQKNFDPFPKKKKRAEPAAVGALEEEENEESPEAAGAEPSDYEYLLSMSIGTLTLEKIQELNAEKQKLVDDVEELENMSPKSLWLKDLDAFEKELDVLDQMDLAEELQREKRINAGKKGGSKAAPKKPRKKAASKKLDSDTEDDDFEPAVAKRGAQPKKTSSKANDSASEDGDYVAAENQKKQSKKASAHVDEEVDMPSLKDRLAAFNISDSSPDHSAMETEVTELTEQQNENKATEGASKRGGRKKASSSLATIPSDVDEEVLEVQAQKKGRGRKPAAVVKPKAPAAARKRAPAQGKVTQKKIDEMLKATEDNNTSASSPEKKVRKMRSSPFNKKSGSILQRGSTASASSGTTVEASPPSGSSAEPVGAAQPRRTARATKKPIYISDSDPEDEVELIDDSDFDADGDSDE

SEQ ID NO: 52090 - protein, 138 aa, Zea Mays
MAAFPSAKPPLGVFFAAIAPRLQPRYYSISSSPKMAPSRIHVTCALVYGPSPTGRIHQGVCSTWMKNTIPLEYSEECSWAPIFVRQSNFKLPADPSTPIIMIGPGTGLAPFRGFLQVSIETIWGRIGHFNPFLWMQEP

SEQ ID NO: 52091 - protein, 236 aa, Zea Mays
MVCDRALARTSVASTTVLSSTSGLFTLFIGVLLGQDSINAAKIIAVFISMAGVVMTTVGQTWASDESEAGKSGFTQRTLLGDMFGLMSAIAYGLFTVLLKKFCGEEGEKVDVQKLFGYLGLFTLVALWWIVWPLTALGVEPKFSMPHSAKVDEVVVANSLIGSVLSDYFWALSVVWTTPLVATLGMSLTIPIAMVADMIIHGRHYSAVYILGSVQVFSGFVIANLADRFSRSLGLS

SEQ ID NO: 52092 - protein, 293 aa, Zea Mays
MLEMLRGKRMLFVGDSLNRGQYVSLLCLLHRAIPDGAKSFETVDSLSVFRAKNYDATIEFYWAPMLAESNSDDAVVHSADDRLIRGAPMDRHSSFWKGADVLVFNSYLWWVAGDKIQILRGADNDPSKDIVEMKSEEAYRLVLHQVVRWLERNVDPVKSRVFFVTASPTHTDGRAWGDDDAEGSGNCYNQTSPISAASSYRGGTSQEMLRATEEVLATSRVPVGLVNITRLSEYRRDAHTQTYKKQWVEPTAEQRADPRSYADCTHWCLPGVPDTWNELLYWKLFFPSNDQVL

SEQ ID NO: 52093 - protein, 170 aa, Zea Mays
MAVLVQEVVNADYAFVIHTTNPSSGDSSEIYAEVVKGLGETLVGAYPGRAMSFVCKKDDLDSPKLLGYPSKPIGLFIRQSIIFRSDSNGEDLEGYAGAGLYDSVPMDEEDEVVLDYTTDPLIVDRGFRSSILSSIARAGHAIEELYGSPQDVEGVVKDGKIYVVQTRPQM

SEQ ID NO: 52094 - protein, 84 aa, Zea Mays
MKFLGVVVALWILSEIGELCDLLRLMYIVVLILHTVPILYHKYQDQVDNFAAKAHRELCKQYAVLDAKVLSKIPRAPPKDKKQN

SEQ ID NO: 52095 - protein, 310 aa, Zea Mays
MENPASVLVLPAQFTKLTFGNLYIRRAGPGSREITEEGRCDLDKRYVSDFPVYDGRGPDASLVARVQGITSEIGNAHQLFVVVFDTDRLKGSTLVTNGVITAGSDEWAIYGGTGVFAMARGVIRRRYLADRAGGNTDELNMDVFCRPFGSQSELQDKVQGQGSSVTKIGLWGGPGGSAQDITAERPPQRLHSVTVRAGVAVDSIEFTYTDSAGQRRAAGRWGGLGGNVRTIDLGDAEDVREVSGTYGAFEGATTLTSLRLVTSSRTWGPWGVENGTRFSVTAPIGSSIVGFYARAGTRLVDAIGVYLRQI

SEQ ID NO: 52096 - protein, 138 aa, Zea Mays
MKRMLETSFPGIHVILHNYPPPFPKRVLSKVIPIVQVGAVATIMAGDQIFPRIGMVAPPWYYSLRANRFGTMATIWLFGNFAQSFLQSSGAFEVYCNGDLVFSKLAEQRFPSEFELRDLVGSRLPGSPFGRNPGKTLT

SEQ ID NO: 52097 - protein, 83 aa, Zea Mays
MSSCLPTPSFSVDSYSSSLQGWCSLLRRSVNRNKNSVYSCTELCMFFSFHRGEFKLLSVCCKVCRLILCVGMLARKGRCHVRI

SEQ ID NO: 52098 - protein, 446 aa, Zea Mays
MLVGWGGNNGSTLTAGVIANREGISWATKDKVQQANYYGSLTQASTIRVGSYNGEEIYAPFKSLLPMVNPDDIVFGGWDISNMNLADSMTRAKVLDIDLQKQLRPYMESMVPLPGIYDPDFIAANQGSRANSVIKGTKKEQVEQIIKDIREFKEKNKVDKIVVLWTANTERYSNVCAGLNDTMENLLASVDKNEAEVSPSTLYAIACVMEGVPFINGSPQNTFVPGLIDLAIKNNCLIGGDDFKSGQTKMKSVLVDFLVGAGIKPTSIVSYNHLGNNDGMNLSAPQTFRSKEISKSNVVDDMVSSNAILYEPGEHPDHVVVIKYVPYVGDSKRAMDEYTSEIFMGGKNTIVLHNTCEDSLLAAPIILDLVLLAELSTRIQLKAEGEDKFHSFHPVATILSYLTKAPLVPPGTPVVNALAKQRAMLENIMRACVGLAPENNMILEYK

SEQ ID NO: 52099 - protein, 72 aa, Zea Mays
MCVYSVFCIPDSRCLVCDVINPGIQQLLLLIYLFSCSVFPSVSAAQHYGGVLFNVSYAVSYCDSLGGHIQET

SEQ ID NO: 52100 - protein, 129 aa, Zea Mays
MVNKIKGKMQKALPDLLKEYDMPAGLFPRDTTNYEFNEETKKLTVYIPSACDVGYKDSSVLRFFTCVTGYLEKGKFSDIEGMKTKVLVWTKVTAIKTEGPKVHFTAGVKKTRSRDAYEVVRDGITIDKF

SEQ ID NO: 52101 - protein, 110 aa, Zea Mays
MLSSGWIQVSNGKEYALSDVIDTIKHAFGGSPQIVCKRGSIEELRLCFDKELKPRDCLTTSLANGSVSKSKHCPRYITLPTYDPLVLANSTVEIMTQFDEFEVPAALYTA

SEQ ID NO: 52102 - protein, 484 aa, Zea Mays
MKGCSERLLFLLLLLASSSLLSAVIAAQQTCPADLDSKCDGGASDDDWEGEFFPGVPKIKYEGPTSKNPLAYKWYNKEEVILGKKMKDWMRFSVAFWHTFRGTGADPFGAPTKTWPWEDGTNSLAMAKRRMRAHFEFMEKLGVDKWCFHDRDIAPDGKTLEETNSNLDEIVQLAKQLQGETNIKPLWGTAQLFMHPRYMHGAATSPEVKVYAYAAAQVKKALEVTHYLGGENYVFWGGREGYQTLLNTDMKRELDHLANFLQAAVDYKKKIGFNGTLLIEPKPQEPTKHQYDWDVATTFAFLQKYGLTGEFKINVECNHATLSGHSCHHELETARINGLLGNIDANTGDPQVGWDTDQFMTDIAEATLVMSSVVKNGGLAPGGFNFDAKLRRESTDVEDMFLAHISGMDTLARGLRNVAKLIGDGSLDDLVRKRYQSFDSEIGALIEAGKGDFETLEKKVLEWGEPTVASGKQELAEILFQSAL

SEQ ID NO: 52103 - protein, 74 aa, Zea Mays
MDQLLGSRQFDFPGAAALQVNSLGVILATGAMATATACTTGHHSTVDMATPPRFRTQTCTPRPTKPTRTMGTSS

SEQ ID NO: 52104 - protein, 197 aa, Zea Mays
MVLDGDVFDVPIRKDIVHRVVRWQLAKRQQGTHSTKTISEVSGTGRKPYPQKGTGKARHGTLRGAQFRGGATMHGPKPRSHAIKLQKKVRRLGLKIALSARTAEGKLLIFEDLEVPSHKTKNIVQYIRQMDDSKKVLLVDGGDIDKKLKLATQNLHYVNVLPSIGLNVYSILQHDTLVMTRAAINRIVERMHTPINR

SEQ ID NO: 52105 - protein, 1577 aa, Zea Mays
MDRIRDGRRSGVSGGAGPPPPRRRLRSNGGGGPRDSPRSERRRGERLMLNGGGAGAGRDDADDTSDDSLGDDDEDAEEELAPRYQQQRRSPSTAPPPPSPPQPGGGHHHSSSSSGGGGYHNHHHGQQHQIQRKGGVSHPKSPMVVKAVDEMIGVPVPRKARSASTKRSSHEWPVPGGGTSGGSSGVGDGSQIQRPSSRPISPAPASTAAPRKKLKTLGGGVSSGGLGPAPKQRPSMSPAPSTTPPQPPPSKISKSPSFIQEEIEVAEVLFGLTRQFPCPQKQESNHKLEPRDAPEAKSGNSSPAPSSSGVRPSDSTSLSTIAPKRKRPRLVNYDEDSRPARPELAEPSSNPESPPVARSEAKTTATSAAAESGTSTTPAAAQPETSRESEKAEDRGRNRDSELRPNESDRRDHRLESQAVPPSPLPLPLPEPPVKPDAEAKPVGSEARNGEATATTKIELASDGARHDKRFSIDLMAPPPGKLSDDIDGSSDPDADKKGLDSEMDMLGRGNSEKKASERTRRGLDIDLEDQKVRRIPVDEFAPKKLTLQLDLEKPSLGDEKSPSERRQPQPQPQQLQQQKPSKAEIKHEKSAMPAAVTPPMPIPVGGWLGNFPPFGYLSPVPGLSAAGLHHPMDVKPGSSSGLHHSALLPPPTRSKRCATHCYIAQFIQHQQRVAKMNSFWPPTAAAAAAAAANRPPGPFFGARPFSMGVVPPTDAASMLVNPMQGSYPVRAHTPMQEAKAPMATSPFQGSLSKDKTLGNAAGAESSQRKQPPSHETLQSTPLPNMLQAPAFIFPFNQQHAMVAAANAANRAGDAKSSGAGNTLPPSASAHTLATNSGAAAMNLSFANMQPADAQFLAILQNGYPFQVAAHPGGPPYRGMASPGPAVPFFNGHVYSSPMLHPSQQQGAQSQSHQKTQMPNLPSSSQKHQPQQSQGLLGYAPNTNAAAAASNSQNYSSGNQRPVLLPGLVHRQESDKTGQDCPSSDDKPSHSQKSGYEHNFAVPVHLPNFAMMPAAQPAVSQSEKKLSDHQHHQQQQQPQVSRGQGVRIDLASSQPFVMPFGSIGPPGSTPSGLDFSALAQNHAVFQSHQDAARHGYPQLNFAAAQPVQSTQQKPQHQMTGETKTVAGDSSSTPIAGDSERKKSTSHKYSSDSQQHSLSFTRTESKNYVPPFLTGNTNETSSRTLSLIGTESSNAFMGSKPTNSNTPASTAAAASASISQQQQQHLQMQAQQKHQQHQQLIQHHHLNRPRSAAPSTQNSAGGYQDRINMANFQNMMYPSSAAQGRVQSPQLKASSGRGTPSSTATTTPAATPPNLIMMKNSSLHQQQAKVPMQALYTPGHQSQTSLSSSKVGPSLTNLSTGGGDLSRSSNAPVASGSPSNSVSKSTGGSPPATGNAKGVQQPVQLPSPQQQSAKNSASTSGSRTTPTNHFSMAMPSILGQQPNASPGSNPGSKQHSHTQPASMKQQPFPQGHFFISNTYAPPAPGAGGAAALGLYQKRPGDKTQQQQQQQASHQQSAMSAAGGNNVKALHPSSGGFMHLAAQSAGGMAHTHVSAGQLTFGTMPTPLKPSSDQKPAAGK

SEQ ID NO: 52106 - protein, 57 aa, Zea Mays
MKYKQRVAWWRRLLSRVDFPVLMEPDVAPGIFPGGSRAVSIVSRAEFVWVVFNMWSV

SEQ ID NO: 52107 - protein, 295 aa, Zea Mays
MVNKYYDLATSFYEYGWGESFHFAHRWNGESLRESIKRHEHFLALQLGLKPGMKVLDVGCGIGGPLREIARFSSTSVTGLNNNEYQITRGKELNRLAGISGTCDFVKADFMKMPFDDNTFDAVYAIEATCHAPDPVGCYKEIYRVLKPGQCFAVYEWCITDHYDPNNATHKRIKDEIELGNGLPDIRSTRQCLQAVKDAGFEVVWDKDLAEDSPLPWYLPLDPSRFSLSSFRLTSVGRMITRTMVKALEYVGLAPQGSERVSNFLEKAAEGLVEGGKKEIFTPMYFFLVRKPLLE

SEQ ID NO: 52108 - protein, 81 aa, Zea Mays
MHQSQILYCFPRFVLPLLNGCKSLAIYYHGTPIIVYKTILYYMQVRVRFKRKQIVVEFVRILQSRNNGMQGLPVMMVAYFF

SEQ ID NO: 52109 - protein, 795 aa, Zea Mays
MRDAMSKLGSDPNKINPLVPVDLVIDHSVQVDVARSANAAQANMELEFHRNKERFGFLKWGSSAFRNMLVVPPGSGIVHQVNLEYLARVVFNNGGILYPDSVVGTDSHTTMVDGLGVAGWGVGGIEAEAAMLGQPMSMVLPGVVGFKLSGKLRNGVTATDLVLTVTQMLRKHGVVGKFVEFYGQGMSELSLADRATIANMSPEYGATMGFFPVDGKTLDYLKLTGRSDDTVAMVESYLRANKMFVDHSQVDAERVYSSYLELNLEEVEPCLSGPKRPHDRVTLKNMKSDWLSCLDSDVGFKGFAVPKESQGKVAEFSFHGTPAKIKHGDVVIAAITSCTNTSNPNVMLGAALVAKKACELGLEVKPWIKTSLAPGSGVVKKYLDKSGLQKYLDQLGFHIVGYGCTTCIGNSGELDESVSAAITENDIVAAAVLSGNRNFEGRVHPLTRANYLASPPLVVAYALAGTVNIDFEKEPIGISKDGKEVYFRDVWPSTEEIAEVVKSSVLPDMFKSTYESITKGNPMWNELPVSTSTLYPWDPSSTYIHEPPYFKDMKMSPPGPRPVKDAYCLLNFGDSITTDHISPAGNIHPDSPAAKYLKERGVERKDFNSYGSRRGNDEIMARGTFANIRLVNKFLKGEVGPKTIHVPSGEKLAVFDAAMKYKNEGHDTIILAGAEYGSGSSRDWAAKGPMLQGVKAVIAKSFERIHRSNLAGMGIIPLCYKAGEDADTLGLTGHERYTVHLPTNVSEIKPGQDVTVTTDNGKSFTCTLRFDTEVELAYYDHGGILPYVARKIAEQ

SEQ ID NO: 52110 - protein, 77 aa, Zea Mays
MMSSVVVDAAATSSSEKKTSWPEVVGMSIKEATETILKDMPNAYIQVLPVGSPVTLDLRPDRVRIFVDTVAMTPTVG

SEQ ID NO: 52111 - protein, 393 aa, Zea Mays
MQMAAAVAPTDAPASASAAAAPSRPHAHAAAAVAAASPHPHALHPHHHMPQPRWVVIPYPPPHHPMVAAPPPPSLQFVKHFTPPSSVTPPPPTGSGGNGGEDNRTIWVGDLQYWMDENYLHSCFGSSGEVVNIKVIRNRHSGVSEGYGFIEFYTHVSAEKALQNFSGHVMPNTDRAFKLNWASYSMGEKRSEISSDHSIFVGDLAVDVTDAMLLELFSNKYRSVKGAKVIIDANTGRSRGYGFVRFGDDNDKIHAMTEMNGVYCSTRPIRVGPATPRRSQGDSGTSPPRQSHVDSTNRTVYVGGLDPNVSEDELRKAFAKYGDLASVKIPFGKQCGFVQFVNRVDAEEALHGLNGSTIGKQAVRLSWGRSPASKQRLITPLCSRKGMRGTRME

SEQ ID NO: 52112 - protein, 233 aa, Zea Mays
MGARDLNIQTENGHIGMPTNICCVVVEYLPGGALKSFLIKNRRKKLAFKVVVQIALDLARGLSYLHSKKIVHRDVKTENMLLDKTRTVKIADFGVARLEASNPSDMTGETGTLGYMAPEVLNGNPYNRKCDVYSFGICLWEIYCCDMPYPDLSFSEVTSAVVRQNLRPEIPRCCPSSLSNVMKRCWDANPDKRPEMAEAVSMLEAIDTSKGGGMIPVDQRPGCLACFRQYRGP

SEQ ID NO: 52113 - protein, 98 aa, Zea Mays
MAPMVAVVSRGLEREARLMRYREKRKSRRFEKTIRYASRKAYAETRPRIKGRFAKRTPGAGEDTLEEHEEMYSSAAAAVAALMAPGGADADYGVVPTY

SEQ ID NO: 52114 - protein, 72 aa, Zea Mays
MQISEEWKFAYISLGRPDYFEDSDTVALKFQRNMYGAWEQYLGLEHPDTAPRKAHTINQNRHSFERPVKIYN

SEQ ID NO: 52115 - protein, 162 aa, Zea Mays
MASPLRRSFPSLGRALLTPAPARMLSAEASDALVEIKPGEIGMVSGIPEEHLRRKVVIYSPARTASQQGSGKVGRWKINFLSTQKWENPLMGWTSTGDPYANVGEAGLTFNSAESAKAFAEKHGWNYVVRKRHTPLLKYKPSLLHILNYKCHCGGRIYYFQY

SEQ ID NO: 52116 - protein, 284 aa, Zea Mays
MRKFLQSLEFFEENERKKLAIFTALAFSQKLSGLPPETVFQPLLKDNLVAKGIVLSFITEFFKEYLEENSLDDLIALLKKGKMEDNLLDFFPSAKRSSEALSEHFTKEGLTSLVEYNEKKMFEVKLKEIKSTLTAMINDEAAISEVIETVKQQVKDAKFPDLEVIRMLWDVLMEAVQWSGKNQQQNSNAALRQVKAWTELLNAFCTSGRLELELIHKVQTQCYEDAKLMKLFPEIIRTLYDQDVLAEDTIVLWFRKGSNPKGRQSFVKALEPFVKWLEEAEEEE

SEQ ID NO: 52117 - protein, 73 aa, Zea Mays
MPLKHKASKRNLQVQLFSVIRKEMYKGQNWMTEAVGSLHSALAKVGVVVEAGEVAATTLADSFSSHVCCSWTT

SEQ ID NO: 52118 - protein, 1083 aa, Zea Mays
MDLLMMPSNCGNLMLVQWPLFLLTSKIMLANDYASDCKDSQYELWDRISKDEYMAYAVKECYYSTEKILHSLVDAEGQHWVVRLFRDLNDSIAQGSLLVTINLKKLQLVQSRLTGLTGLLIRDETAGRAAGVTKALLELYEVVTHEFLSQNLREQFDTWQLLLRARNDGRLFSKILWPKDPEMKEQLKRLHLLLTVKDSATNIPKNLEARRRLQFFTNSLFMDIPQAKPVSEMIPFSVFTPYYSETVLYSMSELCVENEDGISILFYLQKIYPDEWANFLERIGCGESSEDDFKESPSDTMELRFWVSYRGQTLARTVRGMMYYRRALMLQSYLERRCLGGIEDGNSAAEYIDTQGYELSPDARAQADIKFTYVVSCQIYGLQKQTKKQEAADIALLLQRNEALRVAFIHEEEIISRDGKATTREYYSKLVKADVHGKDQEIYCIKLPGNPKLGEGKPENQNHAIIFTRGDAVQTIDMNQDNYLEEAMKMRNLLEEFHNAHGKHGIRKPTILGVREHVFTGSVSSLASFMSKQETSFVTLGQRVLAYLKVRMHYGHPDVFDRIFHITRGGISKASRVINISEDIYAGFNSTLRQGNITHHEYIQVGKGRDVGLNQIALFEGKVAGGNGEQVLSRDVYRLGQLFDFFRMLTFFFTTVGYYVCTMMTVLTVYIFLYGRVYLALSGLDYSISRQARFLGNTALDAALNAQFLVQIGIFTAVPMIMGFILELGLMKAVFSFITMQLQFCSVFFTFSLGTRTHYFGRTILHGGAKYRATGRGFVVRHIKFAENYRLYSRSHFVKALEVALLLIVYIAYGYTKGGSSSFILITISSWFLVMSWLFAPYIFNPSGFEWQKTVEDFDDWTNWLLYKGGVGVKGDNSWESWWDEEQAHIQTFRGRILETILSLRFLMFQYGIVYKLKITDHNTSLAVYGFSWIVLFVMVLLFKLFTATPRKSTALPTFVRFLQGVLAIGIIAGIALLIVLTSFTVADLFASALAFIATGWCVLCLAVTWKRVVKVLGLWDSVREIARMYDAGMGAIIFVPIVVFSWFPFVSTFQSRFLFNQAFSRGLEISLILAGNKANQQI

SEQ ID NO: 52119 - protein, 612 aa, Zea Mays
MAAVGSLKPGMETLHVQDYKDAPPAKGVAAAAVGSLQPGAENLQVQDYKDGNMYYGAYPAYAYGAYGGWGEYPYLSHDGAQTPTAGTYADMYYGYAPYGVATMGHDGQIYGSQNYQYPSTYTKQQNSTAKLSSNGISEKLTPAPQTDVSTIGVDEVKGLKNSNSVLKTDRNMPGSNGSYGRSSVRSGSYQNQTSWSHYPYYSSEMFSDKQQKFTGNHNSTSNPKTKGQSRNQNTRQYPHLMGLQTPTSSVYSANGIYGYDGSYGPGLWYGSHMYNSGLYGGWNSLYDGKYRTRGRGNNGYYVYGNGSIDGFNELKRGPRSGMYKNQLGLEATTQAPAKEQDLLFANGSHPAMKDQYNQADFAETYSDAKFFIIKSYSEDDVHKSVKYNVWASTPNGNKKLDAAYQEAKEKSSETPVFLLFSVNASGQFVGLAEMVGRVDFEKTVEHWQQDKWTGCFPVKWHIVKDVPNSLLKHIILENNENKPVTNSRDTHEVKLEQGLQVLKIFKDHVCKTSILDDFGFYDNREKMMQERKAKQQQSLKKVIDVKLPSVTDMERSPKGETGSTELTGVGTDVLNKERLLGKAGEKNGEKGNDVAPQDLKTQTEKLAGLNGC

SEQ ID NO: 52120 - protein, 550 aa, Zea Mays
MASISGAAAPPSSAVCRLRLRRHLLLRPSHLRLRAPHSIADLSRSSNSAPSPARPALGSGPENGSGGVRAVEKDPIKLWERYVEWLYQHKELGIFVDVSRMGFTEEFLRQMEPRMQQAFVDMRELEKGAIANPDEGRMVGHYWLRDPALAPNSFLRNKIETALDRILAFSQDVVSGKILSPSGRFTSILSIGIGGSALGPQFVAEALAPDNPPLKIRFIDNTDPAGIDHQIAQLGPELATTLVIVISKSGGTPETRNGLLEVQKAFRDAGLQFSKQGVAITQENSLLDNTARIEGWLARFPMFDWVGGRTSEMSAVGLLPAALQGIDIKEMLVGAALMDEETRNTVVKANPAALLALCWYWASEGIGKKDMVVLPYKDSLLLLSRYLQQLVMESLGKEFDLDGNRVNQGLTVYGNKGSTDQHAYIQQLREGVQNFFVTFIEVLRDRPAGHDWELEPGVTCGDYLFGMLQGTRSALYANDRESISVTVQEVTPRAVGALIALYERAVGIYASLVNINAYHQPGVEAGKKAAGEVLALQKRVLTVLKEAIRE

SEQ ID NO: 52121 - protein, 108 aa, Zea Mays
MPALAKPASRTAKPAAAPKPKPAAAKPKAATAGASHPPYFEMIKEAITALKERTGSSSQAIAKYVGDKHGASLPANFKKMLSIQLRGSAAKGKLVKSPASKKARKASA

SEQ ID NO: 52122 - protein, 158 aa, Zea Mays
MLSGDIPPSQTIYLNNLNEKVKKEELKRSLYALCSQYGRILDVVALKTQKLRGQAWVAFSEITAATNAFRGLQDFDFYSKKMRVQYAKTKSDCIAKEDGTYAPKEKRKKQEEKAAEKKRRTEEAQQAGLNAAAAQSNGTMGVLGKNGVQSTGPIHRSL

SEQ ID NO: 52123 - protein, 237 aa, Zea Mays
MFGYRKADPDLEAGGSSLLYPGMTESPELRWAFVRKIYVILAVQLAMTAAVSAFVVKVPAVSNFFVSSNAGVALYIFLIILPFLVLCPLRYYHQKHPVNLLLLGLFTVAISFAVGMTCAFTSGKIILEAAILTAVVVISLTAYTFWAAKRGHDFNFLGPFLFAAIMVLMVFSLIQIFFPLGKISVMIYGGLASLIFCGYIIYDTDNVIKRYTYDEYIWAAVSLYLDVINLFFFFFFF

SEQ ID NO: 52124 - protein, 173 aa, Zea Mays
MKPAVEAEADERAAEEMAPKKAAAAKKAAEEVEEKEAAGVVEISDEDDDDGDGEADDDDDDDGDDDDDDDEDSDDEEEVDGEDDQEEELGTEYLVQPLGRAEDEEHSSDFEPEENGEGADDEEIDEEDDDGEDSVKAQTSTKRKRSGDEEEEDDDDGDDDGDDDDDGRPPSKR

SEQ ID NO: 52125 - protein, 59 aa, Zea Mays
MSYYGQQPPVGVPPQQAWLPSAAAASWTPASDGTIRAGSNTAASEATSLRKSWNWAVLF

SEQ ID NO: 52126 - protein, 69 aa, Zea Mays
MRFIIAGNLLGLPAITVPVGHDKQGLPIGLQLIGRPWGEASLLRVASAVEELCLKKRKRPSAFYDILKA

SEQ ID NO: 52127 - protein, 52 aa, Zea Mays
MNGSTTPCLRQKRQRSAKPARGSVSAFTCTMKTRHHRRPTISPHRLCRPCSV

SEQ ID NO: 52128 - protein, 429 aa, Zea Mays
MALVLHSGAGNKNAFKALIAAEYSGVKVELTKDFEMGVSNKTPEFLKMNPLGKVPVLETPDGPVFESNAIARYVARLKDDNPLFGSSRIEQAHVEQWMDFAATEVDPGVGWYLYPRLGYIPYAHTTEETAIASLKRSLGALNTHLALNTYLVGHSVTLADIVLTCNLYHGIARILTKSFTSDFPHVERYFWTMVNQPNFKKVIGEVKQAESVPPVLKKGVPPKESKAKDVKKETPKEAPKPKVVEVPAEEEAPKPKPKNPLDLLPPSKMVLDDWKRLYSNTKTNFREVAIKGFWDMYDPEGYSLWFCDYKYNDENTVSFVTLNKVGGFLQRMDLCRKYAFGKMLVVGSEPPFKLKGLWLFRGQEVPKFVMDEVYDMELYEWTKVDISDEAQKERVNAMIEDQEPFEGEALLDAKCFKVRNEASEDTIEK

SEQ ID NO: 52129 - protein, 570 aa, Zea Mays
MASPAAAAAAAPPPAAKEKEKDAEEAPVTGDMVSAGFAELERQQQLLATCTRLYQQLSDHFGSLERGLAARSDALRVRRRAFDARTHRALDSLHRREASIDASVSRALDHLHSISASASAAAAASSKAPATSDSDSEGLAESLRALCARMDSAAFLGFVVARRKEADALRAEMPPALKLCVDPAKFVMDAVADVFPVDRREVRNPADLAWACVLILEAAEKKGGVEGAKPPDAHAFLQLVATFAVAEREDRPLYRRIVVSFSWRRQMPRLALTLGLEEQMADIIEELIAKRQQLDAVNFAYEAGLQEKFPPVPLLKSYLEDSKKTSTAASDNSSTSSGQSGSNVNKKEQSALRAVIKCVEDRKLEAEFPLEGLRKQLEELEKAKTEKKKAASSATSGGSGGPATKRIRASTGGPMPPAKAGRLTNNACVSSLPAPTTLTQSPSHASYANTSPSRTSYANTSPSHASYATVSPTHASYATPSPPHASYATASPYPYDRPVGHGVYCTRSPPVIREPYVYPAEEVATVNVGIPMAYSTPPMSYPAAPYGGYGNGMPAYTNGMAPAFHQAYYR

SEQ ID NO: 52130 - protein, 585 aa, Zea Mays
MMINCNLCLSIGVICLMDAFFINTMGISYTSNEALGTPPWPTQPLPSPAMERVLKDDAVEEKGERARMCFTTFPACALNFSGCFKMGMVPCLGVPSHVLASFVGAMAISDLVKTTLGPKGMDKILQSTGRGRNVTVTNDGATILKSLHIDNPAAKVLVAGELLKEAEKLINMKIHPMTIIAGYRMALECARDSLLKKTMDNKENTDKFRSDLMNIAMTTLSSKILSQDKEYFAELAVDAVLRLKGSTNLESIQILKKPGGSLKDSFLDEGFILDKKIGIGQPKRIENAKILVANTAMDTDKVKIYGARVRVDSMSKVADIEAAEKQKMREKVQKIIAHGINCFVNRQLIYNFPEELFADAGILAIEHADFEGIERLALVTGGEIASTFDNPESVKLGQCKVIEEIMIGEDRLIHFSGVAMGQACTIVLRGASEHVLDEAERSLHDALCVLSQTVNDTRVLFGGGWPEMVMAKEVDELARKTPGKKSHAIDAFSHALQAIPTIIADNAGLDSADLISQLRAEHHKENSTAGIDVITGTVGDMQKLGIQESFKVKQAILLSATEAAEMILRVDEIITCAPRRREDRM

SEQ ID NO: 52131 - protein, 202 aa, Zea Mays
MGKRWIPLEANPDVLNQFIWGLGVHEEDVQFCDVYGLDDELLAMVPQPVLAVLFLYPLTSLDEEKEESSVSAATSTSAGKELSKKVYFTKQTVGNACGTVGVIHAIGNATSQIKLVEGSYFEKFYKQTADMDPAQRAAFLEEDDEMEDAHSVAASAGDTDANVDVNEHFVCFSCVDGELYELDGRKSQPTSHGPSSPETLLQ

SEQ ID NO: 52132 - protein, 121 aa, Zea Mays
MAPQILATILRLAEKLWQTIMSTSCKGSFTKSQKTHHPAKTLKWRCMHRSAGFLCCSGVTLPLPLALSLIRGSFCSSARCKTVVADHLGVCLARHLFNFHPWVKLLYTVVSTVFCIAMDLW

SEQ ID NO: 52133 - protein, 243 aa, Zea Mays
MDRTALLFLCFPVILLFLRQWLWNGCFPVLPVQLYQAWLLFLYTSLALRENILRVNGSDIRPWWILHHYCAMLMSLVSLTWEIKGQPNCARKQRGVELFLCWAIMQGFVMMLQNRYQRQRLYTRIALGKAKRMDVVWGETAGVEGQLLLLCPLLFLLQGFEGYVGFLLLRTAHTGVVPEWQVVVCGILLIAMAIGNFANTVDTLVTKSRFKAKMKKSKGRRDLDTCPSPTGSSSPIDSATTKA

SEQ ID NO: 52134 - protein, 244 aa, Zea Mays
MQACACHFSPVLAPPRSRISASHSPGMATLKVPATVPPVADDCDQLRKAFQGWGTNEALIISILGHRDAAQRRAIRRAYAEAYGEELLRSITDEISGDFERAVILWTLDPAERDAVLANEAARKWKPGNRVLVEIACTRTSAQIFATRQAYHERFKRSLEEDIAAHVTGDFRKLLVPLVSTYRYDGPEVNTRLAHSEAKLLHEKIHHKAYSDDEIIRILTTRSKPQLIATFNHYNDAFGHRINK

SEQ ID NO: 52135 - protein, 120 aa, Zea Mays
MAPAAPAATGAASPAVTKGGGKVAARSVRLGLPALPPLPGLSLAAQGQTRAASSLYKRLARDVVAMAAGEPAAPQAANEELTEFVDALKKEDRGQVRGDHARRRRHAWHVERRWSSVGNR

SEQ ID NO: 52136 - protein, 110 aa, Zea Mays
MIHQHQCVLLLKRLDFEEMKFSLYFLGYEDVTLAPDDHIKRTEWTFRQKATLELTHNWGTENDPEFKGYHNGNSDPRGFGHIGVTVDDVHKACERFERLGVEFVKKPDDG

SEQ ID NO: 52137 - protein, 57 aa, Zea Mays
MANLRLASQRSPLPITCTEVGSAVKAGFWTMVDMASGRYLWRTLVAQPANSESEKVR

SEQ ID NO: 52138 - protein, 332 aa, Zea Mays
MRPNASAAFRNFEQEARQSAVWDSDQNATSSSGDNLASLYRPPFSLMFNGPFDKAKLEASSLDKWLLINLQSTAEFSSHMLNRDTWGNDAVAQLIRSNFIFWQVYYDTSEGRKVCTYYHLVSMPAILLIDPVTGQKMHAWNGMVHPDRLLEDLLPYLDKGPKEHHAAQPQKRPRKVDPEASTGKQGKIAVEDEDEELARAVAASLEESKEVIEASDASDDMVEAEPEEENEPTLNTKPDYPPLPEEPTGSRDLLCRVAIRLPNNRRIQRNFLHTDPIKLLWSFCAPQVEDGERRAFHFVQAIPGASQKLELGSDLTFKEAGLANSMINLLLD

SEQ ID NO: 52139 - protein, 531 aa, Zea Mays
MIARFKERKSDRVSGKWSEFPTKVAVQLNDTHPTLAIPELMRLLMDEEGLGWDEAWDITYRTISYTNHTVLPEALEKWSQIVMRKLLPRHMEIIEEIDKRFKELVISKHKEMEGKIDSMKVLDNSNPQKPVVRMANLCVVSSHTVNGVAELHSNILKQELFADYVSIWPTKFQNKTNGITPRRWLRFCNPELSEIVTKWLKSDQWTSNLDLLTGLRKFADDEKLHAEWAAAKLSCKKRLAKHVLDVTGVTIDPTSLFDIQIKRIHEYKRQLLNILGAVYRYKKLKGMSAEEKQKVTPRTVMIGGKAFATYTNAKRIVKLVNDVGAVVNNDPEVNKYLKVVFIPNYNVSVAEVLIPGSELSQHISTAGMEASGTSNMKFSLNGCVIIGTLDGANVEIREEVGEDNFFLFGAKADEVAGLRKDRENGLFKPDPRFEEAKQFIRSGAFGSYDYEPLLDSLEGNSGFGRGDYFLVGYDFPSYIDAQDRVDAAYKDKKKWTKMSILNTAGSGKFSSDRTIAQYAKEIWDIKASPVV

SEQ ID NO: 52140 - protein, 86 aa, Zea Mays
MAKGLRARNCLVEVGTEEIIAPVICVLPLRHCKSKWIMCREIIFMSNNLELGWKCWMPPGDMRLVCWPRCVKSAFEPKLAHLCTAE

SEQ ID NO: 52141 - protein, 368 aa, Zea Mays
MLPKAPESTIPGKNTTLSIPGSSDRFSTSALMERIPSRWPRPTWHAPWKNYRVISGHLGWVRSIAFDPANEWFCTGSADRTIKIWDLASGTLKLTLTGHIEQIRGLAVSQRHTYLFSAGDDKQVKCWDLEQNKVIRSYHGHLSGVYCLALHPTIDILLTGGRDSVCRVWDIRTKAHVSALTGHDNTVCSVFARPTDPQVVTGSHDTTIKFWDLVAGRTMCTLTHHKKSVRAMALHPKEKAFASASADNVKKFNLPKGEFLHNMLSQQKTIINSMAVNEDGVLATGGDNGSLWFWDWKSGHNFQQDQTIVQPGSLESEACIYALSYDVSGSRLVSCEADKTIKMWKEDLTATPETHPINFKPPKDIRRY

SEQ ID NO: 52142 - protein, 51 aa, Zea Mays
MRLRAEEDEFRMFFPHDLFFTEKKKTSMTAQQNFIIRTRKNPRPTRAQSNL

SEQ ID NO: 52143 - protein, 179 aa, Zea Mays
MIMVEGISQFCNDLQVDPQDIVMLVISWHMKAATMCEFTRQEFIGGLQSIGVDSIEKFRGKLPSLRAELKDDNKFRDIYNFAFTWAREKGQKSLSLETAIGMWQLLFAERNWPLLDHWCQFLQVRHNKAISRDTWSQLLEFVKTTDPQLSNYDDEGAWPYLIDEFVEYLTENGLVQRKR

SEQ ID NO: 52144 - protein, 559 aa, Zea Mays
MSVVGFDLGNESCIVAVARQRGIDVVLNEESKRETPAIVCFGDKQRFIGTAGAASSTMNPKNSISQIKRLLGRKFSDPELQRDLASFPFRVTEGPDGFPLVHVRYLGEERTFTSTQLLAMVLSNLKGIAEGNLNAAVVDCCIGIPVYFTDLQRRAVLDAATIAGLRPLRLFHETTATALAYGIYKTDLPENDQLNVAFVDIGHASMQVSVVGYRKGQLKMLSHTYDRSLGGRDFDEALFKHFAAKFKEEYKIDVYQNARACIRLRVACEKLKKVLSANPEAPLNIECLMDEKDVRGFIKREEFEQISASVLERVKGPLEKALAEAGLTTENVHFVEVVGSGSRVPAIIKIITDFFGKEPRRTMNASECVARGCALQCAILSPTFKVREFQVNDGFPFSIALSWNGDSQNAPQQTLVFQKGNAIPSTKALTIFKSSTFEVDVLYVDPDNSQIPQKISTYTIGPFQTSNGEKAKLKVKVRLNIHGTVTVDSVIMLEEDVEVPVSSANEAPNDTMKMDTDDVPSDPAAGSDVTMQEQPPAAGNGAQDNEEKSVSMETDAKAE

SEQ ID NO: 52145 - protein, 631 aa, Zea Mays
MPPKSKASAAAEPVAVEDLFASLHRHIEAGAFKQAAKVADQVLKAAPGDEDAAYCCYRQNKLHEALELLRGQEETSAVLQLESQIFYRLGRMNDCMSSYEKLKKFKIDSMDLKINIIAALVAAGRASEVQAAMKALKVDLTTRALRDTRSFELAYNSACSLIENKKYSEAKEQLDLAKRIGKEELMVEDYGEADIEYELAPVSAQLAYVQQLQGQSQEAMQTYVNMINGQSADLSSLAVATTNLISIKGTKDTADSLKKLDRLIGTTTAPNQLHLVENLDYKLSPWQKEALYSARVLLLLHANKTEQAHELVRGLLGMFPDSVFPVLLQAAVHVKEKKIHKAEDVLSQYAEKRPENSKGLLLALAQIAANANHFQLAADSLSRIPDIQHMPATVATLVALKERLGDSNAAASVLDSAINWWKNSMTEDNKLDILTREAAAFKLSHGRDEEACLLYEELVKSHGSIEALAGLVMTSARTNLEKAEQYEKKLKPLPGLKGVNVESLEKTSGARHVEGPQDMKVDVPEEVKKQKAKKRKRKPRYPKGFDPANPGPPPDPERWLPRRERSSYRPKRKDKRAQVRGAQGAVSRETSATNVGASSKGSQTTNSSKTPAVNAEQPKTSNKSRKKKSRH

SEQ ID NO: 52146 - protein, 109 aa, Zea Mays
MKDGTSSGGGAFAAGSDPRQPSTAKPYAPPKLSPQDLPIDYAGFLAVAFGVLGVMLRYKVCSWIAIIFCAQSLANMKNFENDLKQLSMAFMGKNQKQDGSQDGSTWDRD

SEQ ID NO: 52147 - protein, 56 aa, Zea Mays
MQQKQIPWRRRQTVLQAKNNSDFWNYCHQLFSCFFAASDGVILHSVVEKLSTISSF

SEQ ID NO: 52148 - protein, 485 aa, Zea Mays
MALQAAYEYLQQAVGHGAWSSTQTLTLLLIAVPTVLLLLASLAKSTSSSGRGKPPLPPSPPGTLPIVGHLHHIFASRPWSMASHILRYNTCDVAFSPLGEYWQQTRKLMNTHLLSNKKVYSFRHGREEEVCLVVDNLREAAAKSPSTAVDMSEVLAAYTNDVVSRSVLGSTHRKKGRNTLFREMTMTNVDLLVGFNLEYYIPRWPLTDLLFRLVCWKVTRHLKRWDALLEEVIHEHVEMRKLSGDKEKESDDFIDIFLSRYEEYGFTMDNVKSLLMNVFEAAIETSYLVLESAMAELMNHRRVMKKLQAEVRAYGAEKKLDMIREDDLSSLPYLKASMKEALRLHPPGPLLLPHYSTADCQIDGYHIPANTRVLVNGWAIGRDPAVWEKPEEFMPERFMRDGWDKSNSYSGQDFRYLPFGSGRRICPGANFALATMEIMLANLMYHFDWEVPNEKEDGGGKVSMDETFGLMLRRNEPLYLVPRAV

SEQ ID NO: 52149 - protein, 960 aa, Zea Mays
MLYGHMSYGRGGDPNGAPQAFQLNPNVPLLTNGQMVDDIPPEQHALVPSFMGGGGKRIHPLPYADPSLPVQPRSMDPSKDLAAYGYGSVAWKERMENWKQRQERMHQTGNDGGGDDGDDADLPLMDEARQQLSRKIPLPSSQINPYRMIIIIRLVVLGFFFHYRVMHPVNDAFALWLISVICEIWFAMSWILDQFPKWFPIERETYLDRLSLRFDKEGQPSQLAPIDFFVSTVDPLKEPPLVTTNTVLSILSVDYPVDKVSCYVSDDGAAMLTFEALSETSEFAKKWVPFCKRYNIEPRAPEWYFQQKIDYLKDKVAANFVRERRAMKREYEEFKVRINALVAKAQKVPEEGWTMQDGTPWPGNNVRDHPGMIQVFLGQSGGLDCEGNELPRLVYVSREKRPGYNHHKKAGAMNALVRVSAVLTNAPYLLNLDCDHYINNSKAIKEAMCFMMDPLLGKKVCYVQFPQRFDGIDRHDRYANRNVVFFDINMKGLDGIQGPIYVGTGCVFRRQALYGYDAPKTKKPPSRTCNCWPKWCFCCCCFGNRKQKKTTKPKTEKKKLLFFKKEENQSPAYALGEIDEAAPGAENEKAGIVNQQKLEKKFGQSSVFVTSTLLENGGTLKSASPASLLKEAIHVISCGYEDKTDWGKEIGWIYGSVTEDILTGFKMHCHGWRSIYCIPKRVAFKGSAPLNLSDRLHQVLRWALGSIEIFFSNHCPLWYGYGGGLKFLERFSYINSIVYPWTSIPLLAYCTLPAICLLTGKFITPELNNVASLWFMSLFICIFATSILEMRWSGVGIDDWWRNEQFWVIGGVSSHLFAVFQGLLKVIAGVDTSFTVTSKGGDDEEFSELYTFKWTTLLIPPTTLLLLNFIGVVAGVSNAINNGYESWGPLFGKLFFAFWVIVHLYPFLKGLVGRQNRTPTIVIVWSILLASIFSLLWVRIDPFLAKDDGPLLEECGLDCN

SEQ ID NO: 52150 - protein, 197 aa, Zea Mays
MDLTNLPICVSSVDPSAFHSAVQAGAKMVEIGNYDSFYEMGIEFSSEQILKLTRETRKMLPDITLSVTVPHTLSLPDQMRLAELLEEEGADIIQTEGGKCSSPTKPGVLGLIEKATPTLAAAYSISRAVSIPVMCSSGLSSVTAPMAVTAGAAGVGVGSAINKLNDVVAMIAEVRSIAQAMELAPRIVSETLRTISY

SEQ ID NO: 52151 - protein, 173 aa, Zea Mays
MLGLDAAGKTTILYRLHMGEVLSTVPTVGFNVEKVQYKNVAFTVWDVGGQEKLRSLWKMYLSNSDALIYVVDSLDRERIRDARQEFQTIIKDPLMANSIILVFANKQDLRGTMSTDEVSEGLGLHDLRNRIWHIQGTCALRGEGLYDGLDWLASTLKQLQESGHATSVAGPSI

SEQ ID NO: 52152 - protein, 143 aa, Zea Mays
MSDDEDNQVDSESNMFDGNEGSDGMGFGPLMLTEGERSLVERVRQELKHELKQGYRDKLVDIREEILRKRRAGKLPGDTASTLKAWWQAHSKWPYPTEEDKARLVQETGLQLKQINNWFINQRKRNWHNNSASSSSDKSKRKR

SEQ ID NO: 52153 - protein, 82 aa, Zea Mays
MGATGDTNVLAQMIDEAEGLEKIENLQSHDNNEIYEKAVKLLETYWMEEEDDAMATAGEAAPAVFDFNQGGNPPAAGGLNFN

SEQ ID NO: 52154 - protein, 391 aa, Zea Mays
MMLRKKLQMWFMIQVQGMGQNLDSSPTAVPLAVTMNKKEHVIDMEKADNFVEDQLHPPQPMALRTEKVTVNPSVRTRRGRVPSVEKVESTTTVKSFSIASLQQYTNSFSEENIIRDSRFGKVYLAKLPDGELLEILKIDSSNSKVPVDAFLELVVRISELRHPNILGLVGYCAEFEQRLLVYEYCSKMTLHDELRHVDDSSKPLSWNARLQVASEAAKALQHLHDGCQPPVVHQNFEPSVVLLNSTLVVHISECGLASLASKSVSQLSGHTLFHYEAPEVHESGSVSDRSDVYSFGVVMLELLTGRKPYDSSYPRAEQHLVRWATSQLYDIDAITKMVDPSIRGQCSDKALSRFADIISRCIQHEPEFRPPMSEVVQDLTRMVSNVSRASM

SEQ ID NO: 52155 - protein, 260 aa, Zea Mays
MQVNNEAPLGCLKPNISQYNSPEQIGGVEGFPENNEKRNDIVAAEKIWEATPNQGLSRPIYRQEFYAWPYIYSDYQIVRQPLPYGFDNQFYQINRDHGFPIENRVQYLPFKMLPQGHPHDAQLQEFQYFVVIDFEATCDKVNNPFPQEIIEFPSVLVNSATGKLEECFQTYVRPTYHQFLTDFCKELTGIQQIQVDRGVPLGEALLMHDKWLEDKGIKNTNFAIVTWSNWDCRIMLESECRFKRIRKPPYFNSFCAREML

SEQ ID NO: 52156 - protein, 197 aa, Zea Mays
MESIQEKFATVGKVVNITINDPESVKEFSTAKKPDFNLSFKVTALSDESNWRTGMKVRLLSKQSVMGPGKYKKPSKENQDAVSKMIDQNQHSKEDQLKTLEKISGADAVGITKDRDNLKPVFITETEHQDQKPNARGRKGWYKGQGQMQQNANKQGSCGSESLNKPISGPRMPDGTRGFTLGRGRSLPLQKSEKAEE

SEQ ID NO: 52157 - protein, 286 aa, Zea Mays
MLEMLRGKRMLFVGDSLNRGQYVSLVCLLHRIIPESSKSMETVDSLTVFKAKDYNATIEFYWAPFLAESNSDDAVVHRIADRIVRGTSIEKHAKFWKGADILVFNTYLWWMTGQKMKILRNSFEDKSKDIIEMETEEAYEMVLNAVLKWVESNMNPRTSRTFFVTMSPTHTRSRDWGDDTDGNCYNQTAPIEDLSYWGPDTSKGLMRVIGEVFSASKSRIPVGVVNITQLSEYRKDAHTQIYKKQWNPLTPEQVADPKSYADCTHWCLPGLQDTWNELLYSKLFFP

SEQ ID NO: 52158 - protein, 1480 aa, Zea Mays
MGKVNFVEIRSFWHIFRSFDRMWIFLILSLQAMIIIAWNGGTPSDIFDAGVFKKVLSIFISAAILKLGQAILDLVFGWKAKRSMSFAVKLRYVLKLISAAAWVVILPVTYAYTWENPTGLARTIKSWLGDGQNQPSLYILAVVIYMAPNILASMLFLFPFMRRILESSNVKVITIMMWWSQPRLFVGRGMHEGAFSLFKYTMFWIILLAMKLIVSFYIEIKPLVQPTKDIMREPIRTFQWHEFFPHGTNNIGVVISLWAPIILVYFMDTQIWYALFSTLIGGIYGAYRRLGEIRTLGMLRSRFESLPEAFNERLIPSDANKSKGLRAAFSSRPKASGDESEREKRAARFAQMWNAIITSFREEDLIDNREKDLLLVPDCKDRELDIFQWPPFLLASKIPIALDMAADSGGKDRDLTKRIKSDPYFSFAIRECYASFKNIINTLVFGQREKDVLVQIFTVVDKHIEEETLITGLNMKNLPALSKKFVELLELLQKNKEEDLGQVVILFQDMLEVVTRDIMEEQDLLETLDSLHGANSRKHEGITPLDQQDQLFAKAIKFPVVESNAWTEKIKRLHLLLTVKESAMDVPINLDARRRISFFANSLFMDMPNAPKVRNMLPFSILTPYYKEDVLFSLQNLEERNEDGVSILFYLQKIYPDEWKNFLERVGCKNEEVLREDEQLEEKLCLWVSYRGQTLTRTVRGMMYYRKALELQAFLDMANNDDLMKGYRAMEVMSEDSPLKTQCKAIADMKFTYVVSCQLYGIQKRSNEPCAHDILRLMTEYPSLRVAYIDEVEAPSKDRIKKIEKVYYSVLVKASVTKPNEPGQSLDQVIYKIKLPGNAILGEGKPENQNHAIIFTRGECLQTIDMNQEHYMEEALKMRNLLQEFEKKHGVRHPSILGVREHIFTGSVSSLAWFMSNQETSFVTIGQRVLANPLRVRFHYGHPDVFDRLFHVTRGGVSKASKIINLSEDIFAGFNSTLREGNVTHHEYMQVGKGRDVGLNQISLFEAKIANGNGEQTLSRDIYRLGHRFDFFRMLSCYYTTIGFYFSTMITVWTVYVFLYGRLYLVLSGLDEALATGKRFVHNTPLQVALASESFVQLGFLMALPMMMEIGLERGFRTALSDFILMQLQLASVFFTFSLGTKTHYYGRTLLHGGAEYRATGRGFVVFHAKFAENYRLYSRSHFVKGLELMILLVVYEIFGQSYRGAITYIFITVSMWFMVGTWLFAPFLFNPSGFEWQKIVDDWTDWHKWISNRGGIGVAPEKSWESWWEKEQEPLRYSGKRGTIVEILLALRFFIYQYGLVYHLNITKKITKDNQSVLVYCFSWVVIFVVLLVMKTVSVGRRRFSAEFQLVFRLIKGLIFITFTAIVVILIAIPGMTVLDIFVCILAFMPTGWGLLLIAQAIRPVIQKIGLWGSIKALARGYEILMGLLLFTPIAFLAWFPFVSEFQTRMLFNQAFSRGLQISRILGGHKKDRGTRSKE

SEQ ID NO: 52159 - protein, 166 aa, Zea Mays
MEIMKPPQSDDPSQKNTMLILKFLPFMIGWFSLSVPSGLSIYWFTNNVLSTAQQVWLRKMGGAKPVVTEGGSGIITAGRAKRSNAQPAGERFRQLKEEENRRKFSKALAAGDSDASSSTYDMDDEESDETIEEGGPVEEASTSSDKKLPNYSGKKGKRSKRKRMVQ

SEQ ID NO: 52160 - protein, 80 aa, Zea Mays
MHCKSSFLVYAWGRGEHGRLGFGDDKSSHMVPLKVELLAGEDIVQVSCGGTHSVALARDGRMFSFYQVLPRISMASPFSV

SEQ ID NO: 52161 - protein, 131 aa, Zea Mays
MCTKPLRKKKKRSLVQLFLNLPTPLRARPPLPAFPFPPSPLPFRHGPARFPLLSPLPPRLRAAAPAEPSPPAQARLPRRAWGSRKSAFGGGCCFEEVQIIQKQCETGLQDRECSHFSCCTCLQLRACCVGD

SEQ ID NO: 52162 - protein, 219 aa, Zea Mays
MKTAERAHLPNKLWERVKLPKNYEKAMEVINKHLEFWPKLLVHKIKQRLTKMTQYRIRMRKLQLKVREKVMTMPRKQTQRDLRRMEKAERAAQLERNIENELKERLNKGVYADIYNVPFKAFDEVLDMERDEVVLEEEEEEEGEVYVEGDDMEEMDDMEDFEGLSDGGTDEDDVLDDPVSKKPKGSSSYSKQNVGKRSRKVMTEVEEDEEINTRQRQRA

SEQ ID NO: 52163 - protein, 95 aa, Zea Mays
MNRERGFYVQISHGVFMIMYFLLGFNPFVTQMDVTCFDKIERVRTHTTINLYSKTNILSSLARLSTIYHNPLYSYVLYISPLYQISYIIYFFFTS

SEQ ID NO: 52164 - protein, 75 aa, Zea Mays
MAAENYWRYADARQQQQAMAAAAPPLKRARPDFGDVSGGQDMTGYYPRETDRSGYHSLWENDTLGASYDRYLRNG

SEQ ID NO: 52165 - protein, 183 aa, Zea Mays
MLSSYAPVISAEKAYHEQLSVPEITNAVFEPSSMMAKCDPRHGKYMACCLMYRGDVVPKDVNAAVATIKTKRTVQFVDWCPTGFKCGINYQPPSVVPGGDLAKVQRAVCMISNNTAVAEVFSRIDHKFDLMYAKRAFVHWYVGEGMEEGEFSEAREDLAALEKDYEEVGAEGADDEGDEGDDY

SEQ ID NO: 52166 - protein, 103 aa, Zea Mays
MHKDPSFWRENINNFEENDFQILRVLMTIIDTSSDTTALAVACYDLSQFLQYHPSGRIVVADLKAKDRVMKLMNHENTEVRKNALICVQRLFLGAKYASFLQA

SEQ ID NO: 52167 - protein, 120 aa, Zea Mays
MRRDELTRFQKQVEEQYLSNVERQLERIQNARNARKANGHANMQEMDKELDTHRAEHGPKTRRVPEEGGNDDDEDAEDMAAEDEVMDEVLGINDGINEDPSKPSEEATTEGGEPAPEEAQ

SEQ ID NO: 52168 - protein, 61 aa, Zea Mays
MGLGRKSDLPLVNYCFCLSWKSYRRDCEVLFACKIIRPNNNSTTFSHQFSVCICGCEVAVT

SEQ ID NO: 52169 - protein, 166 aa, Zea Mays
MMMACALAVAQPAASLAPPSGKRTLSGGRPPRLPPPRLSGKLALATPCCARGAGKLIRSRAVVAKAAQDGSESSGTGSIVKYVTSSFSTAEDIFALAGIGFAAVAALWASVNLIEIIDKLPVLPLLFELVGILVAWLFIYNNLLFKPKRKEFLENIKSSGSRILGQ

SEQ ID NO: 52170 - protein, 651 aa, Zea Mays
MVGNVPLGSDHPIRIQTMTTSDTKDVAKTVEEVMRIADKGADLVRITVQGRKEADACFEIKNTLVQKNYNIPLVADIHFAPTVALRVAECFDKIRVNPGNFADRRAQFEKLEYTDDDYQKELEHIEKVFSPLVEKCKQYGRAMRIGTNHGSLSDRIMSYYGDSPRGMVESALEFARICRKLDFHNFVFSMKASNPVIMVQAYRLLVAEMYNLGWDYPLHLGVTEAGEGEDGRMKSAIGIGTLLMDGLGDTIRVSLTEPPEEEIDPCQRLANLGTQAANLQIGVAPFEEKHRRYFDFQRRSGQLPLQKEGEEVDYRNVLHRDGSVLMSVSLDQLKAPDLLYRSLAAKLVVGMPFKDLATVDSILLRELPPVEDAEARLALKRLVDISMGVLAPLSEQLTKPLPHAIVLVNLDELSSGAHKLLPEGTRLAVTLRGDESYEQLDILKDVDDITMLLHNVPYGEEKTGRVHAARRLFEYLQANGLNFPVIHHINFPETIDRDGLVIGAGANVGALLVDGLGDGVFLEAADQEFEFLRDTSFNLLQGCRMRNTKTEYVSCPSCGRTLFDLQEISAEIREKTSHLPGVSIAIMGCIVNGPGEMADADFGYVGGAPGKIDLYVGKTVVQRAIAMEGATDALIQLIKDHGRWVDPPAEE

SEQ ID NO: 52171 - protein, 263 aa, Zea Mays
MLRVELPMIREACLRVLVLSTVFLKEAAAFGLCLSEIGDMMSRQFTAKEEEPSQLELLCMETRKWVEERELFLPDEAGVEDGDDDFTQFPLDSDAFEPPAFCKFGSVKTSSRNPLSKLDECDEEDGDLSEEEGEHGDVLTSGALPQKVPPISKLSSSMKGLGFIGKSKPYRTGGVPKGKVTGRTNYSGKASEHQSGSRSANELLPPSASFVKLSDMSRKEWSAFLEKFQELLPSALRTRKHSAGVGQRPMPRLGTCSSQQVLL

SEQ ID NO: 52172 - protein, 275 aa, Zea Mays
MAAVVALAPASPALLPVPFRGRRDGRVALSPRRTRCSAGRCRATAQTFQGGAAASYAREMERLSAKESLLLAFKDAGGFEALVSGKTTEMQRIDVNERIVGLERLNPTPRPTTSPFLEGRWNFEWFGDSSPGAFAARLLFERSPTAVAHFMGLDVLIKDGYSKLSSNLKFVNTIQSKFLLTTQLSVEGPIRMKEEYVEGLIEIPRINEESLPEQLKGLLGQTAGALQQLPSPIRDAVSEGLKLPLSGSFQRLFMISYLDEEILLIELKPDDQLNQ

SEQ ID NO: 52173 - protein, 96 aa, Zea Mays
MISVLRVGSLCTMAWSIASRSNFRILCCTVPLWTSCGPVGSLQTHCDPGPRGQNQTVQRLLLGPSNIDCILVPAIRSCYCLSHGYRRTFQPLFICI

SEQ ID NO: 52174 - protein, 194 aa, Zea Mays
MERLVLACGGEAVNSVDELTEDCLGWAGLVYEHVLGEEKYTFVENVKNPRSCTILIKGPNDHTIAQIKDAVRDGLRSVKNTVEDEAVVLGAGAFEVAAKKHLIDNVKKTVKGRAQLGVEAFAEALLVIPKTLAENSGLDTQDVIVSLQNEHDRGLVVGLNHHSGDPIDPQMEGIFDNYSVKRQIINSGCCLWMK

SEQ ID NO: 52175 - protein, 218 aa, Zea Mays
MGAYKYVSELWRRKQSDVMRFVQRVRCWEYRQQPAIVRLTRPTRPDKARRLGFKAKQGYVVYRVRVRRGGRKRPVPKGIVYGKPKHQGITQLKFQRNKRSVAEERAGRKLGGLRVLNSYWVNEDSTYKYFEIILVDVAHTAIRNDPRINWLCNPVHKHRELRGLTSAGKKFRGLRGKGHTHHKNRPSRRATWKRNQTLSLQGWTKAWWTQGSQLLLGE

SEQ ID NO: 52176 - protein, 324 aa, Zea Mays
MVNCALARIHRHNQLQGWTRQKIFHFMIGLSNIVFLVYFVSTIIATCQRWICWVHGCGFVLMASPQILLLASFLLLLSFWVDLCHQTNDEDEEDGRSQSHHEALLDRTKAKPGIHPVNIRQRCCPGIQLGSRQKFVILVLLLSFVVMLAFAILIWVGRGDNPIDSSLLKRVYLDVFSVVVIVLGGALACYGAVLFSKMSKVRSETVSTEKWKVASLAAVSLICFSSSAILALVTNVPVLLYWYSTDVDIINNAVILFIYYFIGSSVPSGFVLWIMREMPHRQVVERSVESRVVTLFRERPSTTQDPQWRTAVTSSNKALKSSPI

SEQ ID NO: 52177 - protein, 126 aa, Zea Mays
MVRNAKKAEAEIAALKISYLKKIGKGSNVIIMDSYSDVAKTVAKTLDSVGFKNCWVMAGGFSGRKGWAQSRLGTDSYNLSVVEVVTPSRVIPAVAGRRTGTTAARIGTASSASRATTRKLLPGGVD

SEQ ID NO: 52178 - protein, 58 aa, Zea Mays
MMRGVGGPLLTIGDLLSDLAVDDPLVGVGDASVPSSPSAAQQAGKANPSDLSRLFEFL

SEQ ID NO: 52179 - protein, 142 aa, Zea Mays
MASEKKQSNPMREIKVQKLVLNISVGESGDRLTRAAKVLEQLSGQSPVFSKARYTVRSFGIRRNEKIACYVTVRGEKAMQLLESGLKVKEYELLRRNFSDTGCFGFGIQEHIDLGIKSCLVCLLSCELMTNMPFYQFNLSHG

SEQ ID NO: 52180 - protein, 86 aa, Zea Mays
MTLSGFCLYRYAITKAFVVAFVMTFFSVFDVPVFWPILLCYWVVLFVLTMKRQIVHMIKYKYVPFSIGKQKYGVKKSVASTSSSKD

SEQ ID NO: 52181 - protein, 51 aa, Zea Mays
MTVSSVCISILSMLSSSPAKQRPADNDRYVRNCRNGRSPKETRWWFHDDTV

SEQ ID NO: 52182 - protein, 62 aa, Zea Mays
MVLLSPRLASAKQQWMIPPPPPPRFYWRLQRVEAFESDMFVSFPSFPPCDYLVCVTDEVVAI

SEQ ID NO: 52183 - protein, 667 aa, Zea Mays
MGIFAVLIFLFLGSVESFSTKSQPCHYSKGKTCKPALANAIFSTIAFVLGAVTSLVSGFLGMKIATYANARTTLEARKGVGKAFITAFRSGAVMGFLLAASGLFVLYIAINLFGIYYGDDWEGLYEAITGYGLGGSSMALFGRVGGGIYTKAADVGADLVGKVERNIPEDDPRNPAVIADNVGDNVGDIAGMGSDLFGSYAESSCAALVVASISSFGINHEFTPMLYPLLISSVGIIACLITTLFATDFFEIKAVDEIEPALKKQLIISTAVMTVGIALVSWLGLPYTFTIFNFGVQKTVYNWQLFLCVAVGLWAGLVIGFVTEYYTSNAYSPVQDVADSCRTGAATNVIFGLALGYKSVIIPIFAIAFSIFLSFSLAAMYGVAVAALGMLSTIATGLAIDAYGPISDNAGGIAEMAGMSHRIRERTDALDAAGNTTAAIGKGFAIGSAALVSLALFGAFVSRAEISTVDVLTPKVFIGLIVGAMLPYWFSAMTMKSVGSAALKMVEEVRRQFNTIPGLMEGITKPDYATCVKISTDASIKEMIPPGALVMLTPLIVGIFFGVETLSGVLAGALVSGVQIAISASNTGGAWDNAKKYIEAGASEHARTLGPKGSDPHKAAVIGDTIGDPLKDTSGPSLNILIKLMAVESLVFAPFFATHGGILFKWL

SEQ ID NO: 52184 - protein, 74 aa, Zea Mays
MMMPSFACVETRSLSKTMWFLYICSQFWPLACHWTLKLCLKPVHTSFAVTTSYLMQQKHLLISAVEFSANNSCF

SEQ ID NO: 52185 - protein, 70 aa, Zea Mays
MTAFVQNLLMQMQTRFQAMSENIISKIDEMGARIDELEQSLNDLKAEIGGEGMSTPSKMKEESRPSDSSA

SEQ ID NO: 52186 - protein, 182 aa, Zea Mays
MDTAATELECFQELQKQEHLAASYRIQNLSEEVSKQKALERTLQSRYGELVSGFQRIQEQVEEHKRQLKVQEAVEAESHAQEEEAAASNHAAAEEEDERKEDDERKEEDGRKSLSSEEKPQQTSTATDEEPAGSKGTTEDQMDVDSGNGEGGVVGPVPPAPDTEGGNDEVSVQEISEAQPLP

SEQ ID NO: 52187 - protein, 275 aa, Zea Mays
MAAQQKIRWGELEEDDGGDLDFLLPPRVVVGPDENGLKKVIEYRFDDDGNKVRVTTTTRVRKLARARLSRSAIERRQWPKFGDALKEDAGSRLTMVSTEEILLERPRAPGSKAEESAASGDPLAMASKGGAVLMVCRTCGKKGDHWTSKCPYKDLAPPTETFTDRPPTSDGPPAPGGPAKGAYVPPTMRGGADRTGDSMRRRNDENSVRVTNLSEDTREPDLLELFRAFGPVSRVYVAVDQKTGSSRGFGFVNFVHREDAEKAINKLNGRASHCG

SEQ ID NO: 52188 - protein, 107 aa, Zea Mays
MQPNKVDKSNTQDSIYGANFSCKISPWLATGCLSPRFMYEELKKHATKAIPFGSTPKNNDGTSDAGTNWLMFELLWRDFFRFITKKYSSVQKTSEVATGCTPAPALA

SEQ ID NO: 52189 - protein, 82 aa, Zea Mays
MGGETPKPQKPDLPLLFRRETQTPWLVCQQNRAHLLGAMVHQFASHVPQKIQQVKQLQRADKHPSKCRGGDQHKACCIGGVD

SEQ ID NO: 52190 - protein, 427 aa, Zea Mays
MAMALRRLAGVSGSPSASSAAATVLLRSALTRPISTGFREERDTFGPIQVPNDKLWGAQTQRSLQNFDIGGERERMPVPIIRAFGVLKKCAAKVNMDYGLDPTIGKAIIQAAEEVAEGKLDDHFPLVIWQTGSGTQSNMNANEVIANRASEILGHKRGEKFVHPNDHVNRSQSSNDTFPTVMHIATAVEIHSRFIPSLQQLHDSLHSKTIEFKDIIKIGRTHTQDATPLTLGQEFSGYTTQVKYGIDRINCTLPRMYQLAQGGTAVGTGLNTKKGFDAKIAAAVAEETNLPFVTAENKFEALVMGNHVGVTIGGANGHFELNVFKPMIAAGLLRSLRLLGDASVSFEKNCVRGIQANHKRISQLLHESLMLVTSLNPKIGYDNAAAVAKKAHKEGTTLKEAALDLGVLTEQEFHELVVPEKMIGPSD

SEQ ID NO: 52191 - protein, 377 aa, Zea Mays
MGKHVWAAALMALAVIVGLGVPPGRIAEARTLEKDDLLGGGGDFGAGEGGGFGGGAGGGLGGGFGGGGGLGGGGGAGGGFGGGAGHGGGLGGGFGGGKGGGAGGGGGLGGGVGGGGGLGTGGGGGFGGGKGGGLGGGGGLGSGGGAGVGGGLGGGAGGGGDLGGGKGGGLGGGGGLGGGGGLGGGAGGGGGLGAGGGGGFGGGKGGGLGGGGGLGGGGGAGEGGGLGVGAGGGGGLGGGAGGGFGGGAGGGVGGGGGLGDGAGGGAGAGSGLGGGVGGGAGGGAGGGAGAGGGLGGGAGSGVGGGFGGGKGGGFGGGIGGGGGAGGGAGGGFGGGKGGGFGGAGGGFGGGKGGGFGGGAGGGFGGGGGSGGGIGGGL

SEQ ID NO: 52192 - protein, 59 aa, Zea Mays
MSDEEKAKYGGSKKQDGKASKKENTSSKKAKADVREGDEAEGSNKSKSEVEDDEQDGRG

SEQ ID NO: 52193 - protein, 160 aa, Zea Mays
MFLTRTEYDRGVNTFSPEGRLFQVEYAIEAIKLGSTAIGLKTKDGVVLAVEKRVTSPLLEPSSVEKIMEIDEHIGCAMSGLIADARTLVEHARVETQNHRFSYGEPMTVESSTQAICDLALRFGEGDEESMSRPFGVSLLIAGHDENGPSLCFSLLNGML

SEQ ID NO: 52194 - protein, 713 aa, Zea Mays
MVLVQQIVSFHMKHNAEPEAVDLLMEVEDLDLLVEHVDATNYKRACLYLTSSSKFLPAPDDSLALDIAYTIYMKFGDLASALRISLQLEKSVQYVKQVYTATDDLLLKKQFSYLIARHGLAMEIDDEISTDDNDKEALQEIVNNTKLSEGYLTLARDIEVMEPKSPEDIYKVHLIDGRGASSSLDSARQNLAATFVNAFVNAGFGKDKLMTAPSDSPSSGSSGNWLFKNKEHGKASAAASLGMILLWDTDSGLAQLDKYLHSNDTHVVAGALLGIGIVTCGVKSDCDPAFAILMEYIGKDDSNIRIGAILGLGIAYAGSQKEELKMHLSAVLGDSQSPLEVLVFSAIALGLVFVGSCNEEIAQSIIFALMERSEAELAEPIIRLLPVALGLLYLGKQDSVEATAEVSKTFDEKIGKYCDVTLMSLAYAGTGNVLKVQKLLGICSQHLEKGETHQGPAVLGIALIAMAEELGAEMAVRSLERLLQYGEQNIRRAVPLALGILCISNPKVNVMDTLSRLSHDADADVSMAAIISLGLIGAGTNNARIAAMLRNLSSYYYKEAAHLFCVRIAQGLVHLGKGLLTLSPYHSDRFLLSPMALGGLVTVLHACLDMKSTILGKYHYILYIIVLAMQPRMLLTVDEDLKPLSVPVRVGQAVDVVGQAGRPKTITGFQTHSTPVLLAAGERAELATEKYIPLTPVLEGFVILKKNPEYHEE

SEQ ID NO: 52195 - protein, 203 aa, Zea Mays
MTQEERYESLRHCKWVDEVIPDAPWVLTQEFIDKHQIDYVAHDALPYADTSGTANDVYEFVKKIGKFKETKRTDGVSTSDLIMRILKDYNQYVMRNLARGYSRKDLGVSYVKEKQLQVNMKINKLRETVKAHQEKLQTVAKTAGLNHEEWLANADRWVAGFLEKFEQHCHNMETAIKDRIQERLGKQLSKGIIAGLVQEPVTA

SEQ ID NO: 52196 - protein, 430 aa, Zea Mays
MGGAVEPLDPGAVGSVVRYGLQNYTSGIIHHVRLQGLEPGTRYLYRCGDPAIPDAMSDVHAFRTMPAVGPGSYPGRIAVVGDLGLTYNTTSTVDHLVRNRPDLVLLLGDVCYANLYLTNGTGADCYSCAFAKSTPIHETYQPRWDYWGRYMEPVTSSIPMMVVEGNHEIEQQIHNRTFAAYSSRFAFPSEESGSSSPFYYSFDAGGIHFVMLASYADYSRSGAQYKWLEADLEKVDRSVTPWLIAGWHAPWYTTYKAHYREAECMRVEMEELLYAYGVDVVFTGHVHAYERSNRVFNYTLDACGPVHISVGDGGNREKMATAHADEAGHCPDPASTPDPFMGGRLCAANFTSGPAAGRFCWDRQPEYSAYRESSFGHGVLEVRNDTHALWRWHRNQDLHAAAAANVAADEVYIVREPDKCLAKTARLLAY

SEQ ID NO: 52197 - protein, 481 aa, Zea Mays
MSGPKILTEEGLGVNYRALNDLFGIQEQRKDTICYEIAVQMMEIYNEQVRDLLQTGGNKKLEIRNNSQNGIAVPDANVVPVRSTADVIDLMNLGQKNRTVCSTAMNDRSSRSHSCLTVHVQGRDLTSGTVLRGCMHLVDLAGSERVDKSEVVGIGLKEAQHINKSLAALGDVIAALAQKSTHVPYRNSKLTQLLQDSLGNPQSSKSLVCNLPAPKICAVSILFPLFSGGQAKTLMFIHIAPEPDAISESISTLKFAERVSTIELGAAKSSKEGGGGGGGEARELKEQIACLRAALARKDGDHESIRSTQSSPDIYRMGTGNASPASRHPIEDGIIENDSALGDLAEHSQFGSSNSLPELGPDATQDLAFYQRSNSEQQWSWSGSVATEDSDDFEVATNCSLELDCVRPSSAPKASGLSNGGGTAVKKIQVKGSKGSDVRGVNPGKRSSPLQKKPSGPSPTLIKKGGGEGRKTPNGKTGTKK

SEQ ID NO: 52198 - protein, 295 aa, Zea Mays
MDASTEVTDAIGAVGFDNGAAGKLPPSDSVEGHAEEHDVLADGAHSGESEVINPSEEVEMEATSQSQDIKPRVPEGVQGHSMKVGTKSQRQSPRGGDKSQTRKSSFSPSYPKAPIARVSDPDLVDCSLSNGDAGSSKKKAEKSSFRPVAKETPSLEDSNEKKKTQKASNQHSVKKDIEEESNESVKPQRVGSTPSYGFSFKCDERAEKRREFYSKLEEKIHAQELEKSNLQAKSKETEEAELKMLRKSLNFKATPMPSFYKEPPPPKVELKKCGAPAANLQTHRAHTPQPWCRQP

SEQ ID NO: 52199 - protein, 215 aa, Zea Mays
MKASSKVKKEVSSDDDFVMPTAQKKSAGAAGSNAKTSKVKKIKDEDLEDLKEDKKRKKRVGVKEEAKLALAIVKGEKVKKERKVYGLPGQKHDPPEERDPLRIFYESLYEQVPTSDMAATWLMEWGLLPVDVARKCFEKKQGQKVKSPVKAIVAKRIPSSPAKTLPSSAKKLVMPSNSAGKLKSQKKRKASDDTDDDDDDDDFVASKAKTKRHKA

SEQ ID NO: 52200 - protein, 292 aa, Zea Mays
MTTLTIMRTLPREVDPVVYNMLHEDPGNVSYSAVGGLSDQIRELRESIELPLMNPELFLRVGIKPPKGVLLYGPPGTGKTLLARAIASNIDANFLKIVSSAIIDKYIGESARLIREMFGYARDHQPCIIFMDEIDAIGGRRFSEGTSADREIQRTLMELLNQLDGFDELGKVKMIMATNRPDVLDPALLRPGRLDRKIEIPLPNEQSRMEVLKIHAAGIAKHGEIDYEAVVKLAEGFNGADLRNVCTEAGMAAIRAERDYVVHEDFMKAVRKLNDAKKLESSAHYSADFGKE

SEQ ID NO: 52201 - protein, 89 aa, Zea Mays
MRTIDASIAYLLSLSTSSTTFFFSSTGGRNTLILLILSVNFELNSKTSLGEMDLFAGSLLRILYFAQESEWSKRTTSSSDRFNCVAISE

SEQ ID NO: 52202 - protein, 78 aa, Zea Mays
MVFSALALSQCEVIWYFQHVGIASSKSTRLKTVDIDAIDPTIGFLLDGIGKLCCLVRKYIAAIKGYALSYLLSSAGRI

SEQ ID NO: 52203 - protein, 310 aa, Zea Mays
MCGARRPTWRAGFSTNHSSIQSLSRLSSPRFPSPPAVSLTPRARALSFLAFAAGDELELELVPRIEDDGRGMEPMNVDNGGSGGLDAQIEQLMQCRPLAEQEVKALCEKAKEILMEESNVQPVKSPVTICGDIHGQFHDLVELFRIGGKCPDTNYLFMGDYVDRGYYSVETVTMLVALKVRYPHRITILRGNHESRQITQVYGFYDECLRKYGNANVWKTFTDLFDYFPLTALVESEIFCLHGGLSPSIENLDSVRSLDRVQEVPHEGPMCDLLWSDPDDRCGWGISPRGAGYTFGTYQSSLITQTISNS

SEQ ID NO: 52204 - protein, 87 aa, Zea Mays
MSGAIRVHDDMLLAASEALAQQVTEENFEKGLIYPPFSNIRKISAHIAASVAAKAYELGLASRRPRPKDLVKYAESCMYSPIYRNYR

SEQ ID NO: 52205 - protein, 76 aa, Zea Mays
MGSTIREAVLCNLGDPPPLPFPEGSHGEAEPHTDHRHRLVRPSCFHILAAVGEDRPLHIPYPEGSFPWAVWCKLLK

SEQ ID NO: 52206 - protein, 429 aa, Zea Mays
MEMAESLIKQGKAYIDDTPKEQMRKERMDGIESRCRNNTVEENLSLWKEMVNGTERGMQCCVRGKLDMQDPNKSLRDPVYYRCNTDPHHRVGSKYKVYPTYDFACPFVDALEGVTHALRSSEYHDRNAQYYRILQDMGLRRVEIYEFSRLNMVYTLLSKRKLLWFVQNKKVEDWTDPRFPTVQGIVRRGLKVDALIQFILQQGASKNLNLMEWDKLWTINKKIIDPVCARHTAVLKDQRVIFTLTNGPEEPFVRILPRHKKFEGAGKKATTFANRIWLDYADAAAISKGEEVTLMDWGNAIVKEIKVESGVITELVGELHLEGSVKTTKLKITWLADIEELVPLSLVEFDYLISKKKLEEDEDFLDNLNPCTRREIPALGDANMRNIKRGEVIQLERKGYYRCDAPFIRSSKPVVLFAIPDGRQQASLS

SEQ ID NO: 52207 - protein, 148 aa, Zea Mays
MGAEPKQLAFSAALGVTIGIFPICGTTVILGAVVVAMLGSRCNAVTLMVLNLAATPIELSLIVPFLRLGEAVTGSGHFPLTADALKNVLTGHASKDVLMSIVHAMLGWLIAAPIVLVVLYAVSFPCFKVLVNRFGGIPSSPRTPIKAV

SEQ ID NO: 52208 - protein, 122 aa, Zea Mays
MDSLRGVKLPGVPKGGSALVKVALLGGAGLYAVLNSFYNVEGGHRAIVFNRLEGIKDKGEAKSAELIGQAIANNPAFLALRQIEAAREISHTMAASSNKVFLDSRDLLLGLQQLNVGGKQKK

SEQ ID NO: 52209 - protein, 53 aa, Zea Mays
MGMNYTRSSTLTQRVNETNSNPVIIGAPHGPYDSSLVGHVATRMVSVGGCCRN

SEQ ID NO: 52210 - protein, 140 aa, Zea Mays
MVHPLDDIEHKKDAEQENCPFWWARSPENILQQDTYLALATVFVILRLLYRIFPKIDSFTRWAWRRHNMFAKLMGAHEYFLTYLEQARQKFHRLYPSSSKRGNLQEGAMNATAWASKSLASVSIGEPSAIGRTNSTSELR

SEQ ID NO: 52211 - protein, 566 aa, Zea Mays
MGNCCVTRPFSGKRRGGSRGGAGGNRCGRLGGANVRSCSTLSSISDAARTAATQAWSPLTVLGKGLAAEASAEELLRRYQLGEELGRGEFGVTRRCTDTSTGEVLACKSISKRKLRSSVDIEDVRREVAIMRSLPEHPNVVRLREAFEDADTVHLVMEVCEGGELFDRIVSRGHYTERAAACVMRTIMEVVLHCHKHGVIHRDLKPENFLYANTSENSALKVIDFGLSVCFKPGDRFSEIVGSPYYMAPEVLKRNYGQEIDIWSAGVILYILLCGVPPFWAETDEGIAQAIIRSNIDFRREPWSKVSENAKDLVRKMLDPSPYCRLTAQQVLEHPWIQNASAAPNIPLGEAVRSRLKQFTVMNKFKKKALLVVAEYLPAEELEAIRELFQLLDTNKDGHLTIEELRKGMRLIGHNVHDTDVDMLMEAADIDGNGTLDCKEFVTVSIHLKKIRSEDHLPKVFSYFDKNGSGYIEIEELKEALSPRGDQKAIEDIILDVDIDRDGKISYEEFELMMKAGVDWRNTSRQYSRAVYNTLSRKMFKDASLKLGSNNGPLAAAAVKEQQDVD

SEQ ID NO: 52212 - protein, 330 aa, Zea Mays
MDENYVFGCFSNTGEVQNVKLIRDKNSGQLQGYGFVEFTSRAAAERVLQTYNGQMMPNVDLTFRLNWASAGEKRDDTPEYTIFVGDLAADVTDYLLQETFRVHYPSVKGAKVVTDKLTMRTKGYGFVKFGDPTEQARAMTEMNGMPCSSRPMRIGPAASRKNTGGVVQERVPNSQGAQSENDPNNTTIFVGGLDPNVTEDTLKQVFSPYGEVVHVKIPVGKRCGFVQFVTRPSAEQALLMLQGALIGAQNVRLSWGRSLSNKQAQPQQESNQWGAAAGAGGYYGGYGQGYEAYGSGYAQPQDPNMYGYGAYGGYPNYQQQPAAQQQQQQQ

SEQ ID NO: 52213 - protein, 115 aa, Zea Mays
MSSMMNALSNWLVNPRRNPLARLHMHTVSSRLRKYGLRYDDLYDPYFDLDIKEALGRLPREVVDARIQRLKRAMDLSMKHQYLPEDLQAQQVPFRGYLSDMLALLKLLISTRDGN

SEQ ID NO: 52214 - protein, 140 aa, Zea Mays
MDPNGRENDPPEIDPRAEDKELKYQLLKKYSGYLSSLRQEFSKKKKKGKLPKEARQKLLHWWELHYKWPYPSETEKIALAESTGLDQKQINNWFINQRKRHWKPSEDMPFVMMEGFHPQNAAALYMDGPFMADGMYRLGS

SEQ ID NO: 52215 - protein, 140 aa, Zea Mays
MLLTMRHSTRVRDEEGYPAFALVNKVTGEALKHSTGQGHPVKLVPYNPDYQDESVLWTESRDVGNGFRCVRMVNNIYLNFDAFHGDKAHGGVHDGTEIVLWKWCEGDNQRWKILPWCKNERKKLLAGTLIIILLAAAIPK

SEQ ID NO: 52216 - protein, 174 aa, Zea Mays
MAGLISLRAGPRSSPSLARSSSAWASPPASHVAVRLPSPLFRCAKLRRSRSLLAAALEISKDGSAAVLANSLPSQGAIETLRNADAVCFDVDSTVILDEGIDELADFCGAGKAVAEWTAKAMTGTVPFEEALAARLSLIKPSLSQVEECLEKRPPRTLFWFAGFLLEWLIWLRS

SEQ ID NO: 52217 - protein, 123 aa, Zea Mays
MKQSETRKSSEEATPKVVAFSPLEAAIAKPRSSPLTSESSKVRRSEIATQVTFYMIPALLLASKNSISTSLLVGAVFHQVYMFHKEILLDYVHHDITRKWALIYFKLLLLVMAKDTIMYFNLF

SEQ ID NO: 52218 - protein, 287 aa, Zea Mays
MKKQELAKRYSKRDDATKDLTEAVEVGDKDAIEKLSKRTVKVTRQHNEDCKRLLRLMGVPVVEAPSEAEAECAALCINDKVFAVASEDMDSLTFGAPRFLRHLMDPSSKKIPVMEFDVAKVLEELELTMDQFIDLCILCGCDYCDSIKGIGGQTALKLIRQHGSIESILENLNKDRYQIPEDWPYQEARRLFKEPNVTLDIPELKWTAPDEEGLISFLVKDNGFNEDRVTKAIEKIKSAKNKSSQGRLESFFKPTATTSAPLKRKETSDKTSKAAANKKTKAGGKKK

SEQ ID NO: 52219 - protein, 879 aa, Zea Mays
MYKAANARLLLRSLSPNSAALASVNPGRAASSARLALSLPCGAWVGRSGLVRRAAAFSGTRPRFAGARAQIGAAVPAVEQFQRRMATQATVHAFKDILTSLPKPGGGEYGKFYSLPALNDPRIDKLPYSVRILLESAIRNCDNFQVTKNDVEKIIDWENTSPKLAEIPFKPARVLLQDFTGVPAVVDLAAMRDAMAKLGSDANKINPLVPVDLVIDHSVQVDVARSQNAVQANMELEFSRNKERFGFLKWGSSAFQNMLVVPPGSGIVHQVNLEYLGRVVFNTDGILYPDSVVGTDSHTTMIDGLGVAGWGVGGIEAEATMLGQPMSMVLPGVVGFKLTGKLRSGVTATDLVLTVTQMLRKHGVVGKFVEFYGEGMGKLSLADRATIANMSPEYGATMGFFPVDHVTLDYLKLTGRSDETVSMIEAYLRANKMFVDYNEPPTERIYSSYLELNLDEVEPSMSGPKRPHDRVPLKEMKSDWHACLDNKVGFKGFAVPKEQQDKVVKFDFHGQPAEMKHGSVVIAAITSCTNTSNPSVMLGAGLVAKKACELGLEVKPWVKTSLAPGSGVVTKYLLQSGLQEYLNQQGFHIVGYGCTTCIGNSGDLDESVSTAITENDVVAAAVLSGNRNFEGRVHPLTRANYLASPPLVVAYALAGTVDIDFEKEPIGFGKDGKEVYFRDIWPSTEEIAQVVQSSVLPDMFKGTYEAITKGNPMWNQLTVPEASLYSWDSKSTYIHEPPYFKDMTMSPPGPSTVKDAYCLLNFGDSITTDHISPAGSIHKDSPAAKYLMERGVDRKDFNSYGSRRGNDEVMARGTFANIRIVNKFLNGEVGPKTIHVPTGEKLSVFDAAMRYKSEGHATIILAGAEYGSGSSRDWAAKGS

SEQ ID NO: 52220 - protein, 113 aa, Zea Mays
MESASTTVPSIVVYVTVPNREAGKKLSQSIISEKLAACVNIVPGIESVYWWEGKVQSDAEELLIIKTRESLLDALTAHVKANHEYDVPEVIALPITGGNTKYLEWIKNSTRDK

SEQ ID NO: 52221 - protein, 146 aa, Zea Mays
MAAPLRRSLPSLGRALLTPAPARMLSAEASDALVEIKPGEIGMVSGIPEEHLRRKVLIYSPARTASQQGSGKVGRWKINFLSTQKWENPLMGWTSTGDPYANVGEAGLTFDSAESAKAFAEKHGWNYVVRKRHAPLLRFSRGACIL

SEQ ID NO: 52222 - protein, 434 aa, Zea Mays
MADEKLAKLREATAGLTQISENEKSGFLSLVGRYLSGDEEHIEWAKIHTPTDEVVVPYDTLESPPEGTEATKKLLDKLAVLKLNGGLGTTMGCTGPKSVIEVRNGFTFLDLIVIQIESLNKKYGSNVPLLLMNSFNTHDDTLKIVEKYTNSSIEIHTFNQSQYPRVVADEFLPWPSKGKTDKDGWYPPGHGDIFPSLMNSGKLDLLLSQGKEYVFIANSDNLGAIVDMKILNHLIHKQNEYCMEVTPKTLADVKGGTLISYEGRVQLLEIAQVPDAHVNEFKSIEKFKIFNTNNLWVNLKAIKRLVEADALKMEIIPNPKEVDGVKVLQLETAAGAAIRFFDHAIGINVPRSRFLPVKATSDLQLVQVGSFLGRFKSIPSIVELDSLKVSGDVWFGSGIVLKGKVTITAKPGVKLEIPDGAVIGNKDISGPEDL

SEQ ID NO: 52223 - protein, 199 aa, Zea Mays
MGLHLLDLKIRGHHLGSSPATTVVGQGEGGKGSGNGNAVQLEDVIVQDTPTKMNSNSLAMSAPAAAVSAAADAGGEHEEQQEAGHGEEGDGSPKQAVNLGEDEKTESGPVTAPPIVARGFQESGGVAVEHILPDSPFASTTNKEASAPTAQNGGISNGSPHHVASSPLFPPAPAIELPPYNSCFFQAPRFSPGHEAIGL

SEQ ID NO: 52224 - protein, 738 aa, Zea Mays
MATGVAPAPLPHVRVHHGGVGFTRSVDFAKVLSAPGAGTMRASSSRGRALVAKSSSTGSETMELEPSSEGSPLLVPRQKYCESTHQTRRRKTRTVMVGNVPLGSDHPIRIQTMTTSDTKDVAKTVEEVMRIADKGADLVRITVQGRKEADACFEIKNTLVQKNYNIPLVADIHFAPTVALRVAECFDKIRVNPGNFADRRAQFEKLEYTDDDYQKELEHIEKVFSPLVEKCKQYGRAMRIGTNHGSLSDRIMSYYGDSPRGMVESALEFARICRKLDFHNFVFSMKASNPVIMVQAYRLLVAEMYNLGWDYPLHLGVTEAGEGEDGRMKSAIGIGTLLMDGLGDTIRVSLTEPPEEEIDPCQRLANLGTQAANLQIGVAPFEEKHRRYFDFQRRSGQLPLQKEGEEVDYRNVLHRDGSVLMSVSLDQLKAPDLLYRSLAAKLVVGMPFKDLATVDSILLRELPPVEDAEARLALKRLVDISMGVLAPLSEQLTKPLPHAIVLVNLDELSSGAHKLLPEGTRLAVTLRGDESYEQLDILKDVDDITMLLHNVPYGEEKTGRVHAARRLFEYLQANGLNFPVIHHINFPETIDRDGLVIGAGANVGALLVDGLGDGVFLEAADQEFEFLRDTSFNLLQGCRMRNTKTEYVSCPSCGRTLFDLQEISAEIREKTSHLPGVSIAIMGCIVNGPGEMADADFGYVGGAPGKIDLYVGKASGILRSQCVTVANLPKATNNLAWS

SEQ ID NO: 52225 - protein, 142 aa, Zea Mays
MSSAPSTTASTIAASIHTPFSSGPRGARLPAALRLSLAQLRSAGCRAAPGRLARPRARVRCGAAARFIGQGEFPAEVLESELPVLVDFVADWCGPCRLIAPVVDWASEDGQEVPGSRREGAMIKDKFKEYLEPLLTTITTAA

SEQ ID NO: 52226 - protein, 136 aa, Zea Mays
MNYDKDGRSKGTAEVVFARKVDALDAIKRYNGVLLDGKPMNLELIGNNVEPPPLPPLIHNRPLQNYNDIHSSVLQSQRNGQRRAPQVNGRGGRSSQTSGGRGQGRGRGQDRNRTPISASDLDAELDKYHAAAAKEE

SEQ ID NO: 52227 - protein, 448 aa, Zea Mays
MGNCCPGSGDAEPAPAASADPSSHLHSGSLSLKAGASAGSAPTPTKPPAPIGPVLGRPMEDVRSIYTVGKELGRGQFGVTSLCTHKATGERFACKTIAKRKLSTKEDVEDVRREVQIMYHLAGQPNIVELKGAYEDKQSVHLVMELCAGGELFDRIIAKGKYTERAAASLLRTIVEIVHTCHSLGVIHRDLKPENFLLLNKDEKAPLKATDFGLSVFFKQGEVFKDIVGSAYYIAPEVLKRNYGPEADIWSIGVIVYILLCGVPPFWAGKLKQFTAMNQFKKAALRVIAGCLSEEEIRGLKEMFKGMDSDNSGTITVDELRRGLAKQGTKLSEAEVEQLMAAADADGNGTIDYEEFITATMHMNRMDREEHLYTAFQYFDKDGSGCISKEELEQALKEKGLLDGRDIKDIISEVDADNDGRIDYSEFVAMMRKGTAEPNPKKRRDVVL

SEQ ID NO: 52228 - protein, 84 aa, Zea Mays
MVSLPSDIDKLNRASRKSAVRLQEIGPRMTMRLVKVEAGLCSGDVLYPWPVEKEVVGKKGTETGEVEGQEDDSEATDESEDEMV

SEQ ID NO: 52229 - protein, 124 aa, Zea Mays
MATSFQGTTTKCTACDKTVYLVDKLTADNRIYHKACFRCHHCKGTLKLANYNSFEGVLYCRPHFDQLFKRTGSLDKSFEGTPKVVKPERNVGNENATKVSSAFAGTREKCVGCSKTVYPTERHP

SEQ ID NO: 52230 - protein, 92 aa, Zea Mays
MYGDYFKAALQFVVNPGKFGFSTALQACCGAGGQGNYNFNLKKKCGEQGASVCSNPSSYVSWDGIHMTEAAYRKVANGWLNGPYAQPPILKS

SEQ ID NO: 52231 - protein, 104 aa, Zea Mays
MLSSVCSFTWCCSCGGSAPVLLGMMLKLAALPPLQSLDEGPSTVFWVAARIHIYYTEDHKQIARQSFHSTNFAKHTSDGMNSGHQTLNNTELVIDDLQQKKNNI

SEQ ID NO: 52232 - protein, 414 aa, Zea Mays
MSDMESVAALMNSTSSKIQQLQEAFAELESQSTVSMNLKWKQLEDHFRGLEQSLKKKFDELKEQEKEFQETVAKSEQILEQREAAVVAKELTSLEKLQEKREAALAMIFSKSRLSLPVPTINPMNKALNNLGVKWPKPASEESVHLQVDNAVVTPRSELVALCEEMNVKGLHKFISDNRKNLAAIREEIPSALKKTSHPYGLVLDSLEDFYSGDNLVLDGKKDGDLLGVRRTCLMLLESLGQLHTAGITCFSLEGHMLTTNIIERAKKIAFEWKSKLDNLEIDASNGNCLEAHAFLQLLATFGISAEYNEDDLCKLLPYVSRRRQTPELCRLLGLSQKMPGVIEVLVKSGRTIDAINLAYVFELTEQFEPVQLLKAYLRDVKKLSHARNVKISPGAQVHLFLPRVCFQSAKHTT

SEQ ID NO: 52233 - protein, 50 aa, Zea Mays
MPFTTMGRRPFIFGRSAEEHYWDDGYFGYVKQKDGEPVENEDAEPNVEAV

SEQ ID NO: 52234 - protein, 334 aa, Zea Mays
MLRGVEELADAVKVTMGPKGRNVVIEQSFGAPKVTKDGVTVAKSIEFKDRVKNVGASLVKQVANATNDTAGDGTTCATVLTKAIFTEGCKSVAAGMNAMDLRRGISMAVDAVVTNLKGMARMISTSEEIAQVGTISANGEREIGELIAKAMEKVGKEGVITIADGNTLYNELEVVEGMKLDRGYISPYFITNSKTQKCELEDPLILIHDKKVTNMHAVVKVLEMALKKQKPLLIVAEDVESEALGTLIINKLRAGIKVCAVKAPGFGENRKANLQDLAILTGGEVITEELGMNLENFEPHMLGTCKKVTVSKVAPVILDGAGDKKSMKRDESLE

SEQ ID NO: 52235 - protein, 94 aa, Zea Mays
MLLNLHKKKWTDGLILKRFDTHSKTNEQTVQEMLNLAIKYNKAVQEEDELPPEKLAIANVGRQDAKKHLEEHVSNLMSSNIVQTLGTMLDTVVF

SEQ ID NO: 52236 - protein, 54 aa, Zea Mays
MIQVLFYFLFRFADYLPWAVTCDVLPDSLNSPELRLDRRIYSSRIHAHVCVVAK

SEQ ID NO: 52237 - protein, 182 aa, Zea Mays
MSRGTGAGYDRHITIFSPEGRLYQVEYAFKAVKSAGVTSIGVRGADSVCVVTQKKVPDKLLDQTSVTHLFPITKYVGLLATGLTADARSLVSQARNEAAEFRFKWGYEMPVDVLAKWIADKAQVYTQHAYMRPLGVVAMVLGYDEEKNAQLFKCDPAGHFFGHKATSAGLKEQEAINFWRRK

SEQ ID NO: 52238 - protein, 230 aa, Zea Mays
MGESEKLVANLFQMARENAPSIIFIDEIDSLCGQRGEGNESEASRRIKTELLVQMQGVGHNDDKVLVLAATNTPYALDQAVRRRFDKRIYIPLPDTKARQHMFKVHLGDTPHSLTESDFESLARRTDGFSGSDVAVCVKDVLFEPVRKTQDAMFFFKADGDMWMPCGPKQPGSVQTTMQELASKGLAAKILPPPISRTDFEKVLSRQRPTVSKKDLEVHERFTKEFGEEG

SEQ ID NO: 52239 - protein, 519 aa, Zea Mays
MLPVATMEKATKWEPGDIKGMESHDAYLIASQLNLLDEQQDTVYVAGLQMELQQARDRISELETERRSARKKLDHLFKKLAEEKAAWRNREHEKVRAILEDMKADLDHEKKNRRRLEMINLKLVNELKEAKMSAKQLLQDYETERKARELTEEVCNELAREVGEDKAEIEALKRDSLRLREELDEERKMLQMAEVWREERVQMKLVDAKLTLDAKYTQLSRLQHVVEAFIAARSTANGDITVVEEAENIIQAIKSVRAQGAEFRYEPPAASEDIFSIFEELRPSEEPVIKEIEPCYTNSSAKCESEIQQVSPMTDIFLETKAKVYSNKSPKDESDAEDGSSWETISHEDMRGSSGSPDGSEPSVSNKISISWNSRNGFEYRENEKLEDDLADAYLASMNQPKKKESAISKLWKSSRPKNSEVCKKDAVVETVNARPSNARHSVGTYSTVESGIQETGLSPPSVEQWSSPDSMNIQFNRGFKGCIEYPRTSQKHSLKAKLMEARMESQKIQLRQVLKQKI

SEQ ID NO: 52240 - protein, 98 aa, Zea Mays
MEYLSSLNHEDTRLAVTCEREFLAVLDGNCRTPIAAYAYRDKDGNCSFRGLLSSPDGSKVFETARSGPYSFDDMVEMGKDAGHELKAKAGPGFFDSLQ

SEQ ID NO: 52241 - protein, 192 aa, Zea Mays
MGDSQYSFSLTTFSPSGKLVQIEHALTAVGSGQTSLGIKAANGVVIATEKKLPSILVDETSVQKIQALTPNIGVVYSGMGPDFRVLVRKSRKQAQQYYRLYKEHIPVTQLVRETAAVMQEFTQSGGVRPFGVSLLIAGYDDNGPQLYQVDPSGSYFSWKASAMGKNVSNAKTFLEKRVLSPSEIKDFLEEVE

SEQ ID NO: 52242 - protein, 435 aa, Zea Mays
MATAPSDVLAVELLQRECHVKHPLRVVPLFEKLADLEAAPAAVARLFSIDWYMDRINGKQEVMIGYSDSGKDAGRLSAAWQMYKAQEELIKVAKHYGVKLTMFHGRGGTVGRGGGPTHLAILSQPPDTIHGSLRVTVQGEVIEHSFGEELLCFRTLQRYTAATLEHGMHPPISPKPEWRALMDEMAVVATKEYRSIVFQEPRFVEYFRSATPETEYGRMNIGSRPSKRKPSGGIESLRAIPWIFAWTQTRFHLPVWLGFGAAIKHIMQKDIRNIHILREMYNEWPFFRVTLDLLEMVFAKGDPGIAAVYDKLLVADDLQSFGEQLRKNYEETKELLLQVAGHKDVLEGDPYLKQRLRLRESYITTLNVCQAYTLKRIRDPSFQVSPQPPLSKEFTDESQPAELVQLNQQSEYAPGLEDTLILTMKGIAAGMQNTG

SEQ ID NO: 52243 - protein, 349 aa, Zea Mays
MGKGAQGSDAAAAGGEVEENMAAWLVAKNTLKIMPFKLPPVGPYDVRVRMKAVGICGSDVHYLREMRIAHFVVKEPMVIGHECAGVVEEVGAGVMHLSVGDRVALEPGVSCWRCRHCKGGRYNLCEDMKFFATPPVHGSLANQVVHPADLCFKLPDGVSLEEGAMCEPLSVGVHACRRAGVGPETGVLVVGAGPIGLVSLLAARAFGAPRVVVVDVDDHRLAVARSLGADAAVRVSPRVEDLADEVERIRAAMGSDIDVSLDCAGFSKTMSTALESTRPGGKVCLVGMGHNEMTLPLTAAAAREVDVVGVFRYKDTWPLCIDFLRSGKVDEAFEVSARGRDAIKVMFNL

SEQ ID NO: 52244 - protein, 125 aa, Zea Mays
MRNASDINDARARASRALEALEKTIVERAGAEATQNLHKENMMLKEQLTVVLRENSVLKRAVAIQHERQKEFDERSHEVQNLKQLVLQYQEQVRTLEMNNYALTMHLKQAQQNSSIPGRFNPDVF

SEQ ID NO: 52245 - protein, 915 aa, Zea Mays
MTSRFWGQGDSESEEEEEEVESEQGSDNDDDGGHGGAGRGAQNRYLKNQEDDSDESDTGHREIRSLRDKHNEEMRSIVDQMRNAMKINDWVSLQESFEKLNKNLEKVVRVNESTKVPKMYIKALVLLEDFKAEAPANKEAKEKMSSSNSKALNKMSQKLTKNNKQYKEQIQKCREHPESFEDEAADDKDMDDDDVDESDAEIEDPDKIAMSESEEDHDEEDGDKEGWEQKRSKKDKMMDKQFLKDPSEITWDIVDKKLREIIASRGKKGTGRIERVEQLTFLTRVAKTPAQKLETLFHVISAQFDVNPSLLGHMPVNVWKKCVNNMLLVLDILQQYPNIVVDTSFEPDEKETQKGADYNGTIHIVGDLVAFLERLDSEFLKTLQCTDPYTKDYVQRLREEPLFLVVAQNVQDYLERVGNLKAAAKVALRRVELVYYKPQEVYDAMRKLAEQPEDCVDDDDAEAGDEHQAVDDNRGPSPFVAIPEVVHRKPTFPESGRTLMDGLMSLIYKYGDERTKARAMLCDIYHHAISDEFSVARDLLLMSHLQDGVQLMDISSQILFNRVMAQLGLCAFRAGLINEAHGCLTELYFTGRVKELLAQGVQQSRYHEKTPEQERLERRRQMPYHMHINLELLEATHLICAMLIEVPNMAASTYDKRRPMSKTFRRLLEVSERQTFVGPPENVRDHVMAATRALKKGDHQKAFSVINSLEIWKLLRNREHVLEMLKLKIKEEALRTYLSSYSSSYKSLSLNQLTTMFDLSEQHAHSIVSKMMMHEELQASWHQPTKCTVFHSLDQTRLQELLFQVAEKISVLVETNERAYELRTGGTLEGLPPRRRGEAQDSSKWQESFVASQGRQGGGNRFGYSGRGAASGQSGGLQRGRGNHVSRGGYGGNTRFQDASAHMVNLNRVGRVVSV

SEQ ID NO: 52246 - protein, 147 aa, Zea Mays
MMHQVTSPYGNTVHHNENATTGQFAFTTSEAGNYLACFWIDSVEKGSGTSLNLDWKIGIAAKDWDTIAKKEKIEGVELELRKLEAAVESIHHNLLYLKAREADMRTVSERTNSRVAWFSILSLGVCVAVSVLQLWHLQGFFRKKKLI

SEQ ID NO: 52247 - protein, 226 aa, Zea Mays
MRRFLPPLDNVHAWAWHVLHFRPSHTALSPVKSRTAAAHDLASLPACGASSQAGRPLGGAGDDGEQVVAEGVAEVLGEVLDGAFAGDVGLDEEGEHGEHGEPAVLDLLHLEDGGLVGVAGQAQGVEGATGVQLVLEVQSVDDPVVLGAADEDDLRDHGDHQVDGDAVAEIAEGVSVEEQGSGLQPDGLGAAVSAELVARLWDDSASGTEHGPSGMDQLVGLVPARR

SEQ ID NO: 52248 - protein, 580 aa, Zea Mays
MYFISLVLENLALSIDDNEDILYCLKGWNQALEMAKQKDDQWALYAKAFLDRNRLALASKGEQYHNMMQPSAEYLGSLLSIDQWAVNIFTEEIIRGGSAATLSALLNRFDPVLRNVAHLGSWQVISPVEVSGYVVVVDELLAVQNKSYDKPTILVAKSVKGEEEIPDGVVGVITPDMPDVLSHVSVRARNSKVLFATCFDHTTLSELEGYDQKLFSFKPTSADITYREITESELQQSSSPNAEVGHAVPSISLAKKKFLGKYAISAEEFSEEMVGAKSRNIAYLKGKVPSWVGVPTSVAIPFGTFEKVLSDGLNKEVAQSIEKLKIRLAQEDFSALGEIRKVVLNLTAPMQLVNELKERMLGSGMPWPGDEGDKRWEQAWMAIKKVWASKWNERAYFSTRKVKLDHEYLSMAVLVQEVVNADYAFVIHTTNPSSGDSSEIYAEVVKGLGETLVGAYPGRAMSFVCKKDDLDSPKLLGYPSKPIGLFIRQSIIFRSDSNGEDLEGYAGAGLYDSVPMDEEDEVVLDYTTDPLIVDRGFRSSILSSIARAGHAIEELYGSPQDVEGVVKDGKIYVVQTRPQM

SEQ ID NO: 52249 - protein, 202 aa, Zea Mays
MLPPSRREFRDIYVIFELMESDLHQVIKANDDLTAEHHQFFLYQLLRGMKYIHAASVFHRDLKPKNILANADCKLKICDFGLARVSFNDTPSAIFWTDYVATRWYRAPELCGSFFSKYTPAIDIWSVGCIFAELLTGKPLFPGKNVVHQLDLMTDLLGTPSAESISKIRNEKARRYMNNMRKKPRVPFTKKFPGIGPGRSIL

SEQ ID NO: 52250 - protein, 76 aa, Zea Mays
MEEKKVYLQLYEAMEALVKINLETNKIMDFIKFDVGNVVMVTGGRNTGRVGVIKNREKHKGSFETIHVLLGAFCYV

SEQ ID NO: 52251 - protein, 151 aa, Zea Mays
MPAVAFASAPAIFASASARPCRSAAPGILSSDSGRPRRGARGAVQCEVASSSAPSAAGPQAARWAQRTVVIPPQRRGCHLITNKIVNEIGNDLADFKCGMAHLFLQHTSASLTINENYDSDVQVDTETFLSRIVPEGPSAPWRHTIEVSFA

SEQ ID NO: 52252 - protein, 204 aa, Zea Mays
MSEEPTIETTLWSIEWGIAELVNHPAIQHKLREELASVLGAGVPVTEPDLERLPYLQAIVKETLRLRMAIPLLVPHMNLNDGKLAGFDIPAESKILVNAWFLANDPKRWVRPDEFRPERFLEEEKSVEAHGNDFRFVPFGVGRRSCPGIILALPIIGITLGRLVQNFQLLPPPGLDKIDTTEKPGQFSNQIAKHATIVCKPLEA

SEQ ID NO: 52253 - protein, 166 aa, Zea Mays
MLHGRCLYIIEELIAKRQQLDAVNFAYEAGLQEKFPPVPLLKSYLEDSKKTSTAASDNSSTSSSGQSGSNANKKEQSALRAVIKCVEDRNLEAEFPLEGLRKQLEELEKAKTEKKKAASSATSGGSSSGPATKRIRASNGGPMPPAKAGRLATNACASSFPAGARR

SEQ ID NO: 52254 - protein, 378 aa, Zea Mays
MSDGKDSLDLSALGAAIPNSAELSAEDKANLVASIKNTLEGLASRHTDVLENLEPKVRKRVEKLREIQGEHDELEAKFFEERAALEAKYQKLYEPLYSKRYEIVNGVVEIEGITKESAAETPEEQKSGDETSAEQKEEKGVPAFWLNAMKNHEILAEEIQERDEEALKYLKDIKWYRISEPKGFKLEFHFGTNMFFKNSVLTKTYHMIDEDEPILEKAIGTEIEWYPGKCLTQKVLKKKPRKGSKNTKPITKTEDCESFFNFFSPPQVPDDDEEIDEDTAEQLQNQMEQDYDIGSTIETKLSHMLSRGSLERLLKMRTLKLWMARTTTMKTTMMKTTRMKMTMIMIQRRPRELLEGKGSRVNDLQSASNSEMVWMKWR

SEQ ID NO: 52255 - protein, 442 aa, Zea Mays
MNMRRMHDVFKRKTGGLVIWRSGSTIILYRGTNYTYPYFHHSERVDSFLDKESSDQSNSGDEDETSSQHGSSHEKSSENPVVACAEQIHVGEGNSQTIEYLNQSLSREKDTNHPVSSIKRLVFDADEGNLDIRAGNPNEQHVRLQENTHPDSPNKFGPRDRSSLVAGVGSQNKFRLQLPGEVKLAEEADKLLDGLGPRFSGWWGYDPVPVDADLLPAIVPGYRRPFRLLPSGVPPKLTDREMTILRRLAHALPFHYALGRSSNLQGLAASMIKLWERCEVAKIALKRDAHNTDSELITEEVKELTGGTLLSRDKESIVFYRGKDFLPPAVSLAIEKRRKLGSSTIYKAKPGIEESMPTQNDSVLKVSSDVSVHVREEGTSVTENRAESLNTVAKDVETRLSQAIAEKAKAEKLIEELEKASPLSKAEVRETISEDERSEGSF

SEQ ID NO: 52256 - protein, 158 aa, Zea Mays
MAIYDVMQLVRADVSTIGMGIAGSTASIILGGGTKGKRFAMPNTRIMIHQPVGGASGQALDVEVQAKEILTNKRNVIRIVSGFTGRTPEQVEKDIDRDRYMGPLEAVDYGLIDGVIDGDSIIPLEPVPERVKPKYNYEELYKDPQKFLTPDVPDDEIY

SEQ ID NO: 52257 - protein, 105 aa, Zea Mays
MNRALKLHPVLCNTFKKKAPNAIKEIRKFAQKAMGTTDIRIDVKLNKHIWSSGIRSVPRRVRVRIARKRNDEEDAKEELYSLVTVAEIPPEGLKGLGTKVVEDDE

SEQ ID NO: 52258 - protein, 61 aa, Zea Mays
MSKDDTELLRVMANYGEDVVEALGYEVDRLESEIQKLVPGIKHVDIEAHNPEGLALRAEVL

SEQ ID NO: 52259 - protein, 305 aa, Zea Mays
MGGLTVFSDGVQNLIEKGYRKITPFFIPYAITNMGSALLGMDIGFMGPNYSISTACATSNYCFYAAANHIRRGEADIMIAGGTEAAIIPIGVGGFVACRALSQRNDDPKTASRPWDKDRDGFVMGEGAGVLVMESLEHAMKRDAPIIAEYLGGAVNCDAYHMTDPRSDGLGVSSCIKQSLKDAGVAPEEVNYINAHATSTLAGDLAEVNAIKQVFKDPSGIKINATKSMIGHCLGAAGGLEAIATIKAITTGWVHPSINQFNPEEAVEFDTVPNVKKQHEVNVGISNSFGFGGHNSVVVFAPFKP

SEQ ID NO: 52260 - protein, 488 aa, Zea Mays
MAALEAAREWAGSVIPPELAAAAGGDPLAALAATAAALVAGLLIIAVWFRSGGGTPSKPVATPVRPPPVKVDADADVDDGRKRVTIFFGTQTGTAEGFAKSMAEEARARYEKAVFKVVDLDDYAQEDEEYEEKLKKETVVLFFLATYGDGEPTDNAARFYKWFTEGKEKEVWLKDLKYGIFGLGNRQYEHFNKVAKVVDELVEEQGGKRLVPVGLGDDDQCIEDDFTAWKELVWPELDQLLRDEDDTTGASTPYTAAIPEYRVVFIDKSDLSFQDRSWTLANGTGVIDIQHPCRSNVAVRKELHKPASDRSCIHLEFDISGTGLVYETGDHVGVYAENSVQTVEEVERLLDLSPDTFFSIHADAEDGSPRKGGGSLAPPFPSPCTLRTALLRYADLLNPPKKAALLALASHASDPAEAERLRFLASPSGKDEYSQWITASQRSLLEVMAAFPSAKPPLGVFFAAIAPRLQPRYYSISSSPKKMVSGKP

SEQ ID NO: 52261 - protein, 160 aa, Zea Mays
MRRDKLNDRFLELSSIMNPGKEAKLDKANILSDAARMVAQLRGEAEKLKESNEKLRENIKDLKEEKNELREEKVRLKVEKDRLEQQVKAMSVAPTGYVPHLPHPASYHPAAFTPFAPPQQAPANKSAPIPAPFPGMAMWQWLPPTIVDTTQDPKLWPPNA

SEQ ID NO: 52262 - protein, 86 aa, Zea Mays
MLSFYAPGWCGEVRDVIYTDSGKVTVIYRVTVRGTDGEVHREAAGTASLSDERFDDPVSAAEEAAFCKACARFGFGLYLYHEDETP

SEQ ID NO: 52263 - protein, 157 aa, Zea Mays
MALTSEGKLYGWGWNKFGQVGVGNNDDHSSPGQVSFPEDQKISQVACGWRHTLALSEKKNVFSWGRGTSGQLGNGEIVDRNTPVLIDALSSDGSACKKLESSTAAPFAAKVWVSPSERYAIVPDENVRKAGGGTARGNGADANVPENDVKRMRVQSS

SEQ ID NO: 52264 - protein, 186 aa, Zea Mays
MHRDVKPHNVMIDHELRKLRLIDWGLAEFYHPGKEYNVRVASRYFKGPELLVDLQDYDYSLDMWSLGCMFAGMIFRKEPFFYGHDNHDQLVKIAKVLGTDGLNAYLNKYHIELDPQLEALVGRHSRKPWSKFMNADNQHLVSPEAIDFLDKLLRYDHQDRLTAREAMAHPYFLQVRAVENSRTRPQ

SEQ ID NO: 52265 - protein, 72 aa, Zea Mays
MLRLSVEAGGCSGFQYSFALDDKKNADDRFFETDGVRLVVDDISYNFVKGATVDYEEELIRSTFVVLSMNMY

SEQ ID NO: 52266 - protein, 67 aa, Zea Mays
MSTPLPRLLVHPSPAPAPRKEELNPRRNNTLSHRLTTLMMVGPASAAHFLTLPQWLCAASAKRVGTR

SEQ ID NO: 52267 - protein, 302 aa, Zea Mays
MTTSNGAYIDIQSKSTAFLPLDEACLLDIDNVEEAGIRPGLVEEFMIIDENPGDETLILSLQAIQQELAWERCRQLQAEDVVVTGKVIGGNKGGVVALVDGLKGFVPFSQVSSKTTAEELLEKELPLKFVEVDEEQGRLVLSNRKAMADSQAQLGIGSVVLGTVESLKPYGAFIDIGGINGLLHVSQISHDRVADISTVLQPGDTLKVMILSHDRERGRVSLSTKKLEPTPGDMIRNPKLVFEKADEMAQIFRQRIAQAEAMARADMLRFQPESGLTLSSEGILGPLSSDAPSEDSEDRTDE

SEQ ID NO: 52268 - protein, 266 aa, Zea Mays
MCDCYTPAGEPIPTNKRYNAAKIFSSPEVAAEEPWYGIEQEYTLLQKDTNWPLGWPIGGFPGPQGPYYCGIGAEKSFGRDIVDAHYKACLYAGINISGINGEVMPGQWEFQVGPSVGISSGDQVWVARYILERITEIAGVVVTFDPKPIPGDWNGAGAHTNYSTESMRKEGGYEVIKAAIEKLKLRHREHIAAYGEGNERRLTGRHETADINTFSWGVANRGASVRVGRETEQNGKGYFEDRRPASNMDPYVVTSMIAETTIIWKP

SEQ ID NO: 52269 - protein, 81 aa, Zea Mays
MKKDGGLLSEVLGLCWVQSAAALVILPPLEVDSVRCSVKPASRHSCHSRSAETLEPRQTLPTWDGQAGQCHNEPRPRNHRK

SEQ ID NO: 52270 - protein, 507 aa, Zea Mays
MYGFSWLKPGSDLNLPGVRSVGKQQESYTRESRAGRSARSRSASNGAAGNGISRPSQPACFHQLWKRFPCVPCRLVVAKKLSSTGSIDLSTVVPKSVDRTCRQIFCCLTSKQNCEGCHASSFLPTVVPKTVDDISYVCSLIKIVLHSHPKFLEPGFDARHHRLWPTSGSALQFEPLAHRSIRAIREKKRHRPVTPLATCPSRSGYVSVPLQSVLAQPGRFLLLFPQPGLPTRFHRSRVAKRIPCLVRAMAEEQSNPQHQQAEEREVMVEQQQPRRAPKLRYLDFVQVAAAQAAVCLAGLYGLAKDHAGPLRPSVDAVESAVKGVVSPVYDRFGGLPLDVLAFVDRKVDDTVHEVDKHLPGALKAASAHVYAVVRGVPEVARELAAEAQRSGVRGAARAALAMTEPVARDVYGRVEPVAKDLYVRYEPAAEHLAVSAWRSLNGLPVFPHVAEIVVPTAAHWADKYNRAVAAAAEHGYAGAKYLPAIPTERIAKVFSSAPEAEPLAEGQ

SEQ ID NO: 52271 - protein, 83 aa, Zea Mays
MVPFSTAEDIFALAGIGFAAVAALWASVNLIEIIDKLPVLPLLFELVGILVAWLFIYNNLLFKPKRKEFLENIKSSGSRILGQ

SEQ ID NO: 52272 - protein, 437 aa, Zea Mays
MDAEAGVAGADQLPRRQYYLNLLLLAYQSFGVVYGDLSTSPLYVYKSTFSGKLRHYQDEETVFGVLSLIFWTFTLIPLLKYVIIVLSADDNGEGGPFALYSLLCRHAKLSLLPNQQAADEELSSYYRNGFAPRNGSSPWSRRFLEKHKKMRTLFLLIVLCGASMVIGDGVLTPAISVLSSMSGLHVRATGLHHSSVVLLSCIVLVGLFALQHRGTQKVAFMFAPIVIIWLLSIGGIGLYNILHWNPNVYQALSPYYMVKFFRKTGSEAMFADLGHFTSASVRVAFITVIYPCLMLQYMGHAAFLSKNTFHMPTGFYDTIPEPVFWPVFVVATLAAVVGSQAVISATFSIVKQCHALGCFPRVKVVHTSRWIYGQIYIPEINWILMVLCVAVTIAFRDTTLIGNAYGSSGRMGASCACIHIHVSHVHLALWVKEEVPV

SEQ ID NO: 52273 - protein, 169 aa, Zea Mays
MASADARLAGIASSIRVIPDFPKPGIMFQDITTLLLDPKAFRDTIDLFVERYKDQGITVVAGVEARGFIFGPPIALAIGAKFVPLRKPKKLPGEVISEEYSLEYGTDKIEMHVGAVQANDRALVVDDLIATGGTLCAAVKLIERVGAKVVECACVIELPELKAHGNFNC

SEQ ID NO: 52274 - protein, 700 aa, Zea Mays
MLRKEQAMAFARAVAAGFDIDNLGYLIAFAERFGAARLMKACSHFIELWKQKHETGQWIEVEPEAMSTRSEFPPFNASGIVFMGDNMKPNLESGSINGEANGEDGAKADQKSSQQMGSHAAYPPWAMHPPSGAVVYPPYPMQGMPFYPGVNPYYPPYPPVDDPRYHYSGRKSSRKHSSDSKDSETLDVESDHCSSDRGSSHGRKSHRKGKRSGKKKPSVVVIKNVNVTSKKHGSSESESQSSSEVESADSDNSHSKSSERKHKSSSSKKKEGRRTTFASGDEYSKDEMSNGHDAEQGNWSAFQNFLLRAEEKTRSSDADLFAGEKEPPSRRKQNVNTADPILLAERDGGIVHERNIVGFDSANGRTRAIRVMSNDELVMSGEGRNYMHSEIKEIEAGGGRYRRGTGDDYMVYGQGSQIARHSLLDPLAEAQYKNPVQQDKNRNGVADESFMIPLRSSLHDNIGAESRTTIDIDVELPSRIHKASDEKAGHQLFYEPDELVPERGSEDVSFGYDPAMDYDSHMQTTVKVEDEKTEDDLPVADNDVQKVEKEKLRNAKDGSDKRRKDALLRRLSAPRTPLNDAQKRAQNLRAYKADLQKLKKEQEEEQIKRLERLKLERQKRIAARGNGKGPGNGSPKANGTNGLSKSVPTFTGLKKEKNGTTESLSDRLKRLSEPKSIAGAEHSLNPKSTGADHSRRRSMA

SEQ ID NO: 52275 - protein, 490 aa, Zea Mays
MLPLSLFVSLLVLHLPHASADGDICIIGGGISGASTAFFLTSYTSTLGGAQLRVFERRQKVGGRLGTVTLAGDSFEAGGSIIHPRNLHARRFADLLGLAVKTGGDDWLGIWDGKSFVFQTARPPPVGSSWWRRKLHSLVNSLLLLRRYGLSLLKMDKFVQEMLRRFMLFYNGMESRPVFATVEEMLQWTGLYGLTRRTLEEELLDAGLNTRTIAELVTVITRINYGQSTHISGLAGAVSLAGSESGLWAVKGGNWQLAAGLLKTSNATLHLQEGIDSITDAGDHYVLRSNSGSEYECMVTVVATPLDELNITFSPPISIPPRKMQHTHATFVRGILNPGYFGLNSASDIPELIGTLELPDIPFSCISVLKRYSEGDMAAYKMFSRAKLDDGLLDQIFRARIETIRINWAAYPHYQAPEEFAPIVLDGKQLYYVNTFESAASAIETGAVAAENVARLIISRLSLLPQAQQQQPHIIKSFAEQESQRRHVDL

SEQ ID NO: 52276 - protein, 414 aa, Zea Mays
MPRRGETAVVPIDVASAGGGRGDERPKRERHRSHGPGRHGPHRSRPPPPPPPAFRPFRRWFPFLVPLFIVANIVLFVLTMYVNDCPAHARATGAAIGGSVGESATAQGCWLAPELGRFAFQSFKENPLIGPSSATLLEMGALETSKVTKDHEGWRLITCIWLHAGVVHILANMLSLLMIGIRLEKEFGFIRIGTLYVISGVGGSLLSSLFMVSNISVGASGALFGLLGSMLSELITNWTIYENKFAALLTLVMIILINLAVGILPHVDNFAHLGGFMSGFCLGFVLLMRPQFGYINQKNSPLGFPMGVTKRKFKTYQVILLVISTMILVSGFTIGLVLLFQGFNASEHCSWCHYMSCVPTSKWSCNAPNNYCMSSQLGNQLNLTCESTGKTASYVLSDPNNSEAIKNLCVGLCS

SEQ ID NO: 52277 - protein, 698 aa, Zea Mays
MQAPLNSSALDVKTSDTTEIFSATINVAQTDAKNTTSQPLSKVQHGWGGIPGRPSMAEIVKMGRPQAKVGSRSVASSTALPTVGDSVISNTPNLVPEEYNRTVFASEAGHVAADKLPNGAVEVHSLPKDASAFDMLPSAEGTDVEAPSMSANAQGSSTPDANEDDIEKYANLEEGNTESLISPGQVSASGKDIQSEYTEVVSHVDEGSIEKTNDFQLNGLPFEHNQNLNGDVSTATTQFDHLTLHEGPKLSDDNPAVIIPDHLQVSNADCAHLTFGSFVSGTLDSSLTTKPLESHGDAAAVPDDDSIDQSDGRIHDDEGKVTLATDVNEYVTSAANSNEENLDITSVQQSEVTRADFLDVTSNTEYNLTSTPDYATSSAPLQDSASQSLQENRQFQNISPFSSFMQMQNGLLPPAIPPLREFDPAFSLLLTHPPMMHGTMSSSMSNTTVSTQPQENANPVGLPNPQLTQSQQSTSIASGPPLPQHLLHPYAQPTLPLGYASMIGYPSLPPSYAYLPPAAFQQPYMNSGLFHQAAAAVPTSSVKYPLPQYKSNIALASLPQPGSLLSSYVGGFGTASNMPGNFPLNQSTAAATTTLGFDGTVPSHFKDGNQFISLQQNENPAMWMHGASSRGMPPLAASTMYGYQGQSHQAGLRQGQLPSQFGSALGQSQPGLGPEHRNPSDSNLSGAAQANQMWPNTY

SEQ ID NO: 52278 - protein, 155 aa, Zea Mays
MTHAHSTTSAPARSRSLIAAQSVPPVATRSSMTSTRSPDRSMAPTRISRQSVPYSRTYFSEITSPGSFLGLRRGMNLAPIASAIAGPNTKPLASIPCLGKCGTTRMASEMPCSRGSAAAAGAAAGSRPTSLPTGLALVPASVRLTASQLASSPIN

SEQ ID NO: 52279 - protein, 315 aa, Zea Mays
MNGNTGTAISSGATLPDTSESDQGPPKEKTEQPCYADDITDTDQLKSDHNEGAEFDTAKPEKKAAVDSDKSAKLKLSDKCEAPVHSDADTKKEASAEGTDGAADDTSTAADCTPKPKRGRPPGPKSSQKKAAGKDQSSGSDLKKVNEAGDSAGKLAKRSAKDEKSTKKAGEGESSKKTQKYNSKQQKDENLSEDPAKDLSLKEMITPKSSTKVPGRTKGQSTENSTPKMKQEQETEEPPRSRKSKGLDKSLVGARIKVWWPDDKMFYNGVVESFDSVSKRHKVAYDDGDVEVLLLRDEKWEFISEVCTFLLMIIL

SEQ ID NO: 52280 - protein, 184 aa, Zea Mays
MNCVMHSIPTSCLEAGGTVPSQLDSILARSTDESFGSISFSKSSVVDRSMRFSSSRFSDISMSSSRRIGDTASGDNDECKERPLILRNKAPRWHEQLQCWCLNFRGRVTVASVKNFQLVAATQPAAGAPTPSQATPVPPEHEKVILQFGKVAKDMFTMDYRYPLSAFQAFAICLSSFDTKLACE

SEQ ID NO: 52281 - protein, 410 aa, Zea Mays
MKVYVTEEQELIMEPSLKWAANPNITVAVKAYGLKATIQIVDLQVFASPRITLKPLVPTFPCFAKILVSLMEKPHVDFGLKLLGADVMAIPGLYRFVQETIKKQVASMYLWPKTLEVPIMDPSKASKRPVGILLVKVVRAQNLRKKDLLGKSDPYVKLKMSDDKLPSKKTTVKRSNLNPEWGEDFKFVVTDPENQALEVNVFDWEQVGKHEKMGMNMIPLRELLPEGTKVTTLNLLKTMDPNDVQNEKSRGELTLELTYKPFKEEDIEKEDTQGADVIEKAPDGTPAGGGLLYVVVHEAQDLEGKHHTNPYAKIIFKGEEKKTKVIKKNRDPRWEDEFEFVCEEPPVNDKLHVEVISKAPKAGLIHGKETLGYIDISLADVISNKRINEKYHLIDSKNGQIQIELQWRTS

SEQ ID NO: 52282 - protein, 230 aa, Zea Mays
MAAVGSLKPGMETLHVQDYKDAPPAKAAVESLQPAMESLHVQDYKDAPPAKGVAAAAVGSLQPGAENLQVQDYKDGNMYYGAYPAYAYGAYGGWGEYPYLSHDGAQTPTAVKLEQGLQVLKIFKDHVCKTSILDDFGFYDNREKMMQERKAKQQQSLKKVIDVKLPSVTDMERSPKGETGSTELTGVGTDVLNKERLLGKAGEKNGEKGNDVAPQDLKTQTEKLAGLNGC

SEQ ID NO: 52283 - protein, 165 aa, Zea Mays
MANIIVAQLLYLDAIDPNKDIIMYVNSPGGSVTAGMAIFDTMKHIRPDVSTVCIGLAASMGAFLLSAGTKGKRYSLPNSRIMIHQPLGGAQGQETDLEIQANEMLHHKANLNGYLAYHTGQPLDKINVDTDRDYFMSAKEAKEYGLIDGVIMNPLKALQPLPASS

SEQ ID NO: 52284 - protein, 194 aa, Zea Mays
MIYFQFWNFNITVVPGRVLKMEEAIKNRDFESFAKLTCADSNQFHAVCLDTSPPIFYMNDTSHRIISLVEKWNHSEGTPQVAYTFDAGPNAVLIAQNRKTAAHFLQKLLYYFPPQDNDLSSYLVGDKSILGDAGLHSMKDVEALPAPPDTKIPDQKFKGDVSYFICSRLGAGPKVVVDEGQALIDSVTGLPKGV

SEQ ID NO: 52285 - protein, 657 aa, Zea Mays
MRKRDLGILLLAAFAIFFSLHHEGDFSFRESWYHLTDEDFPIKYEADRLPPPLVADLNGDGKPEVLLPTHDAKIQVLQPPHARHLNDDSAFQEARVMADISLLPDNVRLASGRRPIAMAVGNVDRSYRPGEVRKQVLVVVTSGWSVMCFDHNLKKLWEHNLQDDFPHAAHHREVAISITNYTLKHGDAGLVIVGGRMEMQHHSADLFDEFMIPEHNMDDRRRSASEKQGSEAGNADLRHFALYAFAGRSGDRRWSRKNENIQSQPSDASVMLPQHNYKLDVHALNSHQPGQFECREFRESILGIMPHHWDRREDTTLQLAHFRKHKRKQVKRTPGKAVINSVNKPIEHNPPGKDASNRIARALGKAADMANSNKARKAQRMQYVPTITNHTQVWWVPNVVVVHEKEGIEVVHLASGRTICKLHLNEGGLHADINGDGVLDHVQVVGGNGIKEQTVKFWEDIDTAGLEVATPILVQTDDGHKHRRGSHGDIIFLTSRGEVTSYSPGLLGHDAVWRWQVSSGATWSNLPSPSGMMENIVVPTLKAFSLRAYDPKEVIIAGGDQEAVVLSPSGGILAMIELPAPPTHAHLLEDFSGDGLTDMIVVTSGGIYGFVQTRQPGALFFSTLVGCLIVVIGVVFVSLHLSSSNAAKPRASSSEYR

SEQ ID NO: 52286 - protein, 162 aa, Zea Mays
MQVVDCRICGDPNSVLRFAFIEFADDVAAQAALALGGTVLGFYPVKVLPSKTAILPVNPKFLPHTDDEKEMVSRTVYCTNIDKKIAEDEVKQFFEGTCGEVSRLRLLGDYVHSTCIAFVEFVQADSAILALNCSGIVLGTLPVRVSPSKTPVRSRSPRVTSY

SEQ ID NO: 52287 - protein, 116 aa, Zea Mays
MRVTHGHLLVALRGMFMCVPVQLLKIPSHDHDTSDRSRGRGFNKREREREKKNPPGRLRLALAFSPFWPRRARSSPLLYIASRVSRHLPHTTKLDRSHSQLVAHSCSSTLHSVLGS

SEQ ID NO: 52288 - protein, 66 aa, Zea Mays
MISCSMPCLVEDPVANDPLQLLPKRTYQPSTIKRKRTHGFLTRKSTKGGRKVIARRIAKGRHRISV

SEQ ID NO: 52289 - protein, 137 aa, Zea Mays
MEEQRQESTKSDDENKANDGDPSSNETEPSNGKTDINDTPMDESQATDEDGRDSGKNGGGTDLNLNLGLKDPDGDNEVETSEKHVAANNPQTENRSKRKSVTPDLEMTIYQTCLMCIRLVHEIGHTVSNFNDVSDVH

SEQ ID NO: 52290 - protein, 259 aa, Zea Mays
MEVMGLMLGEFVDDYTVRVVDVFAMPQSGTGVSVEAVDHVFQTNMLDMLKQTGRPEMVVGWYHSHPGFGCWLSGVDINTQQSFEALNPRAVAVVIDPIQSVKGKVVIDAFRLINPQTMMLGQEPRQTTSNVGHLNKPSIQALIHGLNRHYYSIAINYRKNELEEKMLLNLHKKKWTDGLILKRFDTHSKTNEQTVQEMLNLAIKYNKAVQEEDELPPEKLAIANVGRQDAKKHLEEHVSNLMSSNIVQTLGTMLDTVVF

SEQ ID NO: 52291 - protein, 70 aa, Zea Mays
MQAGRMEEKKRAMANELVAKLTFVCWDKCVTGSVGSSLSRSETSCLSNCAKRFAEVKMMALQRFTTTGRG

SEQ ID NO: 52292 - protein, 243 aa, Zea Mays
MALANKLGGLLKKATSSNPSVYQAIRCMSSKLFVGGISYQTDDHSLRDEFAKYGQVIEARIIIDRESGRSRGFGFVTYTSSEEASAAITALDGKTLDGRSIRVNHANEKTGGFRGGGGYGGAGGGGGYGGGHYGGGGGSGGYGGGDYGGNYSNRGGGGDYGVAGGGGGNFTAGGSDSFANSNFGSDSSFGGNGAGGFDATGGSTGDDGFSGTPDDNFGGNKNEETMDDIFKDDEPDSYADKRS

SEQ ID NO: 52293 - protein, 336 aa, Zea Mays
MALALRCPPAATSSRSPFLPSTSPAPAGKVPRRPPASWRCLAYYGDGGFRKNYDHIPKQFREENLKDGLMDNYKHVPQFLYGLSDAQMEMFMNDDNPYNRQSQKVTEESVSAARSYDEFGMYTLSGMHEGPASYSMGMGMGGSMSMSMGRGGRGYRRMRSSAPDLPSLLLDSRIIFLGMPIVPAVTELIAAQFLWLDYDDRTKPIYLYINSTGTMDENNELVASETDAYAIADFINRSKSKVYTINLSMAYGQAAMLLSLGVKGKRGVLPNSITKLHLPKVHKSGGAAIDMWIKAKELDTNTDYYLELLSKGVGKPKEELAEFLRGPSSQLIISSC

SEQ ID NO: 52294 - protein, 126 aa, Zea Mays
MTNQQLMDQGNQLMDETDQAIARSKQTVQETVNVGTETAAALKAQTEQMSRVVNELDSIHFSIKKASQLVKEIGRQVATDRCIMAMLFLIVAGVIAIIIVKIVNPHNKDIRDIPGLAPPVSRRLLR

SEQ ID NO: 52295 - protein, 154 aa, Zea Mays
MSGFGHRVYKNYDPRAKVIRKLADEVFSIVGRDPLIEVAIALEKAALSDEYFIKRKLYPNVDFYSGLIYRAMGFPTEFFPVLFAIPRMGGWLAHWKESLDDPDTKIIRPQQVYTGFWLRHYTPVRERVLSSQSEELGQVATSNATRRRRAGSAL

SEQ ID NO: 52296 - protein, 87 aa, Zea Mays
MVVEIPRGSKVKYELDKISGLIKVDRVLYSSVVYPHNYGFIPRTLCEDSDPMDVLVLMQEQVVPGCFLRARAIGLMPMIDQGEKDDK

SEQ ID NO: 52297 - protein, 83 aa, Zea Mays
MGFFAEAGPVQIFVSNHLIPDDMEFQSGDVPNYTTSDGSVKIQKESEVRLKIIGTRVDATEIFCIGTIKDDFLGVISDPGAAV

SEQ ID NO: 52298 - protein, 425 aa, Zea Mays
MYDAGDHMKFTFPMAFTATVLSWSVLEYGDQMSAAKQLDPALDALKWITDFLIAAHPSDNVLYIQVGDPDLDHNCWERPETMTEKRPLTQINKKTPGSDVAAEAAAAMAAASMVFKSRDTTYSDVLLQHAQKLFTFADTYRGLSSESYPKLQDFYNSTSYVDELLWAASWLYHATGDQTYLSYVTVQNGKSYADWGRPTWFSWDDKNPGTQVLLSRLNFFGSKQISNAENEGLKMYRDTAEAVICGLIPDSPQATASRTGGGLVWISGWNSLQHATNAAFLSVVYSDYMLSTRTAAVQCSGKYYSPTDIRNFAASQANYILGDNPMKLSYLVGYGSSYPKQVHHRGASIPADAKTGCKGFEYLHSPSPNPNVATGALVGGPFQNDTFVDSRDNAVQTESSTYNSGTLVGLLSGLVTTSSVVQSFT

SEQ ID NO: 52299 - protein, 105 aa, Zea Mays
MRPPLRSAPIYVLTCAWACSPTTHCSVVSSHLRSCVCVCDRPDANWRWCAPVAIDAANLTRLRVCLLCYFRFSGEMVQAWCVDVDGWSRSSGEWQRTNETSTSAT

SEQ ID NO: 52300 - protein, 596 aa, Zea Mays
MAVVNPTNLAIDDDDDDTPISFKRTSNSTKTARPTPSKHEGSSGGNGAPVRIPKPVSPNPQKNGATGASRPLHMKPPSSSPNHRPSGSGQPNSLAQHSSKANSIDMSKLKRPLVKDERSDDSDDEVPIGLRRKVEEKKLKGVDTRVQKTDDSDDDDKPLGLKINSSRMSSNRVNKPVLQRTVPKVEQPDEDSDDDKPLASRLPSNAGPKSGGDVSEDSEDEKPLAARFSKVAGSGNPKIASSSKGLTSDTNGQQSLGKRPLDNSNQTSSALKKAKPSNVSASAIVRREIKTDDNTPLAQRLKMGESSKGKSSAKSVFKKSPASVKKDIKKMKGKGKLKKNMKNSQFSKIMKVPPGSGGGKKWTTLEHNGVIFPPPYKPHGVKMLYNGKPIDLTPEQEEVATMFAVMKDTDYAAKPTFIDNFFTDWRKVLGKNHIIKNFELCDFTPIYEWHLREKERKKQMTTEEKKTLREDKLKQEEKYMWAVVDGVKEKVGNFRVEPPGLFRGRGEHPKMGKLKRRILPSDITINIGKGAPVPECPIPGESWKEVKHDNTVTWLAFWNDPINPKDFKYVFLAASSSLKGQSDKEKYEKSRKLKNS

SEQ ID NO: 52301 - protein, 330 aa, Zea Mays
MVAPTRGGRFEVIFVSPTGEEVKSKRQLTQYLKAHPGGPASSEFDWGTSDTPRRSARLSEKVKATESPEGEKTPKRGRSSSKRGKKEEKEDTEAANEAGEDGASEEGKGTDVEMKDAENAEDEKKEVPNADAAEKTEEGEDKKEEAPAVDAAEKTEEGEDKREEEAPAVDAAEKTGEKEVAPAVDATEETEKSTEGQAQPNYVAAPESEYKGDGKPGESEAAPLAFVDETAPHVIIGEEKKEENTENENSQAAESAVPSLASLEGEKKENGGAPEQPALPVAETKADAPPAEAEKGAENSGQPNTGSQEPKAANCDEGQIQPGASAVRCT

SEQ ID NO: 52302 - protein, 81 aa, Zea Mays
MARVVRDKRTGKTKGYGFVSFSNPTDLAAAIKEMNGKYVGNRPIKLRKSNWKERTDVEALQRQKNHVQRKPKIPKKSVLHK

SEQ ID NO: 52303 - protein, 311 aa, Zea Mays
MLRNATWTLSNFCRGKPQPNFDQVKPALPALQQLIHSQDEEVLTDACWALSYLSDGTNDKIQAVIESGVFPRLVELLMHPSASVLIPALRTVGNIVTGDDMQTQCVIDNQALPCLLNLLTTNHKKSIKKEACWTISNITAGNREQIQAVINANIIAPLVQLLQTAEFDIKKEAAWAISNATSGGTHDQIKYLVAQGCIKPLCDLLVCPDPRIVTVCLEGLENILKVGEAEKNLGAGDVNVYAQMIDDAEGLDKIENLQSHDNTEIYEKAVKMLESYWLEEEDDAMPSGDNPQNGFNFGNQPSVPSGGFNFG

SEQ ID NO: 52304 - protein, 94 aa, Zea Mays
MLSRFIPRNQTDNTVLRTRHLRSPSRPRRLLDPAGRRAAQRGFFLHPQCRSLAHVHCLELQSMALQLGDLEVWSFSNIKLITSHLVGKRLLKQH

SEQ ID NO: 52305 - protein, 435 aa, Zea Mays
MNYSLPIQSLFPFLYFMIRDLHIAKQTQDIGFYAGFVGASYMCGRAVSSTVWGIVADKYGRKPVIVLTLIAIVIFNTMFGLSSNYWMALITRCLLGIMCGYLGPIKAYATEVCRKEYNHLALAVVSSSRGIGLIIGPAIGGYLAQPADKYPSIFSQTSIFGRFPYFLPCLCISILAVIALIACIWFPETLHKHNGDAVDNSVETVEESLAGTDTEENGGGGCLKLFTNWPLMSAITLYCIFSLQDVAYAETFSLWAVSDRSFGGLSFTTTDVGNVLAMSGLFLFLYQMLIYPFLAKTVDHITLVRAVALLTLPVLASYPFFPSLSGFGLMVVVNCASFLKNTFSVTTITVFNILMNEAVTQDVRAAANGIAVTLMSISKAVAPAVAGIIFSWAQRRQTAAFLPGDHLVFFILNIFTFIGFVFTFRPFFVRGSAKH

SEQ ID NO: 52306 - protein, 257 aa, Zea Mays
MWRRRVGALLRSPRTSSSASSACQSRRHHLLPSEEPLALNRLARLFTSQAGSDGGDTQKPFIAFVLGGPGSGKGTQCTKIASDFGFAHLSAGDILRHEIASGSEKGELILEIIKEGRIVPSEITVELIRKAMEMNNAKRVLIDGFPRCEENRIAFERIVGTEPDIVIFFDCPEDEMVKRLLGRNQGRVDDNIETIKKRLKVFESLNIPVVDYYSSRGKVHKINATGTADEIFEAVRRLFSSLRGPFRSSCPIHLFKT

SEQ ID NO: 52307 - protein, 761 aa, Zea Mays
MDSVFPWQPSEAKAGIKECDKSVGNLLYAVATKYPTNALVHRPVLISYVLSTKIKNPAQLDAALSFLTNTGPDSLDVVKFEEACGVGVVVSIEEIKSTVTDVLEENMEAIKEQRYHINVGTLCGQVRKRHPWGDAKAIKEEIDKRLAEILGPKTEADNIKPVKKKKEKPAKVEEKKVAVATAAPPSEEELNPYTIFPQPEENFKVHTEIFFSDGNIWRAHNTKEILEKHLKATGGKVMTRFPPEPNGYLHIGHAKAMFIDFGLAKERNGHCYLRFDDTNPEAEKKEYIDHIQEIVHWMGWEPYKVTYTSDYFQALYEHAVELIQKGLAYVDHQTAEEIKEYREKKMDSPWRGRPIEESLKLFEDMRRGLIAEGAATLRMKQDMQNENKNMSDLIAYRIKFTPHPHAGDKWCVYPSYDYAHCMVDSLENITHSLCTLEFDIRRPSYYWLLVALGLYQPYVWEYSRLNISNTVMSKRKLNRLVTEKWVDGWDDPRLLTLAGLRRRGVSSTAINSFIRGIGITRSDNSLIRVDRLEYHIREELNKTAPRTMVVLRPLKVVITNLEEGKVLDLDGKMWPDASDTDASSHYKVPFSRTVYIEKTDFRLKDSKDYYGLAPGKSVMLRYAFPIKCTDVISGDSPDDIVEIRAEYDPLKTSKLKGVLHWIAEPAPGVEPLKVEVRLFEKLFMSENPAELEDWLGDLNPHSKEVIKDAYAVPSLATAVLGDKFQFERLGYFAVDTDSTPEKLVFNRTVTLRDSFGKAGPK

SEQ ID NO: 52308 - protein, 65 aa, Zea Mays
MHVTVSYNNYCLTLSLLLHPFVLDCHRPSYENFFFPIPSNPCGMRITGFLVNLQVNFCAVETYDV

SEQ ID NO: 52309 - protein, 232 aa, Zea Mays
MADGGELQLLGSWYSPYVIRAKVALGLKGLSYEFVEEDLSRKSDLLLKLNPVHRKVPVLVHGGRPVCESLVILQYVDETWAGTGTPLLPADAYDRAMARFWAAYVDDKFCKEWIKLYRSTTAEKAAEALGGVVPVVETLEQAFRECSKGKPFFGGDAVGLVDIALGSFVVWIRVVDEAAGVKLLDEAKFPALTAWAERFLAVDAVKEVMPDAGRLLEHYKGFLAKRSPPAGY

SEQ ID NO: 52310 - protein, 453 aa, Zea Mays
MVNGGRVSNWACINFSRNVQDSAARGFSHELAVMCQISGMDFALEPVLPPVTARPEHVERALKARYQDAMNILRPQGRELDLLIVILPDNNGSLYGDLKRICETELGLVSQCCLTKHVFKMSKQYLANVALKINVKVGGRNTVLLDALSRRIPLVSDRPTIIFGADVTHPHPGEDSSPSIAAVVASQDWPEVTKYAGLVSAQAHRQELIQDLFKVWQDPQRRTVTGGMIKELLISFKRATGQKPQRIIFYRDGVSEGQFYQVLLYELDAIRKACASLEPNYQPPVTFVVVQKRHHTRLFANNHSDQRTVDRSGNILPGTVVDSKICHPTEFDFYLCSHAGIQGTSRPAHYHVLWDENKFTADELQTLTNNLCYTYARCTRSVSIVPPAYYAHLAAFRARFYMEPDTSDSGSLASGARGPPPGAARSSTRGAGSVEVRPLPALKENVKRVMFYC

SEQ ID NO: 52311 - protein, 180 aa, Zea Mays
MLAKAVAHHTTAAFIRVVGSEFVQKYLGEGPRMVRDVFRLAKENAPAIIFIDEVDAIATARFDAQTGADREVQRILMELLNQMDGFDQTVNVKVIMATNRADTLDPALLRPGRLDRKIEFPLPDRRQKRLVFQVCTAKMNLSDEVDLEDYVSRPDKISAADIIEFKCGVKDYRFKVHLAF

SEQ ID NO: 52312 - protein, 332 aa, Zea Mays
MPSHKIEIFKSLDDWARDNILTHLKPVEKCWQPQDFLPDPASEGFHDEVKELRERAKEIPDDYFVCLVGDMITEEALPTYQTMLNTLDGVRDETGASPTAWAVWTRAWTAEENRHGDLLNKYMYLTGRVDMRQIEKTIQYLIGSGMDPRTENNPYLGFIYTSFQERATFISHGNTARHAKDFGDLKLAQICGIIASDEKRHETAYTKIVEKLFEIDPDGTVVALADMMKKKISMPAHLMFDGQDDKLFEHFSMVAQRLGVYTARDYADILEFLVDRWKVADLTGLSGEGNKAQDYLCTLASRIRRLDERAQSRAKKAGTLPFSWVYGREVQL

SEQ ID NO: 52313 - protein, 165 aa, Zea Mays
MRAGERTSGAAGPSMDKIEKATGEAGGRRNLSGPVNQTDSYAQRPRETVSMSLKEIMHSTDRSGERTMERPRTSSRTGSASRRAVASSSRQASSVEPSEQQYSRASRLFSSNSGSRPSSTQRVNPSPGEARATSLSRAAVARGARDEPLHRSLELLSLGGGGKRK

SEQ ID NO: 52314 - protein, 112 aa, Zea Mays
MSNGSDQTSVDAKGLSEKISQLESQLEQLSRELDDKIRFGQRPRSGAGRVTALAPTSLGEEPHATVVDRPRSRGGMEPPPRQEERWGFQGSRERGSFGASRNSDRPMARQRW

SEQ ID NO: 52315 - protein, 231 aa, Zea Mays
MTGKWLGSRQIRCNWATKTNSEEKPETDNHNAVVLTNGSSTNSATDASQDAGSKENPENNPDCTTVYVGNLGHEVNRDELHRHFYNLGVGAIEEIRVQQDKGFGFVRYSTHGEAALAIQMANGLVVRGKSIKCSWGNKPTPPGTTSKPLPPPVASYQPAVAMSGVPQGFTAAELLAYQRQLALSQAAAGQIAGQHGLAGQVSAGLLAAAGSQALYDGYPNQSSAQQLMYYN

SEQ ID NO: 52316 - protein, 223 aa, Zea Mays
MQPVKVYADRRSQPSRAVIIFCRVNQIDFEEVTVDLFKSQHLTPEFKKINPMGQVPAIVDGRFKLFERAKIESILDWHHSNLRRGAATLVMHTALAPFLGLTTSHEAVKQAEKLVMQSLGVIESVWLKGDAKFLLGIPQPSIADLSLVCEIMQLEILGDEVRDRFLGAHERILVWMDKVKKATSPHFEEAHELLFQVKKARMVQGSSSKAFESSTKLKTASKL

SEQ ID NO: 52317 - protein, 144 aa, Zea Mays
MLMYPDASIPVCQLSVQTDRDGTYHYNLGKALAPLREEGTLIIGSGSATHNLRKISPSDAPVPQWAAEFDTWLKDSLLNGRYEDVKRYEEKAPHARVAHPWPDHFYPLHVALGAAGDGAKAEQIHQCWSNGTLSYASYRFTTNT

SEQ ID NO: 52318 - protein, 91 aa, Zea Mays
MKVRAAVKRLCRFCKVVKRRGIVFVQCTANAKHKQRQGFSTIAEAAAVSCVHLPPPPPASGSASAAAFAESFMRKQGMGARFVEAVWKGVL

SEQ ID NO: 52319 - protein, 57 aa, Zea Mays
MEAASNQEPGRCGGDDDEAKRREAELASSRLLDPGFKPSKLSQDRLDKFKRKRSRCQ

SEQ ID NO: 52320 - protein, 467 aa, Zea Mays
MYYDDLPLWGFIGKVEKGGKDDPSEWKYYLYRHIIFDILYNNDRVIEINVHTDQSALVDLTEDKETNVEFLYSAKWKETPTPFEKRMEKYSSSSNMPHHLEVHWFSIINSCVTVLLLTGFLATILMRVLKNDFVKYAHDEEAADDQEESGWKYIHGDVFRFPKNKSLFSAALGTGTQLFALTTFIFLLALVGVFYPYNRGALFTALVVIYALTSGIAGYIATSFYCQLEGTNWVRNLLLTGCLFCGPLFLTFCFLNTVAIAYSATAALPFGTICVIVLIWTLVTFPLLVLGGIAGKNSKSEFQAPCRTTKYPREIPPLPWYRRTIPQMAMAGFLPFSAIYIELYYIFASVWGHRIYTIYSILFIVFIILLIVTAFITVALTYFQLAAEDHEWWWRSFLCGGSTGFFVYGYCLYYYYARSDMSGFMQTSFFFGYMACICYAFFLMLGMVGFRASLFFVRHIYKSIKCE

SEQ ID NO: 52321 - protein, 187 aa, Zea Mays
MNTHVHADHVTGTGLIKTKVPGVKSVISKASGAKADHFVDHGDKIHFGNLFLEVRATPGHTSGCVTYVTGDADGQPSPRMAFTGDALIIRACGRTDFQGGSSEQLYQSVHSQIFTLPKDTLLYPAHDYKGFTVSTVEEEAAYNARLTKDKETFKTIMNNLNLSYPKMMDVAVPANLVCGIQDPPPKI

SEQ ID NO: 52322 - protein, 205 aa, Zea Mays
MSSIGTGYDLSVTTFSPDGRVFQVEYATKAVDNSGTVVGIKCKDGIVLGVEKLVTSKMMLEGSNRRIHSVHRHSGLAVAGLAADGRQIVSRTKSEAASYEKVYGEPIPVKELADRVASYVHLCTLYWWLRPFGCGVILGGYDRDGPQLYMIEPSGVSYKYFGAALGKGRQAAKTEIEKLKLSELTCREGIVEVAKIDAGVHFAVV

SEQ ID NO: 52323 - protein, 513 aa, Zea Mays
MAQGSRLGITTVVSTDSIRHMMRSFADEKQSPLLYASTYHAGEYLDPIAVAQAKAKRNANKPTVVSHPNTSGDKDVTSGDKSQHGSSELPPRAELIGNKQMAVEGYKAQSEMVIDSLDRLITSWEEQKESVIVEGVHLSLNFVMGLMKKHPSIIPFMVYITNEDKHMERFAVRAKYMTLDPAKNRYIKYIRNIRAIQEYLCNRADKHLVPKINNTNVDQSVAAIHATVFSCLRRRAAGEQLYDLNTNTVAVVDEEYRNQRAANTLGSKGMFQLIQRKGSSRNLMALLNTDGSVTKAWHVSASDGNGNLNGITNNKKSPENPMLDPSQIGKAEAVNLQFGPFGISAWMSDTGGTSHTGSVEDLRPDSVETGGRNYSSCCSSPKMSDSTSKELMEDYSVYGSDEEADDPRDAETDDDLTDEERDMHEIDAGSVDEHSTKSDEEYEDLAMRDVMENGDWSDDDQAVGKTKNSPALESIHGSGAAEDDGIKSRYHHNLDLFLKMSKEVAGTRMPCAS

SEQ ID NO: 52324 - protein, 92 aa, Zea Mays
MACADTGEWGVQSRVQPPERGHGGRGRSPPPRRGYGGGRGDHGSVSLLVRNIPLRCRPEELRVPFERFGPVRDVYLPRDYHTGTVFLVEVNA

SEQ ID NO: 52325 - protein, 135 aa, Zea Mays
MKLSRELPRSKPRRKLRKAAARAIKLAQNRHASQNPTQGVRRCHLRRMRMTAEARKRRKRKITKTRCVVLVVTTTDRMSSGYAAMRARLGSMASVSRSLLPRPNTSSTTSVRTAAVVAREPEHDDAGYIHLSCLT

SEQ ID NO: 52326 - protein, 220 aa, Zea Mays
MAATWSSSCCAATASSSALLRHARVKSAPWVAGASRSSYRQRRRRRELSIRATAAAPPPPVVYADAGADNVASLKIKLLSAVSGLNRGLAASQEDLDRADAAARELEAAAGCPVDLSRDLDKLQGRWRLLYSSAFSSRTLGGSRPGPPTGRLLPITLGQVFQRIDVVSRDFDNIVELELGAPWPLPPLEATATLAHKFEIIGESTVHQSCPPLPPIPSQL

SEQ ID NO: 52327 - protein, 52 aa, Zea Mays
MMYNRWNQILVPDYGFMQLELIPMLVGFFTYKIATFAQAIQDSIPPVGNREG

SEQ ID NO: 52328 - protein, 138 aa, Zea Mays
MDATGTGAGGKAKKGAAGRKAGGPRKKSVTRSVKAGLQFPVGRIGRYLKKGRYAQRVGSGAPVYLAAVLEYLAAEVLELAGNAAKDNKKTRIVPRHVLLAIRNDEELGKLLTGVTIAHGGVLPNINPVLLPKKTAEKA

SEQ ID NO: 52329 - protein, 91 aa, Zea Mays
MGVSLPSGVCLANIYGSYSANCDSGEIRMLIPPIIGAQFWLDPCTFEAAVTERVDRPYVWYNFFYENMDLWIILKDVLYVLNPRKKLVSIR

SEQ ID NO: 52330 - protein, 71 aa, Zea Mays
MDEKEFWRMLDLFPVVRSRDYCADPGTSIRGTRQRSRVQEAAKGNDKDSSDAQDLFMQKLKMAAEKKLLLV

SEQ ID NO: 52331 - protein, 274 aa, Zea Mays
MIVAIRDIIPPAQRAAFNDVYIAYELMDTDLHQIIRSNQALSEEHCQYFLYQILRGLKYIHSANVLHRDLKPSNLLLNANCDLKICDFGLARTTSETDFMTEYVVTRWYRAPELLLNSSEYTAAIDVWSVGCIFMELMDRKPLFPGRDHVHQLRLLMELIGTPNEGDLDFVNENARRYIRQLPRHPRQSLPEKFPHVQPLAIDLVEKMLTFDPRQRITVEGALAHPYLASLHDISDEPGCSMPFSFDFEQHALSEEQMKDLIYQEALAFNPDYQ

SEQ ID NO: 52332 - protein, 731 aa, Zea Mays
MELEFHRNKERFGFLKWGSSAFRNMLVVPPGSGIVHQVNLEYLARVVFNNGGILYPDSVVGTDSHTTMVDGLGVAGWGVGGIEAEAAMLGQPMSMVLPGVVGFKLSGKLRNGVTATDLVLTVTQMLRKHGVVGKFVEFYGQGMSELSLADRATIANMSPEYGATMGFFPVDGKTLDYLKLTGRSDDTVAMVESYLRANKMFVDHSQVDAERVYSSYLELNLEEVEPCLSGPKRPHDRVTLKNMKSDWLSCLDSDVGFKGFAVPKESQGKVAEFSFHGTPAKIKHGDVVIAAITSCTNTSNPNVMLGAALVAKKACELGLEVKPWIKTSLAPGSGVVKKYLDKSGLQKYLDQLGFHIVGYGCTTCIGNSGELDESVSAAITENDIVAAAVLSGNRNFEGRVHPLTRANYLASPPLVVAYALAGTVNIDFEKEPIGISKDGKEVYFRDVWPSTEEIAEVVKSSVLPDMFKSTYESITKGNPMWNELPVSTSTLYPWDPSSTYIHEPPYFKDMKMSPPGPRPVKDAYCLLNFGDSITTDHISPAGNIHPDSPAAKYLKERGVERKDFNSYGSRRGNDEIMARGTFANIRLVNKFLKGEVGPKTIHVPSGEKLAVFDAAMKYKNEGHDTIILAGAEYGSGSSRDWAAKGPMLQGVKAVIAKSFERIHRSNLAGMGIIPLCYKAGEDADTLGLTGHERYTVHLPTNVSEIKPGQDVTVTTDNGKSFTCTLRFDTEV

SEQ ID NO: 52333 - protein, 227 aa, Zea Mays
MIKIWYTLRNAEYRLSFERNLELSEEVAECQKSDVIEDNHHDINLGTPVTIFRLAEEDMPQDPEKTDDESSYENMGEELGDLTLQAEEYIIQMQSRLDAMKKELHDLRRKNSALQMQRFVGEEKNDLLDYLRSLTPEKVAELSESSCPGVQEAIHSVVHGLLATLSPKIHSKAPPPLDNTSGGVLNLGGEDDDCAELVENASLPFQPLISVPRACCWVTTSGVWSTG

SEQ ID NO: 52334 - protein, 209 aa, Zea Mays
MCRSMGKAVIVATNMLESMIVHPTPTRAEVSDIAIAVREGADAVMLSGETAHGKFPLKAVKVMHTVALRTEATIPGGETPADLGQAFKNHMSEMFAYHATMMSNTLRTSIVVFTRTGFMAILLSHYRPSGTIFAFTDEERVRQRLALYQGVCPVQMEFSDDAEKTFGNALSYLLKHGMVKDGEEVALVQSGKHPIWRSQSTHNIQVRKI

SEQ ID NO: 52335 - protein, 113 aa, Zea Mays
MDRAELTTEQVLKRDIPWEHYMSTKLISGTCLQLLRRYDHKPESQRAPLLEEDGPAYIRVFLNILRSISKEETVEYVLALIDEMLATNPKRAALFYDQSLSGEDIYEPFLRLI

SEQ ID NO: 52336 - protein, 186 aa, Zea Mays
MHRDVKPHNVMIDHELRKLRLIDWGLAEFYHPGKEYNVRVASRYFKGPELLVDLQDYDYSLDMWSLGCMFAGMIFRKEPFFYGHDNHDQLVKIAKVLGTDGLNSYLNKYHIELDPQLEALVGRHSRKPWLKFMNGDNQHLVSPEAIDFLDKLLRYDHQDRLTAREAMAHPYFLQVRAVENSRTRAQ

SEQ ID NO: 52337 - protein, 253 aa, Zea Mays
MGNRAIAEIQFADYIFPAFDQIVNEAAKFRYRSGNEFNCGGLTIRTPYGAVGHGGHYHSQSPEAFFCHVPGLKVVIPRSPREAKGLLLASIRDPNPVVFFEPKWLYRLAVEEVPEEDYMLPLSEAEVIREGSDITLVGWGAQLAVLKEACEDAAKDGVSCELIDLKTLVPWDKETVEASVKKTGKLLVSHEAPVTGGFGAEIAASIAERCFQRLEAPVARVCGLDTPFPLVYEPFYMPTKNKVLDAIKATVDF

SEQ ID NO: 52338 - protein, 366 aa, Zea Mays
MIKAEECLKREKERVGHYLHISSEQKLLEKVQNELLAQYATPLLEKEHSGCSALLRDDKVEDLSRMYRLFSKISRGLEPISNMFKTHVTNEGTALVKQAEDSASNKKPEKKDIVGMQEQVFVWKIIELHDKYVAYVTECFQGHTLFHKALKEAFEVFCNKGVSGSSSAELLATFCDNILKKGCSEKLSDEAIEDALEKVVRMLAYISDKDLFAEFYRKKLARRLLFDKSANDEHERSILTKLKQQCGGQFTSKMEGMVTDLTVARDHQTKFEEFVAGHPELNPGIDLAVTVLTTGFWPSYKTFDINLPAEMVKCVEVFKEFYQTRTKHRKLTWIYSLGTCNINAKFDAKPIELIVTTYQFLTNDLF

SEQ ID NO: 52339 - protein, 310 aa, Zea Mays
MTGMRDPVAKRGRGRKAARGRRLENRHLRAPGYPASHAPPPNSATLALETPPSCPPLTVLILGSATIAPLPQISLTQGSKPLPSIQPPRRPQWIPTDGPPTMLFHALGCCWKLINHLIGLRKGSKSFEEARAAGFTEESGTLGDIWETVSGSDLVLLLISDVAQFILKVASHFLLADNYEKIFSHMKPNNILVLSHGFLLGHLQSLGLNFPKNISVIVVCPKGMGPSVSRLYVQGKEVNGTGINSSFVVHQDVDGRATDVALAWLVALGSPFTFATTLEQEYKSDIFGERGGTQNKEWMKSRPTKTLSRA

SEQ ID NO: 52340 - protein, 139 aa, Zea Mays
MKSEMSEYKNVVGGRLKLKGKALDVKEGGVKKKKKKHQLEESSQIEHDELHKGGDSGLPTDHNNELIEAGKVGDEEGNPHPDYDHLTPAERRYIEQKRKIDMQKLAKVANKSHRDRIQDFNQYLANLSEHYDIPKVGPG

SEQ ID NO: 52341 - protein, 159 aa, Zea Mays
MPGYIHKPGRIGIVSRSGTLTYEAVFQTTAVGLGQSTCVGIGGDPFNGTNFVDCLEKFVDDPQTEGIVLIGEIGGTAEEDAATFIQESKTQKPVVAFIAGLTAPPGRRMGHAGAIVAGGKGTAQDKIKALREAGVTVVESPAKIGSTMFEIFKQRGMVE

SEQ ID NO: 52342 - protein, 523 aa, Zea Mays
MTEMTTAERELDANTNYDWNRIQESGKDAELLFGPGYTGLANLGNSCYMASIMQVMFSIHPFISRYFEKQSLKAAFATAPADPTVDLNMQLTKLAHGLLSGKYSAPAKEGQEGIRSRMFKSVITANHPEFSSMRQQDVLEFFLHLIDRVEKANPGDRELNPFSGFKFVVEERVQCPSGKVSYNKRSDNVLSLSIPLHEATNKEQLEAFNEKKAAMNLDGKEVSNEDIVRPRVPLEACLSSFSGPEEIPDFYSTALNSKTTVTKTAGFTTFPDYLVLHMRKFVMETGWVPKKLDVYIDVPDTIDITHMRSKGLQPGEELLPEGGSGDDSAEPANPVASEDIVTQLASMGFNYLHCQKAAINTSNTGVEEAMNWLLSHMDDPDINDPISKDSRAYEPSVDEASVQTLISFGFQEDIAIKALKASGGNIEKATDWIFSHPEASTSASADSSTSNVNADDTYIPDGSGRYKLMAFVSHMGTSTHCGHYVAHVLKDGRWTIFNDSKVAVSVDLPKEMGYLYFFQRISN

SEQ ID NO: 52343 - protein, 111 aa, Zea Mays
MAATASLTTTAPSPPALLKASAPLLISFRPVSRHCKNLCIKTKATENDQSAKKHQKVKSILCQDCEGNGAIVCTKCEGNGVNSVDYFEGRFKAGSLCWLCRSLNLVLVSSK

SEQ ID NO: 52344 - protein, 491 aa, Zea Mays
MDNPEESGNTDYLENITIPSALITKSFGDKLKKVIDNGDMVSVNLDWREALPHPDERVEYEFWTNSNDECGLKCDSQIDFVKSFKGAAQVLEKKGYTEFTPHYITWYCPEAFILSKQCKSQCINHGRYCAPDPEQDFSKGYDGKDVVVQNLRQVCVFKVAKEHKKPWLWWDYVTDFAIRCPMKEKKYTKECADGVIKSLGLDHKAIDKCIGDPDADEENPVLKAEQDAQIGKGSRGDVTILPTLVINNRQYRGKLDKGAVLKALCAGFKETTEPAVCLSEDIQTNECLENNGGCWQDKAANITACKDTFRGRVCECPIVKGVKFVGDGYSHCEASGSGRCEINNGGCWKDTKNGRTYSACNDDGCKCPDGFKGDGRHKCEDIDECKERTVCQCKECKCKNTWGSYECGCSGGLLYMKEHDTCISKSGASEAGWGFLWVIFFGLVAAGVAGYAVYKYRIRRYMDSEIRAIMAQYMPLDNQGDVQSHSHHIEM

SEQ ID NO: 52345 - protein, 325 aa, Zea Mays
MAGLSLLCGDCGAQLRSVEEAQAHAEATNHANFVESTEAVLNFVCSDCGKPCRSQTEVDLHTKRTGHTEFADKTAEAAKPIDLEAPLKPASEDVMDVDTSASASGEPQEMVVPEVNKEMLTDLEGMGFSTARATRVLHFSGNSTIEGAINWLSEHQEDIDIDEMPLVPANSKTEDNKPSLTPEEMKIKAQELRDRARKKKEEEERRMEREREKERIRIGKELLEAKRIEEQNERKRMIELRKLEKEEEKRAREKIRQKLEEDKAERRRKLGLPPEDPAAAKPSAPLPVEEKKSALPVRPATKAERMRDCLRNLKQQNKVAENSCL

SEQ ID NO: 52346 - protein, 132 aa, Zea Mays
MMASMEPLLYAAHVDMVIAGHVHAYERAERVYNSRPDPCGAVHITIGDGGNREGLARRYRNPKPAWSVFREASFGHGELKIVNSTHAHWTWHRNDDEEPVRTDDVWINSLAGSGCIQEGSRDRESRKILMSP

SEQ ID NO: 52347 - protein, 302 aa, Zea Mays
MDRYQRVERPRNESTIEENEIRITAQGLIRNYVSYATSLLQERRIKEIVLKAMGQAISKSVAVAEIIKKRIPGLHQDTNISSVSITDVWEPIEEGLVPLEMTRHVSMISITLSPRELDKHTPGYQAPVYIEQPRQQQVPPPQRQPRRPPAQFQQLEYEDSYARGRGRGRGRGRGWGRGGYGGYGGYGNNQGGYHQGGGYYDNQGGYNGYDNQGGYSGYDNQGGYGGGYGYNQGRYGNYQENGGYNRGRGSGMRGRGNWGYRGGGYEGGRGGGYEGGRGGSAQGGRGYGGRGRGRMGGRGRGN

SEQ ID NO: 52348 - protein, 125 aa, Zea Mays
MQVDVSTGLLILGVLCHSLPLMLRYAVSSGEHAESSWDSGLELSRACSIVMLLAYVAYLFFQLKTHRQLFEPQPQEVEDDGDDSVSQDEAVLGFSSAMIWLGVMTLMTALLSEFVVSTIENLVNT

SEQ ID NO: 52349 - protein, 369 aa, Zea Mays
MLNGTIISNANAGDFFDNSSHSDGFLELKDFGDAANLDFPLGNGSSIWPLDCWAWKTPDSAESLNGTNDEIPPLPDDQTFQPDELEQLLQSIQEDSHLGSSIIDPPHSSMTNSVLPDEDCLMFYDAPFDSTMCDDGFAQNGILGSAATNLSGIGMVDDGMPYFDAMDGNLFNDILGSIQQPDGSSSHAFNGPVLTQEVNNTMFTYSPTQKVLEPNIVVGAPSSARLPEAGSQLNCVVLPDGQAKSSTIGKGFVRILDSISAPPAFAGEFPSNHRKSLARISGARPNTLHVSAEVIHIGSLAVPSGADKWALQKDQGMELLFSADFEPDARIHCGCNTITAVLRGGFCLFFVSAIMLLVSYEVGMCIYGK

SEQ ID NO: 52350 - protein, 55 aa, Zea Mays
MRPPVPAARAPRRLPASNARANQPGNLLAILARTAPGAREYRFQLQGPGAGEVVC

SEQ ID NO: 52351 - protein, 81 aa, Zea Mays
MATLSMVSVPIAPSSLSLSTRGRSSSASFPAKKRFNRVAIERLKEIRCYKGIRHKLGLPVRGQRTKNNCRTLKGKRASVVV

SEQ ID NO: 52352 - protein, 359 aa, Zea Mays
MIEGAGSLVDAHTVEVSQPDGSKQRYTAKHILIATGSRAQRVNIPGKDLAITSDEALSLEELPKRAVILGGGYIAVEFASIWRGMGAEVDLFYRRDLPLRGFDDEMRAIVASNLEGRGIKLHPGTNLSELSKTADGIKVVTDKGEELIADVVLFATGRTPNSQRLNLQAAGVEIDRVGAIKVDEYSRTSAPSVWAVGDVTNRINLTPVALMEATCFAKTVFGGQQVKPDHRDVPCAVFSIPPLSVVGLSEEQALEEANGDILVFISSFNPMKNSISKRQEKTIMKLVVDAETDKVLGASMCGPDAPEIIQGIAIAVKCGATKADFDSTVGIHPSAAEEFVTMRTVTRRLSPTSKPKTNL

SEQ ID NO: 52353 - protein, 390 aa, Zea Mays
MGPAVRSSVVIRATVVGLVLVGIALALPLAAALRPLREHVASIGAAASAGSWGDEHAFYKRDENDIGPYSWNITGTYKGSWTFAGATNGSSRFLEFVESKGDSVLELLSTPTKISGVHYVQGSVTFHDVIDNAHNGGVAQIRLEGVYIWPFRQLRMVANSGADGEPLQEEDYFLSNPYHLLRIFSSQVFQESSEEKNRRKNSLTYDMEKHCNTEIAAKVVRVSSNPNDGEHEKYRLEGLMESPAVDDDGECFSPILLNATSLNVEVYYNKAVNYTLMVTFISFLQVLLLIRQMEHSNTQSGAAKVSILMIGQQAIMDAYLCLLHLTAGILVESLFNAFATAAFFKFVVFSIFEMRYLLAIWKASRPLNSGEGWEIMRRELSVLYSRFYGI

SEQ ID NO: 52354 - protein, 574 aa, Zea Mays
MSAADPSAAPAAAADPDGPDSVRLTWNTWPRSKVEASRCVVPLAATISPTRVPDPSAASPPPLPYPPLRCKPPCSALLNPFARVDFAAKIWICPLCFSRNHFPPHYAAISESNVPAELFPQCSTVDYIVGGAGIPGVGGAPPPPPPVFLFVIDTCVIEEELEYVKMAMRKAVALLPEHALVGLVTFGTQVHLHELGFSDLSKIYVFRGTKEISKDQILDQLGLAGAGRPGFPKMPQQPGGPQVNGMHPPSTAGVNRFLLPVSDCEIALSTLLDELQPDQWPVEAGNRAIRCTGVALSVAAGLLGACMPGTGARIIALLGGPCTEGPGMIVSKDLSEPVRSHKDLDKDAAPHFQKAVKFYDGLAKQLVSQGHVLDVFASALDQVGLAEMKVAIERTGGLVVLSESFGHSVFKDSFKRIFEGGEQSLGLSFNGIIEINCSKDIKVQGIIGPCTSLEKKGAMCSDTVVGQGNTSAWKMCGLDRNTSLTVFFDVSPSERSSQPGNQNPHLYIQFVTSYQHPEGQMRIRVTTICRKWVDGSTNTEELVEGFDQETAAVVLARYISLKMEMEQILYSIPL

SEQ ID NO: 52355 - protein, 108 aa, Zea Mays
MLKDEREFDDALLAVVIRNLKLVKGDSKVIVMDSNGARSKAIARLLKKLGVQRPYLVKGGFQAWSKNLRVKELKPETALTSINEDVEEILEQIKPTPTLVFGSLLNGR

SEQ ID NO: 52356 - protein, 873 aa, Zea Mays
MASEERILVSVRLRPVNAREAERGDGSDWECTSTTTLMFRGNIPERAMFPASYTYDRVFNPKCSTRQVYEEGAKQVALSVLSGINSSIFAYGQTSSGKTYTMVGITERSMSDIYDYIDKHPEREFVLKFSAMEIYNEAVRDLLRPDATQLRLLDDPEKGTVVEKLTEETLKDKGHLLELLAVCEAQRQIGETSMNEASSRSHQILRLTIESSAKQFMGRGNSSTLLACVNFVDLAGSERASQTQSAGMRLKEGSHINRSLLTLGKVIRQLSKGRNGHIPYRDSKLTRILQSSLGGNARTAIICTMSPAHCHIEQSRNTLLFANCAKNVVTDAKVNVVMSDKVLVKHLQREIARLENELKFHGSAYTSNHADALREKDELIKQLEEQLKELMGQKETVQSQLDNFRRVAIDENFDDHAIRQWDQRNRSSESLPHNVSEDALSSFDTYDVVYGEQDGLGPKAFDVHPISILHQPRNHISDNIQIYQPNKEASSEVSEEHCKEVQCIETNELRRSPLFFPVDRYHVGTNIDEGKHDENITDTSDSAIKLYTCDSEPSSDTEKTNNDESLALKRCVISSRDSVLTRSRSCRASFMVIPNSWFGDSLDMRMTRPGDIFKYSQRRPKNVRSLYPENGHCSNDLTFTCNEEDEDAINNVVGITKVEEKLEECCTSQLEGNQDDVTEEILDIKHANDVDKDISVTSVDSPSRWPINFEKKQKEIIELWHECNVSIVHRTYFFLLFKGDKEDNIYLEVEHRRLSFIKSSFSVASEANAAATSSLRNLRHERDMLYRQMLRRLNLLERESLYNKWGIDLNSKQRRLQLSRRIWTQTDMEHVRESVALVAKLVEHLEKGQVIKEMFGLTFTLNPQAERRPFQLC

SEQ ID NO: 52357 - protein, 193 aa, Zea Mays
MDRDLKLHKSIDCFFSGTTAVAVIKQEHNLIIGNLGDSRAVLGTRDENNQLIAVQLTVDLKPNIPSEAQRIRQRRGRIFALPEEPEVARVWLPKYNSPGLAMARAFGDFCLKDHGVISTPDVSYHHITEKDEFVVLATDGSGTCYQTMRLLALSAEPHLRPLQPGFSSSRLTALGGLGSPLLRSMTALLSACS

SEQ ID NO: 52358 - protein, 646 aa, Zea Mays
MGGKSEQKSRKERRKEARSEKHKLRFLSWVGHQGGKKKKPSMSVVEPSSVEEKPKKEPDGMMKKKRKREAEGKRKPRSNFQEYLEMEMGGPVSMEEDLEMERKLAKKLKLKKGKLGGPDDGMDDLFADLGFGGDFGSDDGETKAYDWNVVEDTNLDKRKGKKKNKEKKDDTVMEEPDDIDEENGRKKKKKKKKDGMEKEELVDVGEENGQKRKKKKKMKDDSEMDEPDDEGVHMDEENDGAVLESEDGVSNVVELPKESKGKYVPPSLRNASNSESEEIAQMRRRVRGLLNRLSESNVESITQEIATLFRSVPRSDGSQIIGDEVLASCSRGPRGNEQYAAVFAAFVAGMACLVGVDFSAKILASIAKSFEDEYSKEDGLSLRNLTLLFCYLCIFGVTSSDLVYDLLSILSKRLTELDVSTVLTILQCCGMKLRGDDPCAMKDFVLSIQNSVNDLKLHSGVGADGKTDIRSRRMEFMLETICDIKNNKKRPKEDPSHHTRIKKWLQKLKAEDVLLRGLTWSRLLDPDKKGQWWLSGDVPSTVAKIEDVAAVISKDVAETKKLLQLAAAQRMNTDIRRAIFCIIMSAEDYVDAFEKLLRLGLSGKQDREIIRVIVDCCLHEKMFNKYYTVLASKLCNHEKNHKFSLQ

SEQ ID NO: 52359 - protein, 280 aa, Zea Mays
MDHENILALKDVIRPPTRENFNDVYIVTELMDTDLHQIVRSNQPLTDDHCQYFLYQLLRGLKYVHSANILHRDLKPSNLFLNANCDLKIADFGLARTTSETDLMTEYVVTRWYRAPELLLNCSQYTAAIDVWSVGCILGEIVTRQPLFPGRDYIQQLKLITELIGSPDDASLGFLRSDNAKRYMKQLPQFPRQDFRLRFRNMSPGAVDLLERMLVFDPSRRITVDEALHHPYLASLHEINDEPTCPAPFSFDFEQPSFTEAHIKELIWRESLAFNPEPPY

SEQ ID NO: 52360 - protein, 288 aa, Zea Mays
MYAFSTTTYVGFQAVMTEEMSEKFRGLPGVVFILPDSYLYPETKEYGGDKYDNGVITPRPPPVHYSRPSRTDRNRNYRGNYQDGPPQQGNYQNNRPPPEGGYQNNPPQQGNYQTYRSQQDGRGYAPQQNYAQGGQDGRGFGRNDYTDRSGYNGPPDFRSQTQYQGHVNPAGQGQGYNNPQERSNFSQGQGGGFRPGGPSAPGSYGQPSAPGSYGQPNTLGNYGQVPPSVNPGGNRVPGVNPSYGGDGRQGAGPAYGGDNWQRGSGQYPSPGEGQGNWQRHSRHLIVCR

SEQ ID NO: 52361 - protein, 246 aa, Zea Mays
MELFIMIDACRRASARSITVVIPYFGYARADRKAQGREPITAKLAANLLTEAGSDRVIVCDIHSTQALGYFDIPVDHIYGQPVILDYLASKTISEDLVVVSPDVGGVVRARAFAKKLLNARLAIVDKRRQGHNMSEVMNLIGDVKGKVAILIDDMIDTAGTITSAAALLKQEGAEAVYACCTHAVFSPPAIERLSGGVFEEVIVTNSILLPEDKCFPQLTVLSMANLVGETIWHVHRDGSVSSIFQ

SEQ ID NO: 52362 - protein, 129 aa, Zea Mays
MGQSMEMGTIHAGDFLRRFCSTLGMTNQAVNAAKEAVQRSEELDIRRSPISIAAAVIYMITQLSEDKKPLKDILGYWCGRRHHQKFVQGSVSLRLKAHPEYLRQGRRPEESLHTLGSFTFFPFCYINRN

SEQ ID NO: 52363 - protein, 254 aa, Zea Mays
MISFIYRIPHRGMLAKGRKVAGRREEMSANYAFGPQDDDAIIKHRLLTRTTTTRGEPPLKKLQKKFMSFATEIEKDADNISDCERLYKAFLHEINTFELPLLKSKAVVDANIREKESFNELQVEIERQILHAKTDIEDLKKQLEQSKIERQHKEECEAIRKLISLQPPRSETEKLIADLEKEITDLKAENVACIRTLELRKKQFALLLHVVEELQISIEDEQKSIADELRAIAGEQKMSMEEGSVGASDSMVVD

SEQ ID NO: 52364 - protein, 227 aa, Zea Mays
MEKYELLKDIGAGNFGVARLMRNKETKELVAMKYIPRGQKIDENVAREIINHRSLRHPNIIRFKEVVLTPTHLAIVMEYAAGGELFDRICNAGRFSEDEARYFFQQLICGVSYCHSMQICHRDLKLENTLLDGSPAPRLKICDFGYSKSSLLHSKPKSTVGTPAYIAPEVLSRREYDGKLPGNSACISLYRSPNKPIPVYSSASVSPFQHCKIGCICLSEFRNGMMP

SEQ ID NO: 52365 - protein, 112 aa, Zea Mays
MARHHQQRALLLFPLVFLLLLLAPPLAGAWGKEGHIMVCKIAEKYLSEKAAAAVQALLPESAGGELSTVCPWADQVRWHYHWASPLHYANTPQVCNFKYSLKIVYLPWRCRG

SEQ ID NO: 52366 - protein, 156 aa, Zea Mays
MHGGLSPELKNMDQIRNISRPVDVPDVGLLCDLLWSDPDKEIVGWGENDRGVSYTFGADIVAEFLQKHDLDLICRAHQVVEDGYEFFANRQLVTIFSAPNYCGEFDNAGALMSIDDSLVCSFQILKPSEKKRKAGAENMPKPGTPPRKIKISVTRI

SEQ ID NO: 52367 - protein, 1306 aa, Zea Mays
MATTTDAAPVAPVEEGNAAPAAAEEEPPKKVEAAVATTDAAPVAPASVEDENPALAAAAEEELTEKFESAAAAAAEEEDGEAAASVSAPVSEVESKSENGESGEGDPSLASPDAPESDEKGELQEEEQHDEERGAAVEVNVVDKIAEDVESPVAEEEKLVPEVEKGEEVGSGSAVGGELSDEEEVEVSPSPLGEEVAEVAEPQDKVAHVSEANGELGDGKEASDDVVALGGGEATNKDAVGDDVVALGGEETLEESTNKDADGDDSLGGGEASEESANKDADGDDVVAQGGEEALEESTKKDADVEDEAIRPEPPSEATAVVMNDGSIEELAPASAEEIIDSVREDSPQKEQSAEDQAVAGEVVEDVGVDKPTEVENVDATSADGILSRELAPESIKETNGTGEIEGATEVVDHEEEAADNDIIEAVPDDADGDGNEAEDDDDGTNSDTSPARVAILESSEAAKQIMKELAEGSSSGSISRDFTNSMDGQIMLDDSEDDDDDNDDDGDEKGFDSAALAALLKAATGGSSGGDITVTSQDGSRIFTMDRPAGLGSSAPSLRPTAPRQSARSNLFSPSELAVTADPTEEMTEEEKKLHDKVELIRVKFLRLVYRLGATPEETVAAQVLYRLSLAEGIRHGRQTNRAFSLDNARRKALLLEAEGKEDLNFSCNILVLGKTGVGKSATINSIFGEEKSRTDAFSSATTNVREIVGDVDGVKIRIIDTPGLRPNVMDQGSNRKILAAVKNYTKKCPPDIVLYVDRLDSLSRDLNDLPLLKTITAVLGSSIWFNAIVALTHAASAPPEGLNGAPMTYEVLMAQRSHIIQQSIRQAAGDMRLMNPVALVENHPSCRKNREGQKVLPNGQSWRHQMLLLCYSSKILSEANSLLKLQDPNPGKLFGFRFRSPSLPFLLSSLLQSRAHPKLSAEQGGNEGDSDVELDDYSDVEQDDDEEEYDQLPPFKPLTKAQLARLTKEQKNAYFDEYDYRVKLLQKKQWKDEIRRLKEMKKRGKTDLDDYGYANIAGENDQDPPPENVSVPLPDMVLPPSFDCDNPTYRYRFLESTSTVLARPVLDAHGWDHDCGYDGVSVEETLAILSRFPANVAVQVTKDKKEFSIHLDSSIAAKHGENASSLAGFDIQTVGRQLAYILRGEAKIKNIKKNKTTGGFSVTFLGDIVATGLKVEDQLSLGKRLSLVASTGAMRAQGETAYGANLEARLKDKDYPIGQSLSTLGLSLMKWRRDLALGANLQSQFSIGRGSKMAVRLGLNNKLSGQITVRTSTSEQVQIALLGLVPVAASIYRSFRPSEPSFAY

SEQ ID NO: 52368 - protein, 358 aa, Zea Mays
MNLIQEDKTKSWKKLVNVAVSGAAGMISNHLLFKLASGEVFGQDQPIALKLLGSERSFQALEGVAMELEDSLYPLLREVSIGIDPYVVFQDVDWALLIGAKPRGPGMERAALLDINGQIFADQGKALNAVASRNAKVLVVGNPCNTNALICLKNAPNIPAKNFHALTRLDENRAKCQLALKAGVFYDKVSNVTIWGNHSTTQVPDFLNAKIDGRPVKEVIKDTKWLEEEFTLTVQKRGGVLIQKWGRSSAASTAVSIVDAIRSLVTPTPEGDWFSTGVYTTGNPYGIAEDIVFSMPCRSKGDGDYELASDVLMDDFLWERIKKSEAELLAEKKCVAHLTGEGNAFCDLPEDTMLPGEV

SEQ ID NO: 52369 - protein, 669 aa, Zea Mays
MWRLRIAEGGGDPWLRTKNAHVGRQVWEFDASADPDPAVDAARRAFAGSRGHLKHSADLLMRIQFAKENPLELDLPAIKLGEHEDVTEEAVSTTLRRAISRLSTLQAHDGHWPGDYGGPMFLMPGLIITLYVTGALNTVLSSEHQKEIRRYLYNHQNEDGGWGLHIEGPSTMFGSALTYVTLRLLGEGPDSGDGAMEKGRNWILDHGGATYITSWGKFWLSVLGVFEWSGNNPVPPEVWLLPYLLPFHPGRMWCHCRMVYLPMCYIYGKRFVGRITPLVLELRKELFKDPYSKIDWDKARNLCAKEDLYYPHPFVQDVLWATLHKFVEPVMMSWPGSKLREKALETAMQHVHYEDENTRYICIGPVNKVLNMLACWIEDPNSEAFKLHIPRVYDYLWLAEDGMKMQGYNGSQLWDTAFIVQAIVATNLTEEFGPTLKLAHNYIKKSQVLDDCPGDLNDWYRHTSKGAWPFSTADHGWPISDCTAEGLKASLLLSKISPEIVGGPIEANRFYDAVSCLMSYMNDNGGFATYELTRSYAWLELINPAETFGDIVIDYPYVECTSAAIQALTSFRKLYPGHRRKEVDSCISKAANFIESIQKSDGSWYGSWAVCFTYGTWFGVKGLIAAGRTFESSPAIRKACGFLLSKELPSGGWGESYLSSQDQIASFYL

SEQ ID NO: 52370 - protein, 83 aa, Zea Mays
MLSPTTLRPLVPAAAPAHLTACFLPASGRRAPAAAVRAVRNYDSIPKREPFTSNRSTLDEFLRLDKPLVQRTKDQITVGGPCN

SEQ ID NO: 52371 - protein, 114 aa, Zea Mays
MQIFVKTLTGKTITLEVESSDTIDNVKAKIQDKEGIPPDQQRLIFAGKQLEDGRTLADYNIQKESTLHLVLRLRGGIIEPSLQALARKYNQDKMICRKFDTEVSLTAKPPCYLI

SEQ ID NO: 52372 - protein, 127 aa, Zea Mays
MIGRADIEGSKSNVAMNAWLPQASYPCGNFSDTSSFKLRRSKGSIGHAFTVRIRTGNQNQTSFYPFVPHEISVLVELILGHLRYLLTDVPPQPNSPPDNVFRPDRPGEAGPWSQKEGRCPASDPRNK

SEQ ID NO: 52373 - protein, 205 aa, Zea Mays
MKSDSEENRDEDSDEAGDKQEGDYVSGKEKAGKFSEVKESSGKKKANTGSGHQSGPPKKIIRSPVKKVSSKIHEEKESPNNSAKVFSRKKKPTAEKEIKEKKSSGKKVTKGKGESVEAVLPSKDDLRKTITEILKKVDFNTATFSDILKKLDNHYKMDLAPKKEAIKVMIQDELTKLSEEDEGEGAGDTEKKQQQPQAKEIEASR

SEQ ID NO: 52374 - protein, 72 aa, Zea Mays
MTTMTVIAQMTVMTHRWWLMKRLGQKRWQWTGQGPPSLLQTPMGGLLCLLGVVVAARNRVHGSCWLFSRNVC

SEQ ID NO: 52375 - protein, 157 aa, Zea Mays
MAAEGKTPSLAEEYSLPPQEVPVEKAAEEKPSSGTESEAAPSTNDETPPSVEDKNGTSEVQDAAENPEAEETNTAAEETPAVEEASETTEEEEAEKPEIKIETAPADFRFPTTNQTRHCFTRYVEYHRCVAAKGEDAPECDKFAKYYRSLCPGEWLG

SEQ ID NO: 52376 - protein, 225 aa, Zea Mays
MNDDLTKMRQATAQVLASQKRLENKYKAAEQASADWYRRAQLALQKGDEDLAREALKRRKSYADNASSLRSQLDQQKGVVENLISNTRLLESKIAEAKQKKDTLKARAQSAKTATKVSEMLGNVNTSSALSAFEKMEEKVMAMESQAEALGQLATDDLEGKFALLETSSVDDDLSQLKKELSGSSLKGELPPGRTAVSNSGAGRPFPDLEIESELNELRRKAKEY

SEQ ID NO: 52377 - protein, 143 aa, Zea Mays
MGMADAIVDLVSSGTTLRENNLKEIDGGVVLESQATLVASRKSLHKRKGVLEVTHELLERLEAHLRATAELMGPTVSPVYRRRDGKVDVEYYAINVVVPQKLLYKSIQQLRSIGGSGVLVTKLTYIFDEETPRWRNLLSELGL

SEQ ID NO: 52378 - protein, 221 aa, Zea Mays
MQLTNRTDDYIGFKVKTTSPKKYCVRPNSGIVPPRSTSDVIVTMQAQKEAPPDMQCKDKFLVQSVVVAEGTLVKDITGDMFTKESANVVDEVKLKVVYIPPPKPPSPVHEESEEGSSPRPSLSDGINLNYQEMQTTRESDESLLFSAVKTHIDQKDYTSETSALISKLTEERNSAIQQNNKLREELDLTRREANKQNGGFSFVVVVAIALLGMLLGYIMKR

SEQ ID NO: 52379 - protein, 182 aa, Zea Mays
MKRNPRQKMSDNLMEKVSAFGERLKITGTEVSKKMTAGMSSMSFKMKELFQGQTPADKIVEDATSENLDGPDWNSNLEICDLINTEKVNSVELIHGIKKRIMMKDARVQYLSLVLLETIVKNCEKAFSEVAAERVLDEMVRLIDDPQTVVNNRNKALMLIEAWGESGDELRYLPVYEETYKA

SEQ ID NO: 52380 - protein, 57 aa, Zea Mays
MREEKLGTANPDVDDEKRRLGELLKEAGRVRSRKAKSLENLLETNPYIATKRNAVAA

SEQ ID NO: 52381 - protein, 297 aa, Zea Mays
MQHIPLWVLKWQGLQNRVVFVTVITDLNTCHPTWFHADVNRCYCPSEEVAKRAALDDLQPSQIRVFGLPIRPSFCRAVLVKDDLRRELELDPELPAVLLMGGGEGMGPVKKTARALGESLFDKELGKPIGQLIVICGRNKTLSSSLQAVEWKIPVKVRGFETQMEKWMGACDCIITKAGPGTIAEALIRGLPIILNDFIPGQEVGNVPYVVDNGAGVFSKSPKETASLVARWFGPDSEELKKMSEKALKLAQPEAVFDIVKDMHELSQEQGVISQISSSLTSSFFLPSPESTPLQLI

SEQ ID NO: 52382 - protein, 158 aa, Zea Mays
MVQFTEFIQKNLHLYQFRNTIPLSTAAAANFTRGELATALRKNPYMVNVILGGYDKDVGASLYYIDYIATLHKIDKGAFGYGSYFCLSLMDKLYRPDMTVEEAVDLVDKCIKEIRLRLVVAPQNFVIKIVDKDGAREYARRELVGDSAPAEAAATVAA

SEQ ID NO: 52383 - protein, 190 aa, Zea Mays
MKKQIVVASKAMPFYCALPTLSEYMIESGWTRSYFDISEIGFSMYLCYMAMYLIFVEFGIYWMHRELHDIKPLYKYLHATHHIYNKENTLSPFAGLAFHPLDGVLQAIPHVFALFLFPTHFRTHIALLFLEAVWTTNIHDCIHGKIWPVMGAGYHTIHHTTYRHNYGHYTIWMDWMFGTLNEPEDILKKA

SEQ ID NO: 52384 - protein, 218 aa, Zea Mays
MAAVEVCVKAATGKPDTLGDCPFSQRVLLTLEEKKVPYEVKLVDLDNKPEWFLKISPEGKVPVFNGGDGECIADSDVITQTIEEKFPTPSLVTPVEYASVGSKIFPAFITFLKSKDASDGSEKALLDELQALDEHLKAHGPYINGENVSAADLSLGPKLFHLQVALEHFKGWKIPENLTNVHAYTKALFSRESFVKTKPSEEHVIAGWAPKRFGVVDL

SEQ ID NO: 52385 - protein, 76 aa, Zea Mays
MRKRRAGKLPGDTASVLKAWWQAHSKWPYPTEDDKARLVQETGLQLKQINNWFINQRKRNWHSNPTSSGEKTKKKR

SEQ ID NO: 52386 - protein, 84 aa, Zea Mays
MAAAVLGLQATVGALVGKALTTSLVPYYQGIPPGQSPVLALDIFLVQASANTILSHFLGLSSSLELLRSVTLSQTEAAPVPKTA

SEQ ID NO: 52387 - protein, 217 aa, Zea Mays
MALHIGQLLTSGKRTDIAFEVDGEMFPAHKVILSARSPVFRAQLFGPMKDKDMKCIKIEDMEAPVFKALLHFMYWDELPDLEELTGVNTTWVSTLMAQHLLAAADRYALERLKLLCELKLCEDVAINTVANTLALAEQHHCYQLKTVCLKFVALPENLKAVMQTDGFDYLQQSCPSLLTELLEYVAKIGEHSVSPCLYSTEVLDGGDANGRRVKPRI

SEQ ID NO: 52388 - protein, 197 aa, Zea Mays
MVSAVTSMLLSLGEDPLRKELLGTPQRYVQWLMKFKACNLLDVKLNGFTLSNVSLYERTGGGTTDHGAIRSELHLPFCAQCEHHLLPFYGVVHIGYFGNGSGEGIDRSHFQALVHFYGCKLQVQERMTRQIAEAVYSVSHNGAMVVVEANHICMISRGIEKIRSNTATIAVLGQFLADPSAKACFLQNVLDSVGSAV

SEQ ID NO: 52389 - protein, 279 aa, Zea Mays
MAIRSKAWISLLLALAAVLSARAEEPAAAEAEAVLTLDVDSFDEAVAKHPFMVVEFYAPWCGHCKNLAPEYENAAKELSKHDPPIVLAKVDANEEKNRPLATKYEIQGFPTLKIFRNQGKNIQEYKGPREADGIVDYLKKQVGPASKEIKSAEGVAAHFDDKKIYIVGIFKEFSGTEFTNFMELAEKLSSDYDFGHTLHANHLPRGDASVEGPLIRLLKPFDDLVVDSKDFDVAALEKFIDASSTPRVVTFDNNPDNHPYLMKFFQSSAPKLLLDINSI

SEQ ID NO: 52390 - protein, 270 aa, Zea Mays
MPDDRRAEREGEPSRLPPRRTMDRAQLLLVGLPALLFFSDLTHIFAPPPPHLRHPHHHPPHHQHPHPPHHPHSPHPHPHPPHHPHPHPPHHHQHPDPSTAIIQEPRVDEAGFGSTVELQFCASCSYKGTAVTMKRMLETSFPGIHVILHNYPPPFPKRVLSKVIPIVQVGAVATIMAGDQIFPRIGMVAPPWYYSLRANRFGTMATIWLFGNFAQSFLQSSGAFEVYCNGDLVFSKLAEQRFPSEFELRDLVGSRLPGSPFGRNPGKTLT

SEQ ID NO: 52391 - protein, 136 aa, Zea Mays
MLYDGDCPLCMREVNMLRERNKSYGAIKFVDISSKDYSPDDNQGLDYETSMGRIHAVLSDGTVVTDVEAFRKLYEEVGLGWVYAVTKYEPVASMANAVYGLWAKYRMQITGRPPLEEIMASRRAAGECKDDKVCKM

SEQ ID NO: 52392 - protein, 96 aa, Zea Mays
MVEKYNAVVSLWRRVSAMSKGLRYGDAVKLMSMLEDASNGFSSAVNSTISSLHPVQCTRERKVDVQLDLTTLPAFLAVFLLLWFLLRPRRPKPKIN

SEQ ID NO: 52393 - protein, 164 aa, Zea Mays
MLPKEYEEKSQLKEAASLKSGLTQTIEVSSEAKKRSLEAKSRGDDAFRRKDYLVAVDAYTQATELDPTDATVLSNRSLCWLRAGQAERALEDAKACRALRPDWAKACYREGAAHRLLQRFEEAANAFYEGVQLEPENTELVNAFREAIEAGRKFHGVNTPNSTQ

SEQ ID NO: 52394 - protein, 53 aa, Zea Mays
MMKMIMCGKRVNAEKITGDPCSLSNFELVSRHTGQNYFTDEPDYVERMITRNF

SEQ ID NO: 52395 - protein, 63 aa, Zea Mays
MAAMAPAAVSFLAMALLLLSDAEAKFLPNNITVVGSVYCDACSNNTFSKHSFFLKDDFGAHLP

SEQ ID NO: 52396 - protein, 50 aa, Zea Mays
MRTMMIQRGETNQSARSYGHSSLHDLLKRSSCRLFLAFVVSIHDTPFLEL

SEQ ID NO: 52397 - protein, 200 aa, Zea Mays
MKREGAGRGNWGTATDEGLEQDTVDAVNPEETTAVVEDEKKPEDAPQSEVEKDKEGAENEEEEKEPEDKEMTLEEYEKVLEEKRKALLSLKAEERKVEIDKELQAMQQLSVKKDGDEVFIKLGSDKDLKKKESAEREERGKKSLSINEFLKPAEGERYYNPSGRGRGRGRGGFRGGYNGGYRGPAAAPAIEDQAQFPALA

SEQ ID NO: 52398 - protein, 229 aa, Zea Mays
MEGFRVFSPDEWSGSGLDGTAYAAAELKKTLEGLARHLFGAVEMRWVDTYFPFTNPSFELEIYFQDDWLEVLGCGVTEQEILKRNGRRDHVAWAFGLGLERLAMVLFDIPDIRLFWSNDKRFTSQFSEGKLGVKFKPFSKFPPCYKDMSFWINGAFTENNLCEVVRGIAGDLVEEVKLIDNFTNKKGMTSHCYRIAYRSMERSLTDEEINNLQLNVREAVKDKLKVELR

SEQ ID NO: 52399 - protein, 173 aa, Zea Mays
MVSIWGRTESVLLASAFLCASFSRRTWSLLTRSVRAAASTWTSAWTWSISARAAAMARASASICAAWSARERTSPSRSARALVAATETARSSCCAAMSCCWSATWVAANRWLSTRSSWISWSRAARRSSMRAKAGCAAEARRCCARRPSSREDAGTAAGAAPGARPRRGGLGS

SEQ ID NO: 52400 - protein, 161 aa, Zea Mays
MVEKDWLSLVAVHSDAWLLSVAFYFGARFGFDKDARRRLFTMINNLPTVYEVVTGVAKKQSKAPNGSSKSSKSNSKINSNSKPVKPAHPNEEEDSGREDAEEDQAYLCGSCGESYANGEFWICCDICEKWFHGKCVRITPAKAEHIKQYKCPSCSTKRSRE

SEQ ID NO: 52401 - protein, 63 aa, Zea Mays
MAARLAQLRAQAVQAAEFASKHGGSYYKELMEKNKQYVVQPPTIEKCQELSKQLFYTRLARSV

SEQ ID NO: 52402 - protein, 597 aa, Zea Mays
MEGFEDGQEGSPTPAFKTADSPNCASWMQQDSTQSPPQTSGNSDSTSTQSLSSSNGDAQCRTDKIVFKLFDKVPSDLPPVLRSQILGWLSSSPTDIESHIRPGCIILTIYLRLVESAWQELSENMSLHLDKLLSSSTDNFWASGLVFVMVRRRLAFMLNGQIMLDRPLAPSSHHYCKILCVKPVAAPYSATINFRVEGSNLLSTSSRLICSFEGRCIFQEDTDSVAENDEYEDRAIECLSFCCSVPGPRGRGFIEVEDSGFSNGFFPFIIAEKDICFEVSELESIFESSSIEHADANDNAREQALEFLNELGWLLHRANRMSKENVTDTSVATFSMWRFRNLGVFAMEREWCAVIKMLLDFLFIGLVDVGSRSPEEVVLSENLLHAAVRRKSVNMVRFLLRYRPNKNSKGTAQTYLFRPDALGPSMITPLHIAAATSDAEDVLDVLTDDPGLIGISAWSNARDGTGFTPEDYARQRGNDAYLNLVQKKIDKHLGKGRVVLGVPSSICSVITDGVKPGDVSLEICMPMSASVPGCLLCSRKARVYPNSTSRTFLYRPAMLTVMGVAVVCVCVGILLHTFPRVYAAPTFRWELLERGPM

SEQ ID NO: 52403 - protein, 232 aa, Zea Mays
MTKSSQPLDFLEDSLIKECDPSHRCIIENKKFIACLKVSGEDSLALSLLMDNRGINPLDVSIMAPDYVTLAEDSIHVEANGHNETQVRVSVNDDANSTTIVIKVAEKSCNISIHSAITRETAGSGRVIRMPLTPTYTLLPVFLLLVAVAVCIVVRRWRNQDGDPAYQKLDMSDLPVSVGGKKEHDDRSDKWDDNWGDDWDDEEAPVTPSKPLPNPSSKGLAPRRSAKDGWKD

SEQ ID NO: 52404 - protein, 57 aa, Zea Mays
MPMAAKEFESELKKEPGEGGDQPPPATPTATGVGGAEKGLEASSSKESTSRRRGLLV

SEQ ID NO: 52405 - protein, 74 aa, Zea Mays
MDSSSGSQDKKFRDNDRPEAKEANSTAQHLVDFTEAEEDLVSRMHRLVGNRWEIIAGRIPGRTAEEVEMFSCNF

SEQ ID NO: 52406 - protein, 227 aa, Zea Mays
MKYQFPQTKGSQLSEVMTTASSEAIDLISSLCSWDPSKRPKATEVLQHTFFQGCTCVPLPVRRKASSLPKTPPCVGSKRISENSVARRFSTGTLSTMKSHSNAPAKSNGLSRTGVQRKLHLDRQPPQKSTKPTENSNKLATNRVPARNSPGNPVLRHSRSLPETGRRAVQKVSSITEKLSQMSVTSRTRSAVKPAAPTMKAGHGKSDFLGKSDDIPPAKRLTRKLVS

SEQ ID NO: 52407 - protein, 1840 aa, Zea Mays
MRVLGHNGEINTLRGNKNWMTAREGLLEAEKLGLSKEQLSRILPIVDATSSDSGAFDNVLELLVRGGRSLPEAVMMMIPEAWQNDVNMDPEKKALYEFLSALMEPWDGPALISFTDGRYLGATLDRNGLRPGRFYVTHSGRVIMGSEVGVVDVPPEDVLRKGRLNPGMMLLVDFENHTVVDDEALKAQYSKAHPYGEWLKRQKIYLKDIVESVPETDRVAPSISSSLSQKNENIDHVGISGILTQLKAFGYTVEALEMLLLPMAKDGVEALGSMGNDTPLAVMSNREKLTFEYFKQMFAQVTNPPIDPIREKIVTSMECMIGPEGDLLETTEKQCNRLALKGPLVSIDEMEAIKKMNYRGWRSKVLDITYPKKSGRKGLEETLNRICAEARKAIREGYTILVLSDRGFSSDRVAASSLLAVGAVHQHLVANLERTRIGLLVESAEPREVHHFCTLVGFGADAICPYLAIEAIWCLQNDGKITPNGDGQPYSKEELVAKYFYASNYGMMKVLAKMGISTLASYKGAQIFEALGLSSEVVGKCFEGTPSRIEGATFEMLARDALRLHELAFPSRALPAGSADAKALPNPGDYHWRKNGEIHLNDPLAMGKLQEAARVNSRAAYKEYSKRIQELNKACNLRGMLKFKHVSDKISLDEVEPASEIVKRFCTGAMSYGSISLEAHTALAIAMNKLGGKSNTGEGGEQPSRMEPLPDGSMNPRRSAIKQVASGRFGVSSYYLTNADELQIKMAQGAKPGEGGELPGHKVIGDIAVTRHSTAGVGLISPPPHHDIYSIEDLAQLIHDLKNSNPGARISVKLVSEAGVGVVASGVVKGHADHVLISGHDGGTGASRWTGIKNAGLPWELGLAETHQTLVANGLRGRAVLQTDGQLKTGRDVAVACLLGAEEFGFSTAPLITLGCIMMRKCHMNTCPVGIATQDPVLREKFAGEPEHVINFFFMLAEELREIMANLGFRTITEMVGRSDMLEVDPEVVKSNEKLENIDLSLILKPASEIRPGVAQYCVEKQDHGLDMALDNKLIDLSRTAIEKQVRVFIETPIQNTNRAVGTMLSHQVTKRYHMNGLPAGTIHVKFTGSAGQSFGAFLCPGITLELEGDSNDYVGKGLSGGKIVVYPPRNSSFSPEDNIVIGNVALYGATMGEAYFNGMAAERFCVRNSGAQAVVEGIGDHGCEYMTGGTVVILGKTGRNFAAGMSGGIAYVYDVDGKFSARCNNELVDLYHVEEEDDIITLKMMIEQHRRNTESVLARDILSDFDNLLPKFVKVYPRDYKRVLESMKVEKAVAKHAKEPKMANGISVTTKKVQPDQSASRPTHVANAKKYRGFITYERESISYRDPKERVRDWKEVAIESTPGPLLNTQSARCMDCGTPFCHQESSGAGCPLGNKIPEFNELVHQNRWREALDRLLETNNFPEFTGRVCPAPCEGSCVLGIIENPVSIKSIECAIIDKGFEEGWMIPRPPLQRTGRKVAIVGSGPSGLAAADQLNKMGHFVTVFERADRIGGLMMYGVPNMKTDKIGVVQRRVNLMAEEGVTFVVNANVGSDPLYSIERLRSENDAVILACGATKPRDLTIPGRELSGVHFAMEFLHANTKSLLDSNLEDGKYISARGKKVVVIGGGDTGTDCIGTSIRHGCTSLVNLELLSKPPSTRAADNPWPQWPRIFRVDYGHQEAATKFGKDPRTYGVLTKRFIGDGNGKVKALEVVRVKWEKVDGRFQLKEMEGSEEIIEADLVLLAMGFLGPEATIAEKLGLEKDNRSNFKAQFGDFATSVDGVFAAGDCRRGQSLVVWAITEGRQAAAAVDKYLSRYDQNAAATGDSTPSGTGLVQPVAA

SEQ ID NO: 52408 - protein, 290 aa, Zea Mays
MGEPSADFSAEDVSSISEVTTIDLLAVDEGSGLHEDSDDDYIDDPILSLESDSTDDLVNVDFISPAFPIGGVTESSISNSVAGNSSINGTPRLVSAMKGTRAKKGIKTKLSVSWATDVYDPPITSDSHTVKGHRKSSTKGNYKYKCSKSSSSSNHSTTGSKKDKKHSRHRSSSGGGSKRDRKHSYCSSASSNSSRVVTNGSLYGNTCSGGGISSSSRTTTCVPESAKVSTLMVAENATPQERVPVLKTPEPIKCTTSYGKEKPFALLSRQFPPARYKGMFSFWSQNQLAS

SEQ ID NO: 52409 - protein, 1184 aa, Zea Mays
MAPADGGGEQPHKAHRQHKSGAKARKKKGKGKGDAGDDAGGQQKNPKAFAFQSAAKAKRLQARSAEIEQRRLHVPIMDRSIGEPPPFVVVVQGPPQVGKSLLIKCLVKHYTKQNLPEVRGPITVVSGKSRRVQFVECPNDINGMIDAAKIADLALLLIDGSYGFEMDTFEFLNIMQVHGFPKVMGVLTHLDKFKDVKKLRKTKQRLKHRFWAEIKEGAKLFYLSGLIHGKYTKREVHNLARFISVIKPIQLSWRMAHPYLLVDRFEDVTPTESVRLNRKCDRTITLYGYLRGCNMKRGTKVHITGAGDFSLSGVTGLGDPCPLPSSAKKRGLRDKEKLFYAPMSGLGDLLYDKDAVYININDHLVQFSKSDENDAPKKQGKGKDVGVALVKTLQNPRYSLDEKLEQSFINFFGGRPAAQSKDSDAQGNVISASQDNQSDTNILQQVDDGNNSNAVTMESNEHSEGSSDSEGDNDDIQLRDRDVDLREEVEVCNGRLRRRAVSANFRDDFDDEGTDEDANDDEDSGDDQLSGDSASSADDSGEASDPEDELENTSKWKESLLARTMSRRSDNLMQLVYGLPSTKLGSVAEENDDSEANSSDDEFFRPKGQKQQAKNESPSFGDIDGEDCSKFFKAELKDWSNEDLIKSIRDRFVTGNWSKATLRGQDTDDRGEDDEEMYGDFEDLETGEVHMAQTDENVEAKDDPEVEERRLKKLAQRAKFDAQYDGSELSDDEVDDVKKKSRREQSNEGGYFDKLKEEMELRKQMNISELNDLDEETRVDIEGFRTGTYVRLEVHGVPFELVEHFDPCHPILVGGIGLGEENTGFMQASLKRHRWHRKVLKTKDPIIVSIGWRRFQTTPVYAIEDRNGRHRMLKYTPEHMHCFAMFWGPLAPPKSGVLAVQNLSNNQVPFRITATGWVQEFNNTARIVKKIKLTGTPCKIFKKTALIKGMFTSDLEVARFEGAAIRTVSGIRGQVKKAAKIEPGDMLKRKGENTEGIARCTFEDRILMSDIVFLRAWVNVEVPTYSNPVTTALQPREQTWQGMRTTAELRKAHNIPTPHNKDSVYKPIERKPRKFNPVEIPAKLQQLLPFKSKPKDTAKQKKAPVENRVPVIMQPSEKKTHAAIQQLRLIKHEKAKKKKIKEQQKKKAYEAEKAKTELLTKKRQREERRVRYREEDKQKKRARR

SEQ ID NO: 52410 - protein, 154 aa, Zea Mays
MKRINGEANVIAVNAAKENGVPKFILISVHDYNLPSFLLTSGYFTGKRKAESEVLSKYPASGVVLRPGFIYGKRKVNGFEVPLDAVGQPLEKLLSSVENFTKPLSSLPASDLILAPPVSVDDVAYAVINGVIDDSFFGVFTIEQIKEAASKVRV

SEQ ID NO: 52411 - protein, 99 aa, Zea Mays
MPLDGDSFCGSGPDSRRAPSPSTAAQRRHCRRRRSGSSAGAASDIRGRLRWRRRGRLWRKRMPRPCSCCGVCQSSAPALPIPVPVCSSPFRWCATWRKR

SEQ ID NO: 52412 - protein, 187 aa, Zea Mays
MPAIMTPGGALDLATVLLGNRIIFIGQYINSQVAQRVISQLVTLAAIDEEADILIYLNCPGGSLYSILAIYDCMSWIKPKVGTVCFGVVASQAAIILAGGEKGMRYAMPNARVMIHQPQGGSEGNVEEVRRQVGETIYARDKVDKMFAAFTGQPLDMVQQWTERDRFMSSSEAMDFGLLDALLETRY

SEQ ID NO: 52413 - protein, 334 aa, Zea Mays
MDSRCPHLLLLLPLLLLAALLPPPSSGVPEVIWLPTSGGAGPLSCAPPDPAVYDRPVIGIVSHPGDGAGGRISNTTATSYIGASYVKFVEAAGSRVIPLVYNEPEDRLLEKLSLLNGVLFTGGSEKEGVYFDTIKRVFQYVLDKNDAGEPFPLFAQCLGFELVSMIVSKDNNILEAFDAQDQASTLQFPSYALEGSVFQRFDTDLIKKVSTNCLVMQNHRYGISPRRYRENDALSSFFKILTTSPDENGKVYVSTVQANNYPITCTQWHPEKAIFEWRKPMIPHSEDAVQVTQHFANHFISQARKSPNRPPADKVLDNLIYNYSPTFTGKKSLY

SEQ ID NO: 52414 - protein, 787 aa, Zea Mays
MAPALSGTLGASSVAALRPCAGRRAPSAASSVAPRGSGVVRCSRGLRWDAHRSRGRLLRVRCDAAVVEKPAGEEAAGEKFEYQAEVSRLMDLIVHSLYSHKEVFLRELVSNASDALDKLRFLGVTDSSLLADGGELEIRIKPDLDAGTITITDTGVGMTKDELKDCLGTIAQSGTSKFLKALKENKDLGADNGLIGQFGVGFYSAFLVAEKVVVSTKSPKSDKQYVWEAVADSSSYVIKEETDPEKMLTRGTQITLFLRPDDKYEFADPSRIQGLVKNYSQFVSFPIYTWQEKSRTVEVEEDEEPKEVEEATKGEKKKKTITEKYWDWELANETKPIWMRNPKEIENTEYNEFYKKTFNEFLDPLAHTHFTTEGEVEFRSVLYVPGMAPLSNEEIMNPKTKNIRLYVKRVFISDDFDGELFPRYLSFVKGVVDSNDLPLNVSREILQESRIVRIMRKRLVRKTFDMIEEIAEKEDKEDYKKFWESFGKFIKLGCIEDTGNHKRLAPLLRFHSSKNEGDLISLDQYVESMPESQKAIYYIATDSLQSAKTAPFLEKLVQKDIEVLYLIEPIDEVAIQNLQTYKEKKFVDISKEDLELGDEEEETKETKQEFTLLCDWVKQQLGDKVAKVQISKRLSSSPCVLVSGKFGWSANMERLMKAQTLGDTSSLEFMRGRRIFEINPDHPIIKDLSAACKNEPESTEARRAVELLYEAALISSGYTPESPAELGGKIYEMMAIALGGRWGRSDMEEAEASTGEASAEADSSEGTVAEVIEPSEVRPESDPWRDQ

SEQ ID NO: 52415 - protein, 170 aa, Zea Mays
MGLTYDVSFELNLFDKLGLGWYVIAVTSTPSKVHKAVDACKGVLRGLHSSRIVERELDRAKRTLLMKHEAETKTNAYWLGLLAHLQSSSVPRKDVSCIRELTTLYESATIEDLYLAYEHLKVDDSSLFACIGIAGAESGEDTNDDELDVDLHGMAPMGGRGLSTMTRPTT

SEQ ID NO: 52416 - protein, 231 aa, Zea Mays
MACPAQSMLSASGCIFLRSKPQAASQVRGGIIGGGRSSRPFLLTCNASSSPSPSSPAPAQEDPDCNEEECAPEKEVGSLSAEWLAEERTQVVGTFPPKKKGWTGLVEKDTAGQTNIYSVEPMVYVAESAISSGTAGTSAEGAENTAAIAAGLVLITVAAASSILIQVNKSQVPQVPEAAYSGPPLSYYVTKFQPAVAAPAQTLEAPAPDEAQDGAAATVEAPEVPAPQLSF

SEQ ID NO: 52417 - protein, 434 aa, Zea Mays
MVQRTLGLLRSYAHVRSYNSQLSALVSATSECSNLPRRCYYLPNPSPYQVWSRSFASDNGDKFEAVVPFMGESVTDGTLANFLKKPGDRVEADEPIAQIETDKVTIDVASPEAGVIEKLIASEGDTVTPGTKVAIISKSAQPAETHVAPSEEATSKESSPPKVEDKPKVEEKAPKVDPPKMQAPKPTAPSKTSPSEPQLPPKERERRVPMPRLRKRIANRLKDSQNTFAMLSTFNEVDMTNLMKLRSDYKDEFVTKHGVKLGLMSCFVKAAVSALQNQPIVNAVIDGDDIIYRDYVDISVAVGTSKGLVVPVIRDADTMNFADIEKGINNLAKKATEGALSIDDMAGGTFTISNGGVYGSLLSTPIINPPQSSILGMHSIVQRPVVVNGDILARPMMYLALTYDHRLIDGREAVFFLRRIKDVVEDPRRLLLDI

SEQ ID NO: 52418 - protein, 202 aa, Zea Mays
MVLGLYTFADIDADGAPRLEVADGEEFVRVDRVVELALGPRVLKAPGTLYLTTRRVIWVSDGGEGYAVDFVAISLHAVSRDPEAYPYPCIYTQIETEAISDEESDVSDSETNGELELSKVMEMRIIPSDPGQLDELFEAFCNCAELNPDPSAESDEEHGWVHGDEGYEDTVDGSDTEFSDVNPIGQTGEQDINHAVIEDCNI

SEQ ID NO: 52419 - protein, 90 aa, Zea Mays
MAEVFDMEELDSAFGGKNPATFEYNSYAEQMQDDDKKMGSSHGSANSLLGSAGKEANGADSDASSEASFYSGTDSPTHENGEHSIAKKNG

SEQ ID NO: 52420 - protein, 94 aa, Zea Mays
MCYVKDTRFPTTPRSSRESSTGSPAGTTPPTLSPSRPQRRPSPTWSAGSTSTSTESSLHCTHQTEFNKPQQCCDILFGFMAPQIDLSWLRPLLL

SEQ ID NO: 52421 - protein, 337 aa, Zea Mays
MARKLRFFKEQMSKADIGPTQLNETHLDFDDLEIKLGELEAELTEVNANNEKLLRTYNELLEYHTVLQKAGDFFYSAQRTAASQQRELEANQSGQTSLESPLLEQEMSTDPSKQVKLGSLSGLVPKEKAMAFERILFRATRGNIFLRQEPVDEPVTDPVSGEKVTKNAFVIFYSGERAKTKILKICDAFNANRYPFPEDVSKQLHAVQEVSGKISELKATIDMGLAHRDSILKNIASDFEQWNHLVKKEKAIYHTLNMLSVDVTKKCLVAEGWSPVFASIQIQDALQRATVNSKSQVGSIFEVLNTKESPPTYFQTNKFTSAFQEIVDAYGSGINVI

SEQ ID NO: 52422 - protein, 373 aa, Zea Mays
MAAPEAPACYVGIARQSAAFRLMKQMGWEEGEGLGKDKQGIKGHVRVKNKQDTLGVGVDSPHNKWVYDTTQFDNILKKLKVQSANPVQEEVAAVESDSPDITPKKDKSAKHEVTKVTRPQGRYKKRERGKSVNSYSATDLQGILVRKNEDNSKVDQKLEPTCLDEPDPIICLDAVSQADDVNWWGHKFGFLSGGFLGAKSRKNKSSQKDLANVRQTFAEEDQENLYNLVQVATSGKQGLGIKGLPMKVAGQRWKGNKTSFVDSDDDNSAQSDEYSEIEENGDEEEHISASESIDTDKNADKELLVDARPKTKVKKLCKRILRQAPSQSMKLKDLKVAVEEHSNVVFSSFSGRREALLFLKKKLYQQLNLECKA

SEQ ID NO: 52423 - protein, 66 aa, Zea Mays
MTSGAQQALRRTMEIYSNTTRFALACNTSSKIIEPIQSRCAIVRFSRLSDQEILGRLMIVVAAEKC

SEQ ID NO: 52424 - protein, 730 aa, Zea Mays
MFWHVPGLSAASPVDTILDKENFKLECLLDEDEIIQECKALNTRLINFLRDKVQVEQLLRYIVEEAPEDAEKKRIFRFPFIACEIFTCEVDVIMKTLVEDEDLMNLLFSFLKPDHPHGTLSAGYFAKVVICLMIRKTLPLVSYVQGHPEIVSQLVDLIGITSIMEVLIRLIGADETMYSSYADSMQWLDDIQVLEMIVDKFSTSDSPEVHANAAEILCAVTRYAPPALAAKISSPSFVGRLFQHAFEDSRPKSVLVHSLSVCISLLDPKRLVSASYQAFRSQLSHGTLVTASPETVNGMLDSLGDLLKLLDVSSAENVLPTTYGSLQPPLGKHRLKIVEFISVLLSIGSAAAETRLIQLGAIKHAIDLFFEYPFNNFLHHHVENIIGSCLESKQDRLIGHVLDDCKLVTRILEAEKNSALSSDLTKHTMSSEGRSPPRIGIVGHMTRIANRLLQLVNTNIMVQSHLQQNSDWIEWHASTLTKRNALENVYQWACGRPTSLQDRGRDSDDEDFRDRDYDVAALASNLSQAFKYGIYSSEDIDEAQASLERDDEDVYFDDESAEVVISSLRLGDDQESGSLFTNSNWFAFDEDKALNDGLVSSEASPSPNSEISALKEDDEHDEVILGEIIDEIKGSEPTLPVFNKDANKESGSTGLANGTVDKFEDDIRPPTPDVKESQPEFVEWKEEEAEPGDIAEKDTAVPDIEVENEKQLDSMDDHCQLLRHCPLSSS

SEQ ID NO: 52425 - protein, 114 aa, Zea Mays
MEPRIGNKFRLGRKIGSGSFGEIYLGTNIQTNEEVAIKLENVKTKHPQLLYESKIYRILQGGTGIPNVRWFGVEGDYNVLVMDLLGPSLEDLFNFCSRKLSLKTVLMLADQMAH

SEQ ID NO: 52426 - protein, 93 aa, Zea Mays
MFGGATSGHFRDDIEADVYVPEADILSVLDVPPGKMGRVIGRKGSTIMAVKECCKVEIHIGGAKGPPDRVFIIGPEKEVRKAEAIFRGRMLEF

SEQ ID NO: 52427 - protein, 314 aa, Zea Mays
MVNQRGPSAIWLSELLELDRLGLSSRQNALRLVKPLQLRRDELFLNLVMEFVPESLYRVLKHYKDMKQRMPLIYVKLYMYQIFRGLAYIHTVPGICHRDIKPQNILVDPLSHQVKVCDFGSAKILIKGEANISYICSRYYRAPELIFGATEYTTSIDIWSAGCVLAELLLSQPLFPGESAVDQLVEIIKVLGTPTREEIRCMNPNYTEFKFPQIKACPWHKIFHKRMPPEAIDLVSRLLQYSPNLRCSALEACAHSFFDELRESHARLPNGRPFPPLFNFKQELANAPPELVSRLLPEHARRHSGFGSLFGSGP

SEQ ID NO: 52428 - protein, 547 aa, Zea Mays
MVTAETGQFKDQLWRTFRSIALTFLLISGIGALIEDRGISKGLGLNEEVQPSIESKTKFSDVKGVDEAKSELEEIVHYLRDPMRFTCLGGKLPKGVLLVGPPGTGKTMLARAIAGEAGVPFFSCSGSEFEEMFVGVGARRVRDLFAAAKKRSPCIIFIDEIDAIGGSRNPKDQQYMKMTLNQLLVELDGFKQNEGIIVIAATNFPESLDKALVRPGRFDRHIVVPNPDVEGRRQILESHMSKILKGDDVDLMIIARGTPGFSGADLANLVNVAALKAAMDGAKAVTMDDLEYAKDRIMMGSERKSAVISDECRKLTAYHEGGHALVAIHTEGAHPVHKATIVPRGMALGMVAQLPDKDQTSVSRKQMLAKLDVCMGGRVAEELIFGDTEVTSGASSDFQQATAMARAMVTKYGMSKQVGLVSYNYEDDGKSMSSETRLAIEQEVKNFLENAYSNAKTILTKHNKELHALANALLEHETLTGAQIKNILAQVHNKQQHEHTIEAPQKASVAPASPASPAASAAAAAAAAAAAAQQAAAKAKGVAGMGS

SEQ ID NO: 52429 - protein, 164 aa, Zea Mays
MIYGRVDVIAPEQCPPEGRLPAAGPPSPAEHLREVFYRMGLNDKEIVALSGAHTLGRARPERSGWGKSETKYTKDGPGAPGGQSWTSHWLKFDNSYFKAIEERRDDHLLVLPTDAVLFEDSSFKIYATKYAKDQDTFFEDYAEAHAKLSNLGAKFDPPKGISLE

SEQ ID NO: 52430 - protein, 97 aa, Zea Mays
MSMYSKLKNHPNSEISKKANMFVFSFQAMDFMKVSSIPVPKSTGYETYFTKFGSKKNYYASLEEPEVGIEQIVPYIIFLVSPIFLVAFVALRKSFQL

SEQ ID NO: 52431 - protein, 159 aa, Zea Mays
MKALQIAEKARDALLSGKFDQVRVNLPNGDMVGHTGDIEATVVACKAADEAVKIILNAVEQVGGIYLVTADHGNAEDMVKRNKSGKPLLDKNGGIQILTSHTLQPVPVAIGGPGLHPGVKFRNDIQIPGLANVAATVMNLHGFEAPADYEQTLIEVADN

SEQ ID NO: 52432 - protein, 1142 aa, Zea Mays
MDESKVVMKGRLGPGMMITVDLQTGQVLENTEVKKTVASASPYGTWLQECTRLIKPVNFLSSTIMDNETVLRHQQAFGYSSEDVQMVIESMASQGKEPTFCMGDDIPLAVLSQRPHLLYDYFKQRFAQVTNPAIDPLREGLVMSLEVNIGKRGNILEVGPENADQVALSSPVLNEGELETLLNDSKLKPKVLSTYFDIRKGLDGSLDKTIQALCEEADAAVRSGSQLLVLSDRSEAPEPTRPAIPILLAVGAIHQHLIQNGLRMSASIVADTAQCFSTHHFACLIGYGASAVCPYLALETCRQWRLSNKTLNLMRNGKMPTVTIEQAQRNFIKAVKSGLLKILSKMGISLLSSYCGAQIFEIYGLGQEVVDLAFCGSVSKIGGLTLDELGRETLSFWVKAFSEDTAKRLENFGFIQSRPGGEYHANNPEMSKLLHKAIREKRDNAYTVYQQHLASRPVNVLRDLLELKSDRAPIPIGKVESATSIVERFCTGGMSLGAISRETHEAIAIAMNRIGGKSNSGEGGEDPIRWNPLTDVVDGYSPTLPHLKGLQNGDTATSAIKQVASGRFGVTPTFLVNADQIEIKIAQGAKPGEGGQLPGKKVSAYIARLRNSKPGVPLISPPPHHDIYSIEDLAQLIYDLHQINPKAKVSVKLVSEAGIGTVASGVSKANADIIQISGHDGGTGASPISSIKHAGGPWELGLTETNQTLIQNGLRERVVLRVDGGFRSGQDVLIAAAMGADEYGFGSVAMIATGCVMARICHTNNCPVGVASQREELRARFPGVPGDLVNYFLFVAEEVRAALAQLGYEKLDDIIGRTDLLKPKHISLVKTQHIDLGYLLSNAGLPEWSSSQIRSQDVHTNGPVLDETILADPEIADAIENEKEVSKAFQIYNVDRAVCGRVAGVIAKKYGDTGFAGQLNITFNGSAGQSFGCFLTPGMNIRLVGEANDYVGKGMAGGELVVVPVDKTGFVPEDATIVGNTCLYGATGGQVFVRGKAGERFAVRNSLCQAVVEGTGDHCCEYMTGGCVVVLGKAGRNVAAGMTGGLAYILDEDDTLVPKVNKEIVKMQRVNAPAGQMQLKGLIEAYVDKTGSEKGIAILREWEAYLPLFWQLVPPSEEDSPEACAEFERVLAKQATTQLSAK

SEQ ID NO: 52433 - protein, 175 aa, Zea Mays
MICMALSSKALVITGIDDRRYWQHMPTSESRFQSVAYLQQIWWFEVVGEVDFCFPVGTYSLYFRVHLGKFYRRFGRRQCTSEHVHGWDKKPVRFQLSTSDGQQALSQCYLEEPGSWVLYHAGDFVASKPDQLMKLKFSMAQIDCTHTKGGLCIDSVLIYPKGKGFHQERVVRSQK

SEQ ID NO: 52434 - protein, 98 aa, Zea Mays
MASIAGSSALSFARPVKAINTNSLAFSPARKGNTFLRLQPMPMRSVSCAAKKDTTDKVEIVMSLEEHFDISVEESSAQTIATVEDAADLIDKLVAGKA

SEQ ID NO: 52435 - protein, 200 aa, Zea Mays
MLDYLFKLLLIGDSGVGKSCLLLRFADDSYLDSYISTIGVDFKIRTVEQDGKTIKLQIWDTAGQERFRTITSSYYRGAHGIIIVYDVTDQESFNNVKQWLNEIDRYASDNVNKLLVGNKSDLTANKVVATETAKAFADEMGIPFMETSAKNATNVEQAFMAMAASIKDRMASQPAAANARPATVQIRGQPVNQKTSCCSS

SEQ ID NO: 52436 - protein, 152 aa, Zea Mays
MWLTFLPKIIPEKCKYQVLSTKVEIRLAKAEQVTWTTLDYSGRPKAIPQKISTPAETAPRPSYPSSKSKKDWDKLEAEVKKEEKEEKLEGDAALNKFFRDIYKDADEDMRRAMDKSFRESNGTVLSTNWKDVGSKTVEASPPDGMELKKWEI

SEQ ID NO: 52437 - protein, 541 aa, Zea Mays
MPVGPRVQRLHPVLEPARLRLASHLRRRPRPRNPSNSPRRPSSFSIKFTPPPNLESPSRCFSTDPDADADATAAPSPVPTPLPGPRSRDPGRRAMANIDMAKILADLDRGASGGDARVPKTKLVCTLGPASRTVPMLEKLLRAGMNVARFNFSHGTHEYHQETLDNLRQAMHNTGILCAVMLDTKGPEIRTGFLKDGKPIKLTKGQEITVTTDYDIKGDENTIAMSYKKLPVDVKPGNVILCADGTISLAVLSCDPDAGTVRCRCENTAMLGERKNCNLPGIVVDLPTLTEKDKEDILGWGVPNDIDMIALSFVRKGSDLVTVRQVLGQHAKRIKLMSKVENQEGVVNFDEILRETDAFMVARGDLGMEIPVEKIFLAQKMMIYKCNIAGKPVVTATQMLESMIKSPRPTRAEATDVANAVLDGTDCVMLSGESAAGAYPEVAVKIMARICIEAESSLDHEAVFKAMISSEGPARHSLIYRGLIPLLAEGSAKATDSESTEVILEAALKSAVQKQLCKPGDAIVALHRIGVASVIKICIVK

SEQ ID NO: 52438 - protein, 428 aa, Zea Mays
MLGRTRDQIRTTEQVKATIGTCQALKLDALVIIGGVTSNTDAAQLAETFAQLKCPTKVVGVPVTLNGDLKNQFVETTVGFDTICKVNSQLISNACIDALSAEKYYYFIRMMGRKASHVALECALQSHPNMVILGEEVSVSKLTIFDITKQICDAVQARAEKDKYHGVVLIPEGLVESIPELYALLQEIHGLHNKGVSVENISSHLSPWASALFEFLPPFIRKQLLLHPGSDDSAQLSQIEIEKLLAQLVETEMDKRLVLGHVCYHIVAAGLNGYMATVTNLKSPVNKWKCGAAPITSMMTVKRWSRGAATSQIGKPAVHMASVDLKGKAYELLRQNSSSFMMEDIYRNPGPLQFEGSGADTKPISLCVEDQDYMGRIKKLQEYLEKVKSIVKPGCSQDVLKAAVSAMASVTEMLTIMSSLSFSGQATI

SEQ ID NO: 52439 - protein, 199 aa, Zea Mays
MPRLVEVVKGSTKEKVVRVVVLSFRNLLAKGAFAAQMIDLGLPQMVQNLKAQAWTDEDLLDALNQLEVGLKENLKKLSSFDKYKQQVLLGHLDWSPMHKDPSFWRENINNFEENDFQILRVLMTIIDTSSDTTALAVACYDLSQFLQYHPSGRIVVADLKAKDRVMKLMNHENTEVRKNALICVQRLFLGAKYASFLQA

SEQ ID NO: 52440 - protein, 210 aa, Zea Mays
MVAPDVKAETMKLMDQRGALEAEMDAIIARLTAAGGPGITGGLVDAEGFPRSDIDIPNVLAQRRRLAELRNDHKDITNKIGKNLEVLHSAKLSRNEQSTSRRSDTTDPSHFGSSQSEPMEEDHVTGLPFAMIDEIADGSPASVDGLQLGDEIVKFGNVEAGDQLQERLMSEALSNEDSQVSLVIIRQGSAVNLTITPRKWHGRGLLGTWN

SEQ ID NO: 52441 - protein, 131 aa, Zea Mays
MANSNLPRRIIKETQRLLSEPAPGISASPSEENMRYFNVMILGPAQSPYEGGVFKLELFLPEEYPMAAPKVRFLTKIYHPNIDKLGRICLDILKDKWSPALQIRTVLLSIQFSACICSSRVSTYLYGYSIS

SEQ ID NO: 52442 - protein, 262 aa, Zea Mays
MRCVLEPGDKIVDCPPTFTMYEFDASVNGALVIKVPRLPDFSLDVDLIVEVVEQEMPKCIFLTSPNNPDGSVINDEDLLKILDLPILVVLDEAYIEFSSLQSRMAWVKKHDNLIVLRTFSKRAGLAGLRVGYGAFPLSIIEYLWRAKQPYNVSVAAEVSACAALQNPTYLENVKNLLVKERERLFNLLKGIPFLKPFPSHSNFILCEVTSGKDAKKIKEDLAKMGVMIRHYDKKELKGYIRISVGKPEHTDALMKGLNALRL

SEQ ID NO: 52443 - protein, 199 aa, Zea Mays
MTSHLSCQPERSNSLLYLRPVLLRVIVVDVLARHSVEAVVPAVEGHPDGRDDVAPSLAGVLQRVLQVVQAVCRPGVDELGGEPRRPLPAPVQAVHQTLGEGIDVAEGLEAGEVRPDPGDGDADIGVGGGLLGVERRDRLDAAGLAGADQPALRNLNAELVGLILVRSEALLRLGGGLVRQSAGRGEQRRRRGGEDDAEQ

SEQ ID NO: 52444 - protein, 593 aa, Zea Mays
MAAAEENSSLFLIFILTMIALPLVPYTILRLCRAASEKAKTIHCRCSGCHRSGKYRKSIYKRISNFSTCSNLTILLLWIVMIFLVYYIKLVSREVQVFEPFSILGLEAGASESDIKKSYRRLSIQYHPDKNPDPEAHKYFIEYISKAYQALTDPISRENYEKYGHPDGRQGLQMGIALPKFLLNIDGASGGIMLLGIVGFCILLPLMIAVIYLSRSSKYTGNYVMHQTLSTYYYFMKPSLAPSKVIDVFIKAAEYMEMPVRRSDDEPLQKLFVAVRSELNLDLKNIKTEQAKFWKQHPSLVKMELLIQAHLTCESFALTPALLKDYRHMLELAPRLLEELVKIAVLPRNPHGFGWLRPALSVIELSQNIIQAVPLSARKASGANSEGIAPFLQLPHFTEATVKKIARKKIRAFQELCDMPVEDRAALLTQVAGLSEEQARDVEFVLEMIPSIEVDMKCETEGEEGIQEGDVVTMYAWVSLQRRNGLTAALPHCPNFLFHKEENFWLLLANVASNDVWLSQKVSFMDEATAITAASKAIQETQEALGASAKEIGNAVREAVDRVKKGSRLVMGKFQAPAEGTHNLTSFVCATLG

SEQ ID NO: 52445 - protein, 186 aa, Zea Mays
MNDWSARDIQAWETIPLGPFLGKSFSTTISPWIVTLDALKPFMCEAPKQEPEPLPYLAEKNHINYDIPLEVLIKPKDQNVALIVTKTNFKHLYWTVTQQLTHHTINGCNMRPGDIFATGTLSGPEPDSLGCLLELTWNGQKEIPVGNLTRKFLEDGDEVILTGCCKGEGYNIGFGTCTGKVLPALP

SEQ ID NO: 52446 - protein, 558 aa, Zea Mays
MKARTGLKELRILKNEDTKAKIISGNSVHTTTTTTTITTTALVPLAPKCRSLADDEGYLLPEFNDMVLREFGQDIDSIPSTPAARVREDVSNDHEVHKLRDLVRSLQEREKTLELQLLECYGLQEQDAAVRELENQLKINNVESKLYLLKIESLQTENQRLQTQLSENSKIFSELEATRTKCKFLKKKFISDAEQAKEQIISLQKMVDSLQNKQTDEEKKFIEFENKLKRLEELEKEATELRAANSRLQQENAHLIRRLEVTRLPPVPKPKTSMEVKALEEADRLKQETDRLAKEVEQLQSGRFADVEELVYLKWINACLRYELRNKDAPSGKTVARDLSKTLSPKSELKAKQLIMEYANVGAEDSHLGHVEFGSECSSSRASSGEPDDVSIDIASMTKHTNKNPKKKKFFSKLRKLVLGKGKENREISTLERRVSISSCSFDDFTGRDSHDSYSSFMAEPNMPDSRRHGDHGFGTHSSLDSAKSSPLGTEIVGERSDHSVVKSVSSREEKVNAFGPSIGLDSSKAIPEDVEIHKFADALITSRSGSMSSRRSASFRH

SEQ ID NO: 52447 - protein, 160 aa, Zea Mays
MVLASAYSHELPRYGLEVGLTNYAAAYCTGLLLARRVLKIRGLDQEYEGNVEATGEDFSVEPADERRPFRALLDVGLIRTTTGNRVFGALKGALDGGLDIPHSEKRFAGFKKDDKQLDADTHRRYNPKKLTYEQRKASLIERLNQLNSSGGADDDDEDDE

SEQ ID NO: 52448 - protein, 497 aa, Zea Mays
MSTGTDAVPVAVAPAKRPPINKHLGDERRAAVHEGGPQDHGHADRDPRRRHQHLLALRLPRRGPHLRLARPPLHHGAGGRHLLHGRAPHGPRPGLRVPHGGPLRGRHRRRLRAHDRPRVHRRGGAHLRARLPHLLPGGLQQLRHPPRLRLQLRLRAPARPPQLARHVPGRRRAARLPRRRRPRHAGVAALARHAGPHRRRAPRAAEDLRLPRRGRGASARHQEGGRHPRGRDRRRRRGRHRPRQQQGIVVVVVVAPRRGVEGAAHQPFPPRAPHARGGARPHVHPAGHGRGLRGDVQPAGVRAGGHQVQDQLAGRVHGGGRVQDLLHTHLHAAPGPHRPPPAAAGQRRRDDHLPLHAGHVLAHDGPAPRGGGRGTGRGEHRGHAVVRGVVRVRPGPRRLGLLLRDLPAAAARAGCCHRHGAQPDHERRHHHVLPLALQRHHHRRQLLPLRVHRRRRLGVHVLLPAGDHGQEPGGHREALRQGRGRRGRRRQPSSRAQ

SEQ ID NO: 52449 - protein, 295 aa, Zea Mays
MGARMDSEPKSWRILADVLYDLGTALEVVSPLCPQLFLEVAGLGNFAKGMAVVAARATRLPIYSSFAKEGNLSDLFAKGEAISTLFNVMGIGAGIGLASTVCSTTQGKLIAGPLLSAVHIYGVIQEMRATPVNTLNPQRTAMIVADFIKSGKVSSPAELRYKEDLLFPNRVIEEAGSVKIGQPLRKVFSPRLVEQLRATFPGEKFLLSQKSNRTYMVLERSASGEDALRGWLVAAFASEMERSGAGSRDDAVLSEAYEKMERVFPTFVSEVRSRGWYTDQFLDGNCSRVSFAKFR

SEQ ID NO: 52450 - protein, 449 aa, Zea Mays
MRNPKEVEKTEYNEFYKKTFNEFLDPLAYTHFTTEGEVEFRSVLYVPGMAPLSNEEIMNPKTKNIRLYVKRVFISDDFDGELFPRYLSFVKGVVDSNDLPLNVSREILQESRIVRIMRKRLVRKTFDMIQEIAEKDGKEDYNKFWESFGKFMKLGCIEDTGNHKRLAPLLRFYSSKNETDLISLDQYVENMPENQKAIYYIATDSLQSAKTAPFLEKLVQKDIEVLYLIEPIDEVAIQNLQTYKEKKFVDISKEDLELGDEDEDKEKESKQEYTLLCDWIKQQLGDKVAKVQISKRLSSSPCVLVSGKFGWSANMERLMKAQTLGDTSSLEFMRGRRIFEINPDHPIIKDLNAACKNEPESTEAKRAAELLYEAALISSGYTPDSPAELGGKIYEMMTMALGGRWGRLETEEAEVIASIDDADSSEGATTTTEVVEPSEVRTESDPWKD

SEQ ID NO: 52451 - protein, 387 aa, Zea Mays
MEQDQSVVVGSADSGAAAFGFATGNPPSLAVTGGSAVAPDGGAQAADASAYQAEHTALNGTVGDMGNYPSTGAAENGEAVPNETGEPVPELSYEEAVLSAEEARLWSVVTANSLDFNAWTALIEETEKNAENNILKIRKVYDSFLAEFPLCFGYWKKYADHEARLDGVSKVIEVYERAVLAVTYSVDIWYNYCQFAISTYDDSDIIRRLFERGLAYVGTDYHSNILWDEYIKYEESLEAWSHLADIYTRVLEHPIQQLDRYFNCLKELASKHSLSEILTAEEASLYVVTSETTAQAPDGEAHPDDVDKLGQPEISSSTDAESLAKYVSMREEMYRKAKEYESKIIGFELAIRRPYFHVKPLDNPELENWHNYLDYIEKEEDINKWSF

SEQ ID NO: 52452 - protein, 331 aa, Zea Mays
MISQWCTDNGITLPPVENQDEDLVTNNERETFRKLFERIVSSSSDLSEQREAIKELRLRTKCNSSLRAAIGERPDSISQMISVASSPELENSAEVVEDTVTAILNLSIHESNKKIIGDDPLAVPFLIKALQSGTMEARSNAAAAIFSLSALDGNKARIGELGAMRPLVELLEHGSTAARKDAASAIFNLCTLHENKSRATKSGAVDVTLRAVACAGDGSGSGSLVDESLAVLALLSGDHEAVEEVGETGGVASMLHVVKDDPCKRNKENAAAVLFAVCVYDRTRLREVAEHEKLNGSLGWLARNGTSRARRKAAGILDKMKRSMHHPHYSC

SEQ ID NO: 52453 - protein, 238 aa, Zea Mays
MEVSKHYDAGQSDKISEGNSSNRFVKHLMPQLPRPRENASKVDPIRGRRVGETRSRLPKPTKSHNVGASSVPGKDSLPMQMHVPNSGVSERSSSFAGSSTSTSNNEKPTSENNNPVLGVGLRTEVSSGPELQTASTVPSSKPNVSTTNRAKRKYVPTVSNTNRGILKTSEKSSSDSAEPRRTTSDSAEPRRSNRRIQPTSRLLEGLQSSLVISKVPGEKVHRSNYKSASSRGRTQAHG

SEQ ID NO: 52454 - protein, 60 aa, Zea Mays
MSRKMTVQISDLGKVLGRNLLEKNPCSYTEVWSGKNFGPVKEEISAVVHSHGSMVFEIIC

SEQ ID NO: 52455 - protein, 406 aa, Zea Mays
MASNMQSSGLPQPPRPPMMGSSAQPQNLGPPMPMQFRPVMPSQHPPQFMPPAAQQFRPVGEPMAGANVGMPGQMPHFPQPGQHLPHSNQVPPVSQGVPMVYQPARPMSSAPMQQQQQTAYAGGHLPTMGAPMQPLTYTYQPTSIPPVAQPWSTGPGQSVHHVPPLVPSGHQPVSAPTTLPPVNLSEPSSSDWQEHTAAEGKKYYYNKKTRQSSWEKPVELMTPLERADASTEWKEFTTPEGRKYYFNKVTKQSKWTIPDELKVARELAENASNQQPDRESGIATSALVRSAAFEPSTAPANQSSSAVGIIASSAHDGSSNSVLSGPPLPHNVENTSSSIVGMQNGGSSTAVVPVAASTEVPLVATDAGSSRNNDENSSLTTGADAEDGTSAEDLVCWREGLYRLQP

SEQ ID NO: 52456 - protein, 795 aa, Zea Mays
MALSELPLHHSFRLSSRPSIHSLLPLRLLSSSSSSSSAAAASASSPSSTGGNRAAPSTGAPWLQRWAPSDPSRPAPAPAPIPSPTTSIDRIVHRLRNLGLASDEDDPSASASASAATAAAPPDGTERLGDLLHRGWARPDHQFAAAGFDDAVLPWERDDETTGPVRDEEDGTKRRRVKAPTLAELTIEDGELRRLRRLGMTLRDRITVPKAGVTTAVTEKIHDAWRKSELVRLKFHEDLAHDMKTAHELVERRTGGLIIWRSGSVMVVYRGSNYKRPLKSQALNGASSPVKGEDGALFIPDASNPVESNIQGTGLATQYANVSLLNSQNTEDMTEEELEFNQMLDELGPRFVDWWGTGILPVDADLLPQTIPGYKTPYRVLPTGMRSTLTNAELTNLRKLARNLPCHFALGRNRNHQGLSAAIVKLWEKSLVVKIAVKRGIQNTNNKIMAEEIKNLTGGTLLLRNKFYIVIYRGKDFLPTSVAAVLAEREELTKDIYNMEEQRRRVLITQPSDDGLDGHALAGTLAEFQEAQARWGREVTAKEQEEMKEASSRSEKQKLYRKLEHKLSIAQAKIHRAERLLSKIEASLVLADPCDDQEMITDEEKSVFRRIGLRLKAYLPLGVRGVFDGVIENMHLHWKHREVVKLISKQKTLSFVEETARLLAYESGGILVAIERVPKGYALIFYRGKNYRRPINIRPRNLLTKAKALKRAVAMQRHEALSQHIDQLESNIKQMKLDLGIEDYEEQDEDSSDSENEYDNAVTSVSYDEDQDDFDESADEDEYDDYDDEDDEIDS

SEQ ID NO: 52457 - protein, 189 aa, Zea Mays
MEGILERYQRYSFEERAVLNPSIEDQANWGDEYVRLKSKLDALQKSQRQLLGEQLSSLTIKELQQLEQQLDSSLKHIRSRKNQLMFDSISALQKKEKALTDQNGVLQKFMEAEKEKNKALMNAQLREQQNGASTSSPSLSPPIVPDSMPTLNIGPCQHRGAAESESEPSPAPAQANRGNLPPWMLRTVK

SEQ ID NO: 52458 - protein, 235 aa, Zea Mays
MIQQMQHPCNECKGSGETISDKDRCPQCKGDKVVQEKKVLEVFVEKGMQNGQKITFPGEADEAPDTVTGDIIFVLQQKEHPKFKRKGDDLFYEHTLTLTESLCGFQFVVTHLDNRQLLIKSNPGEVVKPDSFKAINDEGMPMYQRPFMKGKLYIHFSVEFPDSLSPEQCKALEAVLPPKPVSQYTDMELDECEETMPYDVNIEAEMRRRQQQHQEAYDEDEDMPGGAQRVQCAQQ

SEQ ID NO: 52459 - protein, 271 aa, Zea Mays
MDTFGDKLDILFKDAASRFQGFQYSKSLLKEEVERYKKFADRLEPFIADTVHVLNESIKQKKKILVEGGQATMLDIDFGTYPFVTSSSPSAGGICTGLGIAPRAIGDLIGVVKAYTSRVGSGPFPTELFGEEGDRLRKAGMEFGTTTGRPRRCGWLDIVALKHSCQINGFSSLNLTKLDVLSGLSEIKVGVSYTQTDGQKLQSFPGDLDTLEQVQVNYEVLPGWQSDISSVRRYDELPQAARLYVERIEELVGVPVHYIGVGPGRDALIYK

SEQ ID NO: 52460 - protein, 72 aa, Zea Mays
MQFIGHGVFEKRAPALLDNLVQAFLMAPFFVLLEILHTFGGYEPYPGFHDKVSKLIEEARKEWEDKKSKKSS

SEQ ID NO: 52461 - protein, 241 aa, Zea Mays
MARGGIARLLATLLLFLLLATPLADGASEAEAGLAQGASEAAAPDAGADAQQQHLLPRPLVIELPSSRAEDEDEPGADAVPPDVRCASWRLAAEANNLAPWRAVPPECAPHVRDYVTGVAYRSDLDLVARESAAYARAAAPLGADGRDAWVFDVDETLLSNLPYYAEHGYGAELFDHHKFDEWVERGEAAAIPSSLKLYNEVRELGFKTFLLTGRSEGHRGVTVDNLNKQGFHDWEKLVLR

SEQ ID NO: 52462 - protein, 64 aa, Zea Mays
MPFSISELKKNSICRDTVRRLLSSASQNLVRLSTIKPSQTPRACILSPRLCRRATGGTRAWRGL

SEQ ID NO: 52463 - protein, 443 aa, Zea Mays
MVNKKVINGCKVSHWACINFSRSVPEATARGFCQELAQMCQISGMEFNSEPVMPIYSARPDQVVKALKSVYNIALNKLKGKELELLLAILPDNNGPLYGDIKRICETDLGLISQCCLTKHVFKISKQYLANVSLKINVKMGGRNTVLLDAISWSIPLVSDIPTIIFGADVTHPETGEDSSPSIAAVVASQDWPEVTKYAGLVCAQAHRQELIQDLYKTWHDPQRGTVTGGMIRELLISFRKATGQKPLRIIFYRDGVSEGQFYQVLLYELDAIRKACASLEPNYQPPVTFVVVQKRHHTRLFTNNHKDRSSMDKSGNILPGTVVDSKICHPTEFDFYLCSHAGIQGTSRPAHYHVLWDENNFTADEMQTLTNNLCYTYARCTRSVSVVPPAYYAHLAAFRARFYMEPEMSENQTSKSSNGTNGGLVKPLPAVKEKVKRVMFYC

SEQ ID NO: 52464 - protein, 367 aa, Zea Mays
MGSSEKTVTAYGEYTYAELEREPYWPSEKLRISITGAGGFIGSHIARRLKNEGHYIIASDWKKNEHMTEDMFCHEFHLVDLRVMDNCLKVTHGVDHVFNLAADMGGMGFIQSNHSVIMYNNTMISFNMLEAARINGVKRFFYASSACIYPEFKQLDTNVSLKESDAWPAEPQDAYGLEKLATEELCKHYTKDFGIECRVGRFHNIYGPFGTWKGGREKAPAAFCRKAQTSTERFEMWGDGLQTRSFTFIDECVEGVLRLTKSDFREPVNIGSDEMVSMNEMAEIVLGFEDRKLPIHHIPGPEGVRGRNSDNTLIKEKLGWAPTMKLKIEKEKTQGVDIAAYGSSKVVSTQAPVQLGSLRAADGKEGL

SEQ ID NO: 52465 - protein, 69 aa, Zea Mays
MGKTRHTRRAIWAMSGRNPSLGHPMPRALSWRRLVLRPSSPTPLSVSVLVFSLLRMARRLLPSCQMTVV

SEQ ID NO: 52466 - protein, 210 aa, Zea Mays
MEDLSDLGGHGHPGAAAWRPAAPSLASSSKVSVQVYTVPSSAATGREARGQGVAPMMHASSVAGHGGRAADLDPVKAKIVSHPSYHRLLAAFLDCHKVGCPPEAAEEIAAVAREREAWQRAAAGDVAHTRPDPELDQFMESYCELLVTWKEELTRPLREAEEFLTTVEAQLNSITNTGPTMGAFISSAAAAADEQSEWCQSEEKVSLKGS

SEQ ID NO: 52467 - protein, 86 aa, Zea Mays
MAAGPSPSSGPERTIETVSNRRPGRRCVERRGEIARNAPWWRWRRRREASDGAEAAAAGVDACRGQQLVYELEARVLSWLCVLSTV

SEQ ID NO: 52468 - protein, 168 aa, Zea Mays
MREDVQFVMLGSGDPELEDWMRSTESIFKDKFRGWVGFSVPVSHRITAGCDILLMPSRFEPCGLNQLYAMQYGTVPVVHATGGLRDTVENFNPFGENGEQGTGWAFAPLTTENMLWTLRTAISTYREHKSSWEGLMKRGMSKDFTWDHAAEQYEQIFQWAFIDRPYVM

SEQ ID NO: 52469 - protein, 592 aa, Zea Mays
MALPSMSLVAKGVLPFSARTSSGVTQRPVSVTASLEHKTSDARRKFLKLALGNLGVGLPTLLGAKKALADEQGVSSSRMSYSRFLEYLDKDRVRVQLPGLSQELLQKLREKNIDFAAHSNQEDSGSLLFNLIGNLAFPLILIGGLFLLSRRAQGGLGGPNGPGFPLGFGQSRAKFQMEPNTGVTFDDVAGVDEAKQDFMEMFVGVGASRVRDLFKKAKENAPCIVFVDEIDAVGRQRGTGIGGGNDEREQTLNQLLTEMDGFEGNTGIIVIAATNRADILDSALLRPGRFDRQVSVDVPDVRGRTEILKVHGSNKKFDSDVSLDVIAMRTPGFSGADLANLLNEAAILAGRRGRTAISSKEIDDSIDRIVAGMEGTVMTDGKSKSLVAYHEVGHAICGTLTPGHDPVQKVTLVPRGQARGLTWFIPMDDPTLISRQQLFARIVGGLGGRAAEEVIFGEPEVTTGAAGDLQQITGLAKQMVVTFGMSEIGPWSLMEGGAQSGDVIMRMMARNSMSEKLAEDIDSAVKQLSDEAYEIALRHIRNNREAIDKIVEVLIEKETVTGDEFRAILSEFAEIPVENRVPPATPAAALPA

SEQ ID NO: 52470 - protein, 249 aa, Zea Mays
MLCCNCKSFFPHEKICSSFFSRSLRTLFLEECIIADEGSEWLHELAVNNSVLVTLNFYMTELKVEPADLELLARNCKSLISLKMSDCDLSDLIGFLQTSKALQEFAGGAFFEVGEYTKYEKVKLPPRLCFLGGLTFMGKNEMPVIFPYSASLKKLDLQYTFLTTEDHCQLIAKCPNLLVLEVRNVIGDRGLEVVADTCKKLRRLRIERGDDDPGQEEQESLSDRPDSRSCRLRELEYIAAYVSDITNGE

SEQ ID NO: 52471 - protein, 134 aa, Zea Mays
MADFNKAISSAKTDEEKTKIKGDQQTSTRTMRSYNNILAMTQSLHSKSPLFIGDKKITLSWMEQPNKAAATKAGGKRSQPSTNGNDPANKKGRGGMQNQLVNRAFEGLSHVGRGSGRGRGRGGRGRGRGWSGYH

SEQ ID NO: 52472 - protein, 394 aa, Zea Mays
MLYCGQELINGNFTTAFLPPPSIYYTGPPRNISPPWRPDDKDGHYVFAVGENLTPRYRILNKMGEGTFGQVLECWDLENQEAVAIKIVRSLQKYREAAMIEIDVLQRLGKHDFTGSRCVQIRNWFDYRNHICIVFEKLGPSLYDFLRKNSYRSFPIDLVREFARQILESVAFMHDLRLIHTDLKPENILLVSSESIRVPDYKVSIRPPKDGSFFKNLPKSSAIKLIDFGSTTFESQDHNYVVSTRHYRAPEVILGLGWNYPCDLWSVGCILVELCSGEALFQTHENLEHLAMMEKVLGPLPKHMIVRADRRAEKYFKRGVRLDWPEGAASRESMKAVWKLPRLQNLVMQHVDHSAGDLIDLLQGLLRYDPNERLKAHEALQHPFFTRCIRRCGF

SEQ ID NO: 52473 - protein, 366 aa, Zea Mays
MWTLPEASEIARPNANVEEGTVPIAAECGSKKVQEKQDYRDILQVQDSHHDVQTLDKTIASLETELSAARSLQESLLNGSPVAEEYKVSESIGRRKYLMVIGINTAFSSRKRRDSIRYTWMPQGEKRKKLEEEKGIIIRFVIGHSAISGGIVDRAIEAEDRKHGDFMRIDHVEGYLALSGKTKTYFATAVSLWDADFYVKVDDDVHVNIATLGQILSKHALKPRVYIGCMKSGPVLSEKGVRYYEPEHWKFGESGNKYFRHATGQLYAVSKDLATYISINKHILHKYINEDVSLGSWFIGLDVEHIDDRRLCCGTPPDCEWKAQAGNVCAASFDWRCSGICNSEGRIWEVHNKCAEGEKALWNATF

SEQ ID NO: 52474 - protein, 463 aa, Zea Mays
MGKEKSHINIVVIGHVDSGKSTTTGHLIYKLGGIDKRVIERFEKEAAEMNKRSFKYAWVLDKLKAERERGITIDIALWKFETTKYYCTVIDAPGHRDFIKNMITGTSQADCAVLIIDSTTGGFEADCAVLIIDSTTGGFEAGISKDGQTREHALLAFTLGVKQMICCCNKMDATTPKYSKARYDEIVKEVSSYLKKVGYNPDKIAFVPISGFEGDNMIERSTNLDWYKGPTLLEALDQITEPKRPSDKPLRLPLQDVYKIGGIGTVPVGRVETGVIKPGMVVTFGPTGLTTEVKSVEMHHEALQEALPGDNVGFNVKNVAVKDLKRGFVASNSKDDPAKEAASFTSQVIIMNHPGQIGNGYAPVLDCHTSHIAVKFAELITKIDRRSGKELEKEPKFLKNGDAGMVKMIPTKPMVVETFSAYPPLGRFAVRDMRQTVAVGVIKSVEKKDPTGAKVTKAAAKKK

SEQ ID NO: 52475 - protein, 243 aa, Zea Mays
MDLASVNEELAEIDGQIGDILRVLQNGFQKLEKIKDANRRSRQLEELTDKMRDCKRLIKDFERVSKAEAEHTDPATAKMLHDRKQSMIKELNSYVALKKQQASENKRIDLFDGPSAEDGFGEENVLLASNMTNQQLMDQGNQLMDETDQAIARSKQTVQETVNVGTETAAALKAQTEQMSRVVNELDSIHFSIKKASQLVKEIGRQVATDRCIMAMLFLIVAGVIAIIIVKEPYFKIEEKKKK

SEQ ID NO: 52476 - protein, 138 aa, Zea Mays
MDPLPGRNALLPSQPGEKIVQYPIRPVDTTTDFEGTTSLQPTQPPSGNAPPGGQSVARPMPRQMPQQPMVGGIPRVAGGVTMAAFNAASQAGMAGLNPGNMPMQRGAGGQSHPHQLRRKADQGMGMQNPGYPQQKRRF

SEQ ID NO: 52477 - protein, 431 aa, Zea Mays
MDLRNGINKAINAITAHLKSKAWKINSPEEINQVATISANGEKEIGDLISKAMEKVGKDGVITIVDGKTLDNELEAVQGMKLSRGYISPYFVTDQKTQKCEMENPLILIHDKKISNMDSLLPALEISIKNRKPLLIVAEDVEGDALSMLVLNKHRAGLKVCAVKAPGFGENRRHNLDDMAVMTGGEVISEERGLDLGKVQLQMLGTAKKVTVSLDDTIILDGGGDKQQIDERCQQLRESIDTSTAVFDKEKAQERLSKLSGGVAVLKIGGASEAEVGEKKDRVTDALNAARAAVEEGIVPGGGVALLYATKELDKISTANEDEKIGVQIIKNSLKAPLMTIAANAGIDGAIVIGKLIEQEDLSLGYDAAKGEYVDMIKAGIIDPVKVIRTALQDAASVSLLMATTEAAVSELPATKSRIASRMPQMSGMDF

SEQ ID NO: 52478 - protein, 503 aa, Zea Mays
MRQRMEGAGKDGNPLRNYRIGKTLGIGSFGKVKIAEHISTGHKVAIKILNRRKIRGMEMEEKVKREIKILRLFMHPHIIRLYEVIDTPADIYVVMEYVKCGELFDYIVEKGRLQEEEARRFFQQIISGVEYCHRNMVVHRDLKPENLLLDSKCNVKIADFGLSNVMRDGHFLKTSCGSPNYAAPEVISGKLYAGPEVDVWSCGVILYALLCGTLPFDDENIPNLFKKIKGGIYTLPSHLSGAARDLIPRMLVVDPMKRITIREIREHDWFKILLPRYLTVPPPDSAQQVKKVDEETLREVLGMGYDKNLLVESIQKRLQNEATVAYYLLLDNRLRTTSGYLGAECQEAMDSSFSNIASYETPSSARGNRQQIFMESPVGLRPHLPAERKWALGLQSRAHPKEIMSEVLKALQELNVYWKKIGHYNMKCRWSPGFPAQIHNNHNFSAGSIETDSLSERLSLIKFEIQLYKTRDEKYLLDLQRVSGPQLLFLDLCAAFLTQLRVL

SEQ ID NO: 52479 - protein, 392 aa, Zea Mays
MPRRGVVGGIDYGFTGEVKKIDVSRIRERLDRDSIVVVSNMGYSSAGEVLNCNTYEVATACALSIEADKLICIVDGQIFDEHGRVNRFMSIEEADMLIRTRAKQSEIAANYVKVVDEEDINHVRCLPMKHGTEHGMNGRDHINGYTASFRNGVGFNDGNGLSGEQGFAIGGEERLSRSNGYLSELAAAAYVCHGGVQRVHIIDGTVGGALLLELFTRDGVGTMIARDMYEGTRMAREEDLSGIRKIIRPLEESGVLVRRTDQELLEALTSFIVVERDGSIIACAALFPFLEDKSGEVAAIAVSEECRGQGQGDKLLDYVEKKALSLGLEKLFLLTTRTADWFVRRGFKECSFDSLPLVRRKRIDLSRGSKYYMKWLQAAEVGHMAADGFAMR

SEQ ID NO: 52480 - protein, 85 aa, Zea Mays
MQYWLSWDSLQILAALHRMLRRKVPTKLVMQRRRKMLLLLPRARPPRRRKRRTRVQRREKKHKKHLMGQRRLPVQDLMKILLLWM

SEQ ID NO: 52481 - protein, 208 aa, Zea Mays
MAKDIEAAAAHEGKDYSDPPPAPLVDAEELTKWSLYRAVIAEFVATLLFLYIVAQCLGAICGVGLVKGFQSAFYVRYGGGANELSAGYSKGTGLAAEIIGTFVLVYTVFSATDPKRNARDSHVPVLAPLPIGFAVFMVHLATIPITGTGINPARSLGAAVIYNNDKAWDDHWIFWVGPFIGAAIAAAYHQYVLRASAAKLGSSASFSR

SEQ ID NO: 52482 - protein, 57 aa, Zea Mays
MELEAEVAKLKDQNEELQKKQVEMLKKQKDEVLERINSQHGPKAKKLCLRRTLTGPW

SEQ ID NO: 52483 - protein, 385 aa, Zea Mays
MSFAPRDSHEAQVQFALERGVPAMIGVLASNRLTYPARSFDMAHCSRCLIPWQLYDGLYLIEVDRILRPGGYWILSGPPINWKKHWKGWDRTKEDLDAEQKAIEAVARSLCWKKIKEAGDIAIWQKPTNHIHCKAIHKVSKSIPFCSNQNPDAAWYDKMEACITRLPEVSDLKEVAGGALKKWPERLTAVPPRIASGSIEGVTEEMFVEDTELWKKRVGHYKSVIAQLGQKGRYRNLLDMNAKFGGFAAALVNDPLWVMNMVPTVGNSTTLGAIYERGLIGSYQDWCEGMSTYPRTYDLIHADSLFTLYNGRCEADNILLEMDRILRPEGTVIIRDDVDMLVKIKSITDGMRWNSQIVDHEDGPLVREKLLLAVKTYWTLDDSKQ

SEQ ID NO: 52484 - protein, 286 aa, Zea Mays
MAGDDHVVVDVNGLAKSKDDGGSKKLSEDANGSAPAAASLSAAVDLVQEEEEEEGDGEEEPLIQAAECRICQEEDSVKNLEKPCACSGSLKYAHRACVQRWCNEKGDTTCEICHEEYKPGYTAPPRVQPDETTIDIDGDLVMDLRDPRILAVAAAQHRLLEAEYDGYASTDASGAAFCRSAALILMALLLLRHALSMSDNEGNDDDASTIFSLFLLRAAGFLLPCYIMAWIFSILHRRRQRQEEAALAAAEVAFILQSARGRALQFAIAPDSPATPQHEPVSQQQQ

SEQ ID NO: 52485 - protein, 203 aa, Zea Mays
MLDRSIREIERERQGLQAQEKKLITEIKKTAKEGQMGAVKVMAKDLIRTRHQITKFYQLKSQLQGVSLRVQTLKSTQAMGDAMKGVTKAMAQMNRQLNLPGLQRIMQEFERQNERMEMVSEVMGDAIDDALEGDEEEEETEELVNQVLDEIGIDINQELVGAPSAAVAQPASAGRVAQAESAGNADTGIDADLQARLDNLRRM

SEQ ID NO: 52486 - protein, 64 aa, Zea Mays
MSTVSRASLDQKLALAKRCSREATLAGAKAAAVATIASAIPTPYVRTYASIGRETARRRPVSNN

SEQ ID NO: 52487 - protein, 254 aa, Zea Mays
MEGKTSTSSAPPYYGAPPPSYGAPPPSQPYGGGGGGGGGYGYGASQPPPYGGAPQQQPPYGGGAPAGFGSPFASLVPSAFPPGTDPNVVACFQAADRDGSGMIDDKELQSALSGYNQSFSLRTVHLLMYLFTNTNVRKIGPKEFTSVFYSLQNWRAIFERFDRDRSGRIDMSELRDALLSLGYSVSPTVLDLLVSKFDKTGGKSKAIEYDNFIECCLTVKGLTEKFKEKDTAYSGSATFTYEAFMLTVLPFLIA

SEQ ID NO: 52488 - protein, 114 aa, Zea Mays
MSEIHVWRLTTGRRELVVLSGAHTIGGKRVSGVPVVFDNTYFKVLLDNRPPQTSSKAGNGMAAMVGLRTDWALTEDDECLRWIRIYAEDQARFFDDFRDTYIKLVDSGASWRTA

SEQ ID NO: 52489 - protein, 199 aa, Zea Mays
MEPRIWRLQDVAGYGVALAVKDIYADAFGERNLDSDLVDLMVKDGRQGKVNGKGYYIYEKGGKPKPDPSVKHVIEEYRKHANTMPGGKPVTLTDQDILEMIFFPVVNEACRVMDENVVIRASDLDIASVLGMGFPKYRGGLVFWADTVGAPYIHSKLSKWAEIYGPFFKPSSYLEQRAKSGVPLSAPGASQQGSARSRM

SEQ ID NO: 52490 - protein, 257 aa, Zea Mays
MVGAIGTLVVDTVATGYFTRVHFKDSAAAAVGAAAVGDEEKQQQQAASAPHVDDGADGDGHGHGGHVHMHTHATHGHSHGASALVAAVGGAEGDKEHALRHRVIAQVLELGIVVHSVIIGISLGASQDPSTIKPLVVALSFHQMFEGMGLGGCIVQAKFKLRSIVTMVLFFCLTTPVGIVVGVGISSVYDEDSPTALVVEGVLNSVAAGILVYMALVDLLAEDFMNPRVQSRGKLQLGINASMLVGAGLMSMLAKWA

SEQ ID NO: 52491 - protein, 99 aa, Zea Mays
MDSQEDIVYPNDPKAKIKVDDDLKQLFREIELPRDMVDIEKELQKNGFKPMTNTAKRRAAAQINGVKPKAKPKKKQREITKRTKLTNAHLPELFQNLNT

SEQ ID NO: 52492 - protein, 196 aa, Zea Mays
MKDLIQLYRTAFLEGNEEVLGVVEKAITAVEKEKSTIASQFESITTEITSGKEKFIRLNADLENFRKQTEKDRAKLTSNIRVEVVQSLLPLVDSFEKTNLENTPETEKEQKISASYQGIYKQLVETLRYLGVGVVETVGKPFDPSVHEAISREASMQFKAGIVMHEVRRGFHLKERLLRPATVKVSTGSGKQSASS

SEQ ID NO: 52493 - protein, 398 aa, Zea Mays
MAGVTATGMAGVPATFSSATAQIGGFLSKKPYAPPLWATHLSPMPCHTFSLGHFPTPIHKWNLPNLPEGTEVWIKRDDLSGMQLSGNKVRKLEFLMADAVAQGADCVITVGGIQSNHCRATAVAAKYLNLDCYLILRTSKLLVDKDPGLVGNLLVERLVGAHVDLVSKEEYGKIGSVALADLLKKRLLEEGRKPYVIPVGGSNSLGTWGYIEAIREIEQQIQQSSDVQFDDIVVACGSGGTIAGLALGSRLSSLNTKVHAFSVCDDPEYFYDYVQGLIDGLNSGFDSHDIVSMENAKGLGYAMNTAEELKFVKDIAASTGIVLDPVYSGKAVYGLLKDMAGNPAKWKEWILKILFHAKMALVRCSDQYGPCDSMMAHSCKHCIHYRVITLKFVQENAE

SEQ ID NO: 52494 - protein, 131 aa, Zea Mays
MVTGLPSSASWQDLKDHMRRAGDVCFTDVYREAGATIGIADYTNYEDMKHAIRKLDDSEFRNAFSRTYVRVREYDARRSRSRSRGRNRSKSRSRSHSHSYSRSRSCSYSKSRSPRSRSASESKSPVKLSVA

SEQ ID NO: 52495 - protein, 1918 aa, Zea Mays
MASSTSRRRRGGGLERVADNWERLVRAALKRDRDHLRVGGAPAAVGGQRLADAVPASLGRTTNIEQILQAADDIEVEDPNVARILCEQAYTMAQNLDPSSEGRGVLQFKTGLASVIKQKLAKKDGAPIDRQNDVQVLWNFYLEYKSRCRVDDMQREQERLRESGTFSTEMGNRAMKMKKVFATLRALLDVLENLVGQSPTDRLHRQILEEIKRIKRSDAALRGELMPYNIVPLDTSSSVANIFGFFPEVIAATAAIQNCEDLPRFPFDTPQLRQKDIFDLLQYVFGFQEDNIRNQRENVVLMLANAQSRLSLQIGSEPKIDEMAVTDVFCKVLDNYIKWCRYLGRRVAWTSLEAVNKNRKIILVALYFLIWGEAANIRFLPECICYIFHNMAKELDGILDSSVAETAKSCTTEGSTSFLEKIITPIYDTMAAEAENNKDGKAAHSAWRNYDDFNEYFWSRSCFELGWPPAEGSKFLRKPAKRKRTGKTNFVEHRTFLHLYRSFHRLWIFLLLMFQLLAIIAFHHGKMDIDTIRILLSAGPAFFVLNFIECCLDVILMFGAYKTARGFAISRLVIRFLWLTAVSTFVTYLYVKVLEERDTRNSDSTYFRIYGLVLGGYAAVRIMFALMAKIPACHRLSSFSDRSQFFQFFKWIYQERYYVGRGLYESISDYARYVIFWVVILACKFTFAYFLQIRPLVEPTNIIVQLHDLKYSWHDLVSRGNKNALTILSLWAPVLAIYLMDIHIWYTLLSALVGGVMGARDRLGEIRSIEMLHKRFESFPEAFAKNLSASRIPSRRIDRVNESEITTKTYASIFSPFWNEIIKSLREEDYISNREMDLLMMPSNCGNLMLVQWPLFLLTSKIMLANDYASDCKDSQYELWDRISKDEYMAYAVKECYYSTEKILHSLVDAEGQHWVVRLFRDLNDSIAQGSLLVTINLKKLQLVQSRLTGLTGLLIRDETAGRAAGVTKALLELYEVVTHEFLSQNLREQFDTWQLLLRARNDGRLFSKILWPKDPEMKEQLKRLHLLLTVKDSATNIPKNLEARRRLQFFTNSLFMDIPQAKPVSEMIPFSVFTPYYSETVLYSMSELCVENEDGISILFYLQKIYPDEWANFLERIGCGESSEDDFKESPSDTMELRFWVSYRGQTLARTVRGMMYYRRALMLQSYLERRCLGGIEDGNSAAEYIDTQGYELSPDARAQADIKFTYVVSCQIYGLQKQTKKQEAADIALLLQRNEALRVAFIHEEEIISRDGKATTREYYSKLVKADVHGKDQEIYCIKLPGNPKLGEGKPENQNHAIIFTRGDAVQTIDMNQDNYLEEAMKMRNLLEEFHNAHGKHGIRKPTILGVREHVFTGSVSSLASFMSKQETSFVTLGQRVLAYLKVRMHYGHPDVFDRIFHITRGGISKASRVINISEDIYAGFNSTLRQGNITHHEYIQVGKGRDVGLNQIALFEGKVAGGNGEQVLSRDVYRLGQLFDFFRMLTFFFTTVGYYVCTMMTVLTVYIFLYGRVYLALSGLDYSISRQARFLGNTALDAALNAQFLVQIGIFTAVPMIMGFILELGLMKAVFSFITMQLQFCSVFFTFSLGTRTHYFGRTILHGGAKYRATGRGFVVRHIKFAENYRLYSRSHFVKALEVALLLIVYIAYGYTKGGSSSFILITISSWFLVMSWLFAPYIFNPSGFEWQKTVEDFDDWTNWLLYKGGVGVKGDNSWESWWDEEQAHIQTFRGRILETILSLRFLMFQYGIVYKLKITDHNTSLAVYGFSWIVLFVMVLLFKLFTATPRKSTALPTFVRFLQGVLAIGIIAGIALLIVLTSFTVADLFASALAFIATGWCVLCLAVTWKRVVKVLGLWDSVREIARMYDAGMGAIIFVPIVVFSWFPFVSTFQSRFLFNQAFSRGLEISLILAGNKANQQI

SEQ ID NO: 52496 - protein, 110 aa, Zea Mays
MDILDLRRTLTHRHQMCTRLPLGAMDIHHHPMACTRRRRRVLTPHHSSLHRGTRATSTTSSVLTTRRRMESINTTTTRETRVAPLGSSKDVWLLSAAAACWRNAAAASET

SEQ ID NO: 52497 - protein, 105 aa, Zea Mays
MNYELNLNQILQYWSLERKLCQPLLITEKMFAYRETVLEEAHQGMELHEHCRHIVDNDDQHCRFHSLCVHQVGLRNTEQQQQYRKESAYVGQMELKCTYLIKSVG

SEQ ID NO: 52498 - protein, 95 aa, Zea Mays
MEEDHVTGLPFAMIDEIADGSPASVDGLQLGDEIVKFGNVEAGDQLQERLMSEALSNEDSQVSLVIIRQGSAVNLTITPRKWHGRGLLGCHFRML

SEQ ID NO: 52499 - protein, 183 aa, Zea Mays
MYGPRFLAPHKKKDRTEAPSFLGIRLEWAGAVVDGGQRVEHVGAGVRAPAHDIQLAPIPPLVEVAVHGAAGDGDVLVRVDGQVAGALPVELVRQALVEEAQRLLLPWLRDPELEGVRPVPLGPVGEGEDQACGVLRHAYPDGVDGRVGFPADLQRHLPRLAAAHDGLVEAAVERHAEHVVRGH

SEQ ID NO: 52500 - protein, 150 aa, Zea Mays
MVVGAYPFEDPEEPKNFRKTIQRILNVQYAIPDNVNISPECRHLISRIFVGDPATRITIPEIRNHSWFLKNLPADLMDDDSMSNQYEEPDQPMQTMDQIMQILTEATIPPACSRSINVLADGLDMDDDMDDLDSDSDLDVDSSGEIVYAM

SEQ ID NO: 52501 - protein, 714 aa, Zea Mays
MGLFDRLLLGGGDRSRGTEDQERGGAEAAAMGSDVPPPSAIPPLSAAAASVVRQCARIAGVPVDQLLRRVDAEEQARGPLEYARSVVEYCSHVALRVEARRPDHLGDREFHTLTYDMMLAWEAPDEETDAVFQKTAFSVLRGDDADDDDSGSIFYSSPTQMAIQVDGRRTVGPEAFAKIAPACPAMAHPITVRNLFDAITNSTGGRLHFLIYHKYLRILNEAFCSAKRVLGGHRAPALQLSDDEVILDIHGAATTKPVLQHIGTSTWPGRLTLTNHALYFEAIGVDFSYGEAVVYDLARDLKQSVKRESTGPWGAHLFDKAVMYKSSLTSEPVFFEFPQFKGHTRRDYWFAAIKEVLHAHKFIRKYKLAGFQKAEALSVATLGILRYRTVKEGFHILPAHFKTILAFNLAEKLPKGDKILEALYGQLKQHCPRFRGGQDLGQSSSEELMLADPFPLSAYTMVTMGLLKLKEEDNAEERDFAVRDVQIGGTSSVQMALERSVGYSGRVEAARATLDQELLFPLIEIGKRLLALSGWEEPFKSYVFLLCFLYMAYSGWIWLMFPGFLLGSTIFMLWNKHYRHGRSVGAFEIITPPRRRTVEQLLALQQAISQLEAHVQAGNIFLLKLRSLMLAAFPQSTNRVAAALVAVAAIFTFVPLRTIVLLILLEEYTRQMPVRKKSSEKLVRRLREWWLRIPAAPVQLVKPRETRRWRSRLR

SEQ ID NO: 52502 - protein, 448 aa, Zea Mays
MWLCGPIAGLVVQPLVGLYSDRCTSRWGRRRPFILTGCMLICVAVIVVGFSSDIGAALGDTKEHCSLYHGPRWHAAIVYVLGFWLLDFSNNTVQGPARAMMADLCDHHGPSAANSIFCSWMALGNILGYSSGSTNNWHKWFPFLKTSACCEACANLKGAFLVAVVFLVLCLTVTLIFAKEVPYRANENLPTTKAGGEVETEPTGPLAVLKGFKDLPPGMPSVLLVTAITWLSWFPFILYDTDWMGREIYHGDPKGSNAQISAFNEGVRVGAFGLLLNSVILGFSSFLIEPMCRKVGPRVVWVTSNFMVCVAMAATALISFWSLRDYHGYVQDAITANASIKAVCLVLFAFLGVPLAILYSVPFAVTAQLAATRGGGQGLCTGVLNISIVIPQVIIALGAGPWDALFGKGNIPAFGVASAFALVGGVVGVFLLPKISKRQFRAVSAGGH

SEQ ID NO: 52503 - protein, 153 aa, Zea Mays
MREALGLAPKRSNRTQGNRLDKHEYAELIKRGSTAEDLGAGHAEAAQVQGLGLYKAPRDEGGSSSLSLDPQMEPEQAEPLLAPKQEDDLEDNRKGKRPRERDEKRGEKERKRDRHGDGKERRRDKHERRHDLEDRSKRHRKDKQKRRHDSDSD

SEQ ID NO: 52504 - protein, 632 aa, Zea Mays
MYERSIKDPAGFWSEIAETFYWKEKWNPAEVCSENLDVTKGPVQINWFKGGKTNICYNAVDRNIESGNGDKVAMYWEGNEPGQDGKLTYSELLEKVCQLANYLKSLGVGKGDAVIIYLPMLLELPIAMLACARIGAVHSVVFAGFSADSLAQRIVDCKPKLVITCNAVKRGVKPIFLKDIVDAALVESEKNGVSVGLCLTYENQSAMKRENTKWQAERDVWWQDVVTKFPTKCDVEWVDAEDPLFLLYTSGSTGKPKGVLHTSGGYMVYTATTFKYAFDYKPTDIYWCTADCGWITGHSYVTYGPLLNGATVLVFEGTPNYPDSGRCWDIVDKYNVTIFYTAPTLVRSLMRDGTEYVTRYSRKSLRVLGSVGEPINPSAWRWFYNTVGDSRCPISDTWWQTETGGFMITPLPGAWPQKPGSATFPFFGVQPVIVDEKGQEIEGECSGYLCIKKSWPGAFRTLYGDHERYETTYFKPFAGYYFTGDGCSRDKDGYHWLTGRVDDVINVSGHRIGTAEVESALVSHPQCAEAAVVGVEHEVKGQGIYAFVTLVDGVPYSEELRKSLIMTVRNQIGAFAAPDKIHWAPGLPKTRSGKIMRRILRKIAARQLDELGDISTLAEPAVVDQLISLSNC

SEQ ID NO: 52505 - protein, 116 aa, Zea Mays
MSRSLGIPVKLLHEAAGHVVTVELKTGEVYRGSMVECEDNWNCQLENITFTAKDGKVSQLEHVFIRGSRVRFMIIPDMLKNAPMFKRLEARIRGKGSAIGVGRGRAVAMRARGMKK

SEQ ID NO: 52506 - protein, 219 aa, Zea Mays
MAASSADPAQHHASSRPPLLLAVRHLPFPGVPRTRTFPVPGPDVLAPLARRLEELASAAAAHPLLKPLFAAHSHLSSFSQGRRRLVAARRATVLSSGELCFAAVLGDSVAGTVVASGINNFLNLYNTVLVVRLVLTWFPNTPPAIVAPLSTILAFLVLNAFTSTAAALPAELPSCSATAQHHQRTAVSPCSAPHEATLSQRKWMRRMRSQKPQGDDGDH

SEQ ID NO: 52507 - protein, 114 aa, Zea Mays
MALRLPISSSHGLASTPAPISTTTCRPAVLATAAAQKRSLLLATASETRGVAPVRSSGIETSTVGLGCEAVTGQVTEVNKDTFWPIVEAAGDKVVVLDMYTEWIRIWLNYSIFT

SEQ ID NO: 52508 - protein, 198 aa, Zea Mays
MYVANRASDKITQLTDNVYVCRSGSAADTQVISDYIRYFLHQHTIQLGQPATVKVAANLIRLLAYQNKNMLQAGMIVGGWDKYEGGQIFSVPLGGTILKQPFAIGGSGSSYLYALLDHEWKEGMSQEEAEKFVVKVVSLAMARDGASGGVVRTVTINADGVKRNFYPGDKLPLWHDELEPQNSLLDILAAGNPDPMVQ

SEQ ID NO: 52509 - protein, 809 aa, Zea Mays
MSDWSSPAAPTFFPFGPQAEGWDVTFKVKYGDTLKRFYGCANGSHFDMNLSALRARIDTAFKFGPDVDFVLTYTDEDGDIVMLDDDDDLRDAALRQRLNPLRITVQLKKNQPTEKKDTSAPVKSAAQDPLSQLMSAIEGLKPVQEDSLAHIKSAIGEAIKSIPEPIPDALAKLSHEILDAAPPPLAELMKPFAQLMAPNNNGNGPSDVHAEGSSSSSSAQVPAEAKNEPKVRPSLGLKTVLKEAAGPVPNAGASQVQQPLMYPSVEEMLFPCNSVDKSVCKGKIDAQSKGKSVTSSGIQPAPHSLRTHAPPPPHPCISEWSRAQRSQHRQLKFEDNAKATNDSRWRIPMYKMPYAPPPPAVPPPGYVPSPHFPYPGRLLSSGHPYGDLAGNMENSAPHSLHRWIQCDGCGAQPIVGPRYKSNVKEDYDLCDSCFQRMGNEMEYTKIDKPILPHRFLRDPHVYRKVHHPRVLMKSRREKLESRFILDVTVLDGTLMTPSTPFTKIWRMHNNGSVVWPRGTQLVWVGGDQFALQTSVPLEIPVDGFPVDKEIDVPVDFVAPTRPGRYISYWRLASPSGQKFGQRVWVHIQVEDPSFVNDNNRNAAINLNLPPESYSSNTTNLIDVNIEPADSALSAHAKRTKEFHFCSTDFPEPSKSVPFTLATTSLSAAAPTNQTGDVPMSSTPAAACLPSVNVPMHEVVTTHTPSPITPVLPTTIHFSAPVSAPAIAPELASGAVGVPPPVSAVVPELSELDVHNEEKLLRELEEMGFRQVDLNKEILRQNNYNLEQSVDDLCGVNEWDPLLAELEEMR

SEQ ID NO: 52510 - protein, 158 aa, Zea Mays
MKPVSVAEHNNHQPRLHSPTPASATKISIPISSSEAALFGKGRYKVWALAAIALLALWSMFAASVTLRLSSVDLATTFGDASDPLIDELDPLEMEQREKLVRRMWDVYTRTDNHLYLRLLACQSIGLRLSNRRIRIRRSEEQDRYLEGWNWYAEGEER

SEQ ID NO: 52511 - protein, 144 aa, Zea Mays
MELPPGNTLTKISKLPALQDDGPATDSYGRFSNDRGSRNNRRSRGGGASRGRGGWDTDGEDRFRRGGRSLRSDNDSWSDDDWSGGGRKSNRSSSFGSRSSSYSSRGSPSFGGRSSSFGGRERSFSGACFNCGESGHRATDCPNK

SEQ ID NO: 52512 - protein, 65 aa, Zea Mays
MGGDHGGGHAGGDFRQKVWSMTGGPYCRPVHWRRNTAIAMFGVFLICIPIAMKSAELEDGSHYPR

SEQ ID NO: 52513 - protein, 201 aa, Zea Mays
MRPASDAHQSRLLYELCALLLTVLRASPDDGAVARPLLPRHVTPAGVASMLLGASMALMLCGSVTFMLGFFLMPWVVGLGFLFLFVGFITNLSGIWRDIILWPSVACSASDSPKEAPSPCICFPSLHPCRREAKYKVRLPRRSTEAGSCWSSSHCQPIFSFLDNPSFTCDTAASCQVLNGFVLCLGGYGILACTYGKEGRV

SEQ ID NO: 52514 - protein, 773 aa, Zea Mays
MGRYSDGKDSGETGGGSYPLVAVCIDKDKNSQNALKYATETLAHRGQTIVLVHVNTKGTSGGVADAAGYKQPTDPQMKDLFLPFRCFCTRKDIHCKDVVLDDHDVAKSVVEFAAHGAVEKLVVGASARGGFVRFKAEICNTISKSAPDFCTVYVVSKGGKVTSVRQAVRQAPAVSPLRTMIHGPKPEPEPVHAQKWTPPPPPPAVQDNHIMSPFARTTGHSAGSARKAFPDFSLPESSDISFIGSAPRRSTERYPPRLSSGSDGVDQQQQHSFEASRTPSRWGDSFGNDSTSHSQTSTSSWCSQPPDEMEAEMKRLRLELKQTMDMYSTACKEALSAKQKALELQRWKMDEEQRSQETRLTEESAMALIEQEKAKARAAIEAAEASQRLADLEAQKRISAEMKALKEAEERLRSMAAGARESAVRYRRYTIEEIEIGTDRFNEARKVGEGGYGPVYKGHLDHTPVAIKVLRPDAAQGRSQFQQEVEVLSCIRHPNMVLLLGACPEYGCLVYEYMANGSLDDCLFHRGGGGPVLPWQHRFRIAAEIATGLLFLHQAKPEPLVHRDLKPGNILLDRNYVSKISDVGLARLVPASVADNVTQCHMTSAAGTFCYIDPEYQQTGMLGVKSDVYSLGVMLLQLVTARSPMGLTHHVGRALERGTFADLLDPAVHDWPMDEAHRFAEVSLRCCELRRKDRPDLATVVLPELNRLRALGEDSMDSCTTMSGRGGMHSSSSAFHGNPYSQPRHDAASDPTRPHHVSNASQSAMAPWRSNYN

SEQ ID NO: 52515 - protein, 206 aa, Zea Mays
MEVTPKTLADVKGGTLISYEGRVQLLEIAQVPDEHFLPNRWVNLKAVKRLVEAEALKMEIIPNPKEVDGVKVLQLETAAGAAIRFFDKAIGINVPRSRFLPVKATSDLLLVQSDLYTLVDGFVIRNPSRANPANPSIELGPEFKKVANFLARFKSIPSIVELDSLKVSGDVWFGSGITLKGKVTITAKSGVKLEVPDGAVFENKDA

SEQ ID NO: 52516 - protein, 326 aa, Zea Mays
MARENALRIFQENENLRIDLENKRRELNLRAKELEKMSAENANDRKTLDDQKQKTKYDNSELELASIEQQRADADVLKLLADQEREKEDVLARMLQLEKELHEKQQLELEVERLNGTLQVMKHLEGDDDGGDIHEKMEKLSERFEREKKRLEDLSGDLVTKERESNDELQQARKELIKGLEEELNGRTAVGIKRMGELDEKPFLNACKRKYGNNEYQVKAAELVTNWQEELKNPSWYPFKMIHVDGEDKEILVDDDTKLKFLWIEFGDDVCNAVKTALMEINEYNPSGRYVVPELWNFRKGRKATMKEVLKYLFSQMDTTTKRRRG

SEQ ID NO: 52517 - protein, 263 aa, Zea Mays
MKHKPQRNCPEVSRLSALAGKYKVFLVIGVVERAGYTLYNTVLSFDPLGKYLGKHRKVMPTALERVFWGFGDGSTIPVYDTPIGKMGALICWENRMPLLRTAMYAKGIEIYCAPTVDCMPTWLSSMTHIALEGGCFVLSACQFCRRKNYPPPPEYTFCGLEEEPSPESVVCSGGSVIISPLGTVLAGPNYESEALLTADLDLGEIVRAKFDFDVVGHYSRPEVLSLVVKSDPKPAVSFISAAECRYERSGIVTVRAVCLSVTS

SEQ ID NO: 52518 - protein, 252 aa, Zea Mays
MSAIQHISQARIKKIMQADEDVGKIALAVPVLVSRSLELFLQDLIDRTYEITLQSGAKTLNSFHLKQCVKRYSSFDFLTEVVSKVPDLGGADSCGDERGLPRRRKSNGSDPENDESRSSKMAIRNANISPRGRGRGRGRGRGRPPTKRKEVGYVQFEDESSMFAEQGEPLPGEETVQEINGNETMPQSTQPPVEAPPTALAQATTSSKAEEANSDHQSDWPMPDAIGSIGVVPSGFGHLTVQVEDEDYDNED

SEQ ID NO: 52519 - protein, 797 aa, Zea Mays
MAPALSRTLGPSSVAALRPSPSCRGLLRAALAPQGRGASARCAVGVRWEAARRRRMAGVRCDAAVAEKPAGEEETAGEKYEYQAEVTRLMDLIVHSLYSHKEVFLRELVSNASDALDKLRFLSVTDPSVLADGGELEIRIKPDLEAGTITITDTGIGMTKDELKDCLGTIAQSGTSKFLKALKENKDLGADNGLIGQFGVGFYSAFLVAERVVVSTKSPKADKQYVWEAEADSSSYVIKEENDPEKMLSRGTEITLYLRDDDKYEFADPTRIQGLVKNYSQFVSFPIYTWQEKSRTVEVEEEEESKGEEATEESKSEEATEGEKQKKKKTITEKYWDWELANETKPIWMRNPKEVEKTEYNEFYKKTFNEFLDPLAYTHFTTEGEVEFRSVLYVPGMAPLSNEEIMNPKTKNIRLYVKRVFISDDFDGELFPRYLSFVKGVVDSNDLPLNVSREILQESRIVRIMRKRLVRKTFDMIQEIAEKDGKEDYNKFWESFGKFMKLGCIEDTGNHKRLAPLLRFYSSKNETDLISLDQYVENMPENQKAIYYIATDSLQSAKTAPFLEKLVQKDIEVLYLIEPIDEVAIQNLQTYKEKKFVDISKEDLELGDEDEDKEKESKQEYTLLCDWIKQQLGDKVAKVQISKRLSSSPCVLVSGKFGWSANMERLMKAQTLGDTSSLEFMRGRRIFEINPDHPIIKDLNAACKNEPESTEAKRAAELLYEAALISSGYTPDSPAELGGKIYEMMTMALGGRWGRLETEEAEVIASIDDADSSEGATTTTEVVEPSEVRTESDPWKD

SEQ ID NO: 52520 - protein, 116 aa, Zea Mays
MPTMETRETQSEWATDTIGGYRRRMNPGRGFAIQISSRGNLMIPTMRSKRSQIGTEAQKALFLLHFPETTKNGIWGGVRGAFVGSPQVKLKWRCGCLRFQMGLNRQIFLLVPNSRS

SEQ ID NO: 52521 - protein, 244 aa, Zea Mays
MSGSSPATVAFRKCCQFRKSSLAKKLHPDTNKGDADAERKFQEVQRAYETLKDEQKRSLYDQVGPDQYEKTASGGGGTGFEGGFGNPFEDIFGGGGGGGGMNDFFRNIFGDRDFGGRDVKVALELSFVEAVQGCSKTVTFQTSVTCEICGGAGVPPGTTPETCLSCRGSGFIFMQTGPFRMQSTCTKCGGSGKTVKEFCKACRGNKVVPGRKSVRLDILPGSDNEDTIKVVRSGGEDPDGRPGS

SEQ ID NO: 52522 - protein, 677 aa, Zea Mays
MFEDGDFARTKLLAHLGFEPPQAPPASSTDELSQTLADTLNIDHAAVTDNADAQFLIDNGDDFFNNPRPSEASLAEESVSTNGQQIEQEVSGDSVPSDPSIDKSIQHALVVGDYKGAVNQCLASNRMADALVIAHAGGSALWESTRNHYLKNSISPYLKVVSAMVGNDLMSFVSTWPLSSWKETLALLCTFAQKEEWHILCDTLASRLLNVGDTLAATLCYICAGNIDKAVEIWSRTLKSEDGGKTYVDLLQDLMEKTITLALATGQKRFSASLSKLIENYAELLASQGLLKTAMEYLKLLGSDEHSHELAILRDRIACSTEENDNVSSVSESTGTPSPYVTNQPYTTPDHSQNVYQQVPQPYNVPSNTYSEAYPQQGTGAYGYNNAYQPQQPANMFVPPSTPPNTQQQPGPSHVPVPQQTVKTFTPANPAGLKNPGQYQQPNTLGSQLYTGATNQPYSSGPSAPYPSGPPTTFHQPVAPVQYQSAAPPVSSFGPTTPVPGTVPNQMFPHSAATNSTSRFMPSNNQSFAPRPGLSPVQPSSPTQVQAQPAPPAPPATVQTADTTKVSAELRPVIGTLTRLFDETTKALGGSQATQAKKREIEDNSRKIGALFSKLNSGDISPNVSSKLIQLCSAIDASDFVTAMHLQVLLTTSDWDECNFWLAALKRMIKTRQNFRM

SEQ ID NO: 52523 - protein, 477 aa, Zea Mays
MAFRRILSTAVRRRSAVAAAAAGNAREASTAVAAAPGVLAPDATAVRAPVMPYDRIADAVNARLRRLEHPDPRFLRYASPVPSHADHMAILAAPETRVTTLPNGLRIATESSLAARTATVGVWIDAGSRYENEEAVGVAHFVEHMLFKGTGKRSAAQLELEIEDMGGHLNAYTSREQTTYYAKVLDKDVPRAMEVLSDILQNSNLDQARIEREREVILREMGEVEGQSEEVIFDHLHATAFQYTSLGRPILGSAENVKSITKEDLENYIATHYTAPRMVITAAGNVKHEDIVEQAKKLFNKLSTDPTTTNMLVAKQPASFTGSEVRIIDDDMPLAQFAVAFNGASWVDPDSVALMVMQSMLGSWNKSAGGGKHMGSELVQKAAINDIAESVMSFNMNYKDTGLFGVYAVAKADCLDDLAFAIMHEMSKLSYRVTEEDVIRARNQLKSSIQLHLDGSTAVVEDIGRQHLLFFVPLLFQ

SEQ ID NO: 52524 - protein, 613 aa, Zea Mays
MRQQSIIDSEQMRQNISTNANAIGNFLEVMFSEAEQVLNDVLKSTSDLKELLAFSAELQNTGLRRNLASVQAMSKQSIDFFEDIRIHVSQLMTLMEQNQMERSSKLVKFENEFKETCVKDEQAALNKIAAILSELTAKKTTMVSSYMGQLNERYSEDQKNLKLEISNLQQVSDNGKNESVACVGVIESQFQEDMSSHTKSNDQMEGILKQYSEKGSHFVSYWSHIQSSLHDLVKSSIMETDDFIEESRNKNENIFQEGLLFSSQNDAEFHGITSDVLTVSKNSLLLDHETCKMVETNTTIFSDHLELLNEKHSEGVESTRNMMSDCLEKDYMANSPVRNHPRELLTSANSLESIDKLRASLPDLVAKFRLENKLNEMDKGKQYSDQRTRVHGKFKTIISAIERRVLEEQLGWARLERQKILALSAEADDAIWHLATLARRRMQERDEARNQARMLLADLQARNARMKAAVPGASCSRVARPDAFAATGYEHIQAQAQAQAQALAPAAFGPRGQRARAGTGYYCVASSSGFGHRSIDSSLDTCAVQPSLLGFASSSSSQEHFDPDMFLVDVAESPQDVVPVPATADSSQGRSSGSGSGTYGHSLASKRPCSERK

SEQ ID NO: 52525 - protein, 182 aa, Zea Mays
MTSLLKTLERYQRHIYASADAAVPSSDEMQNNYQEYVKLKARVEVLQHSQRNLLGEELAPLSPSELDQLESQVDKTLKQIRSRKTQVLLDELCDLKRKEQMLQDANRVLKRKLHEFEAEAASPPQLAWQGGGGMLSHDPPQPEHFFVALESNAPLQPTYHTMDMNQQPEPAPGGCYPPAWMA

SEQ ID NO: 52526 - protein, 212 aa, Zea Mays
MSCNYGLWQESEEEVTDVEQAENWFSLTSAQRICDMFLALDKDTNSTLSKQELKEYADGTLTEIFIERVFDEHVRRSKVGGGNSREMDFESFLDFVLALENKDTPEGLTYLFRCLDLNGRGFLTTADIHTLFRDVHQKWIEGGNYELCIEDVRDEIWDMVKPADPLRISLSDLLSCKQGGTIASMLVDVRGFWAHDNRENLLQEEEEQVEET

SEQ ID NO: 52527 - protein, 135 aa, Zea Mays
MRLPAPPLSVSLVVLLNEHSPALFSLSWRRLGDCRRPRPEAPSSGPSLATSTTWCTGSDPSESDLLFLGFLAEDYGLAGAEARGDADAGAAGGVCCGGVPGGLRARGLPAHAARLRRRRRAHSARHRPQLALLQP

SEQ ID NO: 52528 - protein, 374 aa, Zea Mays
MLEIAPSFWGRWKRRHSNFDKSIPFALLSQVAGIREYFAANPALTSELPSTVVKSKASETLIIQSEHEDSELGDEFYDALTRGESFEDGDSDDDDDATTPKARKVKLKNVSWAIAGLALKTTKALVETSELVTNSSPVTVDPSHFHGTLHRAKTQNDQNSWSAPGGEKFMIRGKTYLTDYHKVVGGDPLLELLAVDWFKVNERFDSVALHPKSLVQSEAAKKLPFILVINLQVPAKPNYNLVMYYAAERPVNKDSLLGRFIDGTDAYRDARFKLIPSIVEGYWMVKRAVGTKACLLGKAVTCNYLRQDNFLEIDVDIGSSSVARSIIGLVLGYVTSIVVDLAILIEAKEEKELPEYILGTVRLNRVNPDSAVSI

SEQ ID NO: 52529 - protein, 499 aa, Zea Mays
MVGNNTVASLFYYSLLIICAAAWHADASQADRLREFIRSRRNSPSEAADKGTFEVANIGHSVASSLLSTSSYSDSEQSALKAADKITALPGQPDGGVDFDQYAGYVTVDEKNGRALFYYLVEAPQDASAKPLLLWLNGGPGCSSLGYGAMQELGPFRVNSDNKTLSRNKAAWNNVANVIFLESPAGVGFSYSNTSSDYGLSGDRRTAADAYLFLANWLERFPEYKSRPFYISGESYAGHYVPELAATILTQNSYNSRTAINLRGILVGNPLLDSYMNLKGAVAYYWSHGLMSDEVFDNITRHCKYDSSDGVACSGALEAVDPGQIDPYNVYAPICVDAANGAYYPTGYLPGYDPCSDYYTYSYLNDPAVQNAFHARTTSWSACANLNWTDAPISMVPTVAGLIEKKLPVWIFSGDFDSVCPLPATRFSIHDLNLHVTTPWRPWTVNMEVGGYVQQYQGGFTFASVRGAGHMVPSSQADRALVLLDSFLKGVLPPYVQEQ

SEQ ID NO: 52530 - protein, 61 aa, Zea Mays
MQQLPTDMASSLSLSLSERPGVCVPLVCACDCVKEPKRMRKLEREEEGEEGGKARRDESEI

SEQ ID NO: 52531 - protein, 95 aa, Zea Mays
MLTCPATEMVDGSRVLYFEQAFWRSPEKPFRQRFYMVKPCPKEMKCDVELSSYAIRDAEEYKNFCDRQKDQRPQAEEVIAVCHFEHNLTFQTVCF

SEQ ID NO: 52532 - protein, 147 aa, Zea Mays
MPPKLDPSQVVEVFVRVTGGEVGAASSLAPKIGPLGLSPKKIGEDIAKETAKDWKGLRVTVKLTVQNRQAKVSVVPSAAALVIKALKEPERDRKKVKNIKHSGNISLDDVIEIAKTMRNRSMAKELAGTVKELQQEIDDGEVEIPSA

SEQ ID NO: 52533 - protein, 222 aa, Zea Mays
MTSRHRRCSVCATSGRLSYPGHRVPGVFEVCLADLQGDEDQAYRKIRLRAEDVQGRNVLTNFWGMNFTTDKLRSLVKKWQTLIEAHVDVKTTDNYMLRLFCIGFTKRRPNQVKRTCYAQASQIRQIRRKMVEIMINQASTCDLKELVSKFIPEVIGKEIEKSTSSIFPLQNVFIRKVKILKAPKFDLGKLMEVHGDYKEDVGVKLERPVEGDEAGQEVAAAE

SEQ ID NO: 52534 - protein, 318 aa, Zea Mays
MECLTTSFPRNVGKEYICSSKLVSGNQWIPKRICCYVSCSTNSSRCHKFTDVACPMSPVIRKRLRWRCFAASLNLEDGPAPSDSTSSSSEQTTDADGTTNGDVSENLLSRKPSSDELKALLADSERSRLLRRLSEANQYNRFLKRQLQIKDDAVVKFKGELAVLELEMQALVGLAEEVANFDVPLGSRKINGKYIQSHLLSRLEAVHDKIMEQVKSVDALKTQEIPVYWIGMAENVQIMGSFDGWSQGEAMSMEYSGDYGRFSATLKLRPGRYEIKFLVDGEWRLSPEYPTAGDGLTQNNILVVESSHGPQLPRAPLA

SEQ ID NO: 52535 - protein, 73 aa, Zea Mays
MVTSTRNSARKKTVIEEIRGSSEHQGPLSQALSLLSGLDTCCDKFKLARFIAWNKLVRICPILPGLGKSELVL

SEQ ID NO: 52536 - protein, 394 aa, Zea Mays
MDFQVVVLAGGTSEKLSPLVSKDVPKALLPVANRPVLSYALDLLEASDLKDLIVVVEGQEAAQLVDAWVSSAYLDRLRVEVVVVSEDLGSAGALRAISKRLMANDILVVSGDLVTDVLPGAVAATHRRNGAAVTALLCSVPVSGPSDTSSSSGKDKAKKPNRLNIVGLDRSKQFLLHIVSGTDVEKDIQVHKRKIQAVGQMEIRSDLMDAHLYAFKRTILQDVLEQKEAYRSIRLEVLPYLVRSQLRSTPSGGSGTSVDEIESSAFQSSGNLQCLSQHRVIAPSAFKQDVLSRSSGGHRCCAYIASKSKYCHRLNSIQSYCDINRDVIGEVSHLSGYSFSAQNNIIHPSSVLGSKTTIGPHCILAEGSQLGDKCSVKRSVIGRHCRIGSNVKQN

SEQ ID NO: 52537 - protein, 100 aa, Zea Mays
MAEFTPEQQHAFCQFVTGAPRLPPGGLAALNPKLTIVRKHSSVANNNSNATGATESADDDLPSVMTCANYLKLPPYSTKAIMLKKLLYAINEGQGSFDLS

SEQ ID NO: 52538 - protein, 146 aa, Zea Mays
MPTKPIIDDPAIVEQNKEKVFEEWKSMRRDELTRFQKQVEEQYLSNVERQLERIQNARNARKANGHANMQEMDKELDTHRAEHGPKTRRVPEEGGNDDDEDAEDMAAEDEVMDEVLGINDGINEDPSKPSEEATTEGGEPAPEEAQ

SEQ ID NO: 52539 - protein, 168 aa, Zea Mays
MEPRIGNRFRVGRKLGSGSFGEIYLGTNVQTNEEVAIKLENVKTKHPQLLYESKLYRILQGGTGIPNVKWFGVEGDYNVLVMDLLGPSLEDLFSFCNRKLSLKTVLMLADQMINRVEFFHSKSFLHRDIKPDNFLMGLGKRANQVYVIDFGLAKKYRDTSTHQHIPYR

SEQ ID NO: 52540 - protein, 105 aa, Zea Mays
MPGYYDIDDILMEDEPISVVFQVTANGVGLLDPGAESNCVEKGAKVDLPFWLAHGLLSLEQAVSINPPPCFTQKTWKEIQADAACVDLRVRCPYFYELGCKIVPW

SEQ ID NO: 52541 - protein, 130 aa, Zea Mays
MLGMNLWGTIYNAVIMFVAPLLFSNWPYANGFEALRFCQENPEVAWDIFLFCLCGAVGQNFIFLTISRFGSLTNTTITTTRKFMSIVVSSVISGNPLSLKQWGSVVMVFLGLSIQIYLKWKRKKGREHKE

SEQ ID NO: 52542 - protein, 150 aa, Zea Mays
MKDARGIASLSGIVPPLVPFAQTFAAVITAALTGTLYYVATTPKDPTYVVTPAMRSRTGRENLKKLFAAWYERRQMRKIYSPLLEGILAFYLGFEWIQTDNILAPMITHGIYSTVVLGHGLWKIHDHRRRLRQRIQKVRSEGSSSADDTL

SEQ ID NO: 52543 - protein, 107 aa, Zea Mays
MTSSSSPSRKALSKIACNRLQKELAEWQLSPPAGFKHKVSDNLQRWVIEVTGAAGTLYAGETYQLQVDFPEHYPMEAPQVIFLNPAPMHPHIYSNGHICLGVLYSAL

SEQ ID NO: 52544 - protein, 343 aa, Zea Mays
MILAADSSASDLIRGIATECGVDFDEDPEAMVIDHINYAAMDVEGDHTLIVGDDLIQSDVILGSKKIEAPVLFRGIGHTANPSNSLVLKVLSASPSAYSANPKTKLSLPPSLTGSAISLVSVMQARNNARVLLSGSLDLFSNRFLKSGVQKAGSKTRYERAGNEQFVTETSKWVFHERGHLKAVNVKHHKVGETNEPGMYRINDDLEYSVEIYEWSGTSWKPYVADDVQLQFFMMSPYVLKTMSNDNKGLYSTSFKVPDVYGVFQFKVEYQRLGYTGLSFTKQIPVRPYRHNEYERFITSAYPYYTASFSTDSRERTSFWRLLMRPRSVAKCYPVQFYGIIYL

SEQ ID NO: 52545 - protein, 323 aa, Zea Mays
MNAKKELEASVCIKITALCPIALLEKASDLLRWQKKHPSFSLPWKTHSFPVLSDSSPLHLTASEPAALTAEEERELQLAHSRLLAVCARCAEHGIPLLVDAEYATVQPAIDYFTLVGALAFNDAGAADGGRPIVHGTIQAYLRDARDRLEAMVRGAERERVRLGLKVVRGAYLTREARLAAALGVPSPVHGSIQETHDCYNGCAAFLLDRVRRGSASVMLATHNVESGQLAAARAQELGIPKGDRNLQFAQLMGMADGLSLSLRNAGFQVSKYLPYGPVEQIIPYLIRRAEENRGLLSASSFDRQLLRKELVRRVKAMVAGRE

SEQ ID NO: 52546 - protein, 362 aa, Zea Mays
MSSHVSTSRGLHPPGKLGTLDSPGAWQPPAPMAQPEAGRGDDQEVRLLSVAWNQDCGCFAAGTSNGFRIFNCEPFKETFRRDLKSGGFAIVEMLFRCNVLALVGGGSNVLYPPNKIDTLSNPNGLCCLSHHSNTSVLACPGLHQGHVRVEHFGLQMVKTIPAHDSHISCMSLTMDGLLLATASTKGTLIRIFNTMDGTRLQEVRRGLDKAEIYSIALSPNVQWLAVSSDKGTVHIFSLRVRVAGVDSSNEQRALEGPRMDHQNSSSSIDPLIQANTGSNASSSLSFMRGILPKYFSSEWSFAQFHLPEVTRYIVAFGAQNTVMMVGLDGRCSFDQANGGQMLQREHFRFLKSDSPPFRTAAA

SEQ ID NO: 52547 - protein, 114 aa, Zea Mays
MDARPDPAASVTITTRTTHEHTRRLTRRGEHSAAMGGGGAHGGTTYKGYTIPHNKRWHTVAGKGLCAVMWFWVFYRAKQDGATLLGLRHPWDGHDDHSHGHGHGHEASSSSSSH

SEQ ID NO: 52548 - protein, 122 aa, Zea Mays
MGIPYEIAKLGIRQGMWGCVKRIEPGLRAYQQARAAGEPVSRSALMAQINTKVGDSFVRSLESDSDGSETVEAEEKPARNRVARFLVLGGAVALACTLDQGLLTKALIFGVARKFVGQRKAL

SEQ ID NO: 52549 - protein, 1653 aa, Zea Mays
MSQRGDRGEGHARRPGRSSSFGGHRGGGVGGAGKGGAGSSGQPPLSTNRSFRKPGNGHGGQQRVVNQPDTTGFQPAPAPAPHQTPARPPPAPQNAAVHVPISAPWPQPQGPQVSSSSAASDRPANPPLPKATHAAPRAPPKSSNPPLPQGGSKGEPPKGFNFQFGSINMNGLPQFPARTSSAPPNLDEQKRNQVLVEELKVTPTPVQPTPKQQLLQQHPHPLQKQQHQLPQLSHQPQQPQQQSTRKETVGSSQPNSINPHTTSQLKRDVHPSPSVPNVTSVRPTVQQMPGVQMPIPFHHQPAQVSLQFGGHGAQLQPQVVPSSFQMSMGLTGSSTPQVPQQLYAPTLQHHQLQQQAMMHPGQGMGYVPSVAHQFPQLGSIPMNIASQYPQQQPNKPAAARKAIVKITHPDTHEELKLDKRMDSSGQRAAPSIAQQSQPGVNYAPHLGFFHQPPNSYNQSGMYYSTTASVNQVATGSSGPRYNYPVTQSAQAMTYISPSAAPPVSGQSQYTVKPHPMGLLSEKSGTHVTISAPPAKSDPPKLHAAGDAASSLKKDNEVVSGITVLNKPTLERESNDPLVTVKHSTVISPSLPIHGEKPQTLVTSSPVANSVSPVTGADGKSKEPIQRSGSFKDSKKNVTKKDVRNSYEPPNPTSFVEDKVQTVKVGDGDLQETKKLNNELDLTNSSSAPTVPLAVSTENADSTAVTTADVPGTDTSSRRPSSEGTGEPGVESFTVSAVECDESKRTHKVVKDPSKDNISSDATKHELPKECAVDSTEQASAVTSNTDDSYAAPLVTNQEQLLKGSASEKQAVMNNSSMNSDTSAHFFDGNDVGVTTSGTSEPTAQTSNDEGDSDISPETDLAVYNVPLGSSELQLKSESRANDQQPAAPTVSVRPVSREKPSTKSTAGKKKKKKEMLAKADAAGSSDLYNAYKGPEEKSEVVGTVEGADNSSTVDTTHVLSDELEKDPSTSADDCKKKVELDDWEDAADMSTPKQPSDSGNQASITQVLDSDVTEANSRKKYSRDFLLTLQHHYTGLPFGFQMNEAVNAIMNNLAGKSYVADREPHPSPGRGLDRPTSRDRRGAAMADDRWTRAGVPLSPGRDVHMDLPNGPSVINYRGGPGGNHGVLRNPRSQSSNQYGGGLLAGPMQSVGPQVPRSGSDADRWQQKGLMPSPGTPVQAMHKAERKYVIGKVSDEEEAKQRQLKAILNKLTPQNFEKLFEQVKEVNIDSVATLTGVISQIFDKALMEPTFCEMYANFCFHLAGALPDFSEDNEKITFKRLLLNKCQEEFERGEREEAEADKTEEEGEIKQTKEEREEKRIRARRRMLGNIRLIGELYKKRMLTERIMHECIKKLFGNHDDPDEENIEALCKLMSTIGDMIDHVKAKEHMDAYFSMMQIMSTNQKLSSRVRFMLRDSIDLRRNKWQQRRKVEGPKKIEEVHRDAAQERHAQSSRLGRGPAVSSVPRRAHPMDYGPRGPSASASSSSQQGSIRGMPPHSRGSQDIRHDERHQFDNRTVLPQRVVKDEAITLGPQGGLARGMSIRGQPPVSNTEIPSVIDHRRIVSSSNGYNSAADWTSSSGREDSNSRLPDRTSGRIPASSQSAVTSQRPASQEGRSRSKSYSEDELREKSVLTIREYYRWHIVFAYGGYTFRNS

SEQ ID NO: 52550 - protein, 372 aa, Zea Mays
METFGRYLDLHELYNEFINSKFGTLMEYSAYVGCFSQTDKISHSHKATREYLEHILEYLTSFLYRTEPLQDIDKIFLKLESEFEEQWANEGILGWGNKGTEKESEIDLDYYSTVEELVELGPEKLKQALAARGLKSGGTVQQRADRLFLLKVTPLEQLDRKHFAKVPHTKDGSNTAPNGNAFKEDMKKEIALMEVKMKRLCELLDEAFVRTKENAEKKLTLTYEEMEAEREEEEVQVDTESDDEEQQIYNPLKLPMGWDGKPIPYWLYKLHGLGQEFKCEICGNHSYWGRRAYERHFKEWRHQHGMRCLGIPNTKNFNEITSIEEAKALWEKIQARQGVNKWRPDLEEEYEDQEGNIYNKKTYTDLQRQGLI

SEQ ID NO: 52551 - protein, 166 aa, Zea Mays
MPIIFSTSSLALPGTLARFSGLDFLKKAAIALNPGGALYLPTNVLLIAFFNYYYTFLQLDPDDLSEQLKRQGASIPLVRPGKSTAAYIKTVLSRISVLGSAFLAVLAAGPSLVEQTSHLTAFRGFAGTSVLILVGCATDTARKVQAEIISQKYKNIEFYDVNRFGQ

SEQ ID NO: 52552 - protein, 108 aa, Zea Mays
MCSQCGGNFNVASIDIEGEDGGPRMYMPPLLPPPQCESKLIARADDTEEVVKERLRVYHDLTEPVEEFYRARGKLLEFNLPGGIPESWPKLLQALNIEDPDNKRSAAA

SEQ ID NO: 52553 - protein, 270 aa, Zea Mays
MAYAARLVAKVHLAATPQAEPRHLSSFRVGALSRSTTVQRQKFVAKSAISAVESGDTFVGVKQNTRPIIVIDNYDSFTYNLCQYMGEVGANFEVYRNDEITVEEIKKISPRGILISPGPGTPQDSGISLQTVTELGPSIPLFGVCMGLQCIGEAFGGKVVRSPYGVVHGKGSLVHYDEKLDGTLFYDIPNPFQAGRYHSLVIEKDSFPHDTLEIVAWTDDGLIMAARHRIYKHIQGVQFHPESIITTEGRLMVNNFIKIIEGYEASNCSP

SEQ ID NO: 52554 - protein, 187 aa, Zea Mays
MFSFVWWIIGFYWVSAGGEVLTRDAPQLYWLCIVFLAFDVFFVVFCVALACIIGIAVCCCLPCIIAILYAVSDQEGASEDDIRQIPKYKFRKMEEPEKQSVGVPGSSGGIMIECGTNQPIEKVLAAEDAECCICLSAYDDGAELRELPCGHHFHCVCIDKWLHINATCPLCKYNVRKNSSSSGSEEV

SEQ ID NO: 52555 - protein, 449 aa, Zea Mays
MRRFAADRARRAVAASLHGAASRSAAPSPHAPAPRHPASPVGAAAMAAAMVRTMSTTAAGTPPVSVATINPKVLKCEYAVRGEIVTHAQNLQQELQKNPESLPFDEILYCNIGNPQSLGQQPVTYFREVLSLCDHPALLDKSETHALYSSDAIERAWQILEKIPGRATGAYSHSQGIKGLRDEIAAGIAARDGFHASGDNIFLTDGASPAVHMMMQLLISSESDGILCPIPQYPLYSASIALHGGSLVPYFLNEETGWGLDVDELKKQLEEARSKGITVRALVVINPGNPTGQVLVEENQKKIVEFCKNEGLVLLADEVYQENIYVEDKPFHSFKKIARSLGYTDDDLPLVSFQSVSKGYYGECGKRGGYMEITGFSPEVREQIYKVASVNLCSNVSGQILASLVMNPPKAGDESFESFMSEKDGILSSLARRAKSPNMEISNKNKSYT

SEQ ID NO: 52556 - protein, 74 aa, Zea Mays
MSSIRWHLSEGGFSEFRLMERLGEGQKPTVIIGEVADEWDLDLVVLSMEAIHSKHVDGNLLAEFIPCPVLLLPL

SEQ ID NO: 52557 - protein, 593 aa, Zea Mays
MYPFIFTSANYFGSDSGWETMGKKSKKPGQAGGRQWAPWSSTNVTPNTARPAWGGSGSSHPSGTSWAQAPDHGAATRGNPRPPSQTSRPVLAPPLANGWQWQSRPRPSGSEVKKDDAPPSGSVPEVENVDGNNTSDDDDDDDDDLSDDISDDYDSDASEKSFETRKTNKWFKEFFEVLNTLSLEQINEQTRQWHCPACKNGPGAIDWYKGLQPLVSHARTKGSTRVKLHRELAALLEEELSRRGTSVLPAGEQFGKWKGLQESTDREIVWPPMVIVMNTFLEKDEDDKWKGMGNQELLDYFGEYEASKARHAYGPSGHRGMSVLIFESSAVGYMEAERLHKHFVNQGTDRNSWHLRKVRFVPGGKRQLYGFLANKEDMEAFNKHCHGKSRLKYEMRSYNEMVVIQMKQMSEDNQQLNYLKNKMVKTEQRSKAVEESLGVVTQKLRETIEENIFVRSKAKEKHMEYEEEMKSQEEIFHGLIEDIHKATEDKEKQFEKLLQEERSKARRFDVDSGTMKDRQLRKEYVQKFIDCQVKDVAEFEVERDELIKVHEDKKLKLKKEYMDLELELEKEFDAALTGLMEKHKPDTFEASSS

SEQ ID NO: 52558 - protein, 209 aa, Zea Mays
MQWAGLRSQAPVPTAAWTGPRPRTARCPQGRFPTARRALVASAAASDANSSSNSPGKDEEGEEVVRREKEEKAVASLLMRSQKYAMLKQQLAVAAQFEDYKEAARLRDSLRSFEEKEPVLCLRRLMKKAIEEERFEDAAKYRDELKILAPHSLLKCSSDATTLGIRVQVRSVYIESRSQPLKGWKWKDRKHLGSWSSGRTTCHIPEDWF

SEQ ID NO: 52559 - protein, 453 aa, Zea Mays
MIVLHEYPLSMVDHVGFRRFVGALQPLFKIGTRNMIRSDIMKHYEVEKKKAIEYMAGIQSRVAVTTDLWTSDNQKRGYMAITAHFIDESWTLRNIIMRFIYVPAPHTADVIGEELYESLVEWNLDEKISSVTLDNCTTNDAVISSLVRNIGKHKLMNDGKLLHMRCSAHILNLIVKDGLEVLKDAIENIRDSVAYWTATPKRFEKFEEIAKFVKVDIKTKIGFDCRTRWNSTFTMLATAVPYKAIFIRASRVDRQYTCLPTEDEWKFAKDVVERLRLFNDITTLFFGTDYVTANVYFTRIAKIRNQIRLWSSCGNPLVEEMLVNMVAKFDKYWTDIQGLMGIATILDPRFKTAVLLICYEDLLVVSGSECEDRVANVKNLLADLMNEYHITENIENNESSTPSVGNSDDFLSDISARIASRRPTSMGLKSELDRYLDEEMVNMQTKNFNVLDW

SEQ ID NO: 52560 - protein, 107 aa, Zea Mays
MRRTATAALVLVPLLAAAVQTSALPFIVLHGIGDQCVNHGVAKFTKLLADWSGSDGYCLEIGRGTWDSWVMPLQQQADIICNKVKEMKQLRGGYNIVGLSQVMQLLY

SEQ ID NO: 52561 - protein, 60 aa, Zea Mays
MTAVRLLSFDTSYWPIGCDGHVIFSNGTAPFLCLACWEFCKRPPISLTSFKPEFDDPTCL

SEQ ID NO: 52562 - protein, 313 aa, Zea Mays
MAAVATPPAPAPAAPAPAPAPAAAPAPVTVAPAADQTTDLLQKLSLDSQPKAAGATEPAAAAAKEGAVTSQPLSVAIPPERSITPVLQDFMDPNLFYLPAYYYGGYDSSMSEWDDYPRYLNSDGVEIAPAVYGDIYGYGYAPYGAYSPATSPVPTVDGQMFGAQHYQYPTTYFQPPTPIPSTTQSNLQSSNNPEKPAAKADPAKATANGVPNGTGHTHSYSGTVPSQQSSALTPDGTYRAPLLGGVPSAGYLDTTYYGYDSTGAQFAWYDGSAYANGQQRTTTTNRFPSSSFSGNGSSAIYQNKSSTTQQMRG

SEQ ID NO: 52563 - protein, 191 aa, Zea Mays
MVLAFFLRHGVQHILSTNRGGQTSGLPTLGRAVIREAHHHNGADTVVHAVVADAAEPALAGPPRGAEALAPHDDGAEREALDLEAEALLHVVVPDDVDLVGDAGVLERAGEVVGLGGREGVVVVLHPARGSGGLAVAVAVLGGGGGARVGEGDVDGAPVGAGAGGACIAGSSAAIALGACLAGSRSCGLAS

SEQ ID NO: 52564 - protein, 409 aa, Zea Mays
MDLYVFATPYRITWDYYFAAREHTLEIKSWEEEAELKYVKEHGISIFLMPSGMLGTLLSLIDVLPLFSNTAWGQHSNLAFLEKHMGASFEKRTQPWVANIRKEDIQSGDFLALSKIRGRWGGFETLEKWVTGAFAGHTSVCLKDEKGDLWVAESGYENEKGEEIIAIVPWDEWWAMALKDESNPQIALLPLHPDVRARFNESAAWEYARSMVGNPYGYHNMIFSWIDTIGDNYPPPLDANLVMAVMSMWTRLQPVYAANMWNEALNKRLGTEDFDLQGIIMEIERRGMSFDQLLTIPEQDEWVYSDGKSTTCVAFILAMYKEAGIFTPFSESIQVTEFTIRDAYMLKIFEDNPARLPGWCNAGTDKLPFCQILGEYRMELPEYNTIEPYAKMNENCPSLPPTYKRPARC

SEQ ID NO: 52565 - protein, 258 aa, Zea Mays
MISAAQMVKPVSLELGGKSPLIVFDDIGDIDKAVEWTMFGIFANAGQVCSATSRLLLHEKIAKKFLDRLVAWAKNIKVSDPLEEGCRLGSVISEGQYEKIKKFISTARSEGATILYGGGRPQHLRRGFFLEPTIITDVSTSMQIWQEEVFGPVICVKEFRTESEAVELANDTHYGLAGAVISNDQERCERISKALHSGIIWINCSQPCFVQAPWGGNKRSGFGRELGEWGLDNYLTVKQVTKYCSDEPWGWYQPPSKL

SEQ ID NO: 52566 - protein, 332 aa, Zea Mays
MLSLQQQHGGAVAAGGDARHHAPQPSVLGGGADWLVFGGRADLEEPARNAPSPALFLLPPAGLDDRAAQPEPNPKPAQLAGAVDEERHLALAHQNYRSGKYREALEHGNVVYEKNPRRTDNLLLLGAIYYQIRNYDMCIAKNEEALAIDPHFAECYGNMANAWKEKGDIDLAIRYYLTAIQLRPNFCDAWSNLASAYTRKGRLNEAAQCCRQALAINPRLVDAHSNLGNLMKAQGFIQEAYSCYIEALRIDPHFAIAWSNLAGLFMEAGDLDKALMYYKEAVKLKPSFADAYLNQGNVYKALGMPQDAIMCYQRALQARPDYAMAYGEHFHA

SEQ ID NO: 52567 - protein, 193 aa, Zea Mays
MADSAALSTSLPRSLASRRPLSSPLHARARARSQRRCRLGSRSLHRLRARAGKDDPEDLYGPYPWDQPLDLTAGSDIQWVPEDRVTLFTSDGLIQIGGSLVPRRVSASEKRQRKLKSGQKLRRFQESSYMDPNQSLCLGALFNIAATNGLDMGRRLCIFGFCRSIEMLSDVVEDTVLEHGGERRQAVTASRRS

SEQ ID NO: 52568 - protein, 765 aa, Zea Mays
MSSFDIVRDALMALGCMEHRGGCGADSDSGDGAGLMSAVPWDLFDDWASKQGLALFDRRNTGVGMVFLPQDEKSMEEAKAATEKVFVDEGLEVLGWRPVPFNVSVVGRNAKETMPNIQQIFVKVAKEDNADDIERELYISRKLIERAAKSFSWADELYFCSLSSRTIVYKGMLRSEVLGQFYLDLQNELYKSPFAIYHRRFSTNTSPRWPLAQPMRLLGHNGEINTIQGNLNWMRSRETTLKSPVWRGREHEICPFGDPKASDSANLDSTAELLLRSGRSPAEALMILVPEAYKNHPTLSIKYPEVTDFYDYYKGQMEAWDGPALLLFSDGRTVGATLDRNGLRPARYWRTSDDFVYVASEVGVIPMDESKVVMKGRLGPGMMITVDLQTGQVLENTEVKKTVASASPYGTWLQECTRLIKPVNFLSSTIMDNETVLRHQQAFGYSSEDVQMVIESMASQGKEPTFCMGDDIPLAVLSQRPHLLYDYFKQRFAQVTNPAIDPLREGLVMSLEVNIGKRGNILEVGPENADQVALSSPVLNEGELETLLNDSKLKPKVLSTYFDIRKGLDGSLDKTIQALCEEADAAVRSGSQLLVLSDRSEAPEPTRPAIPILLAVGAIHQHLIQNGLRMSASIVADTAQCFSTHHFACLIGYGASAVCPYLALETCRQWRLSNKTLNLMRNGKMPTVTIEQAQRNFIKAVKSGLLKILSKMGISLLSSYCGAQIFEIYGLGQEVVDLAFCGSVSKIGGLTLDEGDLIILGEGVL

SEQ ID NO: 52569 - protein, 548 aa, Zea Mays
MQACNGYSLVCVPLYDTLGAGAVDYIIDHAEIDVVFIQDKKIKEILSPNCKSAKRLKALVAFTSATTEQNKEADQIGIKMYAWDDFLKVGKDNPRQPCPPQASDICTVMYTSGTSGQPKGVMLTHESHAMYVKGVDLFMDQFDDKMTTDDVFLSFLPLAHILDRMIEEYFFHKGASIGYYHGDLNALRDDIVELKPTLLVGVPRVYERIYEGILKAIAELRPLRRVIFNALYNRKLASMKAGYSHKTASPFADMLAFRKVKARLGGRLRLLISGGAPLSNEIEEFMRVTTCAYFIQGYGLTETLGPSTVCYIDDMALVGSAGVPATYTEIRLEEVPEMGYNPLGVPSRGEICIRGKSLFAGYYKSPELTNEAIVDGWFHTGDIGEMTPDGILKVIDRKKNIFKLSQGEYVAVEYLEKVYGFPPLVEDIWVYGDSFRSSLVAVVNPHQENTMKWAESNGYKGSFDEICKLEGLKEYILKELAAVAQKNKLRGFEYIKGVVLDPVPFDIERDLVTATMKKKRKNMLNYYQSEIDTIYKKLEAQKSAARAK

SEQ ID NO: 52570 - protein, 91 aa, Zea Mays
MNRPGTEMVIIVAIGLTVLVLIMTGNVTDTGHLMKEYLASPEMAALHVLEALDPELWLNITQLLLDSLRHLSSSHHLYFLTKMAFVLVQVE

SEQ ID NO: 52571 - protein, 783 aa, Zea Mays
MDRQRYQETLERCSLVKDLEMLPYGDHTQIGERGVNLSGGQKQRVQLARALYQNADIYLLDDPFSAVDAHTATSLFNEYVMGALSDKTVLLVTHQVDFLPVFDSVLLMSDGEIIRAAPYQDLLAHCQEFQNLVNAHKDTIGVSDLNRVRSHRTNENKGSIDIHGSLYKESLKPSPADQLIKTEEREMGDTGLKPYILYLRQNKGFFNGSMGILCHVIFVCGQIAQNSWMAANVQNPDVGTLKLISVYIAIGFITVFFLLFRSIALVVLGIQTSRSLFSQLLNSLFRAPMSFFDSTPLGRILSRVRILKQIVHIPEIYWVVSSDLSIVDLDVPFGLMLALGASINAYSNLGVLAVVTWQVLFVSVPMMVLALRLQKYYLASAKELMRINGTTKSALANHLGESVAGSITIRAFEEEDRFFEKNSELVDKNAASYFYNFAATEWLIQRLETMSAAVLSFSAFIMALLPAGTFSSGFIGMALSYGLSLNNSFVFSIQNQCQLSNQIISVERVNQYMDIPSEAAEVIEENRPSPNWPQVGRVELRDLKIRYREDAPLVLHGITCTFEGGDKIGIVGRTGSGKTTLIGALFRLVEPTGGKIIIDSVDITTIGLHDLRSRLGIIPQDPTLFQGTIRYNLDPLEQFSDQQIWEVLDKCQLLEAVQEKEQGLDSLVVEDGSNWSMGQRQLFCLGRALLRRCRVLVLDEATASIDNATDAILQKTIRTEFRDCTVITVAHRIPTVMDCSMVLALSDGKLVEYDKPTKLMETEGSLFRDLVKEYWSYASNGNI

SEQ ID NO: 52572 - protein, 89 aa, Zea Mays
MDKATQEVVNAIVEAQSCGLGLAVNKISIGPNLPTIKLERSVGLPELRSLRRTFIKLAGQYSLSGPPPPTDADSAKRMFVDYLNRELGA

SEQ ID NO: 52573 - protein, 388 aa, Zea Mays
MKIITWNRSFKGMQNGDDGKDDFENDELETLATVVDKILAWEKKLYDEVKAGEIMKLEYQRKVALLNRQKKHNAAIEVLEKTKAAVTHLHTRYIVDMQSMDSTVSEIQYLRDNQLYPRLLDLTDRMAKMWEDMKIHHANQLKIVLNLKSVDIPDSNIETSDYHHSHTRQLRDIVDKWITNFTDFMNCQKEYINALYGWLKLNLIPIESSLKEKVASPPRMQQPPIKAFLYAWHEHLAKLPDDLAKTAIVTFRAVLDTILGVQDEELKQKEICEQTRREYIRKARAFEDWCHKHPQPRAIDVDPDSGEGTGHKDVVTEKRFAVESLKSKLDDEIESHNKLSKQVREKSLSILKAHLPELFRALTDFSDASFEMYSKLRLMSLMQDQGNN

SEQ ID NO: 52574 - protein, 65 aa, Zea Mays
MAWRASLSRSLKEIRVLFCQSSPASAAAREFVKKNYGDIKARNPSLPFLVRECSGVQPQLWARYE

SEQ ID NO: 52575 - protein, 311 aa, Zea Mays
MEDAVAAENGIEGEGYVVVKAAAAAEAEGDSGASDRGDLAAPAEDAAPAGSEDAPAPAVTPDETAAPAKAPAKKGGSGDAAGVRKARPQNGRVPAAAAAAPRVKKPGVLSQSASFPARGAAAKKASAVATPKQAKGVVTNGSEAAAGRAAEKKANSARTPVARRSMPVKSGSADAAAPNDAIPAVQEPHENTDKPLKQMQPGKTEDDVRSTTSSTNTPRAAARKSAAVAAGFSFRLEERAEKRKEFFQKLEEKIHAKELEKTNLQEKSKESQEAEIKLLRKSLTFKATPMPSFYKEQPPKVELKKFLMLWF

SEQ ID NO: 52576 - protein, 178 aa, Zea Mays
MSESQRIRQRRGRIFALPEEPEVARVWLPRYNSPGLAMARAFGDFCLKDHGVISVPDVSYHHITEKDEFVVLATDGVWDVLSNDEVVNTVSRVTSRASAARFLVESAHRAWRTRFPTSKVDDCAAVCLFLNTNEASESSSSLANNLADAVQVSTAQCSKTIQVSAPIDGNEVSVVETR

SEQ ID NO: 52577 - protein, 233 aa, Zea Mays
MKKLVQDLSVIEAALRTSSKLVVSSNGKRVRRLHPLPHKELKDSKKSTVLVENLPPDFSMESIQEKFATVGKVVNITINDPESVKEFSTAKKPDFNLSFKAHVLVEYEAVEAAEKAVTALSDESNWRTGMKVRLLSKQSVMGPGKYKKPSKENQDAVSKMIDQNQHSKEDQLKTLEKISGADAVGITKDRDNLKPVFITETEHQDQKPNARGRKGWYKGQGQMQQNANKQDEF

SEQ ID NO: 52578 - protein, 126 aa, Zea Mays
MIAMSYKKLPVDVKPGNVILCADGTISLAVLSCDPDAGTVRCRCENTAMLGERKNCNLPGIVVDLPTLTEKDKEDILGWGVPNDIDMIALSFVRKGSDLVTVRQVLGQHAKRIKLMSKLVSEMQFC

SEQ ID NO: 52579 - protein, 247 aa, Zea Mays
MAEFPSAKPPLGVFFAAVAPRLQPRYYSISSSPSMAPTRIHVTCALVRETTPAGRVHKGVCSTWIKNAVPSEESKECSWAPIFVRQSNFKLPADPSVPIIMIGPGTGLAPFRGFLQERLAQKESGAELGRSVFFFGCRNSKMDFIYEGELNNFVEQGALSELVLAFSRQGLAKEYVQHKMAQKASEIWDMISQGAYIYVCGDAKGMARDVHRVLHTIVQEQGSLDSSKAESFVKNLQMEGRYLRDVW

SEQ ID NO: 52580 - protein, 151 aa, Zea Mays
MTLKLWDVKMNSGPVATFQVHEYLRPKLCDLYENDSIFDKFECCQSGDGLRVATGSYSNIFRVFGCGTGNSEATTLEATRNPTRRQLQNPTRATRSLSSLTRAVRRGGESTGIDVNGNSYDLSTKLLHLAWHPSENLIACAAANSLYMYYA

SEQ ID NO: 52581 - protein, 496 aa, Zea Mays
MNKMVINHLDKLFVTNDAATIVNELEVQHPAAKILVLAAKAQQEEIGDGANLTISFAGELLEKAEELIRMGLHPSEIIIGYTKAINKTIEILEDLVEKGSENMDVRNKEDVVLRMRSAVASKQFGQEDMLCPLVADACIQVCPKNPANFNVDNVRVAKLLGGGLHNSSVVRGMVLKNDAVGSIKRAEKAKIVVFAGGVDTSATETKGTVLIHSAEQLENYAKTEEAKVEELIKAVADSGAKVIVSGAAVGDMALHFCERYKLMVLKISSKFELRRFCRTTGAVAILKLSQPNADELGYADSVSVEEIGGTRVTVVKNEDGGNSVATVVLRGSTDSILDDLERAVDDGVNTYRSMCRDSRIIPGAAATEVELAKRLKEFSLKETGLDQYAIAKFAESFEMVPRTLAENAGLSAMEIISSLYAEHASGNAKVGIDLEEGACKDISTLKIWDLYVTKFFALKYSADAACTVLRVDQIIMAKPAGGPRRDAQPGGGMDED

SEQ ID NO: 52582 - protein, 175 aa, Zea Mays
MGTICWGVRYSRRKNLLLLSRNSKRFSTGFGVSGGSTLIHEFYSREVQNPIHLTVDTGFTRGEASIKAYISSNLSLRDSQLAAQFQEIPLDLKMIEAEKAGFEILKSTMVEKLPNDLEGMESSMGKLYILIDEIYKYVDDVVEGRVAPDNRIGRFISDSFASVPKLSPAAFDKTG

SEQ ID NO: 52583 - protein, 78 aa, Zea Mays
MVVLVCCLCMCGTALLCYLSWVIFSVAIIVNWVLLYLEKRTLVLSWRNGVDWWVMRITCDCLLVHCFLPLIELMRIPV

SEQ ID NO: 52584 - protein, 380 aa, Zea Mays
MRITWVTNDNSVPSVVDYGTKESTYTMKSQGESTSYSYLLYSSGKIHHVVIGPLEDNTIYYYRCGGQGPEFQFKTPPSQFPLSLAVVGDLGQTSWTTSTLNHIKQCEHDMLLLPGDLSYADYMQHLWDSFGTLVEPLASNRPWMVTEGNHEKEHIPFFESGFQSYNARWKMPYEESGSRSNLYYSFEVAGAHIIMLGSYTDYDDSSDQYAWLKADLAKVDRKRTPWLIVLLHVPWYNSNWAHQGEGDSMMASMEPLLYAAHVDMVIAGHVHAYERAERVYNSRPDPCGAVHITIGDGGNREGLARRYRNPKPAWSVFREASFGHGELKIVNSTHAHWTWHRNDDEEPVRTDDVWINSLAGSGCIQEGSRDRESRKILMSP

SEQ ID NO: 52585 - protein, 229 aa, Zea Mays
MATTTTHAANSCTGEGEGFRGSLLSSLKVPLRQNSKKERQRVTLTRRRQTEQLNSAARRLQSSASSVAASALLVPSLLLPLVRVTREAALLGDVRDLDARVVDLAGAPPPRQHLAVGPHPLAVVPARHHHPELERARRRLPRAPRRPVVARHEPPVGRTHLRDVYGDDVGLPALVEEPDGEVAGGRGRSVAPLLHPHRQVSLVLDVDCAACCEAWGHAGARHGRERGAA

SEQ ID NO: 52586 - protein, 221 aa, Zea Mays
MDASRTPDVKPRITDESEKVKTWKLADIVDNGHLRALHLTDTDTNPSKIVRLLYTNNGVALLALGSNAVHKLWKWQRSDRNPSGKSTASVAPHLWQPANGILMTNDTNDGNPEEATACIALSKNDSYVMSASGGKVSLFNMMTFKVMTTFMAPPPAATFLAFHPQDNNIIAIGMEDSTIQIYNVRIDDVKSKLKGHQKKITGLAFSQSMNVLVSSAMCVEY

SEQ ID NO: 52587 - protein, 344 aa, Zea Mays
MFKESTVSKMVDIPLCHIPEAVIKTASDWISQRSYDALGDFVLWCIDSIMSELSGPSAGPKGSKKVAQQSPRAQVAIFVVLAMTLRRKPDVLVNVMPKIMGNNKYLGQEKLPIIVWFIAQASQGDLVTGMFCWAHFLFPTLCAKPSGNPLARDLVLQLLERILSVTKARSILLNGAVRKGERLVPPVSFDLFMRATFPVSGARVKATERFEVAYRTIKELALAGSPGSKTVKQASQQLLPLCAKAMQENNAELTREAVDVFIWCLTQNAESYKQWERIYPENTEASVAVLSKIVIDWKDVSPKLSSEALKATVKNLKAKNEAALESATDAGKQASIKKQTSTAR

SEQ ID NO: 52588 - protein, 218 aa, Zea Mays
MIVSSFLPLRSSVFVLPSSAASRSRPATATLLPFPRITLSRRRRLAAAATESSSSSSEEGEGEAAGGSTNGSLPGLPPVEEEEELCPVDCVTEFKTDEEFQRHLNRSRATGALVVVDFYRPSCGSCKYIEKAFTRLCKGSGDDGAPVVFLKHNVIDEYDEQSEVADRLRIKIVPLFHFYVDGVLVESFPTRDKERIIAVIRKYTSVEPEPEPEEEQQE

SEQ ID NO: 52589 - protein, 53 aa, Zea Mays
MLQIKLRALKISRNVIGSCGRPEEKPRSDEGDIEMTRIVSSYRDVFERFKLKF

SEQ ID NO: 52590 - protein, 551 aa, Zea Mays
MNQDNYFEEALKMRNLLEEFSLKRGKHYPSILGVREHVFTGSVSSLASFMSNQETSFVTLGQRVLANPLKVRMHYGHPDVFDRIFHITRGGISKASRSINISEDIYAGFNSTLRQGCITHHEYIQVGKGRDVGLNQIALFEGKVAGGNGEQVLSRDIYRLGQLFDFFRMLSFYVTTVGFYFCTMLTVLTVYIFLYGKMYLALSGVGESIQNRADILQNAALNAALNTQFLFQIGVFTAVPMILGFILESGVLTAFVQFITMQFQMCSVFFTFSLGTRTHYFGRAILHGGAKYRATGRGFVVRHIKFAENYRIYSRSHFVKGMEVALLLVIFLAYGFNNGGAVGYILLSISSWIMALSWLFAPYLFNPSGFEWQKIVEDFRDWTNWLFYRGGIGVKGEESWEAWWEEELQHIYSIRGRILETILSLRFFIFQFGVVYHMNASGGSTALLVYWISWAVLGGLFILLLVFGLNPKAMVHFQLFLRLVKSVALLMVLAALVPGNFVYETQCERCFCFHSSICANWVGNHFDCHGMETCREEIGFVENCSCPSSPL

SEQ ID NO: 52591 - protein, 740 aa, Zea Mays
MDRAGRSSSVQSGSSGTDYVTSRSSILGPAVPVKPTVPSLSTNKDVVFNGSVGAPQSSSGFQHNWFGVPGQMSMADIVKMGRPQVRSSGKPMAAADTSYAGQTPSLSSSVNQNSKQSASTTLPTTFDQGFPALPDPIPHTVNSSHGSAGNNHTHENDWFPQDEPQSGVQSTGIEASGDQSLSVASLDQSMLVAGTAYSQENSHAEENNSTAVKATVSSERHLEIVEEDNHYNDGLLQNCAYQAQVHSYVDNEVGVSNVDAESAVANFQHLSLQNEDIVVTKSEDNHAVILPDHLQATNADCAHLSFGSFESGAFSGLFSSKVTKDSLEDNEVHIPDESPSVNLDARNQDYYDNDALNLSANEDVETRIGTNMDNIDGPSVSQSDVPRQGAIDVPGLQYDMPSVPSHAYSSTTQPSKMEDPQGNTQAQPLSHFSGLLQANTLPNYLLGSNLTPIREFDFSQLLQTQSATKYNPSAAPNNLPAISMQETLKPGGFPNTQSTQHVPNTSIPSGLPLPQQLPVYSQPTLPLGPFTSLVGYPYLPQNYYLPSAAFQQAYSSNGPFHQSGAPAVPGAGMKYSMPQYKSSPPASSLPQPSSLSGYGGFGNANNIPGNFSLNQGAPSAPTTLGFDEALGTQFKDPNHYAALQQSDNSAMWLHGGAGSRTVSAVPPGNFYGLQGQSQQGGFRQAHQPSQYGGLGYPSFYQSQSQASLPQEHPQNLTEGSLNNSQGVPSQPSHHLWQHSY

SEQ ID NO: 52592 - protein, 361 aa, Zea Mays
MMAGNEDQLRAVAARAVTDSLRAAASRCSAADRAARFRDCVRSLEAEKAKMEVFRRELPISVHLVADVIDWLKEELAQHRRRPSDLFAPPAPPPPAKDGAVLADADANDKRSWMSSVQLWSCGSHDDSTANTNGAAAAAHKVSSAFVALAASPPAPTLARPSGDAAGKPGASASAMPVADLSLSSPAAAASPSAASSAVTDAAGAHRRQHAQQRKARRCWSPGLHRRFVAALQRLGGAQVATPKQIRELMKVDGLTNDEVKSHLQKYRLHTRRASSDGGDQHAGGLWSSAPEQQYTTSQHSTSQSQSQSGSPQGPLQLAVSSRAMSATAGDSCDAGDEAQGGRSESYGWEMPQHGTKASSS

SEQ ID NO: 52593 - protein, 647 aa, Zea Mays
MEVAPARSSSTPVLLPHPLPLPGEGESPCRGPGRPLPPPVPRMLDGEGKGPAADAPGVLETGSQRMTPLLARRVAVQTLPKAHEHNDFRLNGTTCCQRRKAFKEKFQDKNCDETLNFRLNIPAKSAPSSGFSSPVQSPRRLSNVDFSSAAISIQDTNVWSARSLWSSDAMGSSPPCDSPDKFAGGQERSPLSSPLRSPVLKSRNPSAPPSPMHPKLFPENHVSRPDGNGSASFHPLPLPPASVSPKQTNASHQLVPKAEMPSVAGQWQKGKLLGSGTFGCVYEATNRHTGALCAMKEVNIIPDDAKSVESLKQLEQEIKFLSQFKHENIVQYYGSETIEDRFYIYLEYVHPGSIHKYVHQHCGSLTEAVIRNFTRHILKGLAFLHSQKIMHRDIKGANLLVDINGVVKLADFGMAKHLSTAAPNLSLKGTPYWMAPEVVRATLDKSAGYDLAVDIWSLGCTIIEMFTGKPPWSGLEGPAAMFKVLRTDPPIPDNLSPEGKDFLRCCFKRNPTERPTANKLLEHPFIQTLNHYSPHSVVHSFSGIKSPDTVHSSARDKVPWKSDSYMRGKHANGETSSARSSESLAYRLMTPLPNLGTNSLSPPPLSSASSSGSAAHTPNSMHFSVPYHQPSPLPKPNGKEAINLVSH

SEQ ID NO: 52594 - protein, 656 aa, Zea Mays
MPSTPRWAVANGAGVILSVCDEEVARYETANLTAAAVPALLLPPPTTPLDEHLVAGLPPLEPYARLFHRYYAIATPSATQRLLFGLLEAPPSWAPDALDAAVQLVELLRAAEDYASGMRLPKNWMHLHFLRAIGTAMSMRAGIAADTAAALLFRILSQPTLLFPPLRHAEGVEVHHEPLGGYVSSYKKQLEVPASEATIDATAQGIASLLCAHGPDVEWRICTIWEAAYGLLPLSSSAVDLPEIVVAAPLQPPTLSWSLYLPLLKVFEYLPRGSPSEACLMRIFVATVEAILRRTFPSETSEQSRKPRSQSKNLAVAELHTMIHSLFVESCASMDLASRLLFVVLTVCVSHQALPGGSKRPTGSDNHSHEEATEHSRLTNGRSRCKKRQGPVATFDSYVLAAVCALSCELQLFPFITKNGSHSNLKDSMKIIISGKNNGMNNELHNSISSAILHTRRILGILEAVFSLKPSSVGTSWSYSSNEIVAAAMVAAHVSELFRRSRPCLNALSALMRCKWDAEISTRASSLYHLIDLHGKTVSSIVNKAEPLEAHLTLTPVKRDNQHHREESNTSSLDSVKLENKNGSTSHKKNGFSRPLLKCAEEVLLNGDVASTSGKSIASLQVEASDLANFLTMDRNGGYRDVCRKYISSPRMEEGC

SEQ ID NO: 52595 - protein, 178 aa, Zea Mays
MARRLPLWTALLLPFLLTGVGTAAAASPPHDECPVPTIVESVLGTRDTCSTLDLGNPVGVVEGDEFTLATAVNLLHANKDDYIAVLFYASWCPFSQECKPNFETLASLFPTIRHFAFEESAIRPSIISRYGIHGFPTLFLLNSTMRVRYHGPRTVKPLAAFYTDVSEILTLFLVVTIL

SEQ ID NO: 52596 - protein, 169 aa, Zea Mays
MDYHRGANLEVRIARIFNTYGPRMCIDDGRVVSNFVAQALRKEPLTVYGDGKQTRSFQYVSDLVEGLMKLMEGEHVGPFNLGNPGEFTMLELAKVVQDTIDPNARIEFRQNTQDDPHKRKPDIGRAKELLGWEPKIPLREGLPLMVTDFRKRIFGDQDTAAATTGNQQG

SEQ ID NO: 52597 - protein, 279 aa, Zea Mays
MGSVWNRLGSEVTVVEFAPDIVPSMDGEVRKQFQRMLEKQKFKFMLKTKVVGCDTSGDGVKLTLEPAAGGEQTILEADVVLVSAGRSPFTSGIGLETLGVETDKAGRILVDKRFMTNVKGVYAIGDAIPGPMLAHKAEEDGVACVEFIAGKEGHVDYGTVPGVVYTHPEVASVGKTEEQVKALGIAYNVGKFPLLANSRAKAIDDAEGVVKVIAEKETDKILGVHIMAPNAGEIIHEAVVALQYGASSEDVARTCHAHPTVSEALKEACLQTFDKAIHI

SEQ ID NO: 52598 - protein, 189 aa, Zea Mays
MSYCVHPQDSVGIGELALDPTLFGSSTTLLNADHQEVYFNGMPEWHGKILRRHGDEFERTSDGYYRAHGRADDTMNLGGIKVSSIEIERICNRVHDAILETAAIGVPPVGGGPEQLTIAVVLKDQSSQIEDLNQLKLACNMALKKLNPLFKVSSVVIVPSLPRTASNKVMRRVLRKEFSQAAQAKHSKI

SEQ ID NO: 52599 - protein, 122 aa, Zea Mays
MLPFLASGCCKPPTSCAFSYMNETYWTQNPSVPTVTNDPDCKRWSNDQQTLCFQCDSCKAGVLAGIKKSWRKVAVLNIVVLIILVIVYVAGCAAFRNAKRIENGEAVGMARMTKSHPSRFQF

SEQ ID NO: 52600 - protein, 66 aa, Zea Mays
MLMCVPMKKHPVRLVLLLCLEVGLHTLRMKFQAEVIHKSRLPNTMVPAMNVMYIIGRNSSLAASAW

SEQ ID NO: 52601 - protein, 183 aa, Zea Mays
MARTEIVKQLWAYIRRNNLQDPNNKRKIICNDELRLVFETDSTDMFQMNKLLSKHIRPLESKNDSKPEAKKLKPQGDEPISSVETDVNQLPLMVSDALATFFGTGEREMVHSEAVKRVWDHIKSNDLEDPENPTVILCDSKLKQLFGRESLTAHGVSEVAFRPPLHAIYQYLTGDTIFWTRLG

SEQ ID NO: 52602 - protein, 231 aa, Zea Mays
MADKVEWVNKIKAVIQSKGGSFKGPSTEGSSMRQSNSDGALDTMARRPADPEEELRWMSQEVRGYVEAVLNSLAANVPKAIVLCQVEKAKEDMLNQLYSSISGQSNAKIEELLQEDHNAKRRREKYQKQSSLLSKLTRQLSIHDNRASVSSYSNDTTEAESPRTPTRSGEDWRSAFDSASNGPVAGSTNSQSRSKSADGRSRRYENGDVSSGANSGSRRTPNRLPPAPPKY

SEQ ID NO: 52603 - protein, 304 aa, Zea Mays
MDRRRPTEDSFELPRRDSSRDADIEMGMHQADASDNLKDFLKKVDAIESIIAKLSNLLNKLQTANEESKAVTKASSMKAIKQRMEKDIDEVGKIARQAKTKVDELERDNLSNRQKPGCGKGSAVDRSREQTTGAVKKKLKERMDDFQTLREAIRQEYREVVERRVFTVTGNRPDEETIDDLIETGKSEQIFKDAIQHQGRGQILDTVAEIQERHDAVRDLERKLLELQQIFMDMAVLVEAQGDMINNIETHVSNATNHIQQGVSALQNAKKLQKNSRKWMCYAIILLLVIVAVIVVAVIQPWKK

SEQ ID NO: 52604 - protein, 130 aa, Zea Mays
MKTLHLRVQCQNNTALRMAQFLEEHLKIARVYYPGLPSHPEHHIAKSQMTGFGGVVSFEVAGDFDATRKFIDSVKIPYHAPSFGGCESIIDQPAIMSYCSVAYKQGFKGAEGHLWDQGQPDQVQHWSGGF

SEQ ID NO: 52605 - protein, 963 aa, Zea Mays
MPLSDLYDPSRGYLVNDTIIVEAEVAVRRMVDYWTYDSKKETGFVGLKNQGATCYMNSLLQTLYHTPYFRKAVYHMPTTENDMPSGSIPLALQSLFYKLQYSDNSVATKELTKSFGWDTYDSFMQHDVQELNRVLCEKLEDKMKGTVVEGTIEQLFEGHHINYIECINVDYKSNRKESFYDLQLDVKGCRDVYASFDKYVEVESLEGDNKYHAERYGLQDARKGVLFLDFPPVLQLQLKRFEYDYMRDTMVKINDRYEFPLQLDLDRDNGKYLSPDADRSIRNLYTLHSVLVHSGGVHGGHYYAFIRPTLSDQWYKFDDERVTKEDTKKALEEQYGGEEELPQINPGFNNTPFKFTKYSNAYMLVYIRENDKDKIMCNVDEKDIAEHLRIRLKKEQEEKEHKKKEKSEAHLYTIIKIARDKDLKEQIGKNIYFDLVDHEKVCSFRIQKQLPFTAFQEEVAKEFGIPVQFQRFWLWAKRQNHTYRPNRPLTPHEEAQSVGQLREVSNKAHNAELKLFLEVELGPELCPIRPPEKSKEDILLFFKLYNAEKEELCFVGRLFVKALGKPSEILTKLNEMAGFSPNEEIELYEEIKFEPNVMCEHIDKKLTFRSSQLEDGDIICFQKAPVPDGDPQVRYPDVPSFLEYVHNRQVVHFRSLDKPKDDDFSLELSKLHTYDDVVERVAHKLGLDDPSKIRLTSHNCYSQQPKPQPIRYRGVEHLLDMLVHYNQTSDILYYEVLDIPLPELQCLKTLKVAFHHATKDEVVVHSIRLPRNSTISDVITDLKTKVELSNPDTELRLLEVFYHKIYKIFPPHEKIENINDQYWTLRAEEIPEEEKNLGPHDRLIHVYHFMKDPNQNQQIQNFGDPFLMVIREVETAAEVLERIQRKLRVPDEDFSKWKLAFISMNRPEYLQDTDVVSARFQRRDVYGAWEQYLGLEHTDTTSKRSYTANQNRHTYEKPVKIYN

SEQ ID NO: 52606 - protein, 77 aa, Zea Mays
MERPETYKQWQVRYQRAGFRQLPINQDIMKRAREKVRCYHKDFLIDEDNRWLLQGWKGRIVLALSTWKPDHRSSTAL

SEQ ID NO: 52607 - protein, 150 aa, Zea Mays
MLAPHVNPRATEYGVELGGEGTVQVVFPNGSLAMSEVVRPGDVFWIPRYFPFCQVAARAGPFEFFGFTTSARRNRPQFLVGASSVLRTMLGPEIAAAFGAREKEFSKLVRAQREALIMPSSPGKEEEEHGKKGREKEESLPMVVEQAAAE

SEQ ID NO: 52608 - protein, 164 aa, Zea Mays
MRRANLGSCFLQGMVYCILLAAVLISLIAFSVTRHHIYLYMGIGSVLLIAIYTGYFRRRIRKQFNIRGTESSLDDCVLHLICPCCTLCQEARTLEMNNVQCGVWHGRGDTICLGSNGAGNKAFAALNKASLVPVKSPGLCGMDRSSSAADEQQPLVPPDQLEQV

SEQ ID NO: 52609 - protein, 427 aa, Zea Mays
MQVNNEAPLGCLKPNISQYNSPEQIGGVEGFPENNEKRNDIVAAEKIWEATPNQGLSRPIYRQEFYAWPYIYSDYQIVRQPLPYGFDNQFYQINRDHGFPIENRVQYLPFKMLPQGHPHDAQLQEFQYFVVIDFEATCDKVNNPFPQEIIEFPSVLVNSATGKLEECFQTYVRPTYHQFLTDFCKELTGIQQIQVDRGVPLGEALLMHDKWLEDKGIKNTNFAIVTWSNWDCRIMLESECRFKRIRKPPYFNRWINLRVPFQEVYGDVRCNLKEAVQLAGLTWEGRAHCGLDDARNTARLLALLMHRGFKFSITNSLVWQPAAAPQSTAATCHFSPDRSPDPVVVQLQHQQQQHKPKEALGSPASLVNPSYATPAGGKDRAMYCYCGVLSRWSVVRKPGPMQGRYFFGCGNWTATRRAICPYFAWAS

SEQ ID NO: 52610 - protein, 167 aa, Zea Mays
MQYVAFASFLGLVCCLFWNVIAVTTAWIKGEGVKIWLLAIIYFISGVPGAYVLWYRPLYNAMRTDSALKFGLFFLLYVFHILFCVFSAVAPPVVFEGKSLAGILPAIDLISVNALVGIFYFVGFGLFCLESLLSIWVIQQVYMYFRGSGKAAEMKRDATRGAMRAAF

SEQ ID NO: 52611 - protein, 185 aa, Zea Mays
MAIAGQCSSCYYTSPTLQLHRRHSHLPRQPQAARRARRPRLQVAAAADSGPIRAATDAEFFQPSDTRPIMLFDGVCNLCNGGVRFVREHDPNRSIRYVPLQSESGRKLLQRSGRSPDDISSVVLVEKDRSFIKSEAVLRIMEYLNLPFPQLAVFLKFLRDFAYDNVANNRYAMFGRAEAEACEIL

SEQ ID NO: 52612 - protein, 84 aa, Zea Mays
MEHSCNAFSAWLAIESHFLGKREHRALLDARFRTFVQGDLSITDYCRRLKGMADALGDLVHPVTDRTLVLNVIRGLEEDHSWLR

SEQ ID NO: 52613 - protein, 254 aa, Zea Mays
MAATSEEAIKQFSALMEQLEEPLKSTFQNVHQGNLRGTLMRFLKAREWSVPKAYKMLMDCLNWRVQNEIDIVLAKPILPSDIYRVIRDTLLVGLTGYSKQGQPVYAFGVGLSTFDKASVNYYVQSHIQMNEYRDRVVLPAASKKFGRQINTCLKVMDMTGLKLSALSQIKMLTMITTVDDLNYPEKTETYYIVNAPYVFSACWKVVKPLLQERTKKKIQVLYGSGRDELLKIPVRNVLSFIHATKPVTKLTPMA

SEQ ID NO: 52614 - protein, 85 aa, Zea Mays
MYSWSDSTQGYHADAAHRLLGRDVLLLLVFLVDHPTRGDDEEQTSEGDTFTTKKQQEGVAVQTRPRRQKRNNVRVECIYGPKWVV

SEQ ID NO: 52615 - protein, 173 aa, Zea Mays
MVRDVFRLAKENAPAIIFIDEVDAIATARFDAQTGADREVQRILMELLNQMDGFDQTVNVKVIMATNRADTLDPALLRPGRLDRKIEFPLPDRRQKRLVFQVCTAKMNLSDEVDLEDYVSRPDKISAADIAAICQEAGMHAVRKNRYVILPKDFEKGYRTNVKKPETDFDFYK

SEQ ID NO: 52616 - protein, 340 aa, Zea Mays
MDALMRVFKRVTGITDGAAEGTQAAATPDVCAARLLVPGAQAINLIGKQGATIKAIQESTSATIRVISVDEHERPFYVTDDERIVEIQGDTEKVLKALQAVSNHLRKFLVDHSVLPLFEKTNTTVSQDRNGDGWSDMSRPSIGSAQVNQLPSVLDDYILQVKRDPLYLERESLVDHNIHRSGVSLYGRDPALSTLRPSAVHGAGSLLTQITQTMQIPLTYAEDIIGVKGANIAYIRANSGAVVTIQESLGSPDDITVEIKGTSSQVQAAQQLIQDSLAAHREPVRSSYVGAGLDSVYRSSYSQYGSSIYPSSSLPSYSSIDDVSRYPSSGLGGYGSSYRY

SEQ ID NO: 52617 - protein, 226 aa, Zea Mays
MASLFKDPSKLSAYRDRRFKGTQEEYEATLHASTTLYIGNMSFYTTEEQAYELFSRAGEIKKIIMGLDKNSKTPCGFCFVLYYSREDAEDAVKYISGTMLDDRPIRVDFDWGFEEGRQWGRGRSGGQVRDEYRTDYDPGRGGYGKMVQRELEAQRELVDYGGSFQPNAPPPYERGERKRGYGDSHRNDRGDYQRKRYRSSDDRSAPEESKRAPDSDPAEKNPRFRE

SEQ ID NO: 52618 - protein, 54 aa, Zea Mays
MEKFPRSKKQGLDCLQFVFFLLFLFVWILYIFFSIVMHPLAKYHLKQKMDQAKS

SEQ ID NO: 52619 - protein, 304 aa, Zea Mays
MWGPLAYSVQEGPVLLRADGDGDHHRHELLPGVQVPLRPQRHCVRQAGQARPQRQAPPLRHHRHRVHQGAVRVPGPEDRVPRGGVLEPRLLRGAGGVRGRRRRRGAGGPDGVQDGARPADGAVDADARVLGLRLAHGHQPPHAAALLHPHPQRVRQDARRQQRHPGQLAPQHLLPLLRPVQLTDRDPCPARNWSWLAGALLGSVTIVYSTILCSTTTRLLLLLLVYYHQVRRNGTASRRRRPWEGRCLRSPCRCSCIVIMVLGVVASGARFLGQASCAMFVGSGWHVMPCVTLIASRQARRQKN

SEQ ID NO: 52620 - protein, 1548 aa, Zea Mays
MDRIRDGRRGGVSVGGVPPPPPPRRRLRSNGGGGPRDSPRSERRRGERLMLNGGGGCASRDDGDDISDESLGDDDDDAEQELVPRYHQQRRSPSTAPPPSSPPPPGGGHHSSSSSGGGGYHNHHHGQHHQMQWKGGSNPIVSKAVDEMIGVPVPRKARSASTKRSSHEWPVPGGGTSGGSTGAGDGSQIQRPLSRPISPASASTTVPARKKLKPLGGGSSGGPGQASKQRPSPSPAPSTTPPQPPPPKMSKSPSFIQEEIEVAEVLFGLTRQFSCPPKQEVNHKLDPRDVPESKCGNSSSAPSSGARPSDSTSLSAIAPKRKKPRLAKYDEDSRPASPTKPELVEPSSKPEPPPVARSEAKMATSAATESGTSTAPAAVQLETLRKPEKTEDSELRPSEPDRRNHSLESQAELPASLPAPSVKPDAEAKPVGSEARNGEATATTKIELASDGARHDKFSIDLMAPPPGKLSDDIDASSDPDADKKGLDSEMDMLGRGNSEKKDGERTLGGLDIDLEDQKVQRIPADESTPKKLTLQLDLEKPSLGDEKSPSQRRQPHQHPQQLQQLKPSKAEIKHEKSAMPAVTPPIPIPVGGWLGNFPPFGYLSPVPGLSGAGLHHPMDVKPGSSSGLQHAALLPPPTRSKRCATHCYIAQFIQHQQRVAKMNSFWPPAVAAAAAAANRSGPLFGARPFSMGVVPPTDAASMLVNPMQGSYPIRAHTPMQEAKAPMATSFQGSLSKDKALGNAAGPESSQRKQPPAHETQQSTPMPNMLQALAFIFPFNQQHAMVAAANAANRAGDAKSSGASNAMPPSASAHTLAANSGATAMNLSFANLQPADAQFLAILQNGYQFQVAAHPGGPPYRGMAPPGPAVPFINGHVYSSPMLHPSQQQGAQPQSHQKTQLPNLPSSSQKHQPQHSQGLLGYAPNANAAAAASNSHNYSSGNQRPVLAHRQESDKTGEDGLSSDDKPSHSQKSGYEHNFAVPVHLPNFAMMPAAQPAGSQSEKKLSDHHHQQQQPQVSRGQGVRIDLASSQPFVMPFGSIGPPGSAPSGLDFSALAQSHAFLQSHQEAARHGYPQLNFAAAQSTQHKPQHGETKSVAGDSSLTHIAGDSQRKKSTSTKYSGDSQQHSLSFTRTESKNHVPPFLSGSTNESSSRTLSLIGTESSNTFMGSKSTNSTTPASTPPAASSSISQQHQHFLQMQVQHKHQHQQMIQHHHLNRPRSAAPSTQNSAGGYPDRLNMASFQNMMYPPNAAQGQGRVQSPQLKASSGRGTPSSTATTPPAAAPPNLIVMKTSSLHPQQAKIPMQALSTPGHQSQSSLSMSSSKMAPVTNLSTGGGDLSRSSNAPVASGSPSNSVSKSTGGSPPATGNAKGVQQPVQLPSPQQQLAKNSVSTCGSKSTPANHFSMAMPSILGQQPNSSPGSNTGSKQQSHMSSSMKQQPFPQGHFFISSTYAPQAPGAGGAAALGLYQKRPGDKTQPQAPHQQNALSAAAGSNMKSLHPSSGGFMHLAAATQSAGGGMPHTHMPAAQLSFGTMPVPLKPSSDQKPAAGK

SEQ ID NO: 52621 - protein, 285 aa, Zea Mays
MLAMGFSNVAGSLSSCYVATGSFSRTAVNFSAGARSTVSNIVMSITVFVTLELFMKLLYYTPMAVLASIILSALPGLIDIKEACSIWKIDKMDFLTCLGAFVGVLFGSVEIGLAVALGISFAKIIIQSLRPQVEILGRLQGTDIFCSVRQYPVACLTPTVLPIRVDTSFLCFINATSVKERITEWVWEGVETSNGKARERIQAVVLDMSSVVNIDTSGLTALEEIHKELVSLGLQMAIASPGWKAVQKMKVSQVVDRVGQDWIFMTVGEAVEACLAAHKGTALAC

SEQ ID NO: 52622 - protein, 96 aa, Zea Mays
MLTVLMYLILPMPLIFFLGSDTSSMMSNGGDGWVNFTKFLTGASIVGSIAIPSILKHAGVIGWGALTMELSSFVVFGVAILWFLQMNGEDEYSGVF

SEQ ID NO: 52623 - protein, 176 aa, Zea Mays
MSPKDKLKLKRLAPGQVELSSQAGAIPAITEDEDEPHNPGLWPLLSLNGSDGSLQGFEELLASVLGKKAGEKGTFKLLKARASAQTYVKMAFTVEKKLAEGDVNWSNIPEWKTKPKRMRAHYEVLARVEEGQAIPERIAQVQPFQANEAMSESVLTGNVTRSKMEIVHPPPVYFTL

SEQ ID NO: 52624 - protein, 333 aa, Zea Mays
MHLSLGCRDPAHCTVAATVSSSTMSAASTVDPHPPHQQQQCDKVSSMEMEIPADLIIRIGESVFPLHKAAVTPAGERRSRRASMSGTTAATELGAARPGALEKVAMMVDEVAAEIATEEALPISKFVGVAGAVPKDARPSHDCLYRAVDIYLKTHPELDEIQREKVCSVMDPLKLSYQARTHASQNKRLPLQAALSALYYDELKLRSAATADVVLDTQSSAAGRACAQARAADAALARENEALRSELARMRAYLSGMERSKGGRSTPPSSPSRRAKKASFLGSVSRTMSRLNPFRSGGWMAKVTTSNAAGGGRQSKTMMQHVVTPKRRRASIS

SEQ ID NO: 52625 - protein, 309 aa, Zea Mays
MKIAAGAAKGLEHLHDKASPPVIYRDFKSSNILLGEGFHPKLSDFGLAKLGPVGDKTHVSTRVMGTYGYCAPEYAMTGQLTVKSDVYSFGVVFLELITGRKAIDNTKTQGEQNLVAWARPLFKDRRKFPKMADPMLQGRFPMRGLYQALAVAAMCLQEQAATRPHIGDVVTALSYLASQAYDPNAPVQHVRSNSSTPRARNPAGWNGDQRSVRSPNHHSPDPRRRDAAGASKYGAEVSRTSSTSDSGRRSGLDDMDLTGSQVGSPAQTGRRREAPRGTDRQRAVAEARTWGENSRERTNGHGSFDSTHE

SEQ ID NO: 52626 - protein, 640 aa, Zea Mays
MVLAAEIDALCVQETAIIDLGGARGTVDLNDIRTQVPALPGRDVLGDEIKGSEQAKIESIAEIETVGVKENVIADHKETGIEVDAHVLEQAKMVSALEPDSTPEVCADKLEPSGGEAHCSEQIKMASIAQAVSSMALVGYSSSEDSMVDAAARVTDADFVDSKAAGVYRQETMPTQTTSTLPENMDSPATAATMVESKFAASSEHVAGPEPIDETSVMQVELATSTGDGCAADGHNLVSSETVVEVKLAQEIVVPSPGGSIEANNTSTISEVYKDTQSRASGEACNDGQSHGDENMKLGEAYTELQLAPSSGEEAMTCMCSELPSQEVEAPSSDPLENNEETKNEAAAQGSVNEDSAPRAENAKIDEADTEQELLPSGEATVDESSELLSQDEKVARKDAKMEESAAAAAAQRQLTTEVAHASENAKLGEDGTELQLPPPSMVDISREQLSQEVEVASSGPSGTDETAEMKRLNTEHSPGDETSKLVGTDLGLQLSPSGDAMVDISNKPPSCQDVKEAPSSDILGNDENSDTEKTPAALHGRLNTELAPSGRNTEFSEADTGKQETPVSAEAMVESSSEPRSHEAKEAPTPDLSGDDEKAKSARAAVVAELFGDATEGGSDQPLPSPREQGKEAEADGGF

SEQ ID NO: 52627 - protein, 188 aa, Zea Mays
MVHLRGRIANSVNEGRLVPEDIIFGLLTKRLEDGYNKGENGFILDGIPRTRMQAEILDEIVDVDLVLNFKCADGCFMKKQSRGNICAHCGQLFDVSNSASTNCSPSLGSYTWHSQAEPAGVLGLEASRMERMRTYAEQTKQLEDYYKKQRKIVELKTSARPVETWQGLVAALHLQHLDSPPTPHKLTA

SEQ ID NO: 52628 - protein, 67 aa, Zea Mays
MTEAPFLPRERLFKQQHYFQNLTKHTYLKGRYDVITSVAIPLALAASSMFMIGRGVYNMSHGVGKKE

SEQ ID NO: 52629 - protein, 603 aa, Zea Mays
MIQRAHENLKNKKSLTFAPEASEDVLPLDLGELLAYFVKQSVPLFDQLGIKRDVCDKLVESLCSKRKDHPAYSFLSATESSSLKNDNVGNELDLRIASALQSTGHHYEGGFWSDGHKSDISGKRHVAIVTTASLPWMTGTAVNPLFRAAYLAKSCKQDVTLVVPWLCKSDQELVYPNSMTFSSPEEQEKYMRNWLEERVGFKTDFKISFYPGKFQKERRSIIPAGDTSQFIPSKEADIAILEEPEHLNWYHHGKRWTDKFNHVIGVVHTNYLEYIKREKNGAIQAFFVKHINNLVARAYCHKILRLSGATQDLPKSTICNVHGVNPKFLEVGERIAAERESGQQSFSKGAYFLGKMVWAKGYRELIDLFAKHNSDLEGFKLDIYGNGEDSHEVQSAARKLNLNLNFHKGRDHADDSLHGYKVFINPSISDVLCTATAEALAMGKFVVCADHPSNDFFRSFPNCLTYKTSEDFVARVKEAMARDPQPLTPEQRYNLSWDAATQRFMEHSELDKVLNGDSNSECGGSVGTETGKSAGTMMRRSASAPNMSDVVDGGLAFVHYCFTGSELLRLSTGAVPGTRDYNKQHSLDLRLPPPQVQNPVYGW

SEQ ID NO: 52630 - protein, 483 aa, Zea Mays
MAGPMEREGRDAAEKPLLVRVGGSGGSQGGSASSSSVAVVVGCTAIAVAGSFEFGMSIGYSSPTQLGIMRDLRLSLAEYSVFGSILTIGAMLGAIVSGSVADRAGRRGAMAISDVLCALGYLLIGFSQSYWWLDIGRVLIGCGIGILSYVVPVYISEITPKDLRGGFATVNQFMICCGGSLAFVLGTFIAWRTLAIVGVVPCLVQLVGLLLIPESPRWLARFGHPGAFTGALQTLRGHGTDISEEASEIKVFTEKLQRLPKSKMLDLFQKEYIRAVIAGVGLMALQQLGGVNGVLFYASEVFVSAGFSSGNTGTVAMAVVQVPMVGLGVLLMDKAGRRPLLMISAAGTCVGCLLVGLSFLSKEQHWERDLNVLALAGLLVFIGSFSLGMGGIPWVIMSEIFPINMKGSAGSLVTLVSWLGSWIVSYAFNFLLIWSSYGTFFIFAAICGLTVVFVHRLVPETKGRTLEEIQASMNSSLTPFHKY

SEQ ID NO: 52631 - protein, 248 aa, Zea Mays
MKRPRGASPPLAAMTNPNDDGYGVVGMEADADADADEEMMACGGGGEKKRRLSSEQVRALERSFEVENKLEPERKVAVWFQNRRARWKTKQLERDYSALRQSYDALRHDHDALRRDKDALLAEIKELKAKLGDEEAAASFTSVKAEPAASDGPPPVGVGSSESDSSAVLNDADPPVAEAPVPEVRGTLLDAPGAVAANHGGVFFHGSFLKVEEDETGLLDDDEPCGGFFSVEQPPPMAWWTEPTEHWN

SEQ ID NO: 52632 - protein, 86 aa, Zea Mays
MGMEIIETGDPVAFKEYLQEYENTICGRHPISVFLHMLKHCSTKIKIGFVRYEQSSQCKNMRDSSVSYASAAAKVAGASGEEDKQD

SEQ ID NO: 52633 - protein, 204 aa, Zea Mays
MDRFKLIKEVGDGTFGSVWRAINKQNGEVVAVKKMKKKYYSFEECMGLREVKSLRRMNHPNIVKLKEVIRENDILYFIMEYMECNLYQLMKDKVKPFSESEVRNWCFQIFQALAYMHQRGYFHRDLKPENLLVSKDVIKLADFGLAREVSSLPPYTEYVSTRWYRAPEVLLQSSAYDSAVDMWAMGAIMAELLTLHPLFPGTRK

SEQ ID NO: 52634 - protein, 219 aa, Zea Mays
MAGASLLSPSCTLLRLIPSASHFKRFDRVRRFAPAAMATSSGPKEAPANNPGLQTEVDPATKGYFLQQTMLRVKDPKVSLDFYSRVMGMSLLKRLDFEEMKFSLYFLGYEDVTLAPDDHIKRTEWTFRQKATLELTHNWGTENDPEFKGYHNGNSDPRGFGHIGVTVDDVHKACERFERLGVEFVKKPDDGKIKGIAFIKDPDGYWIEIFDQTIGTKSL

SEQ ID NO: 52635 - protein, 57 aa, Zea Mays
MGHSTALQQKLEATTQFRKLRSIERSPPIEEVISTGVVPRFYGHVMILYLTVAFTCL

SEQ ID NO: 52636 - protein, 515 aa, Zea Mays
MVRKKRTGPGESSGESSGAPGHGSSQRPQATQQGTRGGGQHQGRGGYLGPGVPPSQHPGGGPPEYHQPLDYQGRGGYQGRGGPPSQHPGGGTPPGSQPRGYQGHGGYQGRGGPPSQYPGGGTPPGSQPRDYHGRGGPRPRGGMPQSYRGGHVGGSVVPSVPSGPSRPVPELHQAPDVQHQAPVVATPSSPGAGSSSQPGKAEVSAGQVQQQFQQLAIRNQSLASQAGQMAPASSKSVRFPLRPGKGTHGSRCIVKANHFFAELPNKDLHQYDVSITPEVTSRGVNRAVMAELVKLYRHSHLDGRLPAYDGRKSLYTAGALPFASKTFEITLQDEEDSLGGGQRRQRVFRVTIKFAARADLHHLAMFLAGRQPDAPQEALQVLDIVLREMPTAKYCPVGRSFYSPKLGRPQQLGEGLETWRGFYQSIRPTQMGLSLNIDMSSTAFFEALPVIDFVSQLLNRDISVRPLSDSDRVKIKKALRGVKVEVTHRGNMRRKYRISGLTPQATRELSYVHVS

SEQ ID NO: 52637 - protein, 968 aa, Zea Mays
MFDECVAPLVDGLFQGYNATVLAYGQTGSGKTYTMGTACKEGSHIGIIPRAMAALFDKIENLKTQVEFQLRVSFIEILKEEVRDLLDPTAGTVGKAENGNGHAKLSVPGKPPVQIREASNGVITLAGSTEVHVTTQKEMAACLEQGSLSRATGSTNMNNQSSRSHAIFTITLEQMRKIDPIMTADGMPIEEMNEDYLCAKLHLVDLAGSERAKRTGSDGLRFKEGVHINRGLLALGNVISALGDEKKRKEGAHVPYRDSKLTRLLQDSLGGNSKTVMIACISPADINAEETLNTLKYANRARNIQNKPIVNRNPIADEMKRMRQQIEYLQAELVSARGGATSDDVQGLRERISWLEQTNEDLCRELYDSRNRSQNDPCEPEIQRTLNGFTKSEGLKRSLQSTDPFDVPMADSVRGNPKDIEDEVAKEWEHTMLQDSMGKELNELNRQLERKESEMKMYGCDTVALKQHFGKKLMELEEEKKAVQQERDRLLAEVESLSADGQTHKLRDAQLQKLKSLEAQILDLKKKHENQIQILKEKQKSDEAAKKLQEEIHFIKAQKVQLQHKIKQEAEQFRQWKATREKELLQLRKEGRRNEYERHKLQALNQRQKLVLQRKTEEAAMATKRLKEILEARKSSARDSSAGSNGTSQGYNMGERSLQKWFDQELEVMVHVHEVRNEYEKQSQLRAALGEELAILKQEDIRAGGSSPQRGKNGNSRTNTLSPNARQARIASLESMVTISSNTLVAMASQLSEAEERERAFSGRSRWNQLRSMGEAKSLLQYVFNVAADARCQVKEKEVEIKEMKEQMTELVGILRHSESRRREMEKQLKQREQTTPMATTPPKSGNGTTKHSADDPNTPLSPVAVPAQKQLKYSAGIVNSPSKGVAAIKKEQLKMVPIAQLSAGKRVSIAGHSGKLWRWKRSHHQWLMQFKWKWQKPWKLSEVIRHSDETITRIRPRPPLLPHKPHN

SEQ ID NO: 52638 - protein, 50 aa, Zea Mays
MLHAQALTLAALAGSALVEYYDHQQGSGSKVHQYAKQFLSSDSNSGQQKE

SEQ ID NO: 52639 - protein, 582 aa, Zea Mays
MLLWPLYADGTRTGNQICQYSVAASAEEGVNLVLEVRLVVPEAGGGGAILPADQRWHALEPEPGVHPPRVRRVAPSGLVPDVGAQEHRVLALQCLQPLVDHRLRHVAVCRAAQRRRWGEWESIIKAYEKDHVFLGEAAQIMVQNVNYDIPYQRKQMQKTQQQLAELDRREADIKRLAALSATRYVEACQELGLQGINVREELIESAKTLPSTFSKILEVLNSDPVSNAMEYYTTFVKDCHTEDKRNSDSVLPKLKDLQANPPSLHVSVYNEIKSSLGEASKSPGFTVIAGEIDSNVAAADDIDWDISVDTNEIDWDIGAVEQPGEESGDGFGSYEIIDANIELAGSENYNVGVSDKSMNKEDLASSESGICWDITADSSEEIASIQNASSVLEQSQSQMIAEDRSLLLEKEYRNNILDDLLEVKSFLTQRLGEMRNADTSSLQHQVQAVSPFVLQQHAPDSLENMLVEISSAISLLTNQKTLDLIMILNSKRFLDRLVSSLEEKKHHEVKLREGLGDLSVKRMELQNALSSSWPKQEAAITKTRELKKLCESTLSSVFDGRPVYIIGEINTLLSSSVSQLAG

SEQ ID NO: 52640 - protein, 290 aa, Zea Mays
MANRRVLYMTLKTWFAHILKSQIVSFWLCPQPIRTLLLLMQSRFHGEVDPKGERTFGVLTKIDLMDKGTDAVDILEGRSYRLQTPWVGVVNRSQQDINKNVDMIAARRREREYFASTPEYKHMASRMGSEYLGKMLSKHLEQVIKSRIPGIQSLITKTIAELETELNRLGKPIANDAGGKLYTIMEICRMFDGIYKEHLDGVRPGGEKVYHVFDNQFPVAIKRLQFDKQLSMENVRKLITEADGYQPHLIAPEQGYRRLIESCLISIRGPAEAAVDANFRCCCAAESAGP

SEQ ID NO: 52641 - protein, 833 aa, Zea Mays
MAGKSKGGKNKGKAQVVGHSASAEPEVLATDGAELVNPDNGEVSEPGEVSDPPATEDGVADVEKGDGDAPEVVQSAKKPAEGELHLYPVPVRTQSGEKLELQLSPGDSVIDVKQFLLDAPETCFYTCYDLILHTEDGSAHQLEDYNEISEIADITSGGCSLEMVAAIYDERSIRSHLRRVRELLSLSTLHVSLSTSLTLQQESAQGKSADSGKSPIQELDGLNFMEDSAGALTNLLASTPAEIKCVESMVFSSFNPPPTYRRLHGDLIYIDVATLEGNKYCITGSSKSFYVNSSNKNIFDSKPTKQGLEASTLVGLLQKISAKFKKGFREVLDRRASAHPFENVQSLLPVTSWLGAYPVPEHRRDAARAEDSVVLSYGTELIGMQRDWNEELQSCREFPHGNPQERILRGRALYKVTCDFVDAAVKGAVGVINRCIPPINPTDPECFHMYVHNNIFFSFAVDSDYEDISKDHKPDCQNGSSRSTKVSSPDVITKPDANHGKSAEVVDSKSEEAQLADSEQATYASANNDLKGTKAYQEADVSGLHNLAMAIVDYRGHRVVAQSIIPGILQGDKSDSLLYGSVDNGKKISWNETFHSKVVEAAKQLHLKEHVVLDGSGNPIKLAATVECKGIVGSDDRHYILDLMRVTPRDSNYIGQEHRFCVLRPELIASFVEVESIKQSLKQKVPDAPVASTSDAKATSVEGDDKSEESSVHTHEENDNSSSEILFNPNVFTEYKLAGSAEEIAADEELVKRAGTYLVDIVIPKFVQDLCSLDISPMDGQTLTDALHLHGINIRYLGKIAGMVKHLPHLWDLFSTEIIVRSAKHVIKVLGHT

SEQ ID NO: 52642 - protein, 95 aa, Zea Mays
MPIKKIVTLHSDIWHLNLIQIAATGSWVWKKLFKIVLQKKHQFNFSSDKYGSFSIWSPPEFELLLTVCRTYNIVYSDQQVAHDWPAFGLWGLSVR

SEQ ID NO: 52643 - protein, 222 aa, Zea Mays
MSGSGIFAEKSENGDSEASNPDNKTSLRMYQQTVTGISQISFSADGSVSPKKPSSIPEVAKQRELSGTLEDADAKINKQLSEAKTKELSGSDIFGPPPEIPARPLAARNMELQGNVDFSLPQRSVHTSVKVSNPAGGPSNISFSEEPVVKTAKKIHNQKFQELTGNNIFKEDVPSSAEKSLSSAKLKEMSGSDIFADGTPAPREYLGGIRKPPGGESSIALI

SEQ ID NO: 52644 - protein, 554 aa, Zea Mays
MLTLIARRSRHYAGTRYLKRGVNEEGRVANDVETEQIVYENMLGPWQISSVVQNRGSIPLFWSQETSKLNLKPDIILHEKDKNYEATRLHFENLRKRYGNPIIILNLIKTLEKRPREIILRWEFDRAIKIINSGLPGEDHLRFLHWDLHKNSQSKSTNALQVLLKVAFEALNMTEFFYCQVSPDQRAKGSPNLSPTLKIGFGHHACDDKNCGNADYVDDLDDISQEDTCGSSDPGNGIAEDKFEVNGSAQIKRPKFQKGVLRTNCIDCLDRTNVAQYAYGLAALGHQLHALGSVESPEVHLDSPLSRHLMHFYERMGDTLALQYGGSAAHNKIFSAKRGHLKFAIQSQEFFRTLQRYYSNAYMDAYKQAAINLFLGYFQPQVGKPALWEPESGDEHVLDDETCKLMKRARSDGSILNKSKLSISSNGPNGILKLAFTGSKNEGQRPNRSSDTACDNGMSKSRYTPTLSHIKHISCELDYYNGSGDSNFLDLDWLTASDNERSKAISTPDVNISTDSGVRDVISGTTDDQASGIHAQGFSKDFVQWLNQGEAFWY

SEQ ID NO: 52645 - protein, 124 aa, Zea Mays
MDDRKIVAWGEGHNSWVSAVSFDPYWSPPNSDETEENVMYRFGSIGQDTQLLLWDLALEEIAVPLRHPSGGSPTFSSGSPSAQWDNACPPAGVLQPSPRMRDVPKLSPLVAHRVHVDPLSGLEF

SEQ ID NO: 52646 - protein, 109 aa, Zea Mays
MACFGDEIKEEGWWKEEERQERRCSRRSHGGDKRCYKPRIILIFGITAPSIFSLVSSLHLMVLYYIQLRKNEYFFLVSKKRSILLHIIASNGTKIIIYEACLVLVLCSS

SEQ ID NO: 52647 - protein, 107 aa, Zea Mays
MSSNPALKKNSLQAVRNRQLESKLDLTETIKDGARMFLIDAGIRRQLILAFTEDSRLHVEELIDVYRLVEDQIDMPSVAVEVLQDLPSVARDFMLSWSDSILSDRQY

SEQ ID NO: 52648 - protein, 823 aa, Zea Mays
MHADAETDEVYAQMTLQPLNPQELKDPYLPAELGSANKQPTNYFCKTLTASDTSTHGGFSVPRRAAEKVFPPLDFTQQPPCQELMAKDLHGNEWKFRHIFRGQPKRHLLTTGWSVFVSAKRLVAGDSVLFIWNDNNQLLLGIRRANRPQTVMPSSVLSSDSMHIGLLAAAAHAASTNSRFTIFYNPRASPSEFVIPLVKYVKAVYHTRISVGMRFRMLFETEESSVRRYMGTITGICDLDSVRWPNSHWRSVKVGWDESTAGERQPRVSLWEIEPLTTFPMYPSPFPLRLKRPWPTGLPSLHGGKDDDLANSLMWLRDTANPGFQSLNFGGLGMSPWMQPRLDATLLGLQPDMYQAMATAAFQDATKQASPTMLQFQQPQNIAGRASPLLSSQILQQAHHQFQQQPYLQNISESTIQAQGQSEFLKQQIQRSQSFNEQKPQMQHQQESQQQQQPQCLPVPQHQQMQQQNMTNYQSISNALSPFSQLSPVSQSSPMALQTILPFSQAQSFTDTNVGSLSPSNGNTMQNTLRPFSSEAVSHLSMPRPTAIPVADPWSSKRVAVESLLPSRPQVSSQMEQLDPAPASIPHSSALAPLPGRGCLVDQDVNSDPQNHLLFGVSIDSQSLLMQGGIPGLQNGNDSAAIPYSTSNFLSPSQNDFPLDHTLNSSGCLDDSGYVPPCSDNSDKVNRPPATFVKVYKSGTYGRSLDITRFSSYHELRRELGRLFGLEGQLEDPLRSGWQLVFVDREEDVLLVGDDPWQEFVSTVSCIKILSPQEVQQMGKQGLELLSSAPARRLGSSCDDYVSRQESRSLSTGIASVGSVELG

SEQ ID NO: 52649 - protein, 529 aa, Zea Mays
MIYQSRLAPKFDVNRGKNMNFVLSLLDSENENVTELAAAIISHSCKSSAEQLALCSAGVPQKLVSLFGGSVNLRDACLGSVTVVVQNNQDVASRFVTTVHGKCFRSVVGLIHDRNPSTRLLACRCLIALGHASPGHFQDKQIKTKLIMVLLELIEEPGHIGDEAPLALTTMIKDSFELQKQALATNAVEKLSNHLLAKPLETRQAVAILLALSELCSKLEESRSQMMSDEVSTLLLDALKHDWADIRVAACSCLKNISRSPKVLSGGRLSCDTVIGPLVQLLNDSCTSVQVAALGAICNIAINLTPRKSVLLNSGVVSHLVHLSKSMDPILRLKSVWALRNIMFLLSPKDKDFIVKELTLSTLSSLICDSEHFVQEQTLALVRNLVDGYVDSANFVIGEDGIIMNAIARQLNNASAPGVFVQGMYVLANIAAGNELNKEAVMNVLLPHRADRIKPLFAVNFLQSKDKQLRVATLWCLLNLIYPKCEASSGRAVRLQNAGVIQQVKNMINDHCLDCKSTYGASTLREQCG

SEQ ID NO: 52650 - protein, 81 aa, Zea Mays
MFLGNTSSSTSSCESTACSYAGYTNSTSFAILANVTTTNVCNAGMTPTAQPAHSSALRLEPVWLRWTELVALSLFTLSFFV

SEQ ID NO: 52651 - protein, 321 aa, Zea Mays
MRAGNNTMARKLFEKAVQASPKNRFSWHVWALFEANEGNIDRARKLLKIGHAVNPRDPVILQSLALLEYNFSSANVARVLFRKASQIDPRHQPVWIAWGWMEWKERNARTARALYQRALSVNSTNECAARCLQAWGVLEQRAGNYTAARRLLRSSLSINSQSEVTWMTWAALEEEQGDPVRAEEIRNLYFQQRTEVVDDASWVIGFLDIIDPALDSVKRLLNLDQPSRPARQDDVKSTTEPCPPTAKSSETSAGNDARNNGSEAMGTLTSDFDLDAFIKKRLALDPSELDAVLEGSDPRGVVSQRRKQRLPRKPLPLLPVP

SEQ ID NO: 52652 - protein, 186 aa, Zea Mays
MYFVYRNKKYIDCTGMSFRDFMQGKLPQAPGELPTLNDWENHLTTIFPEVRLKRYLEMRGADGGPWRRLCALPAFWVGLLYDEESLQSILDMTFDWTKEEREMLRRKVPSTGLKTPFRDGYVRDLAEEVLKLAKNGLERRGYKEVGFLREVDEVVRTGVTPAERLLNLYETKWQRNVDHVFEHLLY

SEQ ID NO: 52653 - protein, 518 aa, Zea Mays
MHRERYKEVIRVCCLEKDLEMMEFGDQTEIGERGINLSGGQKQRIQLARAVYQDFNIYLLDDVFSAVDAHTGTEIFKECVRGALKNKTIVLVTHQVDFLHNADIIYVMKDGMIVQSGKYDELLQAGTDFAALVAAHDSSMELVESAAPASERELPLSRQPSSKNAASNGDSSSSSIVAPKAEKASARLIKDEERASGHVSFTVYKQYMTEAWGWWGPLVVVAVSVVWQCSLMASDYWLADQTSDGNETSFQPSLFINVYAIIAAVSVVLVAARSFIVAFIGLQTADRFFKQILNSILHAPMSFFDTTPSGRILSRASSDQTNVDLFLPFFVWMSVSMYITVISVLIVTCQVAWPSVIAIIPLVILNIWYRGYYLSTSRELTRLESITKAPVIHHFSETVQGVMTIRCFRKEENFLQENLNRVNSSLRMDFHNNGANEWLGFRLELIGSFVLCFTAVLMVTLPSNFVKPEYVGLSLSYGLSLNQRPHGGSRTAYQILIGQQKATSMSLILSLGIGTTLL

SEQ ID NO: 52654 - protein, 86 aa, Zea Mays
MKFVAAYLLAVLAGNSSPSAEDLTAILESGRSLLQSHVAVAVWLLWQLPLLLAALLQLRRRKKRRWRRRKKVMTTWASASSTKPVQ

SEQ ID NO: 52655 - protein, 160 aa, Zea Mays
MGRFQWLTCPRKDLSTGWLYCDPGPMFKPEHYSLGESVPHWFPWKDLAIMPVQWHALALGLFASIIAPFGGFFASGFKRAFKIKDFGDSIPGHGGITDRMDCQMVMAVFAYIYHQSFIAPQNFSVEIILDQILRNLTYEEQKYLYEQLGEMFHERQLGQN

SEQ ID NO: 52656 - protein, 242 aa, Zea Mays
MALAGNGTALVLFLSPVPTFIRIWKKGSVEQYSPIPYVATLLNCMMWVLYGLPAVHPHSMLVITINGTGMAIQLTYVALFLLYSVGAARRKVVLLLAAEVGFVGAVAALVLSLAHTHERRSMVVGILCVLFGTGMYAAPLSVMKMVIQTKSVEYMPLFLSLASLVNGICWTAYALIRFDLYITIPNGLGVLFAVAQLVLYAIYYKSTQEIIEARKRKADQIAMTGVVVDGGKTNNQAGAGQY

SEQ ID NO: 52657 - protein, 182 aa, Zea Mays
MEKLQTEVRTTMRSPDGKKLDMLAEEDLGSMPYLKATIKETLRLHPPAPFLLPHYSTADSEIDGYFVPAGTRVLVNAWALGRDRTTWEKPEEFMPERFVQEPGAVDVHMKGKDLRFIPFGSGRRICPGMNFGFATMEIMLANLMYHFDWEVPGSAAGVSMDESFGLTLRRKEKLLLVPRIAS

SEQ ID NO: 52658 - protein, 165 aa, Zea Mays
MDYVPTVFDNFSANVVVDGNTVNLGLWDTAGQEDYNRLRPLSYRGADVFLLAFSLISKASYENVSKKWIPELKHYAPGVPIILVGTKLDLRDDKQFFVDHPGAVPITTAQGEELRKQIGAPYYIECSSKTQLNVKGVFDAAIKVVLQPPKAKKKKKVQRGACSIL

SEQ ID NO: 52659 - protein, 67 aa, Zea Mays
MGSFDGWSQGEAMSMEYSGDYGRFSATLKLRPGRYEIKFLVDGEWRLSPEYPTAGDGLTQNNILVVE

SEQ ID NO: 52660 - protein, 103 aa, Zea Mays
MEKRRTSPAPAYNNTKQNNSNNYSSISSSAPARAIREQKNTLLDSEKLDSARKRLQENYQEAQNAKKQRTIQVMDIHDIPKPKNRNTFVRKSGSSAGFPAKHR

SEQ ID NO: 52661 - protein, 74 aa, Zea Mays
MIDPIVGKLSKEYEGKLKCYKLNTDENPDIATQFGIRSIPTMMIFKNGEKKDSVIGAVPESTLVTCIDKYVGGR

SEQ ID NO: 52662 - protein, 198 aa, Zea Mays
MKGGIALKPFLPQLQTTFVKCLQDNNKSVRTRAAAALGKLSALSTRVDPLVSDLLSMLQSGDESVKESVLSALKGVIKHAGKSVSAPIRSRGCALLEDLLQAEADDIRSCAAKVIGTLSQYMDDREIPDLVQILLEVGTSSDWCTRHGALLALSSISMHSPSKLCDLASFPSLVDLLKDSLKDDKFPVREVATRTLEG

SEQ ID NO: 52663 - protein, 255 aa, Zea Mays
MTSVSELTLVLASGASMLPHPSKVRTGGEDAYFIACDGWFGVADGVGQWSFEGINAGLYARELMDGCKKIVEETQGAPGMRTEEVLAKAADEARSPGSSTVLVAHFDGKVLHASNIGDSGFLVIRNGEVHKKSNPMTYGFNFPLQIEKGDDPLKLVQKYAICLQEGDVVVTASDGLFDNVYEEEVAGIVSKSLEADLKPTEIADLLVARAKEVGRCGFGRSPFSDSALAAGYLGYSGGKLDDVTVVVSIVRKSEV

SEQ ID NO: 52664 - protein, 249 aa, Zea Mays
MFDNLYGCRHSLPDGLMRATDVMIAGKVAVVCGYGDVGKGCAAALKQAGARVIVTEIDPICALQALMEGLQVLPLEDVVSEADIFVTTTGNKDIIMVDHMRKMKNNAIVCNIGHFDNEIDMLGLETYPGVKRITIKPQTDRWVFPETNTGIIVLAEGRLMNLGCATGHPSFVMSCSFTNQVIAQLELWKEKSSGKYEKKVYVLPKHLDEKVAALHLGKLGAKLTKLTKSQADYISVPIEGPYKPAHYRY

SEQ ID NO: 52665 - protein, 175 aa, Zea Mays
MEYDIHTILDTATLAATLFVIYMIRFKLRSTYMLDKDNFALYYVVLPCAVLALLVHPSTSHNIVNRICWAFCVYLEAVSVLPQLRLMQNTKIVEPFTAHYVFALGVARFLSCAHWVLQVLDTRGGLLTALGYGLWPSMVLLSEIVQTFILADFCYYYVKSVFGGQLVLRLPSGVV

SEQ ID NO: 52666 - protein, 174 aa, Zea Mays
MANSRQNIRKLVKDGFIIKKPHKIHSRSRARRAHDAKQKGRHSGYGKRRGTREARLPTKVLWMRRMRVLRRLLRKYREAKKIDKHMYHDMYMKVKGNAFKNKRVLMESIHKSKAEKAREKTLSDQFEAKRAKSKASRERKIARREERLAQGPREITPPVSSTAPATGAPKKAKK

SEQ ID NO: 52667 - protein, 554 aa, Zea Mays
MAAMDLLSGKLIRSLRLHSSLLPSAPSSSRAFEVSASRTVREEFFSAFEEEMEVKRRLEQVQAALEGATEDMDLMGRLLDELDLLQRRSQDVDLDMVDVKVQKLMPELGFMPEDADRLVASFSGGWKMRMSLGKILLQDPDLLLLDEPTNHVDLDTIEWLEMYLKTQDVPMVIISHDRAFLDQLCTKIVETEFGVSKTYKGNYSEYILAKAVAVEAQYAAWEKQQKEIEQTKELINRLGAGVNAGRASSEQKKLEKLEKEGLIEKPFQRKQLKIRFPERGRSGRTVLTINNLQFGFENKTLFNNANLIVERGEKIAIIGPNGCGKSTLLKLMLGMEKPQGGEVLLGEHNVLPNYFEQNQAEALDLEKTVLDTVAEAAEDWILDDIKGLLGRCNFRDDMLDRKVQFLSGGEKARLAFCKFMVTPSTLLILDEPTNHLDIPSKEMLEEAISEYTGTVITVSHDRYFIKQIVNRVIEVKDQTIQDYQGDYNYYLERNLEARERELAREEELEERAPKVKAKSKMSKAEKAVRKKQKMQAFQQSKQKSKSLKNSKRWN

SEQ ID NO: 52668 - protein, 268 aa, Zea Mays
MLRVAGRRLSSALAWRPAAAASGSRGPLAGTLPGRDDDDTRDCRARFAIESPFFAAARETLAPRNQDVGLSELPATVAAVKNPSGKIVYDEYNHERYPPGDPSKRAFAYFVLSGGRFIYASLLRLLVLKFVLSMSASKDVLALASLEVDLSSIEPGTTVTVKWRGKPVFIRRRTEDDIKLANSVDVASLRHPEQDAERVKNPEWLVVIGVCTHLGCIPLPNAGDFGGWFCPCHGSHYDISGRIRKGPAPFNLEVPTYSFLEENKLLIG

SEQ ID NO: 52669 - protein, 418 aa, Zea Mays
MPRKITKVAILGGGLMGSGIATAMVLSNYPVLLKEVNEKFLTAGINRIQANLQSRVKKGKMTEERYEKAMSLVTGVLDYERFKDVDLVIEAVIENVKLKQQIFSDLEKYCPSHCILATNTSTIDLNLIGEKTKAQDRIAGAHFFSPAHVMPLLEIVRTQHTSPQVVVDLLDVGKKIKKTPIVVGNCTGFAVNRMFFPYTQSALFYVDLGMDVYKIDRACTKFGMPMGPFRLADLVGFGVAVATGMQYLENFPERVYKSMLLPLMMEGNRAGEATQKGFYKYEGKRKATPDPEIMKYIEKSRSMAGVTPDPELMKLSEKDIVEMVFFPVINEACRVLDEGIAVKASDLDIASIFGMGFPPYRGGVMHWADSIGAKYIHGKLEEWTKRYGGFFKPCSYLAERAAKGIPLSAPTKKVQARL

SEQ ID NO: 52670 - protein, 79 aa, Zea Mays
MLFFCVCVDLPFSLSERSMGNFHHTVQCSIEYVFTRFCYSLYQHQSFSVSDTSHRNVFGAFQKLLLTWYITQTVVLRAL

SEQ ID NO: 52671 - protein, 212 aa, Zea Mays
MVDYPTPANFLENLPAYPVKEMCKTIDAFPAGADVLEKAFAAASLYYNYTGDQACNKIEDGDDPHGLDGWQWQACTEMIMPMTISNESMFPPSAFSYDDRSDECFQSWGVRPRPHWITTEYGGYKIDKVLKRFGSNIIFSNGMRDPWSRGGVLKNISSSIIALVTEKGAHHLDLRSSTKGDPDWLIEQRRQEVEIIQGWIDQYHQDMAETSS

SEQ ID NO: 52672 - protein, 212 aa, Zea Mays
MKSVTGGFGSQLPRVPKEPALLDERSLLACIVRAVPAGPEGGIRISSTLPNRLGKMLAPLHWHDYKKQYGKLDDFVASRPELFVIEGDFIHLREGAQQIISATTAAAKIAAATASSAPYSSLLPSVAVTPVAQSTRQKRGPAVDSRSSNAILSGNGFTDQFNIIQGVSDVPVSGKVRNTLDNGFLGEVRTGQPSVLTAAANGARHDKGTNNV

SEQ ID NO: 52673 - protein, 409 aa, Zea Mays
MAEETVRELRASFAAGQTRPAEWRAAQLKGLIRMIDEKEAEISAALHEDLAKPHMESFLHEISLTKSSCKFALKGLKNWMKPEKVPAAITTFPSSAQIVPEPLGVVLIISAWNYPFSNGTVGRIVMAAAAKHLTPVALELGGKSPVIVDSNVDLHVAAKRIVVGKWGCNNGQACIAPDYIITTKSFAPELVASFKRVLERFYGEDPLESADLSRIVNSKQFKRLTNLIEEKRVADKIVYGGKADEKQLKISPTLLLDVPEDSEIMTGEIFGPLLPIVTVEKIEESFDLINAKPKPLAAYLFTKNRKLQEEFVASVPAGGMLVNDTALHLTNPYMPFGGVGDSGMGCYHGKFGFDCFSHKKGVLIRGFGGEANARYPPYTTEKQKILRGLINGSFIALILALLGFPREKR

SEQ ID NO: 52674 - protein, 337 aa, Zea Mays
MWLGINSSLIFLQEDFGGGHPDPNLTYAKELVERMGLGKSSSNVEPPEFGAAADGDADRNMILGKRFFVTPSDSVAIIAANAVQSIPYFASGLKGVARSMPTSAALDVVAKNLNLKFFEVPTGWKFFGNLMDAGMCSICGEESFGTGSDHIREKDGIWAVLAWLSIIAFKNKDNLGGDKLVTVEDIVRQHWATYGRHYYTRYDYENVDAGAAKELMANLVSMQSSLSDVNKLVKEIRSDVSEVVAADEFEYKDPVDGSVSKHQGIRYLFGDGSRLVFRLSGTGSVGATIRVYIEQYERDSSKTGRDSQDALAPLVDVALKLSKMQEYTGRSAPTVIT

SEQ ID NO: 52675 - protein, 436 aa, Zea Mays
MREIISIHIGQAGIQVGNACWELYCLEHGIEPDGTMPSDTSVGVAHDAFNTFFSETGSGKHVPRAIFVDLEPTVIDEVRTGSYRQLFHPEQLISGKEDAANNFARGHYTVGKEIVDLCLDRVRKLADNCTGLQGFLVFNAVGGGTGSGLGSLLLERLSVDYGKKSKLGFTIYPSPQVSTAVVEPYNSVLSTHSLLEHTDVAVLLDNEAIYDICRRSLDIERPTYTNLNRFDGAINVDVTEFQTNLVPYPRIHFMLSSYAPVISAEKAYHEQLSVPEITNAVFEPSSMMAKCDPRHGKYMACCLMYRGDVVPKDVNAAVATIKTKRTVQFVDWCPTGFKCGINYQPPSVVPGGDLAKVQRAVCMISNNTAVAEVFSRIDHKFDLMYAKRAFVHWYVGEGMEEGEFSEAREDLAALEKDYEEVGAEGADDEGDEGDDY

SEQ ID NO: 52676 - protein, 177 aa, Zea Mays
MPLMKLACTALERVPLTRRKVIDNLMKKFHQDLVFCRSPADSELTIGVHQKQKEKIDPILEWVDTEFGFKPVVYTSFFGGKQDEGLAKAVETVLKKATDCELASIDAMAAAAHSLVIPLAIFRERLGIEEAIELIRLEEDHQVDRWGLVEGGHDVDIADLKVQMSSAVVFLGLSRGL

SEQ ID NO: 52677 - protein, 616 aa, Zea Mays
MDAWIICPFFLQGGRYTINDIHYVADSDRLIPAGETEFAKDAVFGYKSSNLRQWVEEKTKGRVLENQVSTISITLLRKQGPTAVCEHLCSLEKGSVCIVNAASDRDMAVFASGMIQAELKGKRFLCRTAASFVSARIGIKPKPPICPNDLGLKRALTGGLIIVGSYVPKTTKQVDELRSQFGQSLRVIEVSVEMVSMKSMEDRDQEIRRIVELGNAYIQSRKDTLILTSRQLITGKTPEESLEINYKVSSALVEIVRRIDSKPHYIIAKGGITSSDIATKALEAKRAKVMGQALAGVPLWQLGPESRFPGVPYIVFPGNVGDNSALAKVVKSWASPSRSSTKEILLNAEKGGYAVGAFNVYNLEGIEAVVAAAEAEKSPAILQIHPSALKQGGVPLVACCIAAAEQSSVPISVHYDHGISKSDLLQALEAGFDSVMVDGSHLTLGDNILYTKSISSLAHAKGLLVEAELGRLSGSEDGMTVEEYEARFTDVAQAEEFIDETSIDALAVCIGNVHGKYPPSGPNLKFDLLKDLRALTLKKGVSLVLHGASGLSHELVKECIDLGVRKFNVNTEVRNSYLASLRKPEKDLIQVMASAKEAMKAVVAEKLRLFGSCGKA

SEQ ID NO: 52678 - protein, 431 aa, Zea Mays
MSSGGEKMLLFGSFTEDETKLLQGQPLKSPTKSVSKECERTEIQFGTLNLSVLNLEKISTSSVVLPAKSAKGETSAITKENACNNEKKAAGSSLSNGGPVLANGCPPVNVPANNGLFENVKTEAVVPPVIPVKIISNPTPQMTLETHKDGTKPTESRKLNKEREITENGSPIVDKHIVAAPAEEAVTSLNKKASQNMPLLPHGLRNTGNICFLNATLQALLSCSPFVYLLQDLRNRRIPKVGYPTLSAFVELISQLDVPDESVIKKNEKVITVAAKPLNPAMFDAVLRNFTPDVPAGITARPRQEDAQEFLSFAMDRMHDELLKLNGDGLNSKEGMVVSSADDDAWETVGRKNKSAIVRTQSFVPSELSAIFGGQLQSVVKAAGNKASATVQPFLLLHLDIFPDAVQTLNDALRLFSTPESLEGYRTAAGK

SEQ ID NO: 52679 - protein, 301 aa, Zea Mays
MDMKIFVDTDADIRLARRIRRDTVERGRDISSVLDQYGRFVKPAFDDFVLPSKKYADVIIPRGGDNHVAVDLIVQHIRTKLGQHDLCKIYPNVHVVQSTFQIRGMHTLIRDRDITTPDFVFYSDRLIRLVVEHGLGHLPFTEKQVITPTGSVYMGVDFCKKLCGVSIVRSGESMENALRACCKGIKIGKILIHRVGDNGQQLVYHKLPMDIAERHVLLLDPVLGTGNSVAQAIDLLIRKGVPEDRIIFLNLISAPEGIQCICKRFPSLKIVTSEIDYGLNEEFRVIPGLGEYGDRYFGTDN

SEQ ID NO: 52680 - protein, 224 aa, Zea Mays
MAAIRLEEDGDNIENTLSLALVDTSRHGTTDRSIQLSDPLASSSWERVAEEKTLITPVQCKNLWRQFKAETEYTVTQAIAAQEANKRNNNWLPPPWALAAMAILGFNEFMTLLRNPLYLFAIFVIYLVGKALWVQSEIGREFQHGFLPAILSLSTKFVPTVMNILKRLADAGQEPAAAPERQREMELQPKSTRNGSLYSNVTSAGSSSVTTSEIGPEYSSPVVQ

SEQ ID NO: 52681 - protein, 229 aa, Zea Mays
MLIRDPTKRFTAHEVLCHPWIVDDAVAPDKPIDSAVLSRLKNFSAMNKLKKMALRVIAESLSEEEIGGLKELFKMIDTDNSGTITYDELKDGLKRVGSDLMEPEIQALMDAADIDNSGTIDYGEFLAATLHMNKLEREESLVSAFAFFDKDGSGFITIDELSQACEQFGLSDVHLEDMIKDVDQNNDGQIDYSEFAAMMRKGNAGGAGRRTMRNSLHVNLGELLKPTET

SEQ ID NO: 52682 - protein, 108 aa, Zea Mays
MCQIECQHAKVVVGSFIAEAKKPKEEQPKREPTSVPPHTAVFGAASTASPPSDGTSSEHSDDPGSPMGPNGSAFTSAGLPLHSTYAAVGWSLSEDQSRYDPDLKMMTD

SEQ ID NO: 52683 - protein, 370 aa, Zea Mays
MIDDQIHWFSIVNSLMIVLFLSGMVAMIMLRTLYRDISRYNQLETEEETQEETGWKLVHGDVFRPPANSDLLCVCVGTGVQFFGMLLVTMIFAVLGFLSPSNRGGLMTAMLLTWVLMGLFAGYASSRLYKMLKGSEWKSITLRTAFLFPGIAFGIFFVLNALIWGEKSSGAVPFTTMFALVLLWFGISVPLVFVGSYLGFKQPAIEAPVKTNKIPRQVPEQAWYMNPAFTILIGGILPFGAVFIELFFILTSIWLHQFYYIFGFLFLVFIILIVTCAEITIVLCYFQLCSEDYLWWWRSFLTSGSSAIYLFLYAGFYFFTKLQITKVVSGMLYFGYMLLASFAFCVLTGTIGFYACFCFTRLIYSSVKID

SEQ ID NO: 52684 - protein, 287 aa, Zea Mays
MSRMGGATALLALAAGAAGEPDGVAQDPRREPEEGGSGQGEEQGQEMDAHAASQEETRATGGDDVDPQGRAWTQRGTRQHAQQGGATRRRAPWHWHWHPQETAATRAFLFLERSRAGVRGVPGSVTEAELAGPEPHRAQAAAAAAAVLQGQQQVRVGDEGGQRDADGVQEAPRQHDQAQTVLEMVARIQEAVALVDGRRHVVERLVSLGRYLVMKLEPGQDDTLLSEAITDAVLDLFDAWSESVERPLVRRAKEISSWFLQEGREDTPPPVPPSTRPCAAEAHRMKR

SEQ ID NO: 52685 - protein, 283 aa, Zea Mays
MLEELKKNPESHGGPPDCILLCRLRELVLRELGFRDIFKKVKDEENAKAMSLFEGVIKRNDEIEDDGKRIENLVRGILAGNIFDLGSAQLAEVFAKDGMSFLASCQNLVSRPWVIDDLDAFKSKWTKKSWEKAVIFVDNSGADIILGILPFARELLRRGTKVILAANDMPSINDVTYPELVEIINKLKDADGKLSNVDASGLLVANSGNDLPVIDLSSVSPELAFMANDADLVVLEGMGRAIETNLYAQMKCDSIKIGMVKHPEVAQFLGGRLYDCVFKFNEA

SEQ ID NO: 52686 - protein, 291 aa, Zea Mays
MNKGEVVRTLSTRARIEPGFTTLVWQKLEEENSEFFRAYYIRLKLKRQIILFNHLLQHQYNLMKYPAPPNIPLAPIQNGIHHMPVSNLPMGYPVLQQPIMPAPGQPHMDPMACGLSSGHVVNGIPAPGGYHPMRMNSGNDMVLDNGAPEAPHAGATGSAMSSEMAVSPSSAASSNHAPFTPSDIPGMTMDVSALDSAFGCDVGNPESLQLGPDGSSRDSIRSLGQLWNFSLSDLTADLTSLGADLDVLENYTGTPFLPSDSDILLDSPDQDDIVEYFADAINGSPSDEEKP

SEQ ID NO: 52687 - protein, 504 aa, Zea Mays
MPSISCHNLLDLAAADDVPLPSPTPLRLPRVVQGVQDEARAISARVNARFGTPGYTPIVLIDAPVTPQEKAAYYAAAECCVVSAVRDGLNRIPYIYTVCRQESTALGDDSPKRSVIVLSEFVGCSPSLSGAIRVNPWSVESVAEAMNAALRMPEAEQRLRHEKHYKYVSTHDVAYWARSFDSDLQRACKDHFSRRHWGIGFGMSFKVVALGPNFRRLSVEHIVPSYRRTDNRLILLDYDGTVMPENSIDRTPSSEVISVLNRLCEDPKNRVFIVSGRGKDELSRWFAPCEKLGIAAEHGYLTRWSRDAPWDTSGLAADFDWKKTAEPVMQLYTEATDGSYIEHKESAIVWHHHEADPDFGSCQAKELLDHLENVLANEPVVVKRGQHIVEVNPQGISKGVVVDSLLSSMVRTGKPPDFVLCIGDDRSDEDMFESIVCPASNSGVKLPASSEVFACTVGKKPSMARYYLDDTVDVVKMLDGLASAPSQQRSRPAVQLRVSFEGSL

SEQ ID NO: 52688 - protein, 800 aa, Zea Mays
MSSLVERLRVRSERRPRYALDESDDDLPLRVGAGKGKDQQNDAPAERIEREDAKEEACQRCGKSDNLVSCSTCTYKFHRKCLVPCLNITSDKWSCPECVSPLTEMERILDIEVLEAPREDSSSTEPRSKKMERYLIKWKGLSYIHCSWVSEKEYSEAANIHPRLRTRLNNFRRQKEAMKIEAERSGEDIVAIRPEWTTVDRILASRKNLVGDREYYVKWNELTYEECTWENESDITVFQPEIERFNEIQFRRKKSGDKGKATREPRQFKESPTFLSGGTLHPYQLEGLNFLRYSWFHNKRVILGDEMGLGKTIQSIAFLASLFEDKFGPHLVVAPLSTLRNWEREFATWAPQMNVVMYFGAAASRDIIRKYEFYYPKEKLKKLKKKKSSPSNEDKKQSRIRFDVLLTSYEMINMDSSILKNIEWECLVVDEGHRLKNKDSKLFGQLKDYNTKHRVLLTGTPVQNNLDELFMLMHFLEGESFGSITDLQEEFKDINQDKQIEKLHGMLKPHLLRRFKKDVMKELPPKKELILRVELTRKQKEYYKAILTKNYEVLARRNGGHTSLINVVMELRKLCCHGFMIDEPDLEPANPEEGLRRLLDSSGKMQLLDKMMVKLKEQGHRVLIYSQFQHMLDLLEDYLSYRKWTYERIDGKISGADRQIRIDRFNAKNSTRFCFLLSTRAGGLGINLATADTVIIYDSDWNPHADLQAMARAHRLGQTSKVMIYRLVSRGTIEERMMQLTKKKILLEHLVVGRLTKANNVNQEELDDIIRYGSKELFEDENDESRQIHYDEAAIESALC

SEQ ID NO: 52689 - protein, 465 aa, Zea Mays
MAYAAPPMASSLTASHPPLSPSHLITHPHRCPARPNPTTGLLRLTPSRRRGRPPVAVRLAISASSTSAPPPSADRSEAASSLERYLSATVTGAVMGTGAAPPASAPPRAPPAMKGGRKQYSALGAVTLEKAKLDLSQRRKNIMPELATGGGGGDIGKRIGHGGGDGGDDDGDDDDYFDDFDEGEEEGGLFRRRIVVQELFNREFVEAVLQEWYKTMSDLPTGLRQACEMGLVSSAQMVRYLSIFARPTNARSFSRALPGWLSRGLVGRTLADPSFPHKMSLEFIATIASSIWCEMNIRKERFKQEWDLVIVNALTAACCNLMVLGLLAPCRSYASTSRFDFQNAIEKLPNNIFEKSYPLREFDLAKRISAFFYKAAELSLVGFVAGSVQGGMSIVLSARKERRLSVTIPSISTNALGYGAFLGLYANLRYQLLCGVDQYMVKRFDVLGVAIFFSTAARKGAHHYT

SEQ ID NO: 52690 - protein, 132 aa, Zea Mays
MKVTDIQVRVVRRDNGAKVDIPVTNLVEEVKVLLDEIQKNLFKTAQEKRDACVHVVNTWDEFTTALNNKKLILAPWCDEEEIEKNVKTRTKGELGAAKTLCTPFEQPELPEGTLCFASGKPAKKWSFWGRSY

SEQ ID NO: 52691 - protein, 153 aa, Zea Mays
MDKTSCFFPQNVLPTIRTPTFVLNTAYDVWQLQQSVAPRTADPQGLWSKCRTNHAFCNSNQLQFLQGFRNQMLDAVRGFSASRQNGLFINSCFAHCQSERQDTWYANNSPRLGNKKIADAVGDWFFERGNAKYTDCPYPCDGTCHHLVFRGDH

SEQ ID NO: 52692 - protein, 63 aa, Zea Mays
MTLLLKPVGLKATAIAYKSGERQKLQDAGYVIVGNIGDQWSDILGAPEGARTFKLPDPLYYIG

SEQ ID NO: 52693 - protein, 103 aa, Zea Mays
MGGTVMDDASDEWLALDQKVNSYPTDRGFTAIGIGGDDFVQSMVVAVESVLQESIPKGRVSQKLSSGGKYVSVKIGPIRVVSSEQVQAVYRAMRRDNRMKYFL

SEQ ID NO: 52694 - protein, 176 aa, Zea Mays
MAATAYSTALPGGARLPAAGAAAPPSALLLPRRNKLSPLPLRLQDAPRLSLLRVKASSDDSSAASGDELIADLKAKWDAVENKSTVLTYAGGAVVALWLTSVIVGAINSVPLLPKIMELVGLGYTGWFVYRYLLFKERARRRHRVAQEKNCWDRVKHVVLVKLFLDDSFGNTLPLV

SEQ ID NO: 52695 - protein, 68 aa, Zea Mays
MFIICDCYGRCFLGDNWIFFVKLIFAFLWLCNVTGYWIASWCILNFLFISVSFVTKFVLNCYLVVTQL

SEQ ID NO: 52696 - protein, 68 aa, Zea Mays
MCGQDMIFLLCFILLWVAPYFLTYIQHHLSSSSRMDGLGTSLWVRVTSACPGGLARRYLELLHQISLS

SEQ ID NO: 52697 - protein, 262 aa, Zea Mays
MISTWVTLADQSVYEAQVVGFDQDKDVAVLGIKAPKNKLRPIPVGVSADLLVGQKVYAIGNPFGLDHTLTTGVISGLRREISSAATGRPIQDVIQTDAAINPGNSGGPLLDSSGNLIGVNTAIYSPSGASSGVGFSIPVDTVGGIVDQLIKFGRVTRPILGIKFAPDQSVEQLGLSGVLVLDAPPNGPAGKAGLQATKRDPYGRLILGDIITSVNGTKVTNGSDLYRILDQCKVGDTVTVEVLRGDHKEKIPVVLEPKADES

SEQ ID NO: 52698 - protein, 655 aa, Zea Mays
MDNCTIIASVFPQGKKTYKVNGVSTAGWFSVDYTSTVLLQNVSLKQSVLSRTPAYDGLFQINPVENIFTLYKAPAVWLNVQHDSFYSQFKLSMRSYILSLSKQFIVDYISSPEVNFLTSISGRVSKKTKLVFRFLDERSIEPSTNQTYGSMLKNLTFVKTFASGILVPKSYIWPVTPDNYLLPYTSVVDDAHKAGLEIYAADFANDLTISYNYSFDPLAEYLFFIDNGAFSVDGVLTDFPITPSEAVGCFSNLNTSKIDHAKPLVISHNGASGDYPDCTDQAYEKAVADGADVIDCPVQVTKDGILICMSSVDLMDVTTVAKSQFASQVTTINSLKAGSGVFTFNLTWDDISKNLKPMISNPMSTYNLYRNPRNKNAGNFMRLSDFLTFANGKDLSGIMITVEHAAFMAEELGFGVVDAVIKALDDSGYSKQTAQNVMIQSTNSSVLVKFKQETKYNLVYMIEESVRDAAPSSLADIKKFADAVSVGTTSVFPETHYYLTNQTNKLVPTLKSAGLQVYVYVLMNEFASQPNDFFADATSQINAYVQSAKVDGVITDFPGTAHRYKLNSCTSMGKNMPLFMQPPQPGGLLSTILPDAQPPAAAPMPLLTDADVAEPALPPVSNTTTAASPSHAALRMRTHVLSIATLLMLCASLLI

SEQ ID NO: 52699 - protein, 731 aa, Zea Mays
MFTMGTDFKYQYAESWFRNMDKLIHYVNKDGRINALYSTPSIYTDAKYAANEQWPLKTNDFFPYADNPNAYWTGYFTSRPALKRYVRMMSGYYLAARQLEFFKGRYSSGLSTDSLGDALALAQHHDAVTGTEKQHVANDYAKRLSIGYTQAQELVSTSLACLTESGSKSRCASPVTKFSQCLLLNVTYCPPSEMDLTKGKSLVVLVYNSLGWKREDVIRIPVFSDSIVVHDSEGREIESQLLPIATASLNIREKHVKAYLGTTPGAKPKFWLAFPVSVPPLGFNTYFVSNLKKSAHISSKSTQYSPQGSESSNLQVGQGNLKLQYNEAGKLSLYSDSKTMVQANFEQKYKYYIGQDGNGSDPQASGAYIFRPNGTVPISTDGQVSLTVLRGPILDEVHQQINSWIFQITRLYKEKDFLETEFIVGPIPVDDGNGKEVATEIVTNMVTNKTFYTDSSGRDFIKRIRDYRSEWKIEVHQPIAGNYYPVNLGIYVEDGSKELSVLVDRSIGGSSIKDGQIELMLHRRLLHDDGKGVAEALNETVCLDKQCEGLIIQGKYYVKIDPQGEGARWRRTFGQEIYSPLLLAFTEQDGGNWANSHVAKFSAMDSTYSLPDNVAMLTLQELEDGSVLLRFAHLYEAGEDKDLSSLASIDLKRVFPEKKIGKVIETSLSANQERAAMEKKRLKWKAQGSAADEKVVRGGPVDPSKLVVELGPMEIRTFIVSFDHISDKQQL

SEQ ID NO: 52700 - protein, 95 aa, Zea Mays
MIPGQGTPLTIEQSQKEEKTCLMVFDCRGYEPVEFSFGTGWKAESVHGTPFEIDCSEGEFSEYDEKGECPVELGKLQSTFKVVKKHERGGKTRFV

SEQ ID NO: 52701 - protein, 153 aa, Zea Mays
MMAQRLGAVFMPHGLGHLLGIDTHDPGGYPEGLERPKDPGLNSLRTTRELKEGMVITVEPGCYFIDALLTKTRDDPISSKFFNWQEVEKYKSFGGVRIESDVYVTAQGCRNLTNCPRETWEIEAVMAGAPWPLPASSSMVVAAENSNDISKAS

SEQ ID NO: 52702 - protein, 391 aa, Zea Mays
MTWRQHVTGGKLREITEEAKAFSIGNKALAALFVHTPAGELQRQIRAWLAENFEFLSVTGADAAGGAAGQLELLSTAIMDGWMAGLGTAQPPTTDALGQLLSEYTKRVYTSQLQHLKDIAGTLATEEADDPAHVSKLRSALESVDHKRRKIMQQMRTDTALLTKEEGGSPIRNPLTAAEDARLASLISLDNILKQVKEVIRQSSTGPMRKSKRKALLELLDDLLTQMPSLLDIDHPCAQKQIMEARKVVESLQEDPDDPAPQSNALGEGEVSQWNVLQFNTGTTAPFIIKCGANSSGELVIKADLRVQEPKGGEVIRVVPRPTVLADLSFEEIKGVFEQLPEAVSLLALARTADGTRARYSRLYRTLASKVTALKETVAEMERGGVFKDVR

SEQ ID NO: 52703 - protein, 70 aa, Zea Mays
MADDANRAAFMELQSRMIDTTAKIKQLQTQMRSKEGEKKRAYLTLEELRQLPDDTNTYKTVGNIPKQQSS

SEQ ID NO: 52704 - protein, 731 aa, Zea Mays
MDRQTASHNSSESLCSSGIQYGLNRGPGTIGGLHSSNSLRSLDEIPNNDLPSNTFASLLGSSLSRSASPDPELVRRAPSPSLPPIGVKVGNTDKMNGGSSSFRRSSSAIGGSDDLVAALSGMNLSSRAMSGQTMDQSQLYQDVDNVQKFLFDRQGDQPNGNQQHYMRRPEHGQSKLSDGYSANLANSSTMRNQINSGSFTSFDSLSLGSGFPSPRIGSRSPGGTVSSRQNLAGMSNMLNYNGIGSPTASPSLQTSIDPAYIQYLAQIAATWDDPLMDRSHLGSSYMDLLGTQKANLGPLLQSQKQYGYCGNLGFNLGGYAGSPLTSPVLPSSPIAPGSPLRHGDRNMRFPPGMRNFGNSFGSWNSGMSGKMDANLMPSLLEEFKSNKSKSYELSEIAGHVVEFSADQYGSRFIQQKLETASTEEKDMVFSEIMPQALTLMTDVFGNYVVQKFFEHGSTAQIKELAGQLIGRVLALSLQMYGCRVIQKAIEVVDLDLQTKMVAELEGHVMRCVRDQNGNHVIQKCIECIPQHAIEFIVSTFYGQVVMLSTHPYGCRVIQRVLEHCDDPKTQQIMMDEILQSVCLLAQDQYGNYVVQHVLEHGKPHERSAIIEKLIGQVVQMSQQKFASNVIEKCLAFGNPVERQVLIGEMLGSTSESEPLEVMMKDQFANYVVQKVLETCDDQQREMILTRIKTHLNTLKKYTYGKHIVARVEKLVAAGEKRLGLQPACTAA

SEQ ID NO: 52705 - protein, 102 aa, Zea Mays
MDDLSSEQNKFQYYNRNLSRQQSQQQAWLQKRRQENMARKAAGEEPLPEEDPSNPIFKPIPEPSRLEGYLVTNQISSYCNHINGVAGQNFDRLYLMKALHED

SEQ ID NO: 52706 - protein, 510 aa, Zea Mays
MGDNYDDEGEPIVDLDEREPSPEPQPYEDLDDDLGDGGDWTRSRSPTPVHGDDGEAGSSAKPRKRLLKKGGGGGMPGDDGLDDFGLEDEDADPAAEARKRKGSSALRDLARGGAGKEKKEKKRRREDDGRGSDSGMVRDRRGAGGKDSGGREDQDDGEREIQELWDTIAGGDSEDDQEGVRTIDDDNFIDDTGVDPADRYGSDNERHSPGHYAQAEEGEEDDEIERLFKGGKKKKNDRPRADIGLIVEQFIAEFEVAAEEDANLNRQSKPAINKLMKLPLLIEVLSKKNLQQEFLDHGVLTLLKNWLEPLPDGSMPNMNTRSAVLKLLADFPIDLEQYDRREQLKKSGLGKVIMFLSKSDEETTANRKLAKELVDKWSRPIFNKSTRFEDMRRYDDEKAPYRRPQMKKPSSSSGMESRDDDVDADFSQRKSGQSSSRQHASRPEASPLDFVIRPQSKIDPEQIRARAKQAVQDQRRLKMNKKLQQLKAPKKKNLQASKLSVEGRGMIKYL

SEQ ID NO: 52707 - protein, 218 aa, Zea Mays
MLGLAKRVGARILLTSTSEVYGDPLEHPQTEAYWGNVNPIGVRSCYDEGKRVAETLMFDYHRQHGIEIRIARIFNTYGPRMNIDDGRVVSNFIAQAVRGEPLTVQRPGTQTRSFCYVADMVDGLIKLMNGNKTGPINLGNPGEFTMLELAENVKELINPDVTVTMTENTPDDPRQRKPDITKAKEVLGWEPKIVLRDGLVLMEDDFRERLTVPKKTKA

SEQ ID NO: 52708 - protein, 481 aa, Zea Mays
MKGRDIVAVAKTGSGKTLGYLLPGFILLKRLHHNSREGPTVLVLSPTRELATQIQDEAIKFGRSSRISSTCLYGGAPKGPQLRELERGADVVVATPGRLNDILEMNKVSLRQVSYLVLDEADRMLDMGFEPQIRKIVKQIPPRRQTLMYTATWPKEVRKIASDLLNNPVQVNIGNTDQLVANKSITQHVEVIPHMEKSRRLDQILRSQDPGSKIIIFCSTKRMCDQLARNLSRQYGASAIHGDKSQAERDSVLNDFRSGRCPVLVATDVAARGLDIKDIRIVVNYDFPTGVEDYVHRIGRTGRAGATGSAYTFFGDQDSKYASELVKILEGANQSVPPQLKEMALRGGYGGRSRRWASSDDSYGSQGYGAKRSTDSFKNSSFGNQAGGGSSFHSSFHNSSSGNQFGDTTSFHASYGNSSQNNQTGDNPSFPPSSSNNQSGDGLSFHERFYGSRGRDESRSNNDGFRARSRSPGKPVEVSNW

SEQ ID NO: 52709 - protein, 680 aa, Zea Mays
MIMFEDGDFVRTKLLAHLGFEPPQAPPASSPDELSQTLADTLNLDHATITDYADAQFLTDNGDDFFNNPQPSEASLAEDLVSTNGQQTEQEMSGDVVPSDPSIDKSIQHALVVGDYKGAVNQCLSANRIADALVIAHAGGSALWESTRNHYLKNSISPYLKVVSAMVGNDLMSFVSTWPLSSWKETLALLCTFAQKEEWHVLCDTLASRLLNIGDTLAATLCYICAGNIDKAVEIWSRTLKSEDGGKIYVDLLQDLMEKTITLALATGHKRFSSSLSKLVENYAELLASQGLLKTAMEYLKLLGSDEHSNELAILRDRIACSMEENDNARSYVSESTATPSLYGTNQSYTAPDHSQNVYQQVPQPYNVPSNTYSEAYPQQPTGAYGYNNTYQPQQPTHMFVPPSAPASSQQQPGPSPVPVPQQTVKAFTPANPAGLKNPGQYQQPNTLGSQLYTGTANQQYPSGPSASYPSGPPTTFHQPVSPVQYQPVAPPVSSFGPSAPVPATVPNQMFPHSAAANSTSRFMPSNNQSFAPRPGLSPAQPSSPTQVQAQPAPPAPPPTVQTADTTKVSAELRPVIGTLTRLFDETSKALGGSQATQAKKREIEDNSRKIGALFSKLNSDDISPNVASKLRQLCSAIDASDFATAMHLQVLLTTSDWDECNFWLAALKRMIKTRQNFRM

SEQ ID NO: 52710 - protein, 215 aa, Zea Mays
MAARVLAALALALALALVAVPAPTRASNDEGDALYALRQRLSDPNGVLQSWDPTLVTPCTWFHISCDQVGRVVRLDLGNSNVSGSIGPELGRLVNLKELYRNNLDGEIPKELGNLKNLISLDLYANKLTGGIPKSLSKLDSLRFMRLNNNKLTGSIPREFAKLSNLKVIDLSNNDLCGTIPVDGPFSTFPLRSFENNSRLNGPELQGLVPYDFGC

SEQ ID NO: 52711 - protein, 632 aa, Zea Mays
MSAVVQMRGSIPLFWSQEASRLSPKPDIFVQRYDPTYEATKLHFDDLARRYGHPIIILNLIKTVEKRPREMMLRREYCRAVEYLNQNVPEEKKLRFIHWDFHKFAKSKSANVLGVLGKVAGEALDLTGFYYSGKPKVQKKRLIQLSRTSTARDGSLDIRASSGDLSRLRDGSLDIRASSGDLSRLSSNAEALSSTGFQDMRNQANKQEFLGDTPCYQTGVLRTNCIDCLDRTNVAQYAYGLAALGRQLHAMGLTDVLKIHPDSSIASALMEMYQSMGDALAHQYGGSAAHNTVFPERQGKWKATTQSREFLKSIKRYYSNAYTDGEKQDAINLFLGYFQPQEGKPALWELDTDYYLHVTTAGDDLMSDSYHLSSAPGNNVFVGSGAALNPGTILSPVPACKEDFSRKKLTSFDKLIERTCSSIRNVRLHCDADLKPSGGVGTSGMAPDAAEIQLKSPNWLFGQRKHTETISTARVAPVENVNEGNRDESNVSLCGELIWLSSSVESCEEDIFRRYLAFTTADVENGWYGGTLLYDRDENSGAYRHYSELCQGAVMDPFEHDPEKERHYAEALSVDLGDARVEAEMQAALDDYQVIGSDLSIIPSCGALAEDPSQLTRWIIGDERLLVGAAAQ

SEQ ID NO: 52712 - protein, 236 aa, Zea Mays
MALVSASSSSTTAVTALPRNGQRASSSFLGGKTLLRQAEAARPSFAVRAAADPNRPIWFPGSTPPPWLDGSLPGDFGFDPWGLGSDPESLRWNVQAELVHCRWAMLGAAGIFIPEFLTKIGVLNTPFWYTAGEQQYFTDTTTLFITDPIFPSNKLTGTDVGYPGGLWFDPLGWGSGSPEKIKELRTKEIKNGRLAMLAVMGAWFQAEYTGTGPIDNLFAHLADPGHATIFQAFTPK

SEQ ID NO: 52713 - protein, 295 aa, Zea Mays
MQVKQKVYEFYKGTVERVTAPRTVSAFLEKGVLSVPEFILAGDNLVAKCPTWSWEAGDPSKRKPYLPANKQFLVTRNAGAEVVLDEDGEGWLATHGVQASKTEEEEDIPSMDTLDIGRSDGIKSIPSYFSGGKDEEEEDIPDMDTYEDTGDNLAAAEPSYFIAEEPEDDNILHTRTYDVSITYDKYYQTPRVWLTGYDESRMPLMPELVFEDISQDHARKTVTIEDHPHLLAGKHASVHPCKHAAVMKKIIDVPMSGGVEPEVDKYLFIFLKFIATVIPTIEYDYTMDVDLGSTS

SEQ ID NO: 52714 - protein, 102 aa, Zea Mays
MAAEKPAPVRVLYCGVCGLPAEYCEFGPDFQRCKPWLRAHAPGVYPDDLVAGPSSSGGAGGDRDVDKVGERLQGVGISDGSSSAAGDASASKPEEVKRLPGG

SEQ ID NO: 52715 - protein, 145 aa, Zea Mays
MAQKIAKEKGYSDVLYLDAVHKKYLEEVSSCNVFVVKDNVISTPAIKGTILPGITRKSIIDVALSKGFQVEERLVSVDELLDADEVFCTGTAVVVSPVGSITYQGKRVEYGHQGVGVVSQQLYTSLTSLQMGQTEDWMGWTVQLN

SEQ ID NO: 52716 - protein, 197 aa, Zea Mays
MAAVAYNRRPRTPEVTVDETWFSDPQICETNQQWYILSKTLAEEAAWKFSRDNGLEIVTINPAMVIGPLLQPTLNTSAEAILKLINGSSSTYPNFCFGWVNVKDVALAHILAYEVPSSNGRYCMVERVVHYSELVNIIRNMYPTLPLPDKCADDKPFVPPYQVSKEKIKSIGIELIPLETSVKETIESLKEKGFASF

SEQ ID NO: 52717 - protein, 219 aa, Zea Mays
MEAELNKRERELKRKEEAASRAGVVIEEKNWPPFFPLIHHDISNEIPIHLQRMQYLAFSSFLGLIACLFWNVIATTTAWIKGEGVMIWLLAIIYFISGAPGAYVLWYRPLYNAMRTESALKFGWFFLFYMIHIIFCVWAAVAPPFPFKGKSLAGILPAIDVISKNAIVGIFYFVGFGLFCLESLLSIGVIQQVYMYFRGSGKAAEMKREAARSALSSAF

SEQ ID NO: 52718 - protein, 293 aa, Zea Mays
MMHKAYYRKGAACIKLEEYQTAKAALELGSSYASGDSRFARLLKECDERIAEESSQAPVKNVEATVAATIEDKEDFTNMENTPPVIEPPSKPKYRHDYYNSATEVVLTIFAKGVPADSVVIDFGEQMLSVSIEVPGEEPYHFQPRLFSKIIPEKCKYQVLSTKVEIRLAKAEQVTWTTLDYSGRPKTVPQKISTPAETAPRPSYPSSKAKKDWDKLEAEVKKEEKEEKLDGDAALNKFFRDIYKDADEDMRRAMMKSFVESNGTVLSTNWKDVGAKKVEGSPPDGMELKKWEY

SEQ ID NO: 52719 - protein, 244 aa, Zea Mays
MLYHVAQPNIVARAESEEDAAAAEVVEGADLGIVGDDTQVSSDGPLSPAPGVETVVVFPKNAGKIVLAGEETELLVGLQNDGESILNVVAVHSTLHLPFDHNMYGQNLTVQNFFNSSVPVSVQATFPYKFVVSKFLQPGAYDLVGYIVYEIDQHPYQNVFYNGTIEVVEAGGLLSVESVFLITLGFALLGLFGLWAYGQVQQLSKKTKKAPKVELGTGTTDANIDEWLEGTSFVQRSKSKKKQT

SEQ ID NO: 52720 - protein, 55 aa, Zea Mays
MWRDESEILKSKAFEDFRLVMITAIFTHHHGVNTVCTFIEETAEEFFGARTAFYT

SEQ ID NO: 52721 - protein, 146 aa, Zea Mays
MMNSIVEESRKLQKEAEENLKLKEFLVERSQIVDMLQGEMTGICEDVSLLKRVVDERLSLSKLQPSAMSSLSSSLHSSHHKSWTSSDRTTEANGSLDKHTLAEPASPARKDLNGDECTVQVSDGNDTGKGVLKRVDSKDGDGWELC

SEQ ID NO: 52722 - protein, 260 aa, Zea Mays
MWDNKTGRSRGYGFVSFRNQQEAETAITEMTGKWLGSRQIRCNWATKTNSEEKPETDNHNAVVLTNGSSTNSATDASQDAGSKENPENNPDCTTVYVGNLGHEVNRDELHRHFYNLGVGAIEEIRVQQDKGFGFVRYSTHGEAALAIQMANGLVVRGKSIKCSWGNKPTPPGTTSKPLPPPVASYQPAVAMSGVPQGFTAAELLAYQRQLALSQAAAGQIAGQHGLAGQVSAGLLAAAGSQALYDGYPNQSSAQQLMYYN

SEQ ID NO: 52723 - protein, 583 aa, Zea Mays
MATHSVIPLQSEPALDNNPSKSANARDQILSGTENVTTGNARGGSSLKSQKGPPEKASSVGKPGEQPFPYHQNVYAPQPQPLYPGGYMNPSGQWEEYPHYVSMEGLHSVSPGIYNDNQSLMLSPGYANNPQMMYGAYSPVSTVGDGQQYLPMHFPFSSPYYQPPASPSMGYSSSATGISQGDPMLQQEYFLPDGLLYSPTQGYHQPFSSFDRAPTQLNNAPGLFGQGNLPLASGMHHGSMYGPGSYKGRQQGSKFGGSTTSWSSAGRRFGTIDLSGNQQRGSMPFGSHNGSLEFMNEQNRGPRATKPKIQGTENTSGDERSEKIVPLIDSELYNRSDFITEYKDAKFFVIKSYTEDHVHRSIKYKVWASTASGNRKLDSAYHAAKEKEEHCPIFLFFSVNGSGQFCGVAEMIGPVDFDRSVDYWQQDKWSGQFPVKWHIIKDVPNNLLRHIILENNDSKPVTNSRDTQEVKLEQGLQMLTIFKNHEAETTIVEDFDFYEQREKALQENRRQQQPPTTYPQKLVDTNAQGPVADISDAFAKAVQLKDTANSGTTPKAEGASAENGSAATAKVEGSANLNTGPVE

SEQ ID NO: 52724 - protein, 651 aa, Zea Mays
MSTAKVVLEPAFQGAGHKPGTEIWRIEDFKPVALPKSDYGKFYCGDSYIVLQTTCKGGAFIFDIHFWIGKDSSQDEAGTAAIKTVELDSMLGGRAVQHREPQCYESDKFLSYFKPCIIPMEGGFASGFKKPEVDKFETRLYICKGKRAIRVKEVPFSRSSLNHDDVFILDTENKIYQFNGANSNIQERAKALEVIQHLKEEYHDGVCAVAIVDDGKLQAESDSGEFWVLFGGFAPIGKKAISDDDVVLETTSPKLFSISNGQLKLEDAVLTKSILENTKCFLLDCGAELFVWVGRVTQVEDRKAASAAVEKYIIKENRPKTTRITQVIQGYENHTFKSKFESWPVSNTSGSASTEEGRGKVTALLKQKGVDVKGISKTSVPVNDEVPPLLDGGGKLEVWCIDGSAKTALPKEELGKFYSGDCYVVLYTYHSAEKKEEFYLAYWIGKNSVQEDQEAAFQIANTTFNSLKGRPVQGRIYQGKEPPQFVAIFQPMVILKGGTSSGYKKFVEEKGLKDETYCSDGTALIQISGTAVHNNKTLQVDAVATSLSSTDCFVLQAKNSMFIWNGNASSFEQQQWAAKVAEFLKIGLDLGQLETGVAVKHCKEGTESSIFWSSIGGKQSYTNRNAAPDVVIREPHLYTFSLRNGKLEMIC

SEQ ID NO: 52725 - protein, 846 aa, Zea Mays
MCTRIIWALVSSLEGKSIEVRQAAGLLLKNNLRTTFISMQPSSQHYVKSELLPCIGATNRAIRSTVGTVISVLFQIVRVAGWIELFQALHKCLESNDLDHMEGAMDAIYKICEDVPEELDVDVPGLSERPINVFMPKILQFFQSPHASLRKLSLGCINQYIVVMPSALYMSMDQYIQGLFNLAKDPSADVRKLVCSAWVQLIEVRPSILESHLKNVTELILQANKDPDDEVALEACEFWSAYCDVSMPPEGLREFLPRLIPTLLSNMVYADDDESLDDAEEDESFPDRDQDLKPRFHASRLHGSQTGDDDDDDDAVNVWNLRKCSAAGLDVLSNVFGDSILPTLMPLIEQNLARTDDNSWKERETAVLCLGAIAEGCIGGLYPHLPQIVAFLIPLLDDKFPLIRSITCWTLSRYSKFIVQSLDHPNGREQFDKILMGLLRRILDTNKRVQEAACSAFATLEEEASEELVPHLEVILQHLMCAYGKYQRRNLRILYDALGTLADAVGAELNQAKYLDIFMPPLITKWQQLSNSDKDLFPLLECFTSIAQALGPGFAQFAEPVFQRCINLIQSQQLAKIDPTAAGAVYDREFIVCSLDLLSGLAEGLGAGIESLVAQSSLRDLLLQCCMDEAADVRQSALALLGDLSRVCPIHLHPRLQEFLTVAAKQLNPQSVKDAVSVANNACWAIGELAIKIGKEIAPVVITVVSCLITILKSPEGLNKSLVENSAITLGRLSWVCPDIVAPHMEHFMQAWCSALCTIRDDFEKEDAFHGLCAMVAANPTGAAGSLAYICQACASWTEIKSEGLHNEVCQILNGYKQLLGNNGGWEQCMAALKPDVVQKLARYGV

SEQ ID NO: 52726 - protein, 429 aa, Zea Mays
MILHFLGNEGPRTSDPSRYIRYIYNRVILENATVRASAVSTLAKFGALVDTLKPQIFVLLQRCLFDTEDEVRDRATLYLQTLSGEVAIGNDEKDVKDFLFGSFDVPLANLEASLRTYEPSEEPFDISLVSREVRSLPPKEKAAPGKRPPAGAAAAAAPVSTVDAYQKMLSFIPEFSGFGRLFKSSEPMELTEAETEYAVSVVKHIYDGYIVLQYNCANTIEEQLLEDVTVCVDASDAEEFSEICSKPLASLPYNSPGQVFVAFEKPERVPVVGKFLNLLKFTVKEVDTTTGEADEDGVEDEYQLEDFEIVSADYMLRVVVSNFRNAWENMDPDSERVDEYGLGVRESLAEAVNAVINILGMQPCEGTEVVPKNARSHTCLLSGVFIGNMKVLVRLSFGLSGPNEVAMKLAVRSDDPEVSDKIHEIVASG

SEQ ID NO: 52727 - protein, 96 aa, Zea Mays
MNKTRQHRTELVLHTVALPSRWFCGGGGGRASYRCEADGVAAIYTIFNRVLLSFIIWFCLRVHGSASCSYGMLVSFSPSKYILVCFVSSSCLFVSS

SEQ ID NO: 52728 - protein, 138 aa, Zea Mays
MQIAQADTTEEFGGIVAVAASTSGKLREVDLNETPVTQNKRLRSRVDALMKTVELGRRYFPNCSQVLDKFLEDDLPEGLDQFYLQRGTADEQKVKRMRFCELKEDVLKAFSKDKAEGSVFSGLSSSSSCSPPQKYAQR

SEQ ID NO: 52729 - protein, 157 aa, Zea Mays
MLGTVVITQIWVLLLGGLGLGALLDVWAGHDFPIVFYLAVGGSLLSYIYSAPPLKLKQNGWIGNFALGASYISLPWWAGQALFGTLTPDIIVLTTLYSIAGLGIAIVNDFKSIEGDRTLGLQSLPVAFGMETAKWICVGAIDITQLSVAGLLTPASV

SEQ ID NO: 52730 - protein, 217 aa, Zea Mays
MVMTNLTTGDKAVLYFQPCGWFGAGRYEVDGYVYSAAEEPKIMITGKWNKSLSCQPCDQEGDPLPGTELKEIWRVAPAPQNDGYQYTHFAHKINSFSTAPKKLLASDSRLRPDRYALEKGDMSKSGSEKSRLEEQQRAEKRTREAKGEQFTPRWFNVTDAVASTPWGDLEICEYSGRYTEHRAAIDSSNSTDDDDEIDVTSVEFDPWQYGGSSSSPQ

SEQ ID NO: 52731 - protein, 233 aa, Zea Mays
MLLLLIFASMSDVAASGGYYMAMAAPVIVAEKLTLTGSIGVVTGKFCLQKLYERIDFNKEIISKGRYAELNVNDQRPLRPDEAELFEKSAQNAYALFRDKAAMSRSMSVDQMESVAQGRVWSGHDAFSRGLVDSVGGLSQALAIAKQKANIPKDKKIQLVEVSKPSPSLPEILSGIGGSLLGVDRAVKGVLQDMTSLSGVQARMDGILFESLGDMSGENQLLLLVKDIMNYFD

SEQ ID NO: 52732 - protein, 109 aa, Zea Mays
MLVFLKQFVWFMALASRRCARDARFESGALLELLGAHKLRLLLLLCVCFEIKTMLLCFFFEIKTMLLRVFFSFSVMFVNSLFVAVLSDCYIVNISKHTSLNQMSGLVLP

SEQ ID NO: 52733 - protein, 177 aa, Zea Mays
MTQSLQEALHRSTMDISGAEYRGKEVPLFVLPTRYLLKLDTTMTSYCDMQRVLFEEEQSAYNQAMQQNICDGKIHPLTSIHCTSTYNSSLCKLMEYCLSPAVITLQDRLKENELRLSMLKEECKQLEADTQGMRNGSPRRLMNHGAGGSGSPMAQSRHPFSSQGSPRSPSGGSRRRA

SEQ ID NO: 52734 - protein, 89 aa, Zea Mays
MSSQQLVDFIREHINTEESLSAVCEGVLDRCLAPSTMGGEGCDNMTMILVQFKKPFAQVKDASDAEQLTGDAGCSETHGAEENDSDKQI

SEQ ID NO: 52735 - protein, 885 aa, Zea Mays
MAAADRQLVVAVEGTAALGPYWSTIVAEYVEKIVRSFCASELPGQKLVGTPPELALVVFHTHGPYSAFDVQRSGWTKDVDAFLSWLSGILFSGGGFSEASTCEGLAEALKILQGNPNTTQGHQNHEAQKHCILVAASNPYPLPTPVYCLPTQSTDHKENIETSKEPSIADAETVAKSFAQCSVSLSVISPKQLPTLKAIYNAGKRNLRAADPSVDHAKNPHFLVLLSENFMEARTALSRPLHGNLAPNQTITKMDTAPAVTMPGPTSNGNSSVNAMAGRQPIVGGISTTSVKVEPTTMPPIVSAPAFSHVTPISNVASQGISALQTSSPSLISQEANMGNDNVQEHKPIINPVQQPIRPGGHGSLLNNLSQVRLMNSTSLGGGATSMGLPNMGATPIQVHMSNMISSGMTSTPSVISSMSGPGQPISTQQMVQSTALGSFGSNTPTVTGNSTIAVSSSLTNNQSSMGMGQSVQSVAQGGLVSGSQLGQGGIVANQNVMSTLGPTAISSTPAMMPTPGMVPQTGVNSLGVNNNSAMNMPITQQHANAQQPPPKYVKIWEGTLSGQRQGQPVIICKLEGYRSGTASETLAADWPETMQIVRLIAQEHMNNKQYVGKADFLVFRTLNHHGFLVQLQEKKLCAVIQLPSQTLLLSMADKAGRLIGMLFPGDMVVFKPQASTQQTPMQQQQLQQFQQQQQQLQQHMHMQPQGLPLQQSQMQLQQQQPQMQPMQQQQPSQMQQQMQSMQQQMQPMQQQMQHQQQQMQHQQQQMQQMQQQQQQQQQQQQQIQPQQQQMQQMQQQQQQQMQPQQQQMQQMQQQQQQMQPQQQQMQQMQQQQQQMQPQQQQQPQMVGTGMGQQFMQGHNRAVQMMQGKITPQGPGSMPGGGFLP

SEQ ID NO: 52736 - protein, 171 aa, Zea Mays
MPKSKRNRPVTLSKTKKKPGLERKGKVVAEIKDAVDKYSSAYVFTYDNMRNQKLKDLREQLKSSSRIFLAGKKVMQIALGRSPADEAKTGLHKLSKFLQGNSGLLFTNLPRDDVERMFREFEEHDFARTGSTAIDTVELKEGPLEQFTHEMEPFLRKQGLPVRLNKVYHCC

SEQ ID NO: 52737 - protein, 50 aa, Zea Mays
MVRGNILITHHYELIYTHLQSPIAKITGHVFQSNKHSAQRDWPGYCFSQG

SEQ ID NO: 52738 - protein, 251 aa, Zea Mays
MHNKIQEIKEAVELPLTHPELYEDIGIRPPKGVILYGEPGTGKTLLAKAVANSTSATFLRVVGSELIQKYLGDGPKLVRELFRVADELSPSIVFIDEIDAVGTKRYDAHSGGEREIQRTMLELLNQLDGFDSRGDVKVILATNRIESLDPALLRPGRIDRKIEFPLPDIKTRRRIFQIHTSKMTLADDVNLEEFVMTKDEFSGADIKAICTEAGLLALRERRMKVTHADFKKAKEKVMYKKKEGVPDGLYM

SEQ ID NO: 52739 - protein, 342 aa, Zea Mays
MMEGIFICAAPMCLKSFLKKADFEFHVPDVHANLLQTNLEKEEERNEPDAPNISRASAGDTQRQSQMPEMSTARAPSRPGVSQDRDERSRYHQSREQTPLRPPTLSKPPSFHGRHSYPPGDTQAENNPPQGFDRAYNWASQSRQESPGAATPLRQESDQSIQDKQQLMANAPFMFPPIPPHQGNFMMPMNMNQPLIPNAPFNYPLQQDGNPQYFSAPFQMQLPDTGSEQGSMSNVQPPAGPMSFPEGPQRPWGMRLMSNPFQSMALGQGMIDGAGDPQGGGGLAFMQAGFGGMPDGSMNTGMPDRGDGRGILAQMHMQMQMSLPPPPPTQPPPGSQQTFNRT

SEQ ID NO: 52740 - protein, 168 aa, Zea Mays
MDEKDWLSLVAVHSDSWLMSVAFYFGARFGFDKESRKRLFTMINNLPSIYEVVTGTAKKEPKEKTPKSNIKTNKSGSKPSRHAEPNSRVPKMPPPKDEESEEEEGEPQEDQESALCGACGLGYDDFWICCDLCETWFHGKCVKITPAKADHIKQYKCPSCTGSKRAKV

SEQ ID NO: 52741 - protein, 364 aa, Zea Mays
MKVVHMRPTKGTSGAPSISSTITESPAKVENENSSESSAISDSVTEEANTDTTVRGNEDAEEKAQDVGSSKDSSVEGLKSVLNFFKSRIPEFKVQVINVDVAEETELAANSSEELVQDDVKSTPESSLEEPATEELEQEEDVPEENTDEESKSTEVKLFISGVVHNKEDAGAKSYVRVPAEINNMEKDSFELYIPGEGSDRDLAETKAAKQKVADMAAKLASELMPSDVAKALWGTAKSSSKINKEVQELLRLTLSKARVKLTENTIFKRIIMDTNSTDPFNGLYVGAFSPYGPEIVQLRRKFGHWNSTDDVEFFEYVEAVKLTGDLSVPAGQITFRAKIGKGKRLENRGAYPEEFDCQLQRSG

SEQ ID NO: 52742 - protein, 369 aa, Zea Mays
MEFYKSDMKLKKFLHIIENSPVYPVIYDSNRTVLSLPPIINGAHSAITLATRNVFIECTATDLTKANIVLNTMVTMFSEYCETKFEVEPVEVIHHDGRKTVYPDLSCYKMDVLLSDILGPIGISQDEKQVVCLLNKMQLQAESHSLKGEARISVSVPPTRSDILHARDLSEDVAIAYGFNNVPKSKPKCMTIGGRQPLNRFSDKIRAEVARAGYMEVLTFILSSHEENFDMLNRTDDKSKAVIIANPRTSEFEIFEVGDVVMLDSSRDVGASNNRRLAALYCNRVSGFEEIMGLVDSIVKVVRAPHVNFGENYYVPTDEPEFFPKRQCKIVTSDGKQVGYLGIVHAEVLRKFGIPDPCTFVEMDLEALL

SEQ ID NO: 52743 - protein, 371 aa, Zea Mays
MEDEIGPDGKKIRPGINPVMIDELTECNTMLSAQRKKRQVPPTLAPLDALERYTQISSHPLHKTNKPGILSMDVHPSKDVVATGGIDTNAVIFDRSSGQILCTLTGHSKKITTLKFVPRDQLFVTGSADKTVRIWQENENGNYNCVHTLKDHTAEVEAVTVHATQKYFVSASKDNSWCFYDISTGSCLTQVGEASGQEGYTSASFHPDGLILGTGTTDAVVKIWDVKTQSNVAKFEGHVGPVTAMSFSENGYFLATAAHDGVKLWDLRKLRNFRTFSPYDSDTPTNTVEFDFSGNYLAIGGSDIRVYQVANVKAEWNLIKTLPDLSGTGKVTSVKFGADAKYIAVGSMDRNLRIFGLPGDDQMEESTTAAE

SEQ ID NO: 52744 - protein, 332 aa, Zea Mays
MRPAYHPEGLYDDESKVASQRNAQTITQMWHQNGRCPEGTIPIRRTKEEDVLRASSVRRYGKKKRRSAPNPMSVDPDMLNESGHQHAIAYVEGDKYYGAKATINVWQPKIEQANEFSLSQLWILGGSFGQDLNSIEAGWQVSPDLYGDNNTRLFTYWTSDAYQATGCYNLLCSGFIQINNQIAMGASIFPISNYGGSQYDINILVWKDPKEGNWWLQFGNDYVLGYWPSFLFSYLADSASMIEWGGEVVNSEPDGSHTSTQMGSGHFPEEGFGKASYFRNVQVVDSTNNLKPPRGVGTFTEQSSCYDVQDGSNADWGTYFYYGGPGKNSNCP

SEQ ID NO: 52745 - protein, 139 aa, Zea Mays
MKSEMSEYKNVVGGRLKLKGKALDVKEGGVKKKKKKHQLEESSQIEHDELHKGGNSGLPADHNNELIEAGKVGDEERNLHPDYDHLTPAERRYIDQKQKIDMQKLAKVANKSHRDRIQDFNQYLANLSEHYDIPKVGPG

SEQ ID NO: 52746 - protein, 229 aa, Zea Mays
MDKAVSDPGPMGHPTKSQPSLLCCSIGSPARQTMPTQQACSAAAALRSRRPSPASTTTTSRQLRLRPPRAATAGVRLTVSDAELESRGFAVRRTAEGIDVAALNEVFVRVGFPRRQEERLRRALEHSRVVWLSAGEEEGRPVAFARAAGDGVFNAVVWDVVVEPSSQGLGLGRAVMERLVDELRRDGVANIVLYAETRVVGFYRLLDFAMDPDGIRGMAYYRKSTTTAA

SEQ ID NO: 52747 - protein, 217 aa, Zea Mays
MLWIFYALLKSGAGLRVRVLGWICVSVALSVFAAPLSIMRQVVRTKSVEFMPISLSFFLVLSAVIWFAYGALKRDVFVAFPNVLGFVFGVAQIALYMAYRNKEPAAVTVEEAKLPEHAKEVVVAAAAAEARASCGAEVHPIDIDIEATPTPVEEVHEPQVVVVVDVDVEPVTCAGAAEAAAGAGADASGVADGGVPGPMAPPEQLAIKPDMAISVEA

SEQ ID NO: 52748 - protein, 94 aa, Zea Mays
MVSLSTWFRYAAHKFDYCISLSLKKYNVGQISSTQLTDVIFKNFFHGKLTYVCQTKGEEAMAPIVSPTGGAVLVRKLANLSPTTVDIIDPCKLA

SEQ ID NO: 52749 - protein, 63 aa, Zea Mays
MYCRRTCSNSCSPTLKELFFFKVVKRRPWVPMALAPRQVCSSPLCNITIVTIFCTHNTKLHIY

SEQ ID NO: 52750 - protein, 77 aa, Zea Mays
MMTAGTSTTPTTMSQIPTSFSLSTTVVGLLAPGALQDTSRLYSTTSLVWRGRALLSTIWCAGRRGRKRRECSSRPWC

SEQ ID NO: 52751 - protein, 191 aa, Zea Mays
MEVEDSEDHVQLSTADRSSLAKDLPSALSLKAQALIEALEGKRFDSFMDALRDILEESGLTFKKLDKRLERTMLHSYRKDLTAQVSSENDPVAFLPKVVALLFLQAYNKAIQAPGRAVGAVITLLKDKLPAATYKVLTDYHSTTVKLLALQAAATDDEEDCTSDRMRERKEDLEERLMPELKSLVLGTNKE

SEQ ID NO: 52752 - protein, 193 aa, Zea Mays
MVKLTMIARVTDGLPLSEGLDDSRDLKDADFYKQQAKLLFKNLSRGQHEASRMSIETGPYLFHYIIEGRVCYLTLCDRSYPKKLAFQYLEDLKNEFEKVNGSQIETAARPYAFIKFDAFIQKTKKLYLDTRTQRNLAKLNDELYEVHQIMTRNVQEVLGVGEKLDQVSEMSSRLTSDTRIYAEKAKDLNRQRI

SEQ ID NO: 52753 - protein, 235 aa, Zea Mays
MEAVQGCRKTITYEADTFCGTCNGSGVPPGTVPKTCKTCKGSGAIYMQKGIFTVECTCSLCNGSGKIVKSFCKTCKGEQVVKGKTSVKLDIAAGSDDNDIMKVFGKGGADVDRNKPGDLYVTIKVREDPTFRREGIHVHVDSVLSIAQAVLGGTVTVPTLTGNVTVKVRQGTQPGEKVVLRGKGIKARNSPVFGNQYVHFNIRVPTDVTQRQRELIDEFDKEECADRERPAVASG

SEQ ID NO: 52754 - protein, 221 aa, Zea Mays
MPTRKSERLAKRMKLMASLLLTQRKKIGVGEHFQAEVPGWTGQPSGKELSCYRNDPETSKMLGTRMWPPEGEVYKTDIVAVGQGRPGSCNCPYPGSFLCRQLHTNEARDQLRSELGRVFTMWQFDSMGEEVSKLWSRDEQLKFDALEQLVPVMDQKTYWAVVSKNFASKPRIDLIKYYLNVFLMRRVLYQCRLGLLEIDSDEDDVEEEEDEDQPEGSSSLR

SEQ ID NO: 52755 - protein, 168 aa, Zea Mays
MQPAPIQVSYMGFPGTTGAAYIDYLVTDEFVSPSSYAHIYSEKLVHLPHCYFVNDYKQKNRDCLTPVCPHKRSDYGLPEDKFIFACFNQLYKMDPEIFDTCALWLLRFPAAGETRVRAYAAARGVRSDQIVFTDVAMKNEHIRRSALADLFLDTYEVLHLLFFFPNIS

SEQ ID NO: 52756 - protein, 170 aa, Zea Mays
MWLAGMTFGYLYGFLIITVGMSIGMSLPYFIGSAFHCRIHRWLEKWPKKAAFVRLAGEGDWHHQFKAVALLRISPFPYLVFNYASVATNVKYYPYIAGSMAGTIHETFLAIYSGKLLQSLAVATSQGSFLSVDQIIYNGIGFTIAATSTAAITIYAKKALQKLQAEDEIF

SEQ ID NO: 52757 - protein, 243 aa, Zea Mays
MPKFQQEDKKLSNSEAFLRRSETQRKAEQKVREESERLRQKEREQIAEKRKRDMTLRARVAAKAEEKRLELLYIQWTEHHKRLSNFLRTKAEPPIYYMPTKPIIDDPAIVEQNKEKVFEEWKSMRRDELTRFQKQVEEQYLSNVERQLERIQNARNARKANGHANMQEMDKELDTHRAEHGPKTRRVPEEGGNDDDEDAEDMAAEDEVMDEVLGINDGINEDPSKPSEEATTEGGEPAPEEAQ

SEQ ID NO: 52758 - protein, 848 aa, Zea Mays
MPLCMGEGFVEDQFGLGLIARAVEEGISVIKPSGIMVFNMGGRPGQGVCERLFRRRGFRITKLWQTKIMQAADTDISALVEIEKNSRHRFEFFMDLVGDQPICARTAWAYMKSGGHISHALSVYSCQLRQPNQVKKIFEFLKDGFHEVSSSLDLSFDDDSVAEEKIPFLAYLASFLKENKSNPCEPPAGCLNFRKLVAGFMKSYHHIPLTPDNVVVFPSRSVAIENALQLFSPALAIVDEHLTRHLPKQWLTSLAIEGRADCNHADGTVTVIEAPRQSDLLIELIRKLQPQVVVTGMAQFEAITSAAFENLLNVTKDVGSRLFLDISEHLELSSLPSSNGVLKYLAGKTLPSHAAILCGLVKNQVYSDLEVAFAISEDAAVYKALSQTIELLEGHTSLISQHYYGCLFHELLAFQIADRHPQQERQPAEVIPQQMIGFSDPAVSTLKATEFFVPGSAESSIIHMDLDRSFLPVPSAVNASVFESFVRQNITDSETDVRSSIQQLVKDSYGLSAAGCAEIIYGNTSVALFNKLVLCCMQEQGTLLFPLGTNGHYVSAAKFVNASTVTIPTNPSSGFRIEPKVLADTLKNVSRPWVYVCGPTINPTGFLYSDSDIRELLSVCAEYGARVVIDTSFSGLEYETDGWRQWNLAGCLSSLKRSEPSFSVVLLGELSFALTAGGHDFGFVILGDSSLAETFHSFSSLSRPHTTLKYTFKKLLGLKNQKDQHFSDLIVEQKEELKNRANQLIQTLESCGWEAAIGCGGISMLAKPTAYMGKAFKAAGFDGELDASNIREAILRATGLCINSSSWTGIPGYCRFSFALERGEFERAMGCIARFKELVLGGAQMNGA

SEQ ID NO: 52759 - protein, 132 aa, Zea Mays
MMKFASFETIVELIYKHAVPVPKSECSKTTQLGISFAGGYVAGVFCAIVSHPADNLVSFLNNAKGATVGDAVKKLGLWGLFTRGLPLRIVMIGTLTGAQWGIYDAFKVMVGLPTTGGVTPAPAAEAELKASA

SEQ ID NO: 52760 - protein, 244 aa, Zea Mays
MARLRSWSFHGMSYRAGGDNKGTSKKTSSRKARKQEGLKQQYNGEEDQNGGSNATTGGARKKKGGHVRQSSATHDAIDKNYSGSSAEGLRNKRQKSAAQSASVGRREGLRQRSDAKQHPDAAEGSTEPLADVPGSDGAAQGSMQHGTSAPHTEIKAMVRNILFKDIVDKEHDAEMAYVEEVINGICNATDSMVGGGGGDASAKGGRGSKQSGSGVEGESSNATERRRDEATENALAVKGNTPVS

SEQ ID NO: 52761 - protein, 389 aa, Zea Mays
MYVIESDETQTQLSEDKIPSQGQTGKDGNDLDKIQTQGIEKHLKNASQLSQNGGSDSLLVVCCEDVLLLLSLASLIQGSSKHLQKTKLAKPCCWSAVFKNMDDKVCGLILAYQTGTIEMRFGPDLAIVAETSLMSLLRWSYKTGMEKSTSSSNGQVTLVNGSEFAIISLMASENDLRIPESLPCLHDKVLAAAAEAAMSFSTDQRRKQNPAAGIIGGFIKGMKGKAEENAKMRESLTLRAPSEQLESIFSKEPFAEPSIPDLDDPMEELSIDDIEIDDEVAVALAQAASSTSQGNKRTAVEEERAKLFEGSNSADKPRMRTQQEILTKYRFGGDAAAAAAHAKDKLMQRQEKLERISQQTAELQNGAENFASLAQELAKTMENKKWWKL

SEQ ID NO: 52762 - protein, 704 aa, Zea Mays
MNPYFVGILVPVAVSLLLRKRRKAQRMRGVPVEVGGEPGYAVRNYRFEQPVETHWEGVSTLADLFEQSCKEYVYMPLLGTRKLISRETEAAPGGRSFEKLHLGEYEWKCYAECFKSVCNFSSGLIRVGHQKNERVAIFAETRAEWQIGLQACFRQNITVVTIYASLGEEALCHSLNETEVTTVVCGQKELKKLIDISGQLDTVKRVVYINEEGISTEVSLAQNCTSWIVESFEEVTRLGAEAPVEANMPLPSDVAVIMYTSGSTGLPKGVMMTHRNVLATLSAVMTIVPALGSKDIYLAYLPLAHILELAAEALMAAVGASIGYGSPLTLIDTSNKIKKGTLGDASALKPTLMTAVPAILDRIRDGVRKKVDTKGGIAKQLFDIAYNRRLAAINGSWLGAWGLEKLLWDTLVFGKVRAILGGKIRFVLSGGAPLSGDTQRFINICLGAPIGQGYGLTETCAGGTFSEYDDTSVGRVGAPLPCSYIKLIDWPEGGYLTADLPMPRGEIVIGGPNITKGYFKNEAKTNEVYKDDEKGMRWFYSGDIGRFHPDGCLEIIDRKKDIVKLQHGEYVSLGKVEAALIVSPYVENIMIHADPFHNYCVALVVAAHIELESWASQQGIKYNDFSDLCQKQEAVKEVLGSLAKAAKQARLEKFEIPVKIKLIPEPWTPESGLVTAALKLKREVIRKTYENDLAELEDKGRWRR

SEQ ID NO: 52763 - protein, 211 aa, Zea Mays
MLNSSDGKYLLTGGEDDLVQVWGMDDRKIVAWGEGHNSWVSGVAFDSYWSPPSSDGNGENVYRFGSVGQDTQLLLWDLALDEIVVPLRHPSSASPTFSSGSPSTHWDNACPPTGVLQPSPRMRDVPKLSPLVAHRVHADPLSGMVFTSESILTICREGLIKIWVRPEQSENNQQSNSSEFALGPASKDRAITSSNKASSSSFKKLPPVLVT

SEQ ID NO: 52764 - protein, 301 aa, Zea Mays
MIYIDGQSNPRDFVRPPCMLLLVLGSSLRTQVDRSSSSPISRRSGASSSPRRGGRTPPPPRRPPPRLWPPSCRGARGTRSRRCPGQPPPPRPPRSCAAARAPGPSSPRASRTGRRRRRRGRPSRRGAPCACAPSPPSCTSPSRPGRSRTLRPRPRLHRTACRTRHRRRRRTRRRQRACCRTRRRCHGRIRRRWWCPICCTRCRSRRFRTCCTRHRRCHGRSRRRRAGPAVPIAAAAAVVVIAARLVVATFATAVVISAGLAVVAAVVVVAGAGPAVAAAAVLVRHGSRLLLSSHTFSTEEE

SEQ ID NO: 52765 - protein, 585 aa, Zea Mays
MASAAGAAFAAITLLILVPLTAASDSDHKYQAAEPVTLWVNKVGPYNNPQETYNYYSLPFCHASENHVHKWGGLGEVLGGNELIDSQIDIKFGKNVDKATICSLDLDLVKAKQLSDAIENSYWFEFFIDDLPLWGFVGEADRNNDNKYFLFTHKNIVIRYNGNQIIHVNLTQESPKLIDVNKALDMTYSVKWEPTNITFAHRFDVYLDYPFFEHQIHWFSIFNSFMMVIFLTGLVSMILMRTLRNDYAKYARDDDDIETLERDVNEESGWKLVHGDVFRPPCNLVLLSALVGIGTQLAALILLVILLAIIGMLYIGRGAIVTTFIVCYALTSFISGYVSGALYSRHGGKNWIKAMAMTASLFPFMCFGIGLVLNTIAIFYGSLAAIPFGTMVVVFILWAFISFPLALLGTVVGRNWSGAPNNPCRVKTIPRPIPEKKWYLTPSVIALMGGLLPFGSIFIEMYFVFTSFWNYKVYYVYGFMLLVFLILIIVTICVTIVGTYFLLNAENYHWQWTSFFSAASTAVYVYLYSIYYYHMKTKMSGFFQTSFYFGYTLMFCLGLGTLCGAVGYLGSTLFVRRIYRNIKCD

SEQ ID NO: 52766 - protein, 85 aa, Zea Mays
MSSMMNALSNWLVNPRRNPLARLHMHTVSSRLRKYGLRYDDLYDPYFDLDIKEALGRLPREVVDARIQRLKRAMDLSMKHHFFFF

SEQ ID NO: 52767 - protein, 208 aa, Zea Mays
MVMTHAALPNHIVIKIISRNAEPVANKNINMHDLATIVKKYQFEALTRIIVTRAQAVGWPPVRSYRRNVMTVQSVKSKKEEEPEKQQSAANAGGNGSAFVKVSMDGAPYLRKVDLKMYNSYTELSVALKKMFSTFTTSGNNMNEGKLVDPVSGADVVTTYEDKDGDWMLVGDVPWEMFVESCRRLRIMKSSEAIGLAPRTKDKCKNRS

SEQ ID NO: 52768 - protein, 216 aa, Zea Mays
MIPPSIISRGVGWQGIGLLLDSFFGTANGTSVSVENIGLLALTRIGSRRVVQISAGFMIFFSVLGKFGALFASIPLPVFAGMYCLFFAYVGGVGLSLLQFCNLNSFRTKFIMGFAFFMGLSVPQYFNEYTAVASYGPVHTGARWFNDMINVPFTSKPFVAGLVAYILDNTLQVKESAVRKDRGNHWWEKFRSFKKDARSQEFYSLPFNLNKFFPSV

SEQ ID NO: 52769 - protein, 592 aa, Zea Mays
MRWLLWSVMAGDITCGSLLQKLQFIWDEVGESEEDRDKVLYQLDQECLDVYKRKVDQATNSRDLLIQALDDSKIELARLLSALGEKAIARTPEKTTGTIKQQLAAIAPTLEQLTKQKNERKREFVNVQSQIDQICGEIAGTIEVGEQMTTPQVNEDDLTLERLEDFRSQLKDLEKEKSNRLEKVLDYVGIVHDLCTVLGMDFLSTVIEVHPSLDDSIGDNCKSISNDTLSKLDNTVATLNEDKKLRLSKLQELAGQLYDLWDLMDAPKEERRMFDHVTCNRSASVDEVTAPGSLALDLIEQAEVEVQRLDQLKYSKMKEIAFKKQTELEDIYAGAHIVIDTAAAHEKILALIEAGNIEPSELIADMDTQIAKAKEEALSRKDILDKVERWMSACEEESWLEDYNRDDNRYNSSRGAHLNLKRAEKARILVNKIPALVETLVSKTTAWEENRGLSFMYDGVPLLAMLDEYAMLRQEREEEKKRMREQKRYIEQQLNTDHEGPFGSRVSPNRPASSKKAVGVKVNGSVSNGTPPNRRLSISGQQNGGGHGVRSGGKDSKKDTAKTASPGNNAVAAAPVDAVSQISVTDPVPSTP

SEQ ID NO: 52770 - protein, 56 aa, Zea Mays
MMVGFFCWFIFSVITNLIFCLLNNLFIIYLIFFCFFYRFIVILIIIVVIIIFQFII

SEQ ID NO: 52771 - protein, 918 aa, Zea Mays
MDVDSRMTTESDSDSDAAAAAARGGNAGGSGSGSETSSSSAPSTPGTPGTPAAAPNPAPVGAVGPRPAPGYTAVNAVIEKKEDGPGCRCGHTLTAVPAVGEEGAPGYIGPRLILFGGATALEGNSATPPSSAGSAGIRLAGATADVHCYDVSLNKWSRLTPLGEPPSPRAAHVATAVGTMVVIQGGIGPAGLSAEDLHVLDLTQQRPRWHRVVVQGPGPGPRYGHVMALVGQRFLLTIGGNDGKRPLADVWALDTAAKPYEWRKLEPEGEGPPPCMYATASARSDGLLLLCGGRDANSVPLSSAYGLAKHRDGRWEWAIAPGVSPSPRYQHAAVFVNARLHVSGGALGGGRMVEDSSSVAVLDTAAGVWCDTKSVVTTPRTGRFSADAAGGDAAVELTRRCRHAAAAVNDLIFIYGGLRGGVLLDDLLVAEDLAAAETTNAANHAAANAAATNLQAGRTPGKYAYNEQTRQTITESGPDGAVVLGTPVAPPVNGDMYTDISPENAVLQGQRRLSKGVDYLVEASAAEAEAISATLAAVKARQVNGEMEQLPDKEQSPDSTSTSKHSSLIKLDSALSNNLAAPPGVRLHHRAVVVAAETGGALGGMVRQLSIDQFENEGRRVSYGTPENATAARKLLDRQMSINSVPKKVIASLLKPRGWKPPVRRQFLLDCNEIADLCDSAERIFSSEPSVLQLKAPVKIFGDLHGQFGDLMRLFDEYGAPSTAGDIAYIDYLFLGDYVDRGQHSLETITLLLALKVEYPQNVHLIRGNHEAADINALFGFRIECIERMGERDGIWTWHRMNRLFNWLPLAALIEKKIVCMHGGIGRSINHVEQIENLQRPITMEAGSVVLMDLLWSDPTENDSVEGLRPNARGPGLVTFGPDRVMEFCNNNDLQLIVLQIMPERSWFWVEILWLCQN

SEQ ID NO: 52772 - protein, 294 aa, Zea Mays
MIVMEFAAGGELFDRICDRGRFSEDEARYFFQQLICGVSYCHYMQICHRDLKLENVLLDGSPAPRLKICDFGYSKSSVLHSRPKSAVGTPAYIAPEVLSRREYDGKWYLFMQLADVWSCGVTLYVMLVGAYPFEDPDDPKNIRNTIQQIMQVQYKIPDHVHISTECQQLIARIFVANPMRRITMKEIKSHPWFLKNLPRELTETAQGMYYRRDNRVPSYSDQTSEEIMKIVQDARTMPKSSRSGYGWSSEYSDEEEEKEEEHRPEEHEEEEDEYDRRVKEVHASGELRMDALHI

SEQ ID NO: 52773 - protein, 192 aa, Zea Mays
MKKKKKKQVDLDSSIDDLGDGEDTQGDQVVEEQGDGIVLGGGPTYPWEGTDRDYKYEELLDRVFNILRENNPDLAGDRRRTVMRPPQVLREGTKKTVFVNFMDLCKTMHRQPEHVMMFLLAEMGTSGSLDGQQRLVIKGRFAPKNFEAILRRYINEYVICNGCKSPDTILSKENRLFFLRCEQPRAGFVVNS

SEQ ID NO: 52774 - protein, 93 aa, Zea Mays
MPLELSSALSHEREVVEDSEIRQQALEAIYMIVLQDGGRRSFWSVNGPRILQVGYEDEKDPKVMEAYELIGSLLVGKGEDVQDNKKEQGEKPQ

SEQ ID NO: 52775 - protein, 519 aa, Zea Mays
MSSEPPPASSAAAGEELAADLSAATLSKKQQKKDARKAEKAEQRQRQQQQQQQPADAEDPFAANYGEVPVEEIQSKAISGRSWSHVGDLDDSAAGRSVLIRGAAQAIRPVSKKMAFVVLRQSMSTVQCVLVASADAGVSTQMVRFATALSKESIVDVEGVVSLPKEPLKATTQQVEIQVRKIYCINRAIPTLPINLEDAARSEADFEKAELAGEKLVRVGQDTRLNYRAIDLRTPSNQAIFRIQCQVENKFRDFLLSKNFVGIHTPKLISGSSEGGAAVFKLLYNGQPACLAQSPQLYKQMAISGGFERVFEVGPVFRAENSNTHRHLCEFVGLDAEMEIKEHYFEVCDIIDGLFVSIFKHLSENCKKELESINRQYPFEPLKYLDKTLKLTYEEGIQMLKEAGTEIEPMGDLNTEAEKKLGRLVREKYDTDFFILYRYPLAVRPFYTMPCYDNPAYTNSFDVFIRGEEIISGAQRIHTPELLAKRATECGIDVSTISAYIESFRKTSLFPRDPQRLVP

SEQ ID NO: 52776 - protein, 379 aa, Zea Mays
MFEKAVIKRLMTDVPFGVLLSGGLDSSLVASVASRHLNETKVDRQWGNKLHTFCIGLKGSPDLKAAREVADYLSTVHHEFHFTVQEGIDALEEVIYHIETYDVTTIRASTPMFLMSRKIKSLGVKMVISGEGSDEIFGGYLYFHKAPNKKEFHEETCRKIKALHLYDCLRANKATSAWGVEARVPFLDKSFISVAMDIDPEWKMIKRDLGRIEKWVIRNAFDDDERPYLPKHILYRQKEQFSDGVGYSWIDGLKDHASQHVSDSMMMNAGFVYPENTPTTKEGYYYRMIFEKFFPKPAARSTVPGGPSVACSTAKAVEWDASWSKNLDPSGRAALGVHDAAYEDTAGKTPASADPVSDKGLRPAIGESLGTPVASATAV

SEQ ID NO: 52777 - protein, 240 aa, Zea Mays
MARLLPTAAAAAIVAAVLVAGLPGARAASASPAADDAPPYRNHTVGGGDGWFFDANTNASSGNYSDWAAGETFYLGDYLIFKTNDNSSVVQTTNATTYGLCDASDDLAETTSIYGGGGGGGGGLEQNSTIAVALTAEGANYFFSEADGGAQCQQGMRFEIKVEHGRGLPPSLLHQPPAPKGRVLAPPPAGTAFSGTGGVEPGDGAGDNGGAGTSGACRAASGRFLGVVAAAAAALAVLVL

SEQ ID NO: 52778 - protein, 423 aa, Zea Mays
MAASPQQQGQGGPGSGGWTPEQFWSLLDKADRRFARVRDLPSFGRQEPDEFAKAFRAYTQLWRMQQEHRHRLLDAGLRRWQVGEIAARIAHLYYAQYQRTADTALLSEAFVFYHAVLDRAYFQDADHHLAPAKHLRFLARFLLVALLLGRRSHTVPRLASDIRTLLDDSKKSFQDAEYKEWKHVVQEIARFLRADSPFMNMRPLRYSYAFDPPPDTLRTVPTTVKKRGLVLSDTILCSYYPNEVKFTDLSIDVFRMVQCLEWEPCGSFALNDGYSAHDESGQNQPNLLKDLRDAALPPNPLKTILYRPSVTHFLTVLSTKCEELPSNGIMLIYLSATGEMGTSGFCPDTGENVLSNFNKFDISSLSHTSSKENKEPCLWLGCRETEGSNCIYPGDLIPFTRRPLFLVIDSSTSYAFKAVYSWY

SEQ ID NO: 52779 - protein, 440 aa, Zea Mays
MSSSMESSYLPATTESLAQAQEAKDASESISILYRVIQDPSSSADALRTKEVAITNLTNYLTKENRAEELRNLLTQLRPFFAVIPKAKTAKIVRGIIDAVAKIPGTSDLQISLCKEMVEWTRAEKRTFLRQRVEARLAALLLENQEYTEALTLLTSLIKEVRRLDDKLLLVDIDLLESKLHFSLRNLPKAKASLTAARTAANAIYVPPAQQGTIDLQSGILHAEEKDYKTAYSYFFEAFEAFSALEDPKAIFSLKYMLLCKIMVNQADDVAGIISSKAGLKYLGPDVDAMKAGLKYLGPDVDAMKAVADAYSKRSLKYFETALRDYKSQLEEDPIVHRHLSSLYDTLLEQNLCRLIEPYSRVEIAHIAEMIELPIDHVEKKLSQMILDKKFAGTLDQGAGCLIIFEDSKTEEIFPATLETISNVGKVVDSLYVRSAKIMA

SEQ ID NO: 52780 - protein, 1022 aa, Zea Mays
MFPEPAYEQNGHRDTERPYRSTREQLFSIGQMLRIRKGPLKGYLCRVVRIFRNDVTVKLDSLLKIVTVQADLLSVPANRGDNLSGAPASKFGSQDTSFFGSEAGKTSWDNGLPSFGSDSWQPFSSSTLSVQNAGGESEADPWSKKTSAKDDSDPWGKKTDGDSDRWGKKTDGDSDPWGKEAVSAADGDSNPWGKETVPSAAGDSDPWGKKVVSSADGDSDSWGKKATSSAVDTEKEGSGGTAWDKQAGVGGSDAAGSSWDRAVVNESEKSDNWGEACRVMDMGTGAEADTDPWGSKVKAVDMEGPNNWEKATVPPNNKLEDVSQGWGQPKGNSTEDQAIDNVSKDVDNNRACDSSLPVTEDGTWGKSKDNSCGGAGGAGGWDVSVGNWNKSSVVADAQDEGWGKGNWSSAESEETNNQSGNWNKTGASDQAGYNNWDKPKSFGGNGWNKGDDQNSSWNRPENFGGGRGFGRGQGRGRGQQSGYFNGRNDQGSWKKSWGSDNAERPSWRSDNQVDNEAGESGGYRGRGRGGRGQYGGRGKDNGWRNDDRSNSGFGRENNSGDGPKWGGGGNWNATNPPSSSVGTKSYGQNQPFTWNNSEDNKPSVGEQGDPWASKVSSTEDTEQQNDSWSSKMISGGAEDTSGGWDTKVKDSSCNDGGEGLQNDPWANKIGSNEGKEQETDPWASKMSSTVCADDKKGSWNTTAKGIPSKEKADDPWNSKGGNDDSKKTDTWGAGSSGGDQELSWSKPNFSLGDQESTWNNPRFSDDDNANNRGGFGRGNRGRGRGRNFGDGGGSSWNGGNRNDESGGGRSGEPWNRRDFDGGGGRGRGRFGRGDRNQGNNFGSGDGGSWGSGRGNGGRGGYRNWNDNNERSFGEGGGWSQSQSSDWNANKGNGEGNQAFSKSKPSWEAQNTSGRDGQAGKGDANNSWSKNRSSPSSAWGAPSGGAGGRGSWGKSNEDGWNSAGGSAKEKPAWGGGSEASTKKEDKGGEGNGSQGGGGVSSWDKGADDAWNGNTGSDIGSGGW

SEQ ID NO: 52781 - protein, 465 aa, Zea Mays
MLEVDRVVLPEVCAPVKDTVVCLSIQDEKNDPLASNSQLNMRSYSPEGDGVIKESNRVVTDKENDKSLFLSLDNDQKVHSQAEAEVQDIMVRTSCSISEILAQKITSKEQPSQKSIEVGDECFRPSQDMDYVMMFDSSKDENGPNPERLTAEGDCGDPHERLDLVTVGDIGKMVVDNAIIEDVKSNNTTANNVNHGELHVSLQLPEGNTDNGMTGVSTASSLDIKEGNNDKVVADASAHEGDINDNGSSELKIGNTNSGITGVIAASSDLKEENIDKVVAGDCAHESDINAKDCTELNIGNTDNSIAGDSTVSPEVSAENTDQIIAGDCGNETDLKADGEGADKFLATDSALPCEDDATCMDGANVIVSLDVPRSTKNDTFSKNTSSDAEMPLPVGTCELVDRPSSENDMSEHTSFDGKRPADDRTLEENEMVMPGDEKTEVHYKRRKVLASEKQSSFSGATSTD

SEQ ID NO: 52782 - protein, 118 aa, Zea Mays
MRVVAGIQDGMKQGIINPSDIDVTFEDFPYYVSENTKNVLLSCAFIHLEKKEFIKQFAEISSINQRILLFGPAGSEIYQETLVKALAKHFGARLLVVDSLLLPWGTKLWLSRQSDACF

SEQ ID NO: 52783 - protein, 205 aa, Zea Mays
MVSGRPHGELDSWFKSLMVTSSSERGQAGSGGPAPTLTGWKDLPMELLVRIISTVGDDRMVIVASGVCTGWRDALGWGVTNLSLTWCKLSMNNLMISLAHKFTKLQVLTLRQNKPQLEDSAVEAVANYCHDLRELDLSRSFRLSDRSLYALAHGCPRLTRLNISGCSSFSDTALIYLTCRCKNLKCLNLCGCVKAVTDRALQFWC

SEQ ID NO: 52784 - protein, 252 aa, Zea Mays
MLVYEYVDNGNLDQWLHGDVGEVSPLTWDIRMNIMLATAKGLAYLHEGLEPKVVHRDIKASNILLDQQWNAKVSDFGLAKLLCSERSYVTTRVMGTFGYVAPEYASTGMLNERSDVYSFGVLIMEIITGRCPVDYTRAAGEVQLVEWLKNMVAERKAEEVVDSKMAERPPPKTLKRALLVALRCVDPDANKRPKMGHVIHMLEMDDLQFRDDKRPGAGRDGRRPQGPDRYSSKLGGGREPQQARAPASVQMR

SEQ ID NO: 52785 - protein, 462 aa, Zea Mays
MAAAAADDAAEVERLYELGERLSSANDKSEHAADYEAIIAAVKGQSAKAKQLAAQLIPRFFRSFPALGTRAMSAMFDLVDMEELAIRIQAIRGFPLLGKDTEFVSKIADVLGQLLTSEENVERDAVHKALMSLIRQDVKNSLQPLFKHVEQGSEIREKIICFLRDKVFPLKAELLKPQAEMERFITDLIKKSVQDVTGSEFELFMGFLRSLSIFGDSAPRESFQELIEIIQAQADLNSQFNVSDIDHIERWISCMYMALPIFMRGASASKFLNYFVKQIVPAFEKIPEEKKLDLLKTIASSSPYAAAQDSRQLLPSVVQLLKKYMPGKKVEDINHNYVECLLYTFHHLAHKTPNTTNSLCGYKIVTGQPSDRLGEDFSEHYKDFTERLTGTEETVRAASKRLTQGMADFNKAISSAKTDEEKTKIKGDQQTSTRTMRSYNNILAMTQLDVYLYRSEAMFKKH

SEQ ID NO: 52786 - protein, 77 aa, Zea Mays
MVCYSCRHHELNCQTSLLCSMLICLNQILSMAKCFVGEIRGGKKFEARASEPSRVCFSSSKERAKPFRLASSRAVPN

SEQ ID NO: 52787 - protein, 234 aa, Zea Mays
MALKDESNPQIALLPLHPDVRARFNESAAWEYARSMVGNPYGYHNMIFSWIDTIGDNYPPPLDANLVMAVMSMWTRLQPVYAANMWNEALNKRLGTEDFDLQGIIMEIERRGMSFDQLLTIPEQDEWVYSDGKSTTCVAFILAMYKEAGIFTPFSESIQVTEFTIRDAYMLKIFEDNPARLPGWCNAGTDKLPFCQILGEYRMELPEYNTIEPYAKMNENCPSLPPTYKRPARC

SEQ ID NO: 52788 - protein, 844 aa, Zea Mays
MLSFSRSAILSYLLWCLLFLTLASSNGAVATAKPKAGCGYKLVSLVQLPNGGGLVGYLQVKQRTSTYGPDIPRLRLFVKHETRERVRVQITDADKQRWEVPYNLLPREPAPPVTGGKVTGAPFTGAEYPGEELVFTYGRDPFWFAVHRRSTRQPLFNTSAGALVFKDQYLEVSTALPKNAALYGLGENTQPGGIRLRPNDPYTIYTTDISAINLNTDLYGSHPVYMDLRSLGGRGVAHAVLLLNSNGMDVFYRGTSLTYKVIGGLLDFYFFSGPTPLAIVDQYTSMIGRPAPMPYWAFGFHQCRWGYKNLSVVEGVVEGYRNAQIPLDVIWNDDDHMDAAKDFTLDPVNYPRPKLLAFLDKIHAQGMKYIVLIDPGIAVNSSYGVYQRGMERDIFIKLDGQPYLAQVWPGPVYFPDFLNPNGVSWWIDEVRRFHDLVPVDGLWIDMNEASNFCTGKCTIPKTHQCPIPDTKTPWLCCLDCKNLTNTRWDEPPYKINASGQTARLGFNTIATSATHYNGILEYNAHSLYGFSQAIATHTALQGLQGKRPFILTRSTFVGSGAYAAHWTGDNKGTWENLRYSISTMLNFGIFGMPMVGSDICGFYPSPTEELCNRWIELGAFYPFSRDHANFASPRQELYVWDSVAKSARNALGMRSGAPVKLDAPLNEINVHVYQNTILPMQRGGFVSKDARATPFTLVVAFPFGATQADAEGAVYVDDDERPEMVLAEGQASYVRFHASVRGKAVTVRSEVLMGSYSLHKGLVVEKLSVLGLEGTGKDLAIQVDGTDATAVATSSPYFAAGGNAKLQGEEGVEDSKNGVMVEIGGLALPLGKSFTMTWNMRIEA

SEQ ID NO: 52789 - protein, 290 aa, Zea Mays
MIWDTIIYKPIRAMLGGRVRFVLCGGAPLSGDTQRFMNICLGVPVGQGYGLTETCAGAAFTEWDDTSVGRVGPPLPCCYVKLVSWEEGGYKISDYPMPRGEVVVGGHSITKGYFSNEAKTNEVDERGIRWFYTGDIGQFHPDGCLEIIDRKKDIVKLQHGEYVSLGKVESALATSSYVESIMVYADPFHNYCVALVVPVRQALEKWAQNSGINCEGFEELCQNGQAVKEVQQSLSKAAKAARLERFEVPAKIELLPEPWTPESGLVTAALKLKREQIKAKFKDDLDKLYH

SEQ ID NO: 52790 - protein, 210 aa, Zea Mays
MQPQHPPMQTQMRPQTPPNYPHYPPHQPLNPTPETLPGNVAMQGSYNTAVPSGANRPELPYSYGGAGIPLSQSQPLPQHNMQRHQLPPSSQGSFGPPPSKGSYAGSPQYAPQGNPQGYSTGYAYPPNGPPAVQPQQMPPGGVGMSHPASHMMRGHPYGEMMEKAITMGYPRDQVLNVTQRMAESGQSMDFNTLLDRLNEAGSGAPPPRAW

SEQ ID NO: 52791 - protein, 167 aa, Zea Mays
MENVAANPSAAAAAAGNGVQASGAGGERPEDASKQNLAQVTSSIQKTLGLLHQLNLTVSSFNSASQLPLLQRLNALVAELDTMQKLAEGCNIQVPMEVVNLIDDGKNPDEFTRDVLNSCIAKNQITKGKTDAFKSLRKHLLEELEQAFPEDVEAYREIRATSAAVKA

SEQ ID NO: 52792 - protein, 78 aa, Zea Mays
MLALIDAGQAERDPTPLHRAAKVLINLQSEDGEFPQQEIIGVFNKNCMISYSQYRNIFPIWALGEYRCRVLGAGKPWR

SEQ ID NO: 52793 - protein, 257 aa, Zea Mays
MADVHEPLVRRKRKKVLVDYLVKFRWILVIFVVLPISTLIYFNIFLGDMWSAMKSEKKRQKQHDENVQKVVKRLKQRNPKKDGLVCTARKPWIAVGMRNVDYKRARHFEERRSPLHSRRHPPLPLLFLEMTMTTMKKQQQLLLLLSLMFLVAVTAAAVAADPHPQQQVQVQQQQQAQMRINRATRSLLPQPPPKLDCPSTCSVRCGNNWKNQMCNKMCNVCCNKCSCVPPGTGQDTRHLCPCYDTMLNPHTGKLKCP

SEQ ID NO: 52794 - protein, 122 aa, Zea Mays
MAVGGKDNVLDGLTDRIHMLHDAIASDAAQPKTEDTEHAFENFFSSRVIRRMVIDCPAFAVTLWRKALQGKCKIWAEGHSSKVVASFLESPSTEVKDLAKPELQPLVDAGILKVPDPKVVQK

SEQ ID NO: 52795 - protein, 66 aa, Zea Mays
MPWEVRAEPRLANLGIGSLILLGMQCSRRGWPDLGRKWESRQTHAPPRPASITLRFMVSFTSWRSR

SEQ ID NO: 52796 - protein, 554 aa, Zea Mays
MALTTRGGAGGGDPAKAPSASDPSLGFLTKRDTEVKLPRATRVKNKTPAPIQITAEQILREARERQEPEIRPPKQKITDPHELSDYRLRKRKEFEDVIRRVRWSVSAWVKYARWEEQQRDFARARSVYERALDVAHRDHTLWLKYAEFEMRNRFVNHARNVWDRAVSLLPRVDQLWYKYIHMEELLGAVANARQVFERWMSWRPDTAGWNSYIKFELRYGEVERARAIYERFVAEHPRPDTFIRYAKFEMKLGEVERARRVYERAADLLADDEDAEVLFVAFAEFEERCREVERARAIYKYALDRVPKGRAEELYRKFLAFEKQFGDREGIEDAIVGKRRFQYEDEVRKNPLNYDSWFDYIRLEESVGNKDRIREVYERAIANVPPAEEKRYWQRYIYLWINYALYEELDAQDRERTREVYKECLRLIPHKKFTFAKMWLMAAQFEIRQRNLKAARQILGNAIGMAPKGKIFKKYIEIELYLGNFDRCRTLYEKYIEWSPANCYAWRKYAELEKNLSETDRARSIYELAIAQPALDTPEVLWKLRRTPSAHGPA

SEQ ID NO: 52797 - protein, 160 aa, Zea Mays
MLFNDAQKLSFLDIKDSTGIEDKELRRTLQSLACGKVRVLQKIPKGRDVEDKDDFVFNEDFSAPLYRIKVNAIQMKETVEENTSTTERVFQDRQYQVDAAIVRIMKTRKVLSHTLLITELYQQLKFPVKPADIKKRIESLIDREYLERDRSNPQIYNYLA

SEQ ID NO: 52798 - protein, 213 aa, Zea Mays
MHPSVFFLPTFLEAVRSNTEECFRSIMTEPIPGVYSFAMLQPTFCEMLLEEVENFEKWVHAMKFKIMRPNTMNKYGAVLDDFGLEAMLNQFMEQFIAPISKVLYPEVGGGTLDSHHAFIVEYGKDRDVELGFHVDDSEVTLNVCLGKQFFGGELYFRGIRCENHVNSETQHEEMYDYTHIPGWAVLHHGRHRHGARATSSGLRINLLLWCRRY

SEQ ID NO: 52799 - protein, 77 aa, Zea Mays
MTSRGLVEKDFVQIAEYLHRAVTICLSIQAEHGKILKDFKKGLVQNKDIENLRAEVEKFATSFDMPGFRVSDMKYTD

SEQ ID NO: 52800 - protein, 545 aa, Zea Mays
MREPQMCQVVCKISVGEKEAKLLKEKIEDEYRVNMILDNLPLVVPIQRVDQEGAYFYQHGFHVGAKGKYSGSKDEKYFIHNHLSFTVKYHRDEQRDVSRIVAFEVKPYSVKHEYEGQWNDKKTRLTTCDPHAQRIITSSESPQEVEVGKDIIFTYDVDFKESDIKWASRWDSYLLMTDDQIHWFSIVNSLMIVLFLSGMVAMIMLRTLYRDISKYNQLETQEEAQEETGWKLVHGDVFRPPSNSDWLCVYVGTGVQFFGMLLVTMVFAVLGFLSPSNRGGLMTAMLLLWVFMGLLAGYSSSRLYKLFKGSEWKNIALRTAFTFPGSVFAIFFFLNALIWGQKSSGAVPFTTMFALVLLWFGISVPLVFVGSFLGFKKPTIEDPVKTNKIPRQIPEQAWYMNPIFSILIGGILPFGAVFIELFFILTSIWLHQFYYIFGFLFLVFLILIVTCAEISIVLCYFQLCSEDYLWWWRSYLTSGSSALYLFLYATFYFFTKLEITKFVSAVMYFGYMLIASYAFFALTGTIGFYACFLFTRLIYSSVKIE

SEQ ID NO: 52801 - protein, 53 aa, Zea Mays
MGVVNLNAFWPCSFDPKTIGIEVDWKRLKRILTCRGFDPLNPYGSAQNEQSLS

SEQ ID NO: 52802 - protein, 584 aa, Zea Mays
MSAKSREGALLGFECLCEKLGKLFEPYVIQMLPFLLVSFSDQVLAVREAAECAARAMMSQLTGPGVKLVLPSLLKGLEDKAWRTKQSSVQLLGAMAYCAPQQLSQCLPKIVPKLTEVLTDTHPKVQASGQTALQEVGSVIKNPEISALVPILLSALMDPNAHTKHSLDILLQTTFINSIDAPSLALLVPIVHRGLRERGVETKKKAAQIVGNMSSLVTEPKDMIPYISLLLPEVKKVLVDPIPEVRAVAARALGSLISGMGEEIFPDLVPWLLDTLKSDNSNVERSGAAQGLSEVLAALGQDYFDHILPDIIRNCSHQKASVRDGHLTLFRYLPRSLGGVFQNYLQAVLPAILDGLADENESVRDAALSAGHVFVEHYATTSLPLLLPAIEDGIFSDNWRIRQSSVELLGDLLFKVAGTSGKAILEGGSDDEGASTEAQGRAIIEVLGREKRNEVLAAIYMVRSDVSLTVRQAALHVWKTIVANTPRTLKEIMPVLMDTLISSLASSSSERRQVAGRSLGELVRKLGERVLPSIIPILSQGLKDPSASRRQGVCIGLSEVMGSAGKHQLLSFMDELIPTIRTAL

SEQ ID NO: 52803 - protein, 320 aa, Zea Mays
MPQMSIGNGGSSPSVQYGISSLPVAEKPLPSRSLSMAVPRHLSQRRIKLLPRKYNPISDGKVPFFADDEESPATPKADAFFIPRENPRNLVIRPIEQWSSRRETGRQYTAKNVTDSNKYEDASIESERGKSAMSPSSRPPAVENDKQHEARAMAQHANGNGTSVERLLPKLPRADYFTEPSIEELAAKERAEPGYCGRVRDFVVGRHDYGSIKFFGETDVRCLDLESIVEFNDREVIVYKDDSKKPPVGEGLNKAAEVTLLNIKCVNKKTGEPCQGARVERYREMLVKKAEEQGAEFVSFDAVKGEWKFRVKHFSAYGLW

SEQ ID NO: 52804 - protein, 1336 aa, Zea Mays
MRPLPIARGRFLPDRCGVEAAAAASSSSASAAATVASISVACSTAFTWRNTSYTYQQHKYRKTMEQRLHGGPQSAARRERGGEVFAYGPETRAYLETAQHLREDETLAPFQFSLPNLPQISKSILLRRRSNFPLPGNHPVPSSLPRFRFCARLGRAAEYQAGDLYLAGAGRGGDARNPSLAAAFSNTEMAMEMSPRQSPPRTPRRAAKPRLFIKEMVLRNFKSYAGEQRIGPFHKSFSAVVGPNGSGKSNVIDAMLFVFGKRAKQMRLNKVSELIHNSSNHQNLDSAGVSVHFQEIIDMDDGNYSAVEGSDFVISRVAFRDNTSKYYINERGSNFTEVTKLLKGKGVDLDNNRFLILQGEVEQISLMKPKAQGPHDEGFLEYLEDIIGTNQYVEKIEEAYKQLELLNEKRTASVQMLKLAEKERDSLESAKNEAETYMLKELLLLKWQEKATKLASDDAISRVNQCQENVADLEKNLAAEREKIHQNSQTLKEMEAIYSKHVKRQEDLENNMKSCKDQFKEFERKDVKYREDLKHLKQNIKKLDDKAEKDTSKRDEKTKEMEESSNLIPQLEAEIPKLQKRLNEEEKVLEQIKASSREETERFRAELTQVRTELEPWENQIIEHKGRLDVASAEKKLMKQKHDGAQAELTDAQNQMESIKEKVKTKDSYIVGLQEKIEKHLNEASEARKIEQECQKQEDSLIPLEQAARQKVAEMKTTRDSEKNQSTALKAILQAKESNEIQGIYGRLGDLGAIDAKYDVAISTSASSGLNYIVVETINSAQACIELLRRRNREETVTCLILEKQTHLLHKIKEKVKTPEGVPRLFDLVKVKDEKLKLAFFHVLGNTVVANDLDQASRIAYTAAKEFRRVVTLGGELFEKSGTMSGGGKRVQRGMMGTAIRESFSEEAIKNAENELTKLVDELNKLREKMNNAKKQYRSMEDAKSRLEMELAKAKKEVESMNAQYIYNEKRLDSLKTASQPKADELRRMQELDGIISSEQAELERLTKCSSKLKDQASELQQKVENAGGKKLKDQKTKVGNIQSELDKTSSEINRHKVNVTSGEKLVKRLTKGIEESKKDREKLSAETEKMMSMFKEIEKKAFVVQEEYKKTPEMIDNHKVELDKTKEEYTKLKKAMDELRATEVDAEYKLQDTKKLAKEWEMKVKTFKKRLDEIQINVVKHMDQIQKDAVDPDKLKATLGDEQLNDTYDMKRAMEMVALLEAQIKDLNPNLDSIAEYRTKACLYGERVDELNATTQERDDLKKLYDGLRKRRLDEFMAGFNIISLKLKEMYQMITLGGDAELELVDSLDPFSEGVVFSVRPPKEKLEKYCQFIWW

SEQ ID NO: 52805 - protein, 473 aa, Zea Mays
MRGWGLLVLSLHVLSCLVSGVASGRTSSYVRTEFPSTDIPLESEWFAIPKGYNAPQQVHITQGDYDGKAVIVSWVTPEEPGPSEVFYGKEKLYDQKAEGTTTNYTFYDYKSGYIHHCLVDGLEYNTKYYYKIGSGNSAREFWFETPPAIDPDASYTFGIIGDLGQTFNSLSTLQHYEKTGGQTVLFVGDLSYADRYEHNDGIRWDSWGRFVEHSTAYQPWIWNTGNHEIEYRPDLGETSVFKPYLHRYMTPYLASKSSSPMWYAVRRASAHIIVLSSYSPFVKYTPQWLWLKNEFKRVDREKTPWLIVLMHSPMYNSNEAHYMEGESMRAAFEKWFVKYKVDLVFAGHVHAYERSYRISNVNYNITSGNRYPVPDKSAPVYITVGDGGNQEGLASRFYNPQPDYSAFREASYGHSVLQLKNRTHAIYQWNRNDDGNPVPADTVMFHNQYCTRRRRLKKNHLHLEDLEDLISLL

SEQ ID NO: 52806 - protein, 460 aa, Zea Mays
MEDVRASYTFGRELGRGQFGVTYLATHKPTGRRYACKSIATRKLAHSDDVDDVRREVQIMHHLTGHRSIVELRGAYEDRHSVNLVMELCEGGELFDRIIARGHYSERAAAALCREIVSVVHSCHSMGVMHRDLKPENFLFLNKREDSPLKATDFGLSVFFKPGEQFRDLVGSAYYVAPEVLKRRYGAEADIWSAGVILYILLSGVPPFWAENEDGIFDAVLRGHIDFASDPWPSISNSAKDLVKKMLRQDPKERLTAAEILNHPWIREDGEAPDKPLDITVISRMKQFRAMNKLKKVALKVVAENLSEEEIVGLKEMFKSLDTDNSGTITLEELRAGLPKLGTKISESEIRQLMEAADVDGNGTIDYVEFISATMHMNRLEKEDHIFKAFEYFDKDHSGHITVDELEEALKKYDMGDEATVKEIIAEVDTDHDGRINYQEFVAMMKNNSPEIVPNRRRMF

SEQ ID NO: 52807 - protein, 52 aa, Zea Mays
MSAIKEHPVAAFHLTRLELQPFNVVLVLNVVRFNYARWETERNRADFTRIAS

SEQ ID NO: 52808 - protein, 411 aa, Zea Mays
MGLLRRILDTNKRVQEAACSAFATLEEEASEELVPHLEVILQHLMCAYGKYQRRNLRILYDALGTLADAVGAELNQAKYLDIFMPPLITKWQQLSNSDKDLFPLLECFTSIAQALGPGFAQFAEPVFQRCINLIQSQQLAKIDPTAAGAVYDREFIVCSLDLLSGLAEGLGAGIESLVAQSSLRDLLLQCCMDEAADVRQSALALLGDLSRVCPIHLHPRLQEFLTVAAKQLNPQSVKDAVSVANNACWAIGELAIKIGKEIAPVVITVVSCLITILKSPEGLNKSLVENSAITLGRLSWVCPDIVAPHMEHFMQAWCSALCTIRDDFEKEDAFHGLCAMVAANPTGAAGSLAYICQACASWTEIKSEGLHNEVCQILNGYKQLLGNNGGWEQCMAALKPDVVQKLARYGV

SEQ ID NO: 52809 - protein, 211 aa, Zea Mays
MDPDHTAYNVHLYLGLCKTLVRLGRSKEAISTCTEALIIDSELVDALTQRGEAKLLSEDWEGAVQDLKEAAQKSPQDMGIREALMRAEKQLKLSKRKDWYKILGVSKTASAAEIKRAYKKLALQWHPDKNVDNREKAENMFREIAAAYEVLGDEDKRVRYDRGEDVEEMNMGGGGGFNPFGGGGQQYTFQYDGGFPGGGFPGGGGFQFNFG

SEQ ID NO: 52810 - protein, 94 aa, Zea Mays
MFATFETVVATAMLVKRFDFQMAPGAPPVDMTTGATIHTTEGLKMTVTRRTRPPVIPNLEMKIITDSQESTLSAPSMVVSAASVASGEDQGGIS

SEQ ID NO: 52811 - protein, 509 aa, Zea Mays
MLVCNEQKRVDFEERKKLDQQRAKIKSQMAQYEDELKRKRLQAEHEAQRLRNQELVKMQEESGIRLEQIRRATEEQIQEQRRQTERHRADLEQATISKKAMAEAEGRILVTRQTEDVKRRLILEEINADREKWIQVINTTFEHIGGGLRTILTDQNKLVVAVGGVTALAAGIYTTREGARVVWGYVDRILGQPSLIRESSRGKYPWSGFLSRATSTLTSKLKNGSNLGKDRNGFGDVILNPSLQKRVKQLANATANTKLHQAPFRNMLFYGPPGTGKTMAARELARNSGLDYALMTGGDVAPLGSQAVTKIHQLFDWAKKSNRGLLLFIDEADAFLCERNKTYMSEAQRSALNALLFRTGDQSKDIVLALATNRPGDLDSAVADRIDEVLEFPLPGEDERFKLLKLYLDKYIIKAGDKHEKSWLQFFRRQPQKIEVKGITDDLIREAASRTQGFSGREIAKMMASVQAAVYGSKDCELTPGLFREVVDYKVAEHKQRRRLAGEEPKQDA

SEQ ID NO: 52812 - protein, 83 aa, Zea Mays
MFMIFFLFIWLICSRIDGLNFGAKTSRASPFTTLMIPQLVMVLFRDDDASSLLRMRPSMLAEIKLRAYLGVKYFYSFLIMLCF

SEQ ID NO: 52813 - protein, 147 aa, Zea Mays
MGAMISNLAFVVRTIFSKKGMKGKSVSGMNYYACLSIMSLVILLPFAVAMEGPKLWAAGWQQAVAEIGPNFVWWVAAQSVFYHLYNQVSYMSLDEISPLTFSIGNTMKRISVIVASIIIFQTPVQPINALGAAIAILGTFIYSQAKQ

SEQ ID NO: 52814 - protein, 549 aa, Zea Mays
MHVACLSTHCCPQKEPPSTLLWTLFLISQHYDRRGQYDIALNKIDEAISHTPTVIDLYSVKGKILQHAGNFTAAAALADEARSMDLADRYLNSECVMQMLQADQVGLAEKTAVLFTKDGDQHNNLHDMQCMWYELASGESYYRQGDLGRALKNFLAVEKHYADMTEDQFDFHSYCLRKMTLRAYVSMLKFQDRLHAHEYFHKAAAGAIRCYMKLHDSPTKSSKEENDEISKLPPAQRKKLRQKQKKAEARAKREAEEKQEDETASSNSSKSGKKQHARPVDLDPHGEKLIQIEDPLAEATKYLKLLQNNSSDSLETHILSFELSMRKQKVLLAFQAVKQLIKLDEDNPDSHRCLIKFFHKINSLPGPVTDSEKLIWNVLEAERPDMRQLHGKSLVEVNRSFLEKHNASLMHRAAGAEMMYLLEPNKKMEAINLIEDSTNITSSGHSLLGPVKTWQIQDCIDVHKLLETVFGDQNVANRWKARCAEYFPYSTYFEGIKSAISTYAIDHSLESPPENGIASNPHLKSKDGEQGSLNGTLHIVDDLSSLSIR

SEQ ID NO: 52815 - protein, 408 aa, Zea Mays
MADGEDIQPLVCDNGTGMVKAGFAGDDAPRAVFPSIVGRPRHTGVMVGMGQKDAYVGDEAQSKRGILTLKYPIEHGIVSNWDDMEKIWHHTFYNELRVAPEEHPVLLTEAPLNPKANREKMTQIMFETFNVPAMYVAIQAVLSLYASGRTTGIVLDSGDGVSHTVPIYEGYALPHAILRLDLAGRDLTDSLMKILTERGYSFTTSAEREIVRDIKEKLAYIALDYEQELETAKNSSSVEKSYELPDGQVITIGAERFRCPEVLFQPSMIGMEAAGIHETTYNSIMKCDVDIRKDLYGNIVLSGGSTMFPGIADRMSKEITSLAPSSMKIKVVAPPERKYSVWIGGSILASLSTFQQMWISKEEYDESGPAIVHRKWSILASLSTFQQMWISKEEYDESGPAIVHRKCF

SEQ ID NO: 52816 - protein, 146 aa, Zea Mays
MDAGAKVVKKPVSRSVKAGLQFPVGRIGRYLKQGRYSQRVGTGAPVYLAAVLEYLAAELLELAGNAARDNKKNRIIPRHVLLAIRNDEELGKLLAGVTIAHGGVLPNINPVLLPKKTAVAAAKEGKEKKSPKKAAAAKSPKKVAAS

SEQ ID NO: 52817 - protein, 193 aa, Zea Mays
MLGGKKVTVVFVLGGPGSGKGTQCANIVEHFGFTHLSAGDLLRAEIKSGSENGTMIENMIKEGKIVPSEVTIKLLQEAMIKSENDKFLIDGFPRNEENRAAFENTKISPAFVLFFDCSEEDMEKRLLGRNQGRVDDNIETIKKRFKTFVDSTLPVIEHYNSKDKVKKIDAAKPIPEVFEDVKAIFAPYSLKAE

SEQ ID NO: 52818 - protein, 269 aa, Zea Mays
MDELCLNYLDPAEIPWGNFGAEYVVESSGVFTTTDKASAHLKGGAKKVVISAPSADAPMFVVGVNENSYDSKMNVVSNASCTTNCLAPLAKVVHEEFGIVEGLMTTVHATTATQKTVDGPSMKDWRGGRGAGQNIIPSSTGAAKAVGKVLPELNGKLTGMAFRVPTPNVSVVDLTCRIEKNASYDDVKAAIKAASEGALKGILGYTDEDVVSNDFVGDSRSSIFDAKAGIGLSSSFMKLVSWYDNEWGYSNRVLDLIAHMALVSAAAKL

SEQ ID NO: 52819 - protein, 393 aa, Zea Mays
MGKEKSHINIVVIGHVDSGKSTTTGHLIYKLGGIDKRVIERFEKEAAEMNKRSFKYAWVLDKLKAERERGITIDIALWKFETTKYYCTVIDAPGHRDFIKNMITGTSQADCAVLIIDSTTGGFEAGISKDGQTREHALLAFTLGVKQMICCCNKMDATTPKYSKARYEEIVKEVSSYLKKVGYNPDKIAFVPISGFEGDNMIERSTNLDWYKGPTLLEALDQITEPKRPSDKPLRLPLQDVYKIGGIGTVPVGRVETGVIKPGMVVTFGPTGLTTEVKSVEMHHEALQEALPGDNVGFNVKNVAVKDLKRGFVASNSKDDPAKEAASFTSQVIIMNHPGQIGNGYAPVLDCHTSHIAVKFAELITKIDRRSGKELEKEPKFLKNGDAGLLSVT

SEQ ID NO: 52820 - protein, 109 aa, Zea Mays
MSEASWDGCIVCPSTDSTFDLRTGEIKEWYPKNPVLRALTPALRKLFTYRVKTDEENIYISFSGADGAGSAEIIFSGKAQPGVTASDVNVEERSEKLVSLNLCTQLISP

SEQ ID NO: 52821 - protein, 54 aa, Zea Mays
MLIIISPDYKSRWIAGTICFFSLFDVFSLAVPLRTTIIRLAFVIIHSSTFARVL

SEQ ID NO: 52822 - protein, 253 aa, Zea Mays
MAARKEELLVRSRGRVAFAWTLVALCCGSHASHILHSLGIHVGHGTFLDLLHNPYVKCGIATTALFGPGRDILFDGFRAFKQGSPNMNSLVGFGSAAAFTISAVSLLNPDWEWNSTFFDEPVMLLGFVLLGRSLEESARLKASSDMNELISLLSPQSRLIVTSSSDNPSADSSLNSDAITVEVPVDDVRVGDSILVLPGETIPVDGNVIEGSSFVDESMLTGESLPVAKETGLPVFSGTVNWESCVSFHEKKK

SEQ ID NO: 52823 - protein, 167 aa, Zea Mays
MLSKEYERVRAGKPPFMLDMSRYGLEPPPMNKRNDVGAWRQALRNAQSQLQHQIIRIENLELMLKYGVDVWKLQNRQMESVLSRMQKMAVEYNERIENVNRERKFHQQNTGGQLHALKMEWQELCQKNIAIQAACVDLQNHIDQLKLEAKELGMPMDDNSGTDPQAS

SEQ ID NO: 52824 - protein, 207 aa, Zea Mays
MAHRVLLLLSLASAAAVAAAVDAEDPLIRQVVPGGDDNDLELNAESHFLSFVQRFGKSYKDADEHAYRLSVFKANLRRARRHQLLDPSAEHGVTKFSDLTPAEFRRTYLGLRKSRRALLRELGESAHEAPVLPTDGLPDDFDWRDHGAVGPVKNQGSCGSCWSFSASGALEGAHYLATGKLEVLSEQQFVDCDHETIATFISKMQFH

SEQ ID NO: 52825 - protein, 293 aa, Zea Mays
MFVPWRILAVLGILPCSILIPGLFFVPESPRWLAKMGKMEDFEYSLQVLRGFQTDITAEVNEIKRSLASSRRRTTIRFADIKQKRYSVPLVVGIGLLVLQQLSGVNGILFYAASIFKAAGITNSNLATFGLGAVQVIATGVTTWLTDKAGRRLLLIISTTGMVITLVIVSVSFFVKDNIAAGSHLYSVMSMLSLAGLVAFVIAFSLGLGAIPWIIMSEILPVNIKSLAGSVATLANWLTAWAITMTASLMLNWSSGGTFAIYAVVSTMALIFVCLWVPETKGRTLEEIAFSFR

SEQ ID NO: 52826 - protein, 153 aa, Zea Mays
MVKAVAVLGSSDGVKGTIFFTQEGDGPTTVTGSVSGLKPGLHGFHVHALGDTTNGCMSTGPHYNPASKEHGAPEDENRHAGDLGNVTAGADGVANINVTDSQIPLTGPNSIIGRAVVVHADPDDLGKGTRAQEEHRKRWRPCCLWDHRTPGLN

SEQ ID NO: 52827 - protein, 135 aa, Zea Mays
MVAISAHLIATLPSLPTLRPCPRRLQPSAFATSEAPHRAPAPGVALRGCSRRCSPSVRRFHGFQNAISFGKEHNRQALFASGRGSPSSSDDGSSSPDGPPVLTILAGVTVFLLVLWVVGSVVTWIVGLVFGAAKS

SEQ ID NO: 52828 - protein, 246 aa, Zea Mays
MGAGDYEYAIAFQERVKIPDDKMVYYEERAEMYVGDDVSPDFYGWVFPKCDHVAVGTGTVTHKADIKKFQAATRLRAKDKIEGGKIIRVEAHPIPEHPRPKRVSGRVTLVGDAAGYVTKCSGEGIYFAAKSGRMCAEAIVAGSANGTRMVEESDLRKYLAEFDRLYWPTYKVLDILQKVFYRSNAAREAFVEMCADDYVQKMTFDSYLYKRVVPGNPLDDIKLAVNTIGSLVRATALRREMEKVTL

SEQ ID NO: 52829 - protein, 98 aa, Zea Mays
MLIALCCDCPYVYIVFFHQFVTYGHILVGCQLYCHSDVLHTKYLCCLFVVDGWQLFCLGFETLDWISLPAQVFVWLCIPPSLFIDKQHAMLVTCQENI

SEQ ID NO: 52830 - protein, 216 aa, Zea Mays
MSSWFVWVLIVLFCIGGIEGMHACLVTLLARIFKDCGQKTVQLPVLGEVLILSVGIVPFCAVFAILWAVYRHASFAWIGQDVLGICLMITVLQMARLPNIKVASALLSAAFVYDIFWVFISPLIFHESVMIAVARGDNTGESIPMLLRIPRFFDPWGGYDMIGFGDIIFPGLLVGFSYRFDRANRKGVLSGYFLWLIVGYAVDRWVDGSRIQDFAP

SEQ ID NO: 52831 - protein, 199 aa, Zea Mays
MLFLSKEECDHLISLAKPHMKKSTVVDSATGGSKDSRVRTSSGMFLRRGQDKIIRTIEKRIADYTFIPVEQGEGLQVLHYEVGQKYEPHFDYFHDDYNTKNGGQRIATLLMYLSDVEDGGETVFPSSTTNSSSSPFYNELSECAKGGLSVKPKMGDALLFWSMKPDGSLDPTSLHGGCPVIKGNKWSSTKWMRVHEYKV

SEQ ID NO: 52832 - protein, 235 aa, Zea Mays
MWSHSKDLLEIEPLELRFPFETKKQISCSMQLTNRTDDYIGFKVKTTSPKKYCVRPNSGIVPPRSTSDVIVTMQAQKEAPPDMQCKDKFLVQSVVVAEGTLVKDITGDMLKVVYIPPPKPPSPVHEESEEGSSPRPSLSDGINLNYQETTRESDESLLFSAVKTHIDQKDYTSETSALISKLTEERNSAIQQNNKLREELDLTRREANKQNGGFSFVVVVAIALLGMLLGYIMKR

SEQ ID NO: 52833 - protein, 95 aa, Zea Mays
MYMVSKKLKKKYNITDERASLYDAANTWIDALNGRDFLGGSKPNLADLAVFGVLRPIRYLRAGKDMVENTEIGDWYRRMEDAVGEPSRIQDAEGN

SEQ ID NO: 52834 - protein, 60 aa, Zea Mays
MAQRSARQQHLCVSKQSGFGAGKYDSLSPPLFGKTCVVVLNLFFGAHIGSTFVVVDPWTP

SEQ ID NO: 52835 - protein, 644 aa, Zea Mays
MASQGEPSSSDPKGKKDYSTAILERKKSPNRLVVDEATNDDNSVVALHPDTMERLQLFRGDTVLLKGKKRKDTICIVLADETCEEPKVRMNKVVRKNLRVRLSDVVSVHQCPDVKYGKRVHILPIDDTIEGITGNLFDAFLKPYFLEAYRPLRKGDLFLVRGGMRSVEFKVIETDPAEYCIVAPDTEIFCEGEPIKREDEERLDEVGYDDVGGVRKQMAQIRELVELPLRHPQLFKSIGVKPPKGILLYGPPGSGKTLIARAVANETGAFFFLINGPEIMSKLAGESESNLRKAFEEAEKNAPSIIFIDEIDSIAPKREKTHGEVERRIVSQLLTLMDGLKSRAHVIVMGATNRPNSIDPALRRFGRFDREIDIGVPDEVGRLEVLRIHTKNMKLAEDVDLEIIAKDTHGYVGADLAALCTEAALQCIREKMDIIDLEDETIDAEILNSMAVSNDHFKTALGTSNPSALRETVVEVPNVSWEDIGGLENVKRELQETVQYPVEHPEKFEKFGMSPSKGVLFYGPPGCGKTLLAKAIANECQANFISVKGPELLTMWFGESEANVREIFDKARQSAPCVLFFDELDSIATQRGSSVGDAGGAADRVLNQLLTEMDGMNAKKTVFIIGFRSSKPVSGSLLWPRMLT

SEQ ID NO: 52836 - protein, 613 aa, Zea Mays
MVTSPCGRRPSPRTRRWRRWRGWWRRPRTAGPGRSGSSTRAPSTTPLVAVVVLAAGVVLVPVLLGAPDLEHWFRLSLVLLVSACPCALVLSTPVATFCALLRAARMGLLVKGGNVLESLGEVRVAAFDKTGTITRGEFSIKDFLVVRDKVQMSQLLYWVSSIESKSSHPMAAALVEYAQSKSIQPKPEDVTETCIYHGEGIYGAINGKHIYIGNERIMARSSCRQQEAGHRETDGLKGVSVGLVICDGDLVGKFSLSDTCRTGAAEAILQLRSMGIKSVMLTGDSEAAAKHAQEQLGGVLEELHSGLLPEDKVRLIRGLQARHGATLMVGDGMNDAPALAAADVGVSMGLSGSAAAIETSHATLMSGDVLRVPKAVRLGRRTRRTIAVNVASSVGAKAAVLALAVAWRPVLWVAVLADVGTCLLVVLHSMLLLRDAARARRRCGGASKACCATACKAPKTACCATASKACGATTVKPVATRPQPAGAGKKADRPGGDKHGNGKDDCHRCCHKQSKLPEDAVVIAIPVRAVEHRKDAAAHEKAEGNAAGGCCGGAPASAACCAEAHGGEDEVCIVISARSPCCSTARSRSASPKDAMCCGSGGKDGGAISALVC

SEQ ID NO: 52837 - protein, 66 aa, Zea Mays
MGKLISTWHLCIGVLLGFRFQVCCLVHALNTARWHLNYRSTCTKLNAHRLLGDYASTIYNGNSSAR

SEQ ID NO: 52838 - protein, 52 aa, Zea Mays
MGGGQRSHVLLVEDTWGTYSKGRGLRRLPTSDTVLTASRLSSIRPPRKPDGR

SEQ ID NO: 52839 - protein, 305 aa, Zea Mays
MSCLDYLEAVPWVGEEEENVVSSVRNLQSESYGVSPVLKRVAPSDRTTPPNDTFSHIIELVLRSSEDRGRREMKSLVQKLLKESSTGCMSGSSDLCSAVLYRSCRNCLDSLLILFQQATDSDFAEQALNTKEPVFRQVALEADNLLWLAEILADRNAADEFAVIWASQRELAGLHSRLPVKSRHLVSCVTARLFVGIGKGEMLPSKDTRRLLLDVWLQPLMDDYNWLQHGCRSFDRKVVEEGVGRTILTLPLEDQQTILLSWLGSFLKVGDSCPNLQKAFEVWWRRTFVRPYAEQQGNRSQSGRS

SEQ ID NO: 52840 - protein, 317 aa, Zea Mays
MMKGSGRAFCAGGDVVRLHELISEGKLEECKDFFKTLYMFIYFLGTYLKPHVAILDGITMGGGGGVSIPGTFRVATDRTVFATPEVHIGFHPDAAASFYLSHLTGHVGEYVALTGEKLNGTDMIALGLATHYFMSGHLDLIDERLAKLVTDDPSVIDSSLAQYGDMVYPDKKSIVHRLEVIDKCFSHDTVEEIVDALESEAASSNEEWCILALKRLKEASPLALKVSLRSIREGRYQTLDECLVREYRMSMNGISKQFSHEFCEGVRARLVDKDFTPKWDPPALEYVTNDMVDAYFAPLGDSEPELKLPIESREAFV

SEQ ID NO: 52841 - protein, 511 aa, Zea Mays
MRKRDLGILLLAAFAIFFSLHHEGDFSFRESWYHLTDEDFPIKYEADRLPPPLVADLNGDGKPEVLLPTHDAKIQVLQPPHARHLNDDSAFQEARVMADISLLPDNVRLASGRRPIAMAVGNVDRSYRPGEVRKQVLVVVTSGWSVMCFDHNLKKLWEHNLQDDFPHAAHHREVAISITNYTLKHGDAGLVIVGGRMEMQHHSADLFDEFMIPEHNMDDRRRSASEKQGSEAGNADLRHFALYAFAGRSGDRRWSRKNENIQSQPSDASVMLPQHNYKLDVHALNSHQPGQFECREFRESILGIMPHHWDRREDTTLQLAHFRKHKRKQVKRTPGKAVINSVNKPIEHNPPGKDASNRIARALGKAADMANSNKARKAQRMQYVPTITNHTQVWWVPNVVVVHEKEGIEVVHLASGRTICKLHLNEGGLHADINGDGVLDHVQVVGGNGIKEQTVVSGSMEVLKPCWAVATSGVPVREQLFNVSICHYNHFNLFHHGDFSRSFGRTLIQLV

SEQ ID NO: 52842 - protein, 61 aa, Zea Mays
MRVLMTEDSNSDESGSFLLDDNSSIPFSVDDILSDHLLICCIFFGSFLPHVPFFSYLILLS

SEQ ID NO: 52843 - protein, 513 aa, Zea Mays
MARAALRLGDRALALLVLVSVALLPLVSSDDGHKHCEGVVRGWADSSTGRVKDGDKLSLKDLLFFLHIPRTGGRTYFHCFLKKLYTNAQECPRSYDKLRFDPSHPDCKLVVSHDDYSLTSKLPRERTSVVTILRNPVDRVFSTYEFSVEVAARFLVHPNLTSAKLMTTRVLKKSRAVSTLDIWPWKYLVPWMREDLFSRRDARGIDKVHSSKKVNAYDVEDMVMPLHQYINDPVAHEIIHNGATFQITGLTNNSYFDGAHEVRHCARKHPDLGRIVLEVAKNRLDQMLYVGLTEDHEESARLFAHMVGAQVLLQSGTLSLDLKEDLHSETDSHPSMVEPGDEEASEHLNNTHGWQNNEALNSTSDEQGKGNMTVGKLMEAYETCIAKLRKSQSSRRKISLKKVEEANFSKEARKLVPEAILKQIISLNSLDMELYDHAKKIFTQEHLMLKAQQSMAGQHRQLAEQEEGWIGTMCSDGTCSPWVVVLLGLGITTILVLATLAVTTRKRTSKLKV

SEQ ID NO: 52844 - protein, 132 aa, Zea Mays
MYYAAERPVNKDSLLGRFIDGTDAYRDARFKLIPSIVEGYWMVKRAVGTKACLLGKAVTCNYLRQDNFLEIDVDIGSSSVARSIIGLVLGYVTSIVVDLAILIEAKEEKELPEYILGTVRLNRVNPDSAVSI

SEQ ID NO: 52845 - protein, 472 aa, Zea Mays
MLDGVFAFVLYDTRDRTYVAARDAIGVNPLYIGWGSDGSVWIASEMKALNEDCVRFEIFPPGHLYSSAGGGFRRWYTPHWFQEQVPRMPYQPLVLREAFEKAVIKRLMTDVPFGVLLSGGLDSSLVASVTKRHLVETEAAEKFGTELHSFVVGLEGSPDLKAAREVADYLGTIHHEFHFTVQDGIDAIEEVIYHDETYDVTTIRASTPMFLMARKIKSLGVKMVLSGEGSDELLGGYLYFHFAPNKEEFHRETCRKVKALHQYDCLRANKATSAWGLEVRVPFLDKEFINVAMGMDPEWKMYDKNLGRIEKWVMRKAFDDDEHPYLPKHILYRQKEQFSDGVGYNWIDGLKSFTEQQVTDEMMNNAAQMFPYNTPVNKEAYYYRMIFERLFPQDSARETVPWGPSIACSTPAAIEWVEQWKASNDPSGRFISSHDSAATDHTGGKPAVANGGGHGAANGTVNGKDVAVAIAV

SEQ ID NO: 52846 - protein, 302 aa, Zea Mays
MTTRNEDLTWQMRAIRVLPMFILPAVSSVIYSTVVNFTRMFEQKDQKTLEKLRAERKAKIDELKERTNYYLTQQLIQKYDLDPAAKAAAASVLASKLGEETGLKVHVGEEPKLDAAVARSNDVEIVPSDGLRNRKQPSARGSRTGSPTSHTPAQGTETNLPPAPASAGLETAPAPVVVEHHQGSGASDGGGWIAKIAALLVGEDPSQSYALICGSCHMHNGLARKEDYPHVTYYCPHCHALNTSKQSMGQYSGSNSGRSTPVVLADGLSTSSSVQETELSNLTTLQELPEEGKTDKQQVEAS

SEQ ID NO: 52847 - protein, 129 aa, Zea Mays
MRLSWALVHSRQTDDVNRGISMLQASLDNSASPLQTREKLYLLAVGFYRIGDYSKSRQLADRCLEIQADWRQAISLKKAIEDKIAKGETTWSDWNRNCDNCGRTSGWWNCSCCCQEEVRPIYWIGSSLN

SEQ ID NO: 52848 - protein, 113 aa, Zea Mays
MKPSAEIRPRLPGPPNGSTAEQFRHVSSASRGAGAQKTSSSSKASPHDSSGKMLFSRLNIGPKHFPVLPTLAQPNRISASSQCRRFSYSYAPFPSVTARRKGVFREDIAQLMV

SEQ ID NO: 52849 - protein, 409 aa, Zea Mays
MARVDCASKVNVDLCNKFSVDHYPYLVWGPPTKFNLAQWKPKQENSELELIDDGRTADRLLKWINKKMGSSFNLDDKKYENESMHPKNTSDPEQIVRAIYDVEEATSHALQIILEHKMIKPDTRDSLISFLQILVAHHPSKRCRRGSAELLIDFDDHWHTNLSLSLEDSTTLLKGAGEKVCGNGVPRGYWIFCRGSKKETRGFSCGLWVLLHSLTVRIGDGESQTTFTSICDFIHNFFICEECRTHFYEMCSSVSVPFKSARDLALWLWTAHNKVNERLMKEEKELDNADPSFPKIIWPPKQLCPLCYRSSSRTADGAMQVEWNEDEVFNFLVNYYGKMLVSSYRETSMQSFQVASISDDSSASSAATVPIGAALGIALASCTFGALACFWRTQQKNRKYYHLRSLKKI

SEQ ID NO: 52850 - protein, 117 aa, Zea Mays
MLSNVVEVQGDKLRRRGAWENWLLPKQNYSAGSSSGSLPPVTSNIDSLTSQFRFVGLEGATYHATMPVMHGEALLTRSATSVSLGYHASTMGGLPSNGSEPLLGPKSARNLLRSDTF

SEQ ID NO: 52851 - protein, 987 aa, Zea Mays
MVSPPAFAAAVAVVAVLLCASAAANPAGGPHMADLSVLLPPRMTKPVEYRLIGGDGCFSWSWDHHDLISVKPEYNDSSRCSTSARLASIAPYSGRRETSVYATDIISGITIHCKVFVDKISRISIFHHAVKIDLDEIATLRIHAFDDEENVFSTLVGLQFLWHLTPRLVDNSSHHLIRIPLKETHLSDCGGFCGDMNIRFELEDKNLGSDFSVVKGIEIGQEVVKAQLFEPQFEHVIDTITLTVAESMSLEPSSPVLVTVGVLVKFKLKVFRQKVAQVVKLPSQYHRWYATNSSVAQVDSLGILHALSLGFTKVVVEDTRVSGHEQVSSLHVVIPRTLFLYLVPIMDDSAHLHGITNIPSSKVWYVYPGRKYMVLAKAFAEGFDAREIYITEENELKLESSTMEFWNLSQVPDSSTSSYEVQTSRLLSPIFQGQGHLDASLTYLTGASGPTKVLKLVQEVNVCSKVKAFWDEGLENSNVIYLPWVPGVHQEVEMMAIGGCGKTLDDYKLFSSDEDVASVSDSRIVRAKKPGQAVIRVVSAFDFLNFDEVIVEVSIPSVLSILPIFPVEVPVGTRLHSAAVLKTSAGHPFSQCTHFNAFIRWSLLSEDEAFHILNTAEASSIDDIKHNSGYWGQNGNPCAWVSLSAFAAGRSTIVATFAVDSDSDIETFGGPISLEATSKISAYYPLVVLQGGNGNHFGGYWFDLSGIHSRIKNMDNNSPKELYLVPGSTMDVLIFGGPERWDQVIDFVETVDVIDPSKNHIISSTAVKKLSSGLYRVSCLSKVSYKLLFSRGNMVGKDHPVPAISKSEFTVICDFPSEITLIANENENRLDILEAARKADRGPDRLQASPIVISNGRNIRLAAASIHVNGRFFANSSSLRLKWEATGCEGLAYFEETKSVEMLDESAWERSLVLQNSTGVCTVRATVDDFSTKYAGQTHEEEYTFHSLTDAIQLQIVSSLRVTPEYVLLVFHPEAQENLIVSGGTCS

SEQ ID NO: 52852 - protein, 88 aa, Zea Mays
MDISHPHPKACSARSYARAPRTSTPLVAFGAIYAEVKKKTSRWISRSSRTLMSSRIRLATSPSQLPVVGCLRWLRFDSAYFDLYYVND

SEQ ID NO: 52853 - protein, 165 aa, Zea Mays
MKEQMTELVGILRHSESRRREMEKQLKQREQTTPMATTPPKSGNGTTKHSADDPNTPLSPVAVPAQKQLKYSAGIVNSPSKGVAAIKKEQLKMVPIAQLSAGKRVSIAGHSGKLWRWKRSHHQWLMQFKWKWQKPWKLSEVIRHSDETITRIRPRPPLLPHKPHN

SEQ ID NO: 52854 - protein, 150 aa, Zea Mays
MMENVQGELIESFLPVLDNFERAKMQIKVETEGEEKINNSYQSINKQFIEILNSLGVEDVETVGKPFDPMLHEAIMREESSEYEEGIILQEFRKGFKLGERLLRPAMVKVSAGPGPENSGDDDPTVVEDSVAPQKVEDVEEDGFDDGDAE

SEQ ID NO: 52855 - protein, 190 aa, Zea Mays
MASEVEDEAATPLLANGAADVRRRRDQAKAILSTQAVRIATKAEQHERFIFKRLLRDPEVMTSYRELSKKAQKANNIWWRLSGLLGDRNRQVMYILLQALFTVATMALTVPIFLSYRMHVVFLILKVCASTWNGGSFILEVMPRQVVQKQLKKLDMKPMEQGSSTQGAPGGDGGTLGNHHQHTSEEHIQE

SEQ ID NO: 52856 - protein, 91 aa, Zea Mays
MTSRQGLGVGGGTPYGFDVGNSERGNVLKGLDLGVEGMKVGGQRLIIVPPELAYGKKGVQEIPPNATIELDVELLSIKQSPFGTPVKIVEG

SEQ ID NO: 52857 - protein, 150 aa, Zea Mays
MCNCSTPVWVDDLVEASKSISTLPSMVERDIQTDTVRKPGSHTRNLLRVKRGIDMVKVLFEQILVTEGNSLRDAASVAYAQVFAPHHGWAIRKAVSAGMYALPSKSQLLKKLNEDEESAKVQMQNFVRSSAPVICYVDDLFTSRNLGIDW

SEQ ID NO: 52858 - protein, 110 aa, Zea Mays
MLEAINDGKDLHISVTMPSIEVGTVGGGTQLASQSACLDLLGVKGANRESPGSNARLLATVVAGAVLAGELSLISAQAAGHLVKSHMKYNRSSKDMSKTLAEETDKPKKC

SEQ ID NO: 52859 - protein, 202 aa, Zea Mays
MPAMATAPVKFSVATNSPCVQPSLPLRRTPAAISFPCRPWSAAMNSCTGLLRRSDVVAAAGHQKLMGSLTTNEGLRFGVGALETFERYSVKEENITVVSVPGSFEVPITAQKLGKSGKFDAILCIGAVIRGDTTHYDAVANSAASGVLNAGLSAGVPCVFGVLTCEDMDQALNRAGGKAGNKGAEAALTAIEMASLFRHHLG

SEQ ID NO: 52860 - protein, 200 aa, Zea Mays
MEGKPYGYHNMIFSWIDTISDNYPPPLDAHVVASVMTVWSKLQPEYAANMWKEALNKRLGTKGLDLSEIIVESEKRGITFDKLLSVPENDSWVYEDGQSASCVAFVLMMYKEAGLFDPITSSIEVTEFTIKDAYILNFFEDNSTRLPEWCNKDDDVKLPFCQIKGKYRMELPGYNTMKPYAHMNERCPSLPPDYNRTKGC

SEQ ID NO: 52861 - protein, 59 aa, Zea Mays
MYTLTIASADPQSISANKPVHFTKSVTKWFTKEGVLVEGLFWKDVEKLIDDYNSERKSK

SEQ ID NO: 52862 - protein, 598 aa, Zea Mays
MQISTRTEDFIVDTLKLRKYLGDYLREFFRDPTKKKVMHGAGRDIIWLQRDFSIYVCNLFDTGQASKVLQMDRNSLEHLLHHFCGVAANKEYQAADWRLRPLPDEMIKYAREDTHYLLYIYDLMRLRLVNGSSCENDLLLEVCKRSNEICLQLYEKEQLTDTSYLHIHGLKENELNATQLSVLSSLYRWRDGIARAEDESTGYILPNKTLLEIAKEMPVTSGKLKRMIKSRNSILERNLNHVINNIRDAIAASGAFESIVEQLKKGKLEELTLADVKNSSEDTEMIPAVDVDNIEDPSDESAVVPAVITNVGAAPCITSEASLGNMHLEDPVPKTKDSGASSGFTGLTDNKKLSNDQQQAAKATVQVSKRPTAFGALFGKAAAGRRPDLFLGFSNVQGKTKVDKITSSVVLPFHHFSGGAKLSSAALPAKESLHSEPDSIQHSDPACQLEEVIQLDMGTDEQQPPENGNEDDGHCETEDTEMSKSPSGDPSVTEQRFRSLNEERNVKQNQKTPREFEFSVPVVPFDYAEARKNLVSSLPKAERRKDDAVARAINTDAGDKQRGSKKPPGGGENEGNFQHPRRRQAFPPSGNRNATYHQ

SEQ ID NO: 52863 - protein, 354 aa, Zea Mays
MGKEKSHINIVVIGHVDSGKSTTTGHLIYKLGGIDKRVIERFEKEAAEMNKRSFKYAWVLDKLKAERERGITIDIALWKFETTKYYCTVIDAPGHRDFIKNMITGTSQADCAVLIIDSTTGGFEAGISKDGQTREHALLAFTLGVKQMICCCNKMDATTPKYSKARYDEIVKEVSSYLKKVGYNPDKIAFVPISGFEGDNMIERSTNLDWYKGPTLLEALDQITEPKRPSDKPLRLPLQDVYKIGGIGTVPVGRVETGVIKPGMVVTFGPTGLTTEVKSVEMHHEALQEALPGDNVGFNVKNVAVKDIKRGYVASNSKDDPAKEAASFTSQVIIMNHPGQIGVLARSLRKSPSS

SEQ ID NO: 52864 - protein, 809 aa, Zea Mays
MGDACFSTQLIDGDGVFNVSGLENFMKDARLGECGLSYAVVSIMGPQSSGKSTLLNHLFGTNFREMDAFRGRSQTTKGIWLAKAQNIEPCTLVMDLEGTDGRERGEDDTAFEKQSALFALAVSDIVLINMWCHDIGREQAANKPLLKTVFQVMMRLFSPRKTTLLFVIRDKSRTPLENLEPILREDIQKIWDAVPKPHAHKETPLSEFFDVQVVALSSYEEKEELFKQQVSDLRDRFQYSIAPGGLAGDRRGVVPASGFSFSSQQFWKVIKENKDLDLPAHKVMVATVRCEEIGNEKVGSFTSDEEWQQLEEAVQHDFVPGFGKKISSLLDRCLSEYDMEAIYFDEGVRSSKRQQLESKLLQLVNPAYQSLLGHLRTRTLEAFNESFDKALEKEGFAAAARNCTQTFLEKFDKGSEDAAIQQVNWDTSKVKDKLRRDIEAHVASVRAAKLSELCAKYEAQLTKALAEPVESLLDSASEDTWPAIRKLLQRETKTAVSGLQSAVSAFELDEATEKELLVKLEKHGRSVVESKAKEEAGRVLIRMKDRFSMLFSRDADSMPRVWTGKEDIKAITKTARSASMKLLSTMAAIRLEEDGDNIENTLSVALVDTSKPGTTDRSIQLTDPLASSSWERVGEEKTLITPVQCKNLWRQFKAETEYTVTQALAAQEANKRNNNWLPPPWALAAMAILGFNEFMTLLRNPLYLFAIFVIYLVGKAIWVQSEIGREFQHGFLPAILSLSTKFVPTVMNILKRLADEGQAPAAAPERQREMELQPKPTRNGSSYTNATSAGSSSVTTSEIGPEYSSPVAQ

SEQ ID NO: 52865 - protein, 136 aa, Zea Mays
MMKLGMKPVTGVTRITIKRAKNILFVVSKPDVFKSPTSETYVIFGEAKIEDLSSQLQAQAAQQFRMQDLSKVMAKQDAAAAAAAPADEEEEVDEAGIEPRDIDLVMTQASVTRAKAVKALKAHDGDIVSAIMELTA

SEQ ID NO: 52866 - protein, 385 aa, Zea Mays
MMHKYIGSDVTSLVTLPVIIFEPMTMLQKMAELMEYCELLDKADECEDPYMCMVYASTWAVSVYFAYQRTWKPFNPILGETYEMVNHQGITFLAEQVSHHPPMGVAHCENEHFTYDITSKLKTKFLGNSVEIYPVGRTRVTLKKSGVVLDLVPPLTKVNNLIFGRTWVDSPGEMVMTNLTTGDKVVLYFQPCGWFGAGRYEVDGYVYSAAEEPKIMITGKWNKSLSCQPCDQEGDPLPGTELKEIWRVAPAPQGDKYQYTHFAHKINSFDTAPKKLLASDSRLRPDRYALEKGDMSKSGAEKSRLEEQQRAEKRTREAKGEQFTPRWFNLTDVVSPTPWGDLEIYEYNGKYTEHRAAIDRSDVTDETDVTSVKFSPWQYGSSSSQ

SEQ ID NO: 52867 - protein, 159 aa, Zea Mays
MEFYAKKAALEERKRPPRQSKDEMPPPPSLQGPPKKGHHMGDFIPQEELEKFMARCNDAAAQKATKEAAEKAKIQADNIGHKLLSKMGWREGEGLGSERRGRADPVMAGDVKKDHLGVGAVQPGEVTSEDDIYEQYKKRMMLGYRYRPNPLNNPRKSYY

SEQ ID NO: 52868 - protein, 77 aa, Zea Mays
MRTVHSTAAGICILLLMVMSCTLMTTPTWAAEDCYQQYPTCQDAVCEAKCSEEFHSKLSGFRCTSRMHIPVCCCTHT

SEQ ID NO: 52869 - protein, 67 aa, Zea Mays
MAATASKTRRAILALFIWAMAILLFMAALHPNALAAADEIYCMCCAAKTECTFDPTCCTDGCCRMRP

SEQ ID NO: 52870 - protein, 748 aa, Zea Mays
MIKSLKDQYFVELNELYNKVSIKIQQIDNQMPAQKSAEQYEKMKGFKGMLERTLHFLQVNKSNIHPGLREKIPIYERQILSILSSQRRKPVQAPGQQTFQQSSGQAPSSNISQQLQTSQGLQQHDSHTSQMPQASLPSMNTGVQTSGAPAPQGTNFGVPTTQQNVTNAPQAGSNLENAQGNNFNHVQHGSMGAALQQERTGPMQGALNAQQQSSSNMISNNAMSTMQTNNNANANSLQQLKQQRQEHQMMQSQQMKQRQQMMQQIQQKQTLQPQLPIQQLKKQQQQGQMQFPQLHSGNDVNELKVRQGAAIKSGMYQQLSQRNYYQQIKQGGVFPISSPQTLQTSSPQISHHSPQVDQHSLLQSQVKTGTPLHSANSPFVPSPSPPVAPSPMPMDSDKPLSNLSSVTSAGQAGHQQTSLAPQTQSIAVNTPGISASPLLAEFTSADGSPANVPTQVPAKSSAAERPLDRLLKALRTTQRESLSAAVSDIGSVVSMIDRIAGSAPGNGSRAAVGEDLVAMTKCRLQARNFITHDGSGASKKMKRDTSAMPLNVSSAGSVNDSLKQSYGVGTPELQSTATSRVKWQRAEVNHALMEEIQEINQQLIDTELHVSEDDAESFTTSEGGKGTVIRCTFTAVAVCPSLKSVFASAQMSPILPLRLLVPASYPKCSPVLLDKFPDEQWNSDDLSTKAKTKFSVLLRGLAEPMSLREIARTWDACARKVITEYAQQTGGGSFSSSYGCWESCVGAC

SEQ ID NO: 52871 - protein, 1005 aa, Zea Mays
MVSLCYFCPGLTTRSRMPVKRYKKILAEIFPKTQDEEPNERRIGKLCEYASKNPLRVPKITVYLEQHIYRDLRSEQYGFAKVVMLIYRRLSVSCKEQMPLFASSLLSIVHTLLDQKRQDDLCIVGCETLFDFAVNQVDGTYQFNLEGLVPRLCEIAQEVGEDERASALRAAALQSLSAMVWFMGELSHISSEFDNVVQVVLENYKPQKMQNDDQGTNDADNQLVQEDQKAEHPPSPFIITPAPSWESIVNVKGGVNLPEEDARDPKFWSRICVHNMAKLSREATTFRRILECLFRYFGNNSSWLSENGLALCVLLDMQLLVESSGQNMHLMLSLLIKHIEHKTMLKQPDMQLSIVEVAATLAEQSSAIASPTTMGAISDLVSDAGPVLDMMAVMLENIASTPVVARSTAAAVYRTAQIIASVPNLQYQNKVFPEALFHQLLLTMIHPDHEARVAAHRIFAIVLVPSSVSPSIQASPSSRPKKHDMQRTLSRAVSVFSSSAAIFDKMKKDKNSENSQGESKDNSMHSVGEGTGQSKSQNLHVSQSRRSMKAPNFSMKRGPSMAMRAPSVAIRAPSISLRGPSMSLRASSMSVKEDQSSSNKSDEETESVLVKLSARQITLLLSSIWAQSTSPENTPVNYEAIAHTYSLLLLFSGSKASTFEALTQSFQVAFSLRSYSLTEADSLQPSRRRSLFTLSTAMIIFSSRAYNVLPLIPICKQMINDRAADPFLHLVDESRLTAVKDSSNDPSKIYGSPEDNNNALKSLSEIELSESQSRECIVSTIMNNIANMLDAELHNVRSQLLSDFTPDDMCPTSTQFFEVHADNPSSGSYETGHHQEGLLIDLGNDHDAFGEASESAEASASSIPASDLLSIDQLLETVGAEPAPQAGVVSADIGFKDMTSHCEALTIGKQQKMSAFMSFQQSVQAAGLPSSQPNQMELDLSQDPQLPQTGAHSTNPFTDDSLQGYPQYTKGPNGDNAQPGQDFQQQSLKLPAASPYDNFLRAAGC

SEQ ID NO: 52872 - protein, 256 aa, Zea Mays
MVSGRPHGELDSWFKSLMVTSSSERGQAGSGGPAPTLTGWKDLPMELLVRIISTVGDDRMVIVASGVCTGWRDALGWGVTNLSLTWCKLSMNNLMISLAHKFTKLQVLTLRQNKPQLEDSAVEAVANYCHDLRELDLSRSFRLSDRSLYALAHGCPRLTRLNISGCSSFSDTALIYLTCRCKNLKCLNLCGCVKAVTDRALQAIAQNCGQLQSLNLGWCDDVTDKGVTSLASGCPDLRAVDLCGCVLITGSAQLGF

SEQ ID NO: 52873 - protein, 154 aa, Zea Mays
MKTVREKADLLSDSQRIKYTIETFTKGIPDARTYLNTLQQLRIKSGLIDHLGIEPLMMEALEKIEKDIKKPLLRSDKKNMATLLAEFDKINKKLGFRKEDLPKIEEELELEIAKSELTELKKECVEAMETQLKREEFQDEEMPDVRKLDIRNFL

SEQ ID NO: 52874 - protein, 233 aa, Zea Mays
MLKEAVEMSTDEESDGVVICHPNGNTDGCDEAISGSHDDDSPEGQETSSIKDPDVEGDTQEDKCVNQDSLKLIDQETSAPPKSPAKSATASSGPEKPKRVVTQPLSLSTQRRSSGVNGGVTNPSPNKDKSGDKSSISPASMTKKCTPLAPRKTLQPEQAFHPLEEDSCSVTSSTTTSSRAGRTKTTVPVAPSFVCANRADKRKEFYTKLEEKHKALEAEKDEAEARKKSKTLL

SEQ ID NO: 52875 - protein, 121 aa, Zea Mays
MIPRGQEKFLAIMDLKGWGYANCDVRAYIAAIEIMQNYYPERLGKALMINVPYIFLKVWKTMIYPFIDANTRDKFVFVDDKSLRETLRREIDESQLPEFLGGKMPLVSLKDYAQQPQPVCE

SEQ ID NO: 52876 - protein, 112 aa, Zea Mays
MLGAVVRVPGPILPFLPGPTRPSPPPPPLPPARNAHGLGHPLRWRHREARRRAGSHARANAAAAREASPGRLLRQRLRSLRLGHIFRRARRVRQGPRRARGLLRLRRQGRLC

SEQ ID NO: 52877 - protein, 347 aa, Zea Mays
MSVSIARLKNLNRRTVDVLASRLYFYYSYVYELTNSLAEIRGNLLALHRMATLHRDELGQETLLNLLLRNYLHYNLYDQAEKLRSKAPRFEAHSNQQFCRYLFYLGKIRTIQLEYTDAKESLLQAARKAPTTARGFRIQCNKWAIIVRLLLGEIPERTVFMQKGMKKALTPYFELTNAVRVGDLELFRTVADKFASTFSADRTRNLIVRLRHNVIRTGLRNISISYSRISLADIAKKLRLDSENPVADAESIVAKAIRDGAIDATIDHANGWMVSKETGDVYSTNEPQIAFNSRIAFCLNMHNEAVKAMRFPPNSHKEKESAEKRRERLQQEEELAKHMAEEEDDDF

SEQ ID NO: 52878 - protein, 391 aa, Zea Mays
MLTSVFFFSLSPLHGIPYGLKDIIAVPHYKTTWGSRTFKNQVLDSEAYVYRRLKSAGAVLVAKLVTGSLAYDDIWFGGRTRNPWNIEEFSTGSSAGPAASTSAGMVPFAIGSETAGSIAYPAARCGVTALRPTFGTVARTDVMSISESLDKLGPFCRSAVDCAVVLDTIRGTDAGDPSSREVALGDPFHVDITKLTVGYLDDAEMEVVDVLSSKGVKLVPFKLNYTVESVQSILNITMDTDMLAHFDNWQREGHDDDYEAQDQWPVELRRARLIPAVDYIQAQRARGKLIREIKDSFTVDAFVGNVTDWERVCLGNLVGMPVVVVPTGLKSIENPPKGGTKRRTTVTTGIYAPPDHDHIALALAMAYQSVTDHNKQRPPIDDLGPNDVIQR

SEQ ID NO: 52879 - protein, 400 aa, Zea Mays
MVLQGMINELAKDEDRKKYARFLLRAYVEGSKKTKWCPAPDCTCAVEFLGDENYDVSCNCMFSFCWNCTEEAHRPVNCETVSKWILKNSAESENMNWILANSKPCPKCKRPIEKNQGCMHMTCTPPCKFEFCWLCLGAWSDHGERTGGFYACNRYESAKKEGVYDETDARRERAKNSLERYMHYYERWASNQTSRQKAQADLLKAEKDQIANLTDIFGIPETQLKFIIEAWSQIIECRRVLKWTYAYGYYLDDKIKSEFFEYLQGEAESGLERLHQCAEKDLQIFLPSVKSDSTETTTPTVAEFGEFRVKLAGLTSVTRNYFENLVQALEAGLEDVRATGQAAGTSSTATSSKKGGTKSKKKQHTAPSSDHTDDGWPCERCTFLNPPTVDACSVCEKSRY

SEQ ID NO: 52880 - protein, 563 aa, Zea Mays
MQPVDRFVVEECILDVLLFFNGCRKECAFYLVSLPVSYRYEYLMAETIFSQLLLLPNPPFKPIYYTLVIIDLCKALPGAFPSVVVGAVHALFDRISNMDMECRTRLILWFSHHLSNFQFIWPWQEWSYVKDLPKWAPQRVFVQEVLEREVRLSYFEKIKQSIEDAAELEELLPPKAGPNFKFHSDESNESTDGLKLSKELIGLIRGKKSTYDIILWVEEQIIPKNGTEFALDVVSQTLLDMGSKSFTHLVTILERYNKIISKLCPNEEMQLLLMNGVSAYWKNSTQMTAIAIDRMMGYRLISNLAIVKWVFSPANVEQFHVSDRPWEILRNAVSKTYNRISDLRKEIQSLKKGLQVAKEASAKNRKELEEAKSVLEIVEGQPAPAERPGRIRRLESHVKNAEDEERTLEESLEAKGVLLARAHEESKDLLKLLFKSFVDVLTERLPPVSVDGEIPNLRSGDQNVNFAAQNSEAATMEIDNENGADNNSEPNERNTKNAYNVGELEQWCLCTLGYLKSFSRQYASEIWSNIAMLDEVFVGDVHPLIRKAAFSGLRRFTNEGSHP

SEQ ID NO: 52881 - protein, 106 aa, Zea Mays
MTSVSIRSRQRSLGFKICCSAKKETVDKVCSIVKEQLALPDGTAITAESKFAELGADSLDTVEIVMGLEEAFNITVDETSAQDIATVQDAADLIEKLMLEAPPKVV

SEQ ID NO: 52882 - protein, 246 aa, Zea Mays
MALCGGFERVFEVGPVFRAENSNTHRHLCEFVGLDAEMEIKEHYFEVCDIIDGLFVSIFKHLTENCNKELETINRQYPFEPLKYLDKTLKLTYEEGVQMLKEAGTEIEPMGDLNTEAEKKLGRLVREKYDTDFFIMYRYPLAVRPFYTMPCYDNPAYSNSFDVFIRGEEIISGAQRIHTPELLTKRATECGIDVSTISTYIEVFSYGAPPHGGFGVGLERVVMLFCALNNIRKTSMFPRDPQRLVP

SEQ ID NO: 52883 - protein, 286 aa, Zea Mays
MERQGLDMKATALVNDTVGTLAGGRYMDTDVVAAVILGTGTNAAYVEHANAIPKWTGLLPKSGKMVINTEWGSFKSNKLPLSEYDKAMDFESLNPGEQIYEKMISGMYLGEIVRRILLKLAHEASLFGDVVPPKLELPFILRTPDMSAMHHDSSHDLKTLGAKLKDIVGVADTSLEVRYITRHICDLVAERAARLAAAGVYSILKKIGRDKVPSGGGKMPRTVVALDGGLYEHYKKFSSCVEATLTDLLGEEASSSVVAKLANDGSGIGAALLAASHSQYQYGASD

SEQ ID NO: 52884 - protein, 132 aa, Zea Mays
MKEGVDKFNPVYLFDEGSTISWVPCGRKLTCSYPGIKFAYGPDIYFGNEVSVLEMDGQFDRLDELIYVESHLSNLSTKFYGEVTQQMLKHADFPGSNNGTGLFQTIVGLKIRDLYEQIVAERAGAPVEAAKV

SEQ ID NO: 52885 - protein, 373 aa, Zea Mays
MGGEKETFDTSDLNASLPAAAAALSAEDRAGLVNALKDKLQSLAGQHADVLETLSPNVRKRVEFLREIQSQHDEIEAKFFEERAALEAKYQKLYEPLYTKRYGIVNGEVEVDGVCDEPASENTVEGKEPDAKGVPDFWLTAMKTNEVLSEEIQERDEAALKYLKDIKWSRIEDPKGFKLDFFFDTNPFFKNSVLTKTYHMVDEDDPILEKAIGTEIEWYPGKNLTQKILKKKPKKGSKNTKPITKTEDCESFFNFFNPPQVPEDDDDIDEDTADELQSQMEHDYDIGTTIRDKIIPHAVSWFTGEAVQGEDFGELGDDDEDDDDEDDDEDDEDEEEDDDEEEDDEEESKPARKSGSGRRHKVSNQCQYLTDGV

SEQ ID NO: 52886 - protein, 1563 aa, Zea Mays
MGLDGTVSGVVSRKVLPACGGLCCLCPSLRPRSRQPVKRYKKILIDIFPAEQEDGPNVRRIGRLCEYVARNPHRVPKITAYLERRCYRELRNEQYDIVKVVVLIYRRLLVSCNEQMPLLANSLLSIIQTLLDQSRQDDMCIIGCETLFDFIVTQVDGTYQFNLEEFIPRLCKLSQIVRDKEKANALRAAALQSLSAMIWFMGELSHISSEFDSVVQVVLESYEPRQVQSDNSATENPGCQLVEEVLKPEGHASPSTFIFSVIPSWDSIVSDYGGIQLLMDDAKDPYFWSRVCVHNMAKLSREATTFRRVMESLFCHFDNTNSWSSKNGLALCVLLDMQMFMEKSGTNINLMISVLVKHLEHKAILKQPEMQLSIVEVITALAEQSRAQASAATIVAISDLVRHMKKTLHLALGSNDLEVVKWNDKLRMAFDECIVQLSKKKKKEDLLREIAKKKKEEEEKEKERKAAAPEQPAATTKRRNRWDQSQDGDAGAGAKKVKTSSDWDAPDATPGIGRWDATPGRVGDATPSVRRNRWDETPTPGRMADADATPAAGGATPGATPSGAWDATPKLPGGVTPTPGKKQRSRWDETPASMGSATPGSLGAATPAGYTPGPTPFGAENLATPTPSQIARGPITPEQYQLMRWERDIEERNRPLTDEELDAMFPQEGYKILEPPASYQPIRTPARKLLATPTPLGTPLYAIPEENRGQHFDVPKELPGGLPLMKPEDYQYFGTLLNEEEEEQLSPEEQKERKIMKLLLKVKNGTPPQRKTALRQLTDKAREFGAGPLFNKILPLLMQPTLEDQERHLLVKVIDRVLYKLDELVRPFVHKILVVIEPLLIDEDYYARVEGREIISNLSKAAGLATMIAAMRPDIDNIDEYVRNTTARAFSVVASALGIPALLPFLKAVCQSKKSWQARHTGIKIVQQIAILMGCAVLPHLKSLVEIIEHGLSDENQKVRTITALSLAALAEAAAPYGIESFDTVLKPLWKGIRSHRGKVLAAFLKAIGFIIPLMDALYASYYTKEVMQVLIREFQSPDEEMKKIVLKVVKQCVSTEGVEADYIRNDILPDFFKHFWVRRMALDRRNYKQLVETTVEMANKVGVADIVGRVVEDLKDESEPYRRMVMETIEKVVANLGASDIDARLEELLIDGILYAFQEQTSDDANVMLNGFGAVVNALGQRVKPYLPQICGTIKWRLNNKSAKVRQQAADLISRIAIVMKQCQEEQLMGHLGVVLYEYLGEEYPEVLGSILGALKAIVNVIGMTKMTPPIKDLLPRLTPILKNRHEKVQENCIDLVGRIADRGAEFVPAREWMRICFELLEMLKAHKKGIRRATVNTFGYIAKAIGPQDVLATLLNNLKVQERQNRVCTTVAIAIVAETCSPFTVLPALMNEYRVPELNVQNGVLKSLSFLFEYIGEMGKDYIYAVTPLLEDALMDRDLVHRQTAASAVKHMALGVAGLGCEDALVHLLNYVWPNIFETSPHVINAVMEAIEGMRVALGAAVILNYCLQGLFHPARKVREVYWKIYNSLYIGAQDALVASYPALEDDGDNIFSRPELAMFV

SEQ ID NO: 52887 - protein, 136 aa, Zea Mays
MLKKGPPLSTQQQLLVTLGMLRLMAILSQHILQCMAILMQHILHRPILMLITLIRLTCTLVPVPITRVNHFPMDNTRASTPISKDDCRHKIALTRLPSHSRCKRIVAESTGLSMLEKSVASERWNSSWSCLLFFSG

SEQ ID NO: 52888 - protein, 219 aa, Zea Mays
MDCQRLDVAKDCIGVLSKQFPGSTRVARLEALLFEAKSEWAEAERAYTQILEINPFDQIVHKRKIAIAKAQGNMSLAIGYLNKYLELFMADHDAWRELAETYVSLQMYKQAAFCYEELILSQPTIPLYHIAYAEVLYTMGGLENLQTAKKYYASTIQLTGGKNTRALFGVCLLTKGRNKEEEGSELQRLAAEVLLNNYKQQAPSKAPLISSLLKNMKLS

SEQ ID NO: 52889 - protein, 1411 aa, Zea Mays
MFEIVSLADDLLPHIPARIIKLPTYYHTYKGSSTKKSASIKQEGGGSTGNERSGRERLLREQPELLQQFGMDLLPTMTQVYGSSVNAPIRHKCLSIIGKLMYYSSAETIQSLLGTTNISSFLAGILAWKDPQVLIPALQIAEIMMEKLPETFSKLFVREGVVHAVESLICSESSNKMPSQVPPQDKDKDSAMPSRSRRQRRRAGAVAAENSSLDESNSSNLGVMCSTATASEAPNTSLRFTVSDHAKSFKDKYFPADTDSSDIGFTDDLLKLRALCAKLNTVSENVKTKAKGKSKAISTNFLDISIDVEEQLDKIISEMLSELSKVNGVSTFEFIRSGVVIALLDYLSCGTFGKEKVSEGNLSQLRQQALRRYKTFISVALSIDHGRDETPMALLVQKLQSALSSLERFPVVLSQSSRIGIGGSRLTSGLSALAQPFKLRLSRAQGEKSLRDYSSNIVLIDPFASLASVEEFLWPRVQRSEVASKPIIPSGNNSESGVPGTTAGASLTAAMAQSGRRPTTRSKSSAAGGLTSKKDSHDESTSTAKGKGKAIVKPNSDESKGPNTRNAAHQKSASEKDLEMKQAHGHSSSEDEELDTSPVEIDDALMIDDDDISDDDDDDDDDHEVLQEGSLPICSQDGVHDVKLGDADESNIGSATFSHAQPSSGSGARNTSSRGPDSTEFRSMGTFGSRGAMSFVAATMAGLASVGGRSVRGVRDRRGLSLGGSMNDHNKLIFTAGGKQLNKHLTVYQAIQRQLMLDEDDEERFNGSDIPNDGNRFWGDVFTITYQKADNQVEKGCQGTSTSLNIKSDSYRSISEAQGVSLLDSILQGELPCDLERTNSTYNILALLRILEGLNQLSPRLRVQGASDDFAEGKINTLDELYRTGAKVPSEVFVNSKLTPKLARQMQDVLALCSGSLPSWCYQMTKACPFLFPFETRRQYFYSTAFGLSRALNRLQQQQSDNHSSGGEREVRFGRLQRQKVRVSRNRILDSAAKVMEMFSSQRAVLEVEYFGEVGTGLGPTLEFYTLLSHELQCAQLGLWRATSSYDSGLHTDMKDVIRLDPEDGSSGKELNTDLPGDGMYLIQAPLGLFPRPWPPKVDTSEGSRFFKVLEYFRLIGQVIAKVLQDGRLLDLPLSTAFYKLILGQELDLFDIVSFDSEFGKTLQELQVLVERKQFLESTSGKNQLQVADLCFHGASIEDLCLDFTLPGYPDYVLKEGEGGTIVNIYNLEEYITLVVDATVKSGIKRQVEAFRSGFNQVFDMSSLHIFSPQELDYLICGRQEIWESESLVDNIKFDHGYTAKSPAIVNLLEILSEFTPEQQHAFCQFVTGAPRLPHGGLAALSPKLTIVRKHPSSAVNTSNSTGAVESADDDLPSVMTCANYLKLPPYSTKEIMRKKLLYAILEGRGSFDLS

SEQ ID NO: 52890 - protein, 94 aa, Zea Mays
MDMAMASFVAATHHHGSHLAAGFPYSARAGRSVGRSGVTISIRAQKNRHEYGLKKPILHVLSDRMNESGFSRPEGYLYPYPIKPGPYFIKEEGN

SEQ ID NO: 52891 - protein, 151 aa, Zea Mays
MAAEAKTPSLAEEYSLPPQEVPVEKAAEEKPSSGTETESAPSTNDETPSSVEDKNETSEVQDAAEKSDAEETNTAAEEASETAEEEEAEKPEIKIETAPADFRFPTTNQTRHCFTRYVEYHRCVAAKGEDAPECDKFAKYYRSLCPGEWEC

SEQ ID NO: 52892 - protein, 560 aa, Zea Mays
MGKSPGKWIKSVLLGKKSTKSGPTKSNESKADNNRYSTGEDRTLSESSPVISEPVLVNIHKNVAINGKAADASDRARQQDPQSQSVVESRSSAPAAQLGEDQAAAKAQAAFRGYLARRSFRALKGIVRLQALIRGYLVRRQAVSTLRATWLIVKFQALVRGRNVRLSGSRMQLNVKFGQSNFGGVRSSDAWKEKLSSNAYVRKLLSSPIVLEPLHFQYDKRDPNSTYNWFERWTIGCIWKPAFQPKRVADGKPLVKKASYAMETQSAKLKRNIRKGSAAIAGSFHTSGESDKVKRNPKNFSSFPADSVPDSQLSELEKVKRNLRKVTDSMAEASKISSSRVDSSKVCNSTAEVPKESNPVAEISKIRSLLNGISDHQDIQCENTRESSFPLGTQEDSDNDHLLRYSNMDSLDLVPGLKSDQEIQLDSVSIGENVDDPTVVAPAVEEMSPQNIDTEDNVLCKKEEARSKEEHLSNGSLRTSKRKSSFPNKSEYVENGTHATPVQPRQPSYMAATESAKAKLRAQNSPSLDSDSAAEKNGFTRRHSLPSSTKSRALKAEWKR

SEQ ID NO: 52893 - protein, 160 aa, Zea Mays
MLVAASGIFTSEDISELNLPKTTSISFPNGKDDLMNFEITIRPDEGYYMGGAFVFTFQVSPSYPHDPPKVKCKTKVYHPNIDLEGNVCLNILREDWKPVLNINTVIYGLNLLFTQPNDEDPLNHEAAAVLRGNPKMFEANVKRAMTGGYVGQHYFQRCLA

SEQ ID NO: 52894 - protein, 432 aa, Zea Mays
MPGNLVDGQCDSNDDPCQELLSWLLPLDRTLPPRSLAPPTLNPSVSHKQSYSASGSQIFNFRSYSMPSASSVQTPNNIRPPPISESQEFMPEKPAKTPDIINDGQLSFRGVPLEPERYSVRCGLEGVYLPGKRWRRKVEIIQPIEVQSFAAKCTVENLLCVTVKNIAPTHAKDIVVFIDAITIVFEEASKGGAPLSLPIASIEVGHGHSLPNLALRRGEEHSFILKPATMSSRERKTNSHAPLALSLPTMTGATLNTHTPKAGEPYADLSDQYAVLVSYRCNYTESKLFFKQATSWRPSAASDLMISVSSELSLRNPSLGARVPQLPVQILTLEATNMTSENLTLTVLAPEASGSSSVVSLNSSPTTPNGSFDGVNESAKRSGVGKDGIGFRRLNSVLATPKEGVFLPAQAPLSNLSCYHYQMELSHLILCK

SEQ ID NO: 52895 - protein, 198 aa, Zea Mays
MIVANVGDSRAVLGTTSDDGAIAAVQLTVDLKPNLPQEKERIRRCNGQVYCLADEPGVHRVWQPSRESPGLAMSRAFGDYCVKDCGVISTPEVTQKRISSSDQFIILATDGVAFGLSAFNSLCKHRHMHPSFRLRKHTHCLVTDDGKREFYPIGMGRALQRRGGTYRGGDAGPGEGGQAAGGVRRSRVEAQAARHRRR

SEQ ID NO: 52896 - protein, 142 aa, Zea Mays
MNRTTSIRRFQMNCWSMPKLLPRLLLRRWMPTKRHDDLPKLGVFGGVDISDPLGGGGPTRGRHISTENRAELESRFFRFFDSVSVFLSYEPKRSARLRFLFAGHRYNRTYCSLMSCVARVQLDLDNLQCSPPKPKRHQRTAS

SEQ ID NO: 52897 - protein, 135 aa, Zea Mays
MSFIRSYVVPEGFPDSVTPSYVPYMTWRALKHFFGGAMGVFTTRTLLNSVGVSQSRAASGAVAINWILKDGAGRVGKMFFARQGKKFDYDLKQLRFSGDLLMELGAGIELATAAFPQFFLPMACIANVGSFPTDL

SEQ ID NO: 52898 - protein, 311 aa, Zea Mays
MTSPFTDASTRKFFETRRYFGLDPDQVTFFQQGTLPCVSADGRFIMETPYRVAKAPDGNGGVYAALKSKKLMEDMAARGVKYVDCYGVDNALVRVADPTFLGYFIDKGVSSAAKVVRKAYPQENVGVFVQRGRGGPLSVVEYSEMDAAMTTEINQSTGRLRYCWSNICLHMFTLDFLNQVANSLEKDSVYHLAEKKIPSIHGFTTGLKLEQFIFDAFTYSPSTELFEVMREEEFAPVKNANGATYDTPDSAKLMLLRLHSRWVVAAGGFLTHSVPLYMTGVEVSPLSSYAGENLEAICRGRTFHAPSEISF

SEQ ID NO: 52899 - protein, 93 aa, Zea Mays
MKELIEVVTKTKPDNFTPRIVEKKDDYIRVEYESPIFGFVDDVEFWFPPGNKTMVQYRSASRSGFIDFNANKKRVKELRLALEKKGWASESNF

SEQ ID NO: 52900 - protein, 86 aa, Zea Mays
MAVTAEAAAEMVLERRAYARVGLLGNPSDVYGGRALSFAIADFSATVHLRPSPELLIQPHPHHDLVAFPSLPQLVGRSRTYITSKS

SEQ ID NO: 52901 - protein, 115 aa, Zea Mays
MTNLYYGGTGIAGSKIVFANGSQDPWRHASKQKSSDELPSYLIECKNCGHCSDLSGCPQAPSNIEGDSSKCSPPEALNKVRKEIVDHIDLWLSECQEQGHDKEPWLGSRWSIAAI

SEQ ID NO: 52902 - protein, 106 aa, Zea Mays
MKKGLTVWLDVPLDALARRIAAVGTASRPLLHQESGDPYAKAYAKLTSLFEQRMDSYANADARVSLEHIALKQGHNDVTILTPSTIAIEALLKMESFLTEKTMVRN

SEQ ID NO: 52903 - protein, 208 aa, Zea Mays
MSIWDYIWRGHDPTSVAVMTEDGAAVTGLAIAAASLVAVQMTGNAMYDPIGSIIVGNLLGMVAIFLIQRNRHALIGRAIDDHDMQRVLEFLKSDPVVDALYDCKSEVIGPGFFRFKAEIDFNGVVLVQNYLERTGRGSWAKQFREAAMSKDDTELLRVMANYGEDVVEALGYEVDRLESEIQKLVPGIKHVDIEAHNPEGLALRAEVL

SEQ ID NO: 52904 - protein, 159 aa, Zea Mays
MQLQDNLTKYMSAEGQYTEEELEMYMENHKKVMVDSLWKLNVADIEATLSHVCQMVLQDSSARKEELRLRAKGLKTLGRIFQGAKVNPSEGETSQTKNIDNMDGNDGSSPDSSPNREAQFTPNQPPVPSPYVEAPHVNGVYCPFPMPAAPPGARRDRIP

SEQ ID NO: 52905 - protein, 266 aa, Zea Mays
MCLSGFFVTIWIAAVMFKSNDILRKQTALKGERKISVLIGITVIFMIHVFGVYWWYRNDDLLRPLFMLPPKDIPPFWHAIFVIMVNDTMVRQAAMAVKCMLLLYYKNCRGRNYRRQGQMLTLVEYLLLLYRALLPTSVWYRFFLNKEYGSLFSSLTTGLYLTFKLTSVVEKVQSFLAAVKALSRKDVHYGSYATAEQVLAAGDMCAICQEKMHVPVLLRCKHIFCEDCVSEWFERERTCPLCRALVKPADIRSFGDGSTSLFFQLF

SEQ ID NO: 52906 - protein, 229 aa, Zea Mays
MIAVQRCTSSVAILQQYFSNTISRLLLPVDGAHPSACEDMGSAVSVVEAAAHKGLLQCIDTVMSEVERLLSSEQKATDYRTPDDGAAPDHRPTNACIRIVAYLSRVLEVAFSALEGLNKQSFLTELGNRLHKGLLNHWQKFTFSPSGGLRLKRDITEYGDFVRSFNAPSIDEKFELLGIVANVFIVAPESLASLFEGTPSIRKDALSSGMIIRQRKSLRCSTISCPSNE

SEQ ID NO: 52907 - protein, 211 aa, Zea Mays
MGYNDIGDFFYAHGQLSDAFKSYIRTRDYCTTSKHIVQMCMNVILVSIELGQYAHVSNYVSKAEQTPDSLDPTIVAKLKAAAGLANLETKKYKFAARKFVETGIELGNNFSEVIAPQDVAVYGALCALASFDRSDLKSKVIDNINFRNFLELVPEVRELVNDFYASRYGSCLGHLEKLKPNLLLDIHLHQHVETLYMEIRHKAIIQRSWPH

SEQ ID NO: 52908 - protein, 215 aa, Zea Mays
MFLASEVLMGKDEFFRSFRENADNFICSLLPGISGHPQIQYSPGGLLFKVGNSNMQHVTSLSFLLLVYSNYLSHADARVPCSSSSSAAAASPVQLRRVAKRQVDYILGDNPLRMSYMVGYGPRYPLRIHHRASSLPSVSAHPARIGCKAGAAYYASPAPNPNLLVGAVVGGPSNSTDAFPDARAVFQQSEPTTYINAPLLGLLAYFSQHPDPAQH

SEQ ID NO: 52909 - protein, 200 aa, Zea Mays
MPNRSMPAAPLPTPGALLMGDAFNMRHPLTGGGMTVALSDIVVLRNLLKPLRNLHDASSLCKYLESFYTLRKPVASTINTLAGALYKVFSASPDQARNEMRQACFDYLSLGGVFSNGPIALLSGLNPRPLSLVAHFFAVAIYGVGRLMLPLPSPKRMWIGARLISGACGIILPIIKAEGVRQMFFPATVPAYYRAAPTGE

SEQ ID NO: 52910 - protein, 418 aa, Zea Mays
MLTLSATVPALQPSHMPCREDGVSSSSCQPGWPQVAFFYVSLYLIAIAQGADKPCGLAFAADQFDAEHQGERASRGSLFNWWFFCMAIGISVSVSVVGYIQEYVGWGLGFGVPCAIVLCAFLVFLLGTPTYRLYAPTPEAKSPFRRLARGLAANANKTGGLSASHSEEEEAAADARCVLRLLPIWAASLAYGVVYAQIMTLFNKQGRTLDRHIGDGLELPPAALQTLGPASILLFVPVYDRAVVPALRWATGNPSGLSMLQRVGAGMAVSLAGVAVAALVEARRLAMAREHGLVDDPSATVPMSWAWIVPQYAMMGVADVLAVVGLQELFYDQMPDGLRSLGLALYLSVMGIGGFISSLLISLIDGVTGSGGGDSWFADNLNRAHVDYFYWLLAGLSAVELALFLYFARSYVYKHKPN

SEQ ID NO: 52911 - protein, 112 aa, Zea Mays
MSELDRVAQDYKIHRDEIHNKLVQIMRERLLANLRKLPQIVEGWNGPEDNDVQPSQFAKAVTKEVTYLHRILSQTLLEVEVQTIFRQVVQIFHSHITEAFSKLEVNTPSGKE

SEQ ID NO: 52912 - protein, 71 aa, Zea Mays
MRAGTCKRLVVWESEALVVHLYEIMMVQFSLRFLYTSYVCQDVWPCNPWRSIGLGVPNFETILPQLNHYVF

SEQ ID NO: 52913 - protein, 88 aa, Zea Mays
MNFMRKQYRDRGYQEVLSPNIYNMQLWETSGHAANYKENMFVFEIEKQEFGLKPMNCPGHCLMFANRVRSYRGYTFAFGISSPPLMKH

SEQ ID NO: 52914 - protein, 143 aa, Zea Mays
MHGGLSPELNKLEQILNLSRPTDVPDTGLLCDLLWSDPSNEATGWAINDRGVSYTFGPDKVSEFLEKHDLDLICRAHQVVEDGYEFFASRQLVTMFSAPNYCGEFDNAGAMMSVDETLMCSFQILKPARKVLGGSTNNKSGFK

SEQ ID NO: 52915 - protein, 165 aa, Zea Mays
MSSKKNYYKEKLMRRKEEKKEEPETPRYRDRAKERREDQNPDYEPTELGSFHAVAPPGNDLRLADAHKISIEKSKYLGGDLEHTHLVKGLDYALLHKVRSEIEKKPEAEDGKDTKSRAAKEDQAVSFRTATAKSVYQWIIKPQSIIKENELFLPGRMSFIYNMEE

SEQ ID NO: 52916 - protein, 202 aa, Zea Mays
MEQFEVELKAMREAAEWRRIQGVSLAGDDELLAGPKESQRPTRDEWMTTLPPERKAGVPMHSTTSFSMNGKEGRGDTSVWTDTPLDRAQKAQQSYLEAYNKTKAIAEGDDVKSKNPDASIVDKYNTSKRSVSLVQKHRESKKEKKKQKQQEKEEWEGSHPWKPWDREKDLSAGRQNVALDAENMSQGLSSRFASGAVQRNFL

SEQ ID NO: 52917 - protein, 143 aa, Zea Mays
MEQVRSGDASATEYFELGAVMLRRKFYPAAIKYLQQAIDKWDRDEQDLAQVYNALGVSYKRENKLDKAIQQFQKAVELQPGYVTAWNNLGDAYEQQKDLKSALKAFEEVLLFDPNNKVARPRVDDLRPRVSMYKGVPVKSEKR

SEQ ID NO: 52918 - protein, 159 aa, Zea Mays
MPGHVVQAFTLLKSSTEAQSVVASLASDRNVWDAVLKNEKVMEFYKTHQTIQTFPEEAATAESPGKFEDATSENASNSELPTGSGASFADFVDNAKKKVMDVVHNITDFFRDLFNDSAEAQTGAGPSAEKGFSATEMAVGGSFMALTIAVILVVLFKRA

SEQ ID NO: 52919 - protein, 55 aa, Zea Mays
MLAEWPQESSPLRSSFQQSPPCAEPYHQSTAHQRAGGLELSWKPPSQQQMLPAQM

SEQ ID NO: 52920 - protein, 701 aa, Zea Mays
MPVAALRPPPVAVGAGRRSARLQARFALRASSLEASAAVTVTVNGSAEAAVERKEKVQEDKDNEGLPVKEEQERGLEVLYDDGFGSVTVKDYFAAAKVLCRDDGGPPRWFSPVECGHPAVDQAPLLLFLPGMDGVGTGLILHHKSLGKVFEVRCLHIPVNDRTPFEGLVQIVENLIKHEHDLSPDRPIYLVGDSFGGSLALAVAARNPQIDLVLILVNPATSFAKTPLQPVLPLLESVPSEFHATVPYLLSFVMGDPLKMAAVSIENNLSPPETLQKLSDSLTSMLPLLSELSDIIPRDTLLWKLKLLKAGAAYANSRLHAVQAEVLLLASGKDNLLPSGEEADRLFKALKNCRVRYFKDNGHTLLLEDGVNLLTVIKGANMYRRGRQRDSVTDYLPPTLSEFRQTFDVDHRLFHLALSPVMMSTLKDGKIVRGLAGVPDKGPVLFVGYHALMGIELSPLYEEFLREKRTVVRGMAHPFLFGKKFESSRQETSRFDTVSMYGGLPVTPINMYRLFQRNQFVLLYPGGVREALHRKGEEYKLFWPDQPEFVRMAARFGVTIIPFGCVGEDDVLELVLDYNDQKNIPGLREWIQSINKEAERVRDSVKGEDGNQDMYLPALLPKVPGRFYYLFGQPIEMKGMGNLVRDRKSANEVYLRIKSQVEEIMSYLKRKREEDPYRSLPQRALYQATWGASAQVPTFEP

SEQ ID NO: 52921 - protein, 472 aa, Zea Mays
MAVASRLAVTRVSPADGARPAAAAGRRSGLAVVRLPPTDSRGRRRRRGGAVAASPPTEEVVQMTEPLTKEDLVAYLVSGCKPKENWRIGTEHEKFGFEVDTLRPIKYDQIRDILNGLAERFDWEKIMEGNIVIGLKQGKQSISLEPGGQFELSGAPLETLHQTCAEVNSHLYQVKAVGEEMGIGFLGLGFQPKWALSDIPIMPKVNLDFSSEQDMIRKFRAGLALQPIATAIFANSPFKEGKPNGFLSLRSHIWTDTDNNRAGMLPFVFDNSFGFEQYVDYALDVPMYFVYRNNKYIDCTGMSFRDFMQGKLRQAPGELPTLNDWENHLTTIFPEVRLKRYLEMRGADGGPWRRLCALPAFWVGLLYDEESLQSILDMTFDWTQEEREMLRHKVPLTGLKTPFRDGYVRDLAEEVLKLAKNGLERRGYKEVGFLREVDEVVRTGVTPAERLLHLYETKWQRNVDHVFEHLLY

SEQ ID NO: 52922 - protein, 654 aa, Zea Mays
MGPKHTLPPGSVTSSAELASSVLKGSEDWDADVMDKYSIGKEGKSKNIDPVRKDDSVAILEQFFGNVLSKSGSNLPTYVENQPLKTDDDMITSVPESSKFAHWFLDEDLKPAEDLSSKSLLSMIVKNENPGLENLNHTPLSDAAAQNLSPRAPIDKLDSASELISFTSSTPANGVLEQCIHSDVPEAVPIMTCEDLEQTMLAQVSNSSSTQINATKEQLTVMDEPVAMQKVTVDNHASQHLLSLLQKGTDNKGAPSLGFQRESTDEPLSVDTNLMANGGISGSDPVNSVENVPTSGKDLTLEALFGAAFMNELHSKDAPVSIRGATTGGPTEFAEMGKTLLSSSHEGYYPVEQTVHFNNTKDAAVRREPGIEHSAVPGLSQGSASFDKKGMEIHLPEEDNLFTMSDSLLGQNSDILASVGSSRVEGLLPEKALDNLSYRFQSLVPGDAEHIQVYGPDALGSHPRDSQNMYHLLQGRPPMIAPHPMMDHIVNRKQPAPFDMAQSIHHDSHRSFPSNVNHMQHNLHGPGVPHLDPAGHIMRQHMSMPGRFPPEGLPRGVPPSQPVHHMAGYRPEMGNVNNFHMHPRQPNYGEFGLMMPGPSGPEVRGNHPEAFERLIQMEMSARSKQQQVHHPAMAAGRVPSGMYGHELDAKLRYR

SEQ ID NO: 52923 - protein, 491 aa, Zea Mays
MLVRAYDDNDPRLQEEVLRRTVSLSRQLDTKLVKQAVLPRVHGLALKTTVAAVRVNALRCLGDLVPSLDKEGILGILETVRRCTAVDHTAPTLMCTLGVANAIYKQCGVEFAAEYVIPLIFPLLTAHQLNVQQFAKYMLFVKDITSKIEEKRGVTVTDNGNTEVKASPSLANGIHSEPMPGQIPAAKSSPPWDEDWGPSKKTGVPSLSVDSSAQTKQPSVHPFDFSTQTKQSTPLPFDLSTRAKQPSLVSHATAATIPPAQPQPVQSLVPSSGPQTSGSCAPVDIEWPPRRSSSSDFNASLSISKENESGRLSSDGLDDIDPFADWPPKPSNVTSITATEHRPSINQNISGFSSGNIGFGGSGNSIGQAKSNQMSWSNTPNLMGMNSTGSYLNQGSAALGFGNPIGGLSTGLSNPSSSSTGLSMMQPKSDFGSLSMSANNAANGPPRLAPPPSTSVGRGRGRNQGQSALSRASRPPHSNSSSGQQPILDLL

SEQ ID NO: 52924 - protein, 1003 aa, Zea Mays
MELLLFGGGVFAELQWLIARQEYSHSSVLGIQDNRALKLPVCVNFNLQNGGAQEWADESRRLSLSKAGNSNGSTHLGSGIFHHEPLEDFKSSNQSLLHSVRQRMAPNSLANRHVNTELAKHHAIKHAAVAVSALTSVVNDDLKSVKRPKESEVEVHWSNGPKFHSHIPKISEVETSLRFDENATDGYAKDVNECSPEETVQPSRTRAPSSQESLDARKALSTIYDKVLVVDNVMSARSVVQLLTTKYRNYIHACDTEVANINVKQETPVGHGKVTCFSIYSGTKGAEADFGNGKTCIWVDVLDGGPDVLMEFVPFFEDSSIRKVWHNYSFDSHVIENYGIKVAGFHADTMHLARLWDSSRRTDGGYSLEGLTNDHRVMGVVPKELQKIGKRSMKTIFGRKKIKKDGSEGKITAIEPVEILQREDRELWICYSSLDSMSTLRLYESLKSKLERKPWTFDGYPRPGGSLYDFYEEYWCPFGAILVKMETAGMLVDRAYLSEIEKVAVAQRESAADKFRKWASKYCPDAKYMNVNSDTQIRQLFFGGIENIYKSGDFLPKSKAIKVPNNETAVSEGKKVPKYRTIDLFSIVEDLKTDIFTASGWPSVSGAALRNLAGKVPSDLVYSTDDVNDDECGIHSEISHCDLEDTSSYGTAYDAFGGGKEGKEACHAIAALCEICSINSLISNFILPLQGNHISCKEGRIHCSLNINTETGRLSARAPNLQNQPALEKDRYKIRQAFVAAPGNTLIVADYGQLELRILAHLADCKSMLDAFKAGGDFHSRTAMNMYQHIREAVEEEKVILEWHPQPGQEKPPVPLLKDAFGAERRKAKMLNFSIAYGKTAHGLARDWKVSVKEAKDTLKLWYSDRKEVLAWQMKQKQLAHEKREVYTLLGRSRRFPNMAHATSGQRGHIERAAINAPVQGSAADVAMCAMLEIDRNTRLKELGWTLLLQVHDEVILEGPSESAELAKSIVVECMSKPFYGTNILKVDLAVDAKCAQNWYAAK

SEQ ID NO: 52925 - protein, 268 aa, Zea Mays
MPRGSLENHLFRKSLPLPWAIRMKIALGAAKGLAFLHEEAERPVIYRDFKTSNILLDADYNAKLSDFGLAKDGPEGDKTHVSTRVMGTYGYAAPEYVMTGHLTSKSDVYSFGVVLLEMMTGRRSMDKNRPNGEHNLVEWARPYLGERRRFYKLVDPRLDGNFSIKGAQKTAQLAHACLSRDPKARPLMSQVVEVLKPLQNLKDMASSSYYFQSMQHERRTALANPYGSQSMKAQSTFARNGQQPMRSLSYGPHASPYRQSPRLDSKRQ

SEQ ID NO: 52926 - protein, 584 aa, Zea Mays
MAEIAGDEAPTPPTISGEVSGDPHTSAATPAGSSNKPPLRATKPGVKRLILTASVLLSFLVGLPFLLKSTEIHRSPLPSDAITALAHRLHSTPPSFPCALHAVFLRSVPGRSDDASLYRRLERSISAQLQLLAATSTAGNVSVSVTVESAGGCSSSSGSVGSGWQCGTVSSADLVVGDEVFDELLHSALGSVGGDGSRVYTVVVVEIDDADGMRVVVGKHRHAWVVGKADEVKAVSVIGKVFAKYFMNGGIEEGEAGIGKGEFMPVGSDGNVVLSFSLLNADPSDWVYDWDFEKIGEKMLNPVVEALRPIAEINIESQVLYHTPKSSYSYFDDKLGGNFLSMGDIPFFVNSNEWHLDTSISATGRSKVLQFVVYIPSARECPLYLQLPDGGLSKTNAFISPMWGGVLIWNSPDCSLGSKKTHGTQKKMSSQELMEALEIFVGQLRQLFGLKPSYFSQDMDVPTKFLVSEKGFTEWELDLLYRHHARSNLLSCLTTLESLSSLVHSLPRMIVMDEIGRQVELSLEAANLAQGNATLGISDSSAAIFRTSFLACAAGGNQRAETLQGRASKIFGISCFPGDILLIW

SEQ ID NO: 52927 - protein, 125 aa, Zea Mays
MAGMGDMPMRPARPGPPMQHRGPPPMARLRPEPIDREKTCPLLLRVFTRVAGHHQNEEFAVRGKEPKDEVQIYTWKDATLRELTDLVKEVALPARKRNARLSFAFVYPDKNGRFVVRQHVLVGRQ

SEQ ID NO: 52928 - protein, 93 aa, Zea Mays
MRLGLFFFVPSATSGRLARHSKQFVVVSVCSEFYGVGTLVEMSFHCLLFPAGSHFTKYFHHSCREALLSPNYLEHFVPPRNFRTFFPVFLAFF

SEQ ID NO: 52929 - protein, 322 aa, Zea Mays
MYRAAASLASKARQAGSSSAARQVGSRLAWSRNYAAKDIKFGVEARALMLRGVEELADAVKVTMGPKGRNVVIEQSFGAPKVTKDGVTVAKSIEFKDRVKNVGASLVKQVANATNDTAGDGTTCATVLTKAIFTEGCKSVAAGMNAMDLRRGISMAVDAVVTNLKGMARMISTSEEIAQVGTISANGEREIGELIAKAMEKVGKEGVITIADGNTLYNELEVVEGMKLDRGYISPYFITNSKAQKCELEDPLILIHDKKVTNMHAVVKVLEMALKKQRPLLIVAEDVESEALGLCCQSSWFWGKQEGKLTGPRYPYRRRGNN

SEQ ID NO: 52930 - protein, 126 aa, Zea Mays
MAEFLEGVLLECLWLQLLFRLWWLALSQRERNQSQRKHGRLNRWLLLHRRWLPLFHLRWPPALHRREHPAHHLMTLAAQSTTVRCRSATPASINTLTSTSTSTCRLPTHPGVGPSQCTSRIGMILT

SEQ ID NO: 52931 - protein, 269 aa, Zea Mays
MSSPWSPMSLEEEEEIQELDAEEQQDGEQPQQGDGLQQGSTAEARAQQTGKKRARSVANSSTKSEAKIKVEESAPGAATGVILSLRESLQDCKQSLASCQVELEAAKSEIEKWHSAFQSIPAVPSGTSPDPVSVVSYLSNLKSSEESLKEQLEKAKKREAAFIVTFAKREQEIAELKSAVRDLKTQLRPPSMQTRRLLLDPAIHEEFTRLKNLVEEKEKKIKELQDNVAAVNFTPSSKLGKMLMAKCRTLQEENEEIGAMASEGKEMDL

SEQ ID NO: 52932 - protein, 88 aa, Zea Mays
MIGRRRHRRIKKQRRYERLAATSQLSLWLTFSDTSSFKLRRSKGSIGHAFTVRIRTGNQNQTSFYPFVPNEIFCSRLSSILKNTCVIF

SEQ ID NO: 52933 - protein, 246 aa, Zea Mays
MRGGIQMCFPQFGYSGTLERHGFARNRIWSLDDEQPPLNHNDNGSKVSVDLILKPSEDDLKCWPHCFEFRLRASLSKDGDLSLISRIRNVNGKPFSFSFAYHTYLSVSDISEVRIEGLETLDYLDNLSHKERFTEQGDAITFESEVDRVYVSSPNVVAVIDHEKKHSFVIRKEGLPDVVVWNPWEKKSKTMVDLGDEEYKQMLCVDAAAVERAISLRPGEEWTGKLELSAVLSTNCSDHLDHPVSI

SEQ ID NO: 52934 - protein, 347 aa, Zea Mays
MSSVDLMDVTTVGKSSFTSQVTTINDLKAGPGVFTFNLTWDDISKNLQPMISNPMSTYKLYRNPRNKNAGNFMRLSDFLTFAKGKDLSGIMITVEHAAFMAEKLGFGVVDAVVKALDDSGYSKQTAQNVMIQSTNSSVLKKFKQETKYSLVYMIEEGVRDAAPSSLADIKKFANAVSVSTTSVLPQTHYYLTNQTNKLVTSLQSAGLQVYVYVLMNEFASQPNDFFADATSQINAYVQGAKVDGIITDFPGTAHRYKLNSCTSMGNSAPLFMQPPQPGSLLLTMAPDVQPPAAAPMPLLTDADVAEPALPPVSNTTTAASPSHAALRMRTDVSILIALLMLCASLLI

SEQ ID NO: 52935 - protein, 203 aa, Zea Mays
MELGATTALYPLHRCKTIYLVRHAQGIHNVAGEKDFGAYMSHELFDAQLTPLGWNQVDGLREHVKKSGLAEKIELVITSPLLRTMQTAVGVFGGEKYTDGVNAPPLMVENAGHSGRPAVSSLNCPPFIAVETCREHLGVHPCDKRRSITEYRPLFPAIDFSLIENDGDVLWEPDVRETNEAVALRGMKFMDWCILFRCLCLSP

SEQ ID NO: 52936 - protein, 272 aa, Zea Mays
MIVTLNAYNVLAARCAAEYLEMFETIDKGNLIYKIDVFLTSSVFRTWKDSIIVLQSTRSLVPWCEDLKVISHCIDSIASKASIDPSEVEWSYTYNRKKLPSENGIDSHWNGVRMQPMVPTDWWVEDLCELEVDSYKRVIMSIKAKGSTPAVVVGEALRAYAYRRLLGSLEDAVSNGVDCAKPRAVLDAIVSLLPAEEGSVSCGFLLKLLGAACLLESGESSHRSNLIKRIGAQLDGASVSDLLIIPPNTDENDTYSIDLVMAIVEEFHVVTE

SEQ ID NO: 52937 - protein, 945 aa, Zea Mays
MADGGRMKGVQSAGGGAGDDEEGNEEVREEPELALSLGRRVWHLPPRQEAAPRSLNWTPVLPEWNPDAAGSSQGVERALGGQSISSLGFHDMFGGILDDPQAGGSMEVGWGKLNEEDEDRDLQNKRLRVRHFGEENPLHSGASATPFGSESSFLPISDECVHLKLSRFPEHELEFGLSLFANDGSESPRDANNEQVDDAENSGGRNSVDVGIRMDLSDDFLHMIFSFLDQKDLCRAGVTCKQWRSASVHDDFWKCLKFENTSVSLENFVNICRHYQSVTELNLHGVINAETLVLEAIMFLRHLKTLTMGKGQLGESFFQALAECPLLTALTVNDASLGSGIQEVTVNHDGLRELHILKCRALRISVRCSQLQILSLRRTGMAHVSLNCPQLLELDFQSCHKLSDNAIRQAATACPLLAKLDMSSCSCVTDETLRDIASSCPSLSVLDASNCPNISFESVRLPMLIDLRLLSCEGITSASMAAIAYSRLLEALQLDNCSLLTSVSLDLPHLKNISLVHLRKFADLNLRSPVLSYIKVSRCSALHRVSITSTTLQKLVLQKQESLSSLSLQCHNLIDVDLTECESLTNAVCEVFSDGGGCPMLRSLILDNCENLSIVELNSSSLSCLSLAGCRSMTLLRLSCPNLQHVNLDGCDHLQSAAFCPVGLESLNLGICPKLSVLHIEAPNMSILELKGCGVLSKASINCPRLTSLDASFCRQLVDDSLTCMSEACPMIEHLILSSCLSIGIDGLSSLHCLHKLTLLDLSYTFLDNLKPVFNSCLQLKVLKLSACKYLSDSSLDALYREGALPLLVELDLSYSSIGQNAIEDLLACCTNLVNVNLNGCTNFQELVCGSDDSSCVDMPVDFCAPSSAIKSEEISERSGRLLEVLNCTGCPNIKKVVIPSIANFLHLSKINLNLSTNLKEVDLTCPNLLTLNLSNCSSLEVLKA

SEQ ID NO: 52938 - protein, 338 aa, Zea Mays
MATPLAPASSFITRPLALALVLVAAALCRPASCAAAAAAADRITRLPGQPEVSFGQYSGYVGVDGDGGGKRALFYYFVEADAPDPASKPLVLWLNGGPGCSSLGVGAFSENGPFRPSGQVLVKNEYSWNKEANVIYLETPAGVGYSYSADAAYYQGVDDKMTAMDNMVFLQRWLQKFPQYRGRDLYIAGESYAGHYIPQLAEAMVEFNNKEERIFNLKGVALGNPVLEFATDFNSRAEYFWSHGLISDATFRAFTSACNYSRYVAEYYGGALSPLCARVMNRVTRETSRFVDKYDVTLDVFLSSVLSQSKTLSPHVGQRVDVCVEDETVRYLNRRDVQ

SEQ ID NO: 52939 - protein, 382 aa, Zea Mays
MLSVLESAIKRDYLSSNFETTTELLNSSTQDFATQNSAGGSGSATALPWVPDTTAAVALRLLDLDASISYTLHPKLGSNKEQESGDFMKLPPRYPSMNKGKQEIEQFRPIGFDQQDGTLLPNSNGRRGRGRGGRGGSRGGRSRGHGGRVPRGIGSSSRIQFRDDNSMLYGRAPRKNARGGRGRGRGRGRGLRTVRPRQPSELSARSIPKANLLGSFSMLSKTNHTGTTHSPESSGAEEWAFERREYVKDDENNLVSQSDESEENVEPMNEEYGEHISGYPRDNSDSRPVQMMGDGSDDNDEDAEGDEGEEDGEDYEAEDPGDEDDDVEMDGDDDVEVDEDDDIEMDGDDDIEDDDDDDGGDGAANGDEDGGGTSSYSSEYSE

SEQ ID NO: 52940 - protein, 489 aa, Zea Mays
MVTATTTPPQCWRGLPALARAPPPLSSPLRPRAVAAAAPIYPLRRRIAITTTRGRRGTLDCSPRCTLETAGPGFYPLGLYEEGSNSLSRSPLSTFFGIMAPVFGSSSGGGASREKASGRGAAAAIEDSSIDIGDFFKGPLPGKFLKLLGFLALSRLGVYIPLGGVNREAFAGNLDQNSLLGTLDSFSGGGIGRLGICSLGIVPFINAQIVFQLLAQLYPKLQDLQRKEGEAGRKKVLQYTRYASVGFAIVQAIGQVLYLRPYVNDFSTEWVLTSVTLLTLGSVFTTFIGERISDLKLGNGTSLLIFTSIISYLPASFGRTVAQAFQDGNYVGLLTIILSFLLLVLGIVYVQEAERKIPLNYASRYSSRTGELQRSAYLPFKVNSSGVMPIIFSTSSLALPGTLARFSGLDFLKKAAIALNPGGALYLPTNVLLIAFFNYYYTFLQLDPDDLSEQLKRQGASIPLVRPGKSTAAYIKTKQDHGGDRRSYT

SEQ ID NO: 52941 - protein, 141 aa, Zea Mays
MAAAASMGHPYAPAELDLPGFVPLKLSQVEILVSYLGASVFVFLAVWLVSGRCVRLSKTDRLLMCWWAFTGLTHIMIEGPFVFTPDFFKKENPNFFDEVWKEYSKGDSRYVARDTATVTVEGITAVLEGPASLLAVARSSC

SEQ ID NO: 52942 - protein, 359 aa, Zea Mays
MDFMRQQYRDRGYQEVLSPNIYNMQLWETSGHAANYKENMFVFEIEKQEFGLKPMNCPGHCLMFANRVRSYRELPLRMADFGVLHRNELSGALTGLTRVRRFQQDDAHIFCREDQIKDEVKAVLEFINYVYEIFGFKYELELSTRPEKYLGEVETWNKAEQQLTEALNEFGKPWKINEGDGAFYGPKIDIGVFDALKRKFQCATLQLDFQLPIRFKLAYSAEDEAKIERPVMIHRAILGSVERMLAILLEHYNGKWPLWLSPRQAIVCSVSSGSVEYAKQVLATLHEAGFHVDIDASDRTIQKKVREAQLAQFNYILVVGAQEAETGNICVRVRDNADLVTTSVDGFITRLREEIAAFK

SEQ ID NO: 52943 - protein, 203 aa, Zea Mays
MPARTIRVRGIGIQHSSHLLPRPTAPPQRDGGEQQHHGMRDAAGADLRGARDRVGGVVRVGAGRGVRAPGAVARGHPGRAAPAGRAGGLRGRVLEPARPACLLPLRHGVARRAPHRAPRLRLRRHPRVRRLPRARPRLRRLPPRRLLHVAPRVRLRRPRALGQGQGLPRRLRHLQEARAPGRLHQRRPVLSVAPLPAPGLTYR

SEQ ID NO: 52944 - protein, 159 aa, Zea Mays
MEIKAQLEDRNQKLLEESTYAKGLASAAGVELKALSEEVTKLMNQNEKLATELSSLRSPTPAPRRFNNGPRGTRRESMSRREPASRRDTNASHEREKALEALLMEKEQKEAELQRKVEESKQKEAFLESELANMWVLVAKLKKSQGYDHEDLEAKHDGS

SEQ ID NO: 52945 - protein, 50 aa, Zea Mays
MRFHCRSSWWGRIRHELPSNNSSRICLKLFIMHQLCIEFCAYNEVTGIGV

SEQ ID NO: 52946 - protein, 131 aa, Zea Mays
MRYPTTGTEGLLMGILVEGTSGAAKLLRANGITLLKVREEAANVLGKSEMFYFSPMHPPLTEAAQRALDWAVNEKLKSGEDGEVNANHLLLGIWSDDESAGHKILYSLGFDDVKASLLAKTADEEAAMSPR

SEQ ID NO: 52947 - protein, 139 aa, Zea Mays
MELISLVFWGYNIGTRLVDEFLAKSNVSRCVDFKETADVIAKLGFKMFLGVTATVTNWDVEGTSCSIVLEDNPLVDFVELPDTCQGLQYCNLLSGVIRGALEMTEVTWVRDMLRGDDAYEMRVKLIKQVPEEYPYKDDD

SEQ ID NO: 52948 - protein, 376 aa, Zea Mays
MAGSSLGVQIYAVFISKASGEELKKYSGQTDAELWIIPTYENSAWPIMAISFVSLLAMSAILVACFFARRHQIRRDRARLPRAQESHGMSSQLVKAIPSLIFTKVQEDNCTSATCAICLEDYSVGEKIRVLPCRHKFHAACVDLWLTSWRTFCPVCKRDASAGTSDPPVSESTPLLSSSATRLPESTVLASLRSTAAASPPRTISRHPLLRSISRNYSVSGSSILRTPDSRFDANSSICTSGSNLDLANVPSPWSGTWHRASAHSLCRGYLSPPIGIRNTSAHVSRSANGSPSRYVGSSRMSHGSSGQQHPHLRHCTLSGPSLFTMVPQSPQQNQLQHGGYSETNLSAAASAQSFRQLYLQHCPDSDTSSQSLPGC

SEQ ID NO: 52949 - protein, 1229 aa, Zea Mays
MMDSYEECRDPPRLYLLDKFDNAGAGACVKRYSDPSYFKKAWDTMRADKNANVQREKRSQKIKRKGSRLREPYHGQAMPRHRGTEFQRSLTAGQLVNSRQFASPSNDGQGISEHKSTPDARSNPDNMSRSSSLSSKTQLSSVEQAIDTKPSAVSHENGHGKSLDTKLHKPGGLPSPVLLNSTTVDDHSDHLKQGSPPDGMVARSPYVKWDEKTAIIMSTSSIYCDDVVMDEVEDAEPTCISSVQKETDHKVMDTLHQQDALLKKTKSLLVPSVLNHHDDIPGEADNYMDALNTLESETETESEFQTKNRVPAPSFKAEAPQVGAIDNIVPQCLDSSAADFIDTCQESDIICTSERAIDFPSLSNADSLEVSQLELSDYTSVSPYKESSVITNIHESGAEGARGDPCEIIEPLQVHSAILANDGSPVCNEIPKSKPDDDLGYFQEIPQPGFSTCMVIPSNKESAVANKNLEGDAKSDDDLIDGTADNVVSGPKIANMVVDEVGFKMAPANRSSPGDPSDDSCVIPESRPQDYAVKSYEGVGDCGVTEVSKLCSEPLNKPSDNICATQDVPTNTSTMSAGASEVSSSWSEPVTELIDDRCATQGVPANASTTSTVVPSVKLWTNAGLFGLEPSKPPVFGNGPREDTPPGFKEAQPVHSTEFTEVHCSKPTESAAVDVPNGNTSITSSFVEKLVGIRPGSANLNSSGANQSAARIPDPIHSHTDGHSDFSSSFEHNNMTGKHTSISELLEFEGSADTGTKIYSTDMRNNAVSASSFSSIAQRFLANTLQRRTSKYTDLPMSSERANADTSAKSESTLNPVVEPSEAVFAEETKFENKTENGMDGLSKTSIFSSRHYSEKSSPPLEYMKISFHPMSAFEMSKLNLDFCDGNIHEISDDMMLPTFQLLSESSIPQPGSGSESEDDTFGRSYSYSSYDDLSPRLYSNSEAWDQDDGTGLEEHELYDDSNQIGSSTAPLSSYMGFEQMNLSDMKSDISLANIGDQNVIGTLQSCTVEELPNFDTLMSRSDDQNGETPIPHNLGNMTPDEDQLPPPPPLPPMQWRMTRQTTSLEEETCITTKDMLRKTSSLPHIHTSAQEEHCPPTAPLDLQGHAGEVGVQKTGGVREITNPPSIIDIKSSLLQQIRDKSEQLKLNGHERSKKAVGGDIKSLDEREELLQQIRSKTFNLRRTNASKADGSSQSTASSNVAAILEKANAIRQAVASDEGGDDDTWSDI

SEQ ID NO: 52950 - protein, 275 aa, Zea Mays
MSIDPKLLLSNFPMISMILGLLIIGKTLLVTFVGRVFGVSTIAAIRVGLLLAPGGEFAFVAFGEAVNQGLLSPQLSSLLFLVVGISMALTPWLAAGGQFLASKFEQHDVRSLLPVESETDDLHDHIIILGFGRVGQIVAQLLSERLIPFVALDVRSDRVAVGRALDLPVYFGDAGSREVLHKVGAERACAAAITLDTPGANYRAVWALNKYFPNVKTFVRAHDVDHGVNLEKAGATALCATSGNSLGYGFSRVMSKSKSISSDDESETVDGALAI

SEQ ID NO: 52951 - protein, 227 aa, Zea Mays
MCHMSACALLSYAAIAWLRVVPMQLVRSRVQLAKIAALSLVFCGSVVSGNVSLRYLPVSFNQAVGATTPFFTAVFAYIMTVKRESWVTYLTLVPVVTGVIIASGGEPSFHLFGFIMCIGATAARALKTVLQGILLSSDGEKLNSMNLLLYMAPIAVIFLLPATIFMEDNVVGVTIELAKKDFTIVWLLLFNSCLSYFVNLTNFLVTKHTSALTLQMHKHQTTLSWFC

SEQ ID NO: 52952 - protein, 316 aa, Zea Mays
MPRHDALKALEIYRRAGQQAGNLSDFYENCRGLELARNFQFPTLREPPQTFLATMEDYVKEAPRMVPVREPLELPERLLLTYKPEESEEILEPAPVEEEKVPVEEPVLVPPVTEVVSPPPKAEVPDTGDLLGLDDTNPAVSAIEESNALALAIVPTDGASTTGNTAFQDKGFDPTGWELALVTAPSNTTSSTSVGQLGGGLDKLILESLYDDGAYRQRQQQQLYGSAAPNPFMANDPFAMSNQVAPPPSVQMAAMSQQHQQIPTMMQPNPFGPPMHPQVSMAPATNNPFLDAGFGAFPAANNGHQQHNPFGSAQLL

SEQ ID NO: 52953 - protein, 248 aa, Zea Mays
MDQSSSGGTAFSKSVWTVKEYVGGGDSPYVTLYYHSFDGEQGFPGNLDAYVTYRVSGPYTLGVHMSATALDRATPVNLLLHAYWNLGGQGSGDVLGHELRLHASRYAVLDEELLPSSGRVAPVAGTPLDFRTPTPIGARIRQVTGGKVVGYDANYVVDGEGMRPVAQVRDGASGRAVELWANQATVQLYTGNWLNHTQGKGGGVYDQYAGFTLETMGYVDAVNHPEFPSQTLLPGQEYKHDMVFKFSF

SEQ ID NO: 52954 - protein, 155 aa, Zea Mays
MQALPLHFCREEVHDYLKSLCPDLHITGGEYDEYARYPETKTLTIGQFKLGLCHGHQVVPWGDLDSLAMLQRQLDVDILVTGHSHQFKAYKHEGGVVINPGSATGAYSSITYDVNPSFVLMDIEGLRVVVYVYELIDGEVKVDKIDFKKAATMQA

SEQ ID NO: 52955 - protein, 245 aa, Zea Mays
MYGGTFCRYFIASILLWRLRLHVDLLPPSFKHLQFGRFLKNGFLLLARVIAATCCVTLSASMAARLGSTPMAAFQICLQTWLACSLLADGLAFAGQAILASAFARKDYPKATATASRILQLALVLGLLLSILLGVGLRIGSRLFTSDQGVLHHIYIGIPFVCLTQPINALAFVFDGINYGASDFGYAAYSMVLVAVVSIICILTLESYGGFIGIWIALVIYMSLRMFAGFWRIGTAQGPWAYLRG

SEQ ID NO: 52956 - protein, 535 aa, Zea Mays
MDRHDKEKEMASVLLSYLYGNVVSSTQIRLGFVLLLEAVDDLAVDIPDVVDVLALFIARAVVDDILPPAFLSNAKVSLSGSSKGMQVVQIAEKSYLSAPHHAELIERRWGGSTHITVEEVKRRIADLLKEYIRNGDTAEACRCIRELAVPFFHHEVVKRALTLGMESPAAEALIVKLLKEASEECLVSSSQMMKGFHRVAESLDDLILDIPSAKSEFQLLVSKAISEGWLDSSYVNSGVNGSVEDDEHEKLARYKREAVSIIHEYFFSDDTTEVIRSVKELGYPEYNPIFVKKLITIAMDRKNREKEMASVLLPSLSMELFSSEDIAKGFVMLLESAEDTALDILDASDELGLFLARAVIDDVLAPLNLDEISSKLPPNCSGAETLNMARSLASARHAGERLLRCWGGGTGWAVEDAKDKITKLLEEYESGGDVGEACNCIRELGMSFFNHEVVKKALVMAMEKKNERTLNLLQECFGEGIITINQMTKGFSRVRDGLDDLALDIPDAREKFLSYVQRAKKSGWLLPGFGVASSA

SEQ ID NO: 52957 - protein, 312 aa, Zea Mays
MGMEVVGAEAAPAEIKVSDDVNLFQEKESKATAKEREEAAVFGSETTTNVTDLAPPTDVKDEWPEPKQTYAFYFIKVRSFEDPKLRAKLEQADKEFQKKIQARSKLIEAVRAKKAERSSIIAELKPLSAENKQYNGVVNEKIKEMEPLRNSLGKFREENNAMRAQSAGLCSSIEDLDLTIKMLNDRIVHESIPLSEEKRLVKEIKDLEKTRSKVISNAANRAKLQGTVVEKEAIQDQVKIIGEGIDEIKKERQAVRSKIKVLEDELKLVDAEIASLQEDLDAATARKDKAYELLQELRAGRDAKRYYSSVFD

SEQ ID NO: 52958 - protein, 234 aa, Zea Mays
MKQPIFVYYQLDNFYQNHRRYVKSRNDAQLRDKSKASDTTNCDPEAKTVDGKPIVPCGLIAWSLFNDTYTLIHNNKTLRVDKKDISWKSDRDHKFGSDVFPTNFQKGPLQGGKILNPKIPLSEQEDLIVWMRTAALPTFRKLYGRIHVDLKENDTITVQLENNYNTYSFSGKKKLVLSTATWIGGKNDFLGLAYLTVGGICFVLAFAFTLLYLIKPRKMGDNNYLSWNRPTLGR

SEQ ID NO: 52959 - protein, 237 aa, Zea Mays
MWAHLAVALFVALAVAPPARGSDVPSFPLSQAQSPSNSSSPSNAASRPCHLDLSAELFGGVAAACGAGGGPGSLDRGRCCPVLAAWLFAAHARTALSVPPAPPPSALAGDEGMGPDGGDDGPMVPYDNQRCVDALGAALERRGVALPRPNATCDTVLCFCGIRLHQIGSLRCPAAFAVKAGAAARNATPTAAVKALEKSCRNASYAGCSRCVQSLQKNSIAARSLPPRVFRGLAASW

SEQ ID NO: 52960 - protein, 160 aa, Zea Mays
MADLYLSRKLAGASSPVSGSGGPNWFPASPTIGSKISRASRASAATVHGNENDVEELEMLLEAYFMQVDGTLNKLTTLREYIDDTEDYINIQLELFLSSGTVCLSLYSLVAGVFGMNIPYTWNDGHGYIFKWVVLVSGLFCAFIFVSIVAYARHKGLVGS

SEQ ID NO: 52961 - protein, 554 aa, Zea Mays
MVGDFSEDNRSGINHSLHRISAIRNRKAQIIGLTCRVGRAISGSAEMIRDLVVSGGSILVIGPPGVGKTTLIREIARILADEGKKRVIIVDTSNEIGGDGDVPHSGIGRARRMQVPKVTMQHNVMIEAVENHMPEVIVIDEIGTELEAMAATTIAQRGVQLVGTAHGVTIESIIKNPCLQMLVGGIESVTLGDEEAKKRKVQKTILERKGPPTFLCAVEMISKTECRVHHRLDATVDAILAGKPPKFEARKMHNKSTEFEMPLVIPDREYEIESLPLYQEVMVTRSLSSDGNFSDDFAASRQTKSKSMPSEDNFGDNFVYTRKAKGNKPVHGKSLVQVYTYQISEADILQVATMMGFDDELDVTDDIGAADVILASSSEMKQNPWIHNVAKYHKLPIFVVKTNTMAQIVKAIRMIVGRDNTSSSKQPEVMEGEIEIEDDAPKRKPSLEEIDALEEARLAIEYIVIPGGEPVELLPRCSEIVARQLELVESYQLLAETFGSDSNSRLQILPMKITKRGSSKDNGASKPTKQTGSDLIVSENGGGSSFSRLPFLPK

SEQ ID NO: 52962 - protein, 276 aa, Zea Mays
MSKKLILYRADLANLVNEAALLAGRLNKEIVEKVDFIRAVERSIAGIEKKHAKLKGNEKAVVARHEVGHALVGTAVANLLPGQPRVEKLSILPRSGGALGFTYTPPVTEDRYLLFVDELRGRLVTLLGGRAAEEVVLAGRVSTGALDDIRRATDMAYKAVAEYGLSQRIGPISLATLSNGGLDDSGGSPWGKDQGHLVDLVQREVKALLQSSLEVALSVIRANPAVLEGLGAYLEEKEKVEGEELQEWLKSVVASKELTSFIRGQQEQVLQLEAGS

SEQ ID NO: 52963 - protein, 76 aa, Zea Mays
MATTSLASRLYKDDAARVWPCAARLRPGSGGSAGSPSLTERAATLPPPLVTAGLAAPVAAGAAGAMVWCPARRARS

SEQ ID NO: 52964 - protein, 661 aa, Zea Mays
MLNCKVNYYLISKLRDDIQKLQASEAEIKALSFNYAAMLKEKEEQLGKLREENGSLKRSLESCKAVSANSNGTLERSPRVQRNAVQENSLNLTKQNGYGGGSSHSTQTNGLHPMAGYQKGSISEEERSSFTTKQASLENEIKQLKQQLSNNSEKETEIRRRLEDETKRSEFLQQQLNELKMDKERMTTSMEELQKELSEKKSEFRRVQDEQSKRDKEHVSDGSLQSLRNMLMALQKENSSLKIEKVKLDADLKSMKSTSQKTVDSTLDANKISDLEKVKKEMDSLKRALQDASRERDKAVQDLARLKQHLLDKDLEDQEKMDEDSKLIEELRVVCEQQRAHIMQLERALKVEMAKQEENKKVISEEHQRSNEQIENLNYKLASCMSALESKNVELLNLQTALGQYYAESEAKDRLGGDLAVAREELSKLSESLKVANQTIEISRREKEDMATKLSQAERMLADGKRSMQKLEDDNSRLRRALEQSMTTVNRMSLDSDNSVDRRIVIKLLVTYFQRNHSKEVLDLMVRMLGFSEEDKQRIGFAQSNAGRGVVRGVLGLPGRLVGGIVGGGPSGKSTQSSQDSQSFADLWVDFLLKETEEREKREASEAARQSQQESHTTTGPSTSSSIQQPSQHNPSNVAPGPSTMPHTAWVSQNRNPQQFR

SEQ ID NO: 52965 - protein, 482 aa, Zea Mays
MPAAASSSLPPSVNGCGATPRRRLLLRDLSSRRCCYEGYGPTWDSDDEYDNFIRKMNPPRIVIDNESSAEATIVRVDSANEYGILLEVIQVMIDLNLVIGKAYITSDGGWFMDVFNVTDKEGKKIKDEATLTQIEDYIRKSLGADSRYIPSRRRSVDVAAAADHNIIELTGTDRPGLLSEVSAVLTSLKCNVVSAEIWTHNTRAAAVMRVTDEDTGLAVTDAERLERIREKLSYLFRGGNLSRGATVSSRTATTHTERRLHQMMLDDGDYEQLQRQAPGQSQRPNVTVRNWNDKDYSVVTIRCKDRSKLLFDTVCTLTDLQYVVFHANIDAKDNQAYQEFYVRHVNGSPMNTETERLRVIQCLEAAIERRVSEGVKLELCTNDKVGLLSEVTRIFRENSLTVTRAEVTTRGRMAVNTFYVRGSAGEAVDQKAIDSIREAIGHSLQVKGQAEPPEPQKKESPTWFLFANLFRPRSLYSFGFMR

SEQ ID NO: 52966 - protein, 156 aa, Zea Mays
MHGGLSPELKSMDQIRNISRPVDVPDVGLLCDLLWSDPDKEIDRWGENDRGVSYTFGADVVAEFLQKHDLDLICRAHQVVEDGYEFFAKRQLVTIFSAPNYCGEFDNAGALMSIDNSLVCSFQILKPSEKKGKAGNGNMPKPGTPPRKIKISVTHI

SEQ ID NO: 52967 - protein, 200 aa, Zea Mays
MGFSGVILKPWRACIATMDWPSSSNSTKAMPGLASIIRTSRKPGYCWNRIWSIMLVVWSGKFWMKRMLFGGAGRVSNRVWGDSENEHELLLSGGDEGGAVLVLNVTAARRGLVSQWDGAGASQAESRGATLAKTQLGRAAVGVGGGRREEDDDEGAGAVIRAHLLSDFKAAVRAGKVLVSDPSSGSAGGLFGKWGMDNTL

SEQ ID NO: 52968 - protein, 281 aa, Zea Mays
MLTQMVLSNEEELKIKYFKDDSLNRLCPVDVFLKAMLDVPFVFKRVDAMLYIASFYLEINRLRMSYATLEGACQEMRSSRLFHKVLEAVVNFGNFMSTNSGSPSSKGLEPNTVLKIADVKGADGKAALMQFIVQEIVKPEGYDVMQHGSGACKMSTNTLQCDAECRKHGLEVVAKLAAQLSNTKKAASIDIKRLSQSVSELGMGLGKVHDVVRLNSMVTSVDSARRFHNSMSTFLRHARGGDPEAPVPGEHLLVISEGDGGVVLLGSQSTMKLTCSESLLE

SEQ ID NO: 52969 - protein, 309 aa, Zea Mays
MYEEFWRGTGDSASIFIPGWQTMSYFSDLGGICWFLEPGFEREVRRLHRLVGNAVVDGYHVLVGTGSTQLFQAVLYALSPASDGTPMNVVSPAPYYSSYPSVTNYLNSALYRWAGDANTFDGDTCIELVCSPNNPDGGLRKPVIKSKSSKPVYDFAYYWPQYTPITEAAAHDIMLFTVSKCTGHAGTRLGWALVKDTKVAQKMIKFIELNTIGVSKDSQLRAAKIIGAICNGYEPVPSSAFPMRLSPPILHLHGFATTRMILKIWRPSYSRKRLSLEVAQGLEWMQGLSELVWLTQTKPSMCSSIVWPQ

SEQ ID NO: 52970 - protein, 589 aa, Zea Mays
MTKFQFNLLLQRVGLSALSPGMEDINFEAWWSRSAEVTPKDLRDGLNSLVVLGAWTIWRHRNDCVFNGAQPSIARLLTSASDEFNMWCFAGAKGNYVMPNVSFDAVIIIVQVAQVRVAAAESSIQIVYLSVNDKVELDIKYADELGYIFNEAHGVVPVKIETNYPDVVSVLMPRDFNGTYDTRERFVLQARSHGTALVRLHTNNVPNKVDFIMVSVGAQIYPRDVILHSGQHLNFTVIGDSMDMCGHGHWLSSNGKIVHINRVTGEAQARSEGVAEVIFKGSNFKLQTTITVLKVNQIVVDAPAETLTNAAGLPDGYMFSVRFSDSIEHSIGSSASPINVPFECKVDPSFVGFVEPWTEHATKKSYCLFHPYSPAQLLPVKLDPNEGTLHILVRANLKEDPKVTGSAHALFVKGFYIKEPGKLNLTPSCNHSVITIDGNTDIELFWNAKDLLRVSRVDTNENNGVLSRVVYRVEALKRLSFSDKVTIVLPATGQTEEVEVSYDTGEEAESPSSWGLTTTAVMLTCIIVTIVTVALFIKLLQRPIRQAPSGSMTASTPARAPAADPAAMADPASPANAIEHPVWNDVDRV

SEQ ID NO: 52971 - protein, 1109 aa, Zea Mays
MAKPMKYDDEEEISSSAEEEDQSDAAGSVSGEEGDDDDEDAAAPPAEEAEGEGQQEEEVDEEEIEAVTTGAGAEDEEDAGAVTAAEGDDESQSTEDDEPVARDKDDDDETDAVVGKREKARLKELQKMKKHKIQEILDTQNAAIDADMNNKGKGRLKYLLQQTEIFAHFAKGSQSNEKKPRGRGRHASKMTEEEEDEEYLKEEEDALAGAGGTRLVSQPSCIKGKMRDYQLAGLNWLIRLYENGINGILADEMGLGKTLQTISLLGYLHEFRGITGPHMVVAPKSTLGNWMKEIQRFCPILRAVKFLGNPEERNHIRDDLLQPGKFDVCVTSFEMAIKEKSALRRFSWRYIIIDEAHRIKNENSLLSKTMRIYNTNYRLLITGTPLQNNLHELWALLNFLLPEIFSSAETFDEWFQISGENDQQEVVQQLHKVLRPFLLRRLKSDVEKGLPPKKETILKVGMSQMQKQYYRALLQKDLEVINAGGERKRLLNIAMQLRKCCNHPYLFQGAEPGPPYTTGEHLVENAGKMVLLDKLLPKLKERDSRVLIFSQMTRLLDILEDYLMYRGYQYCRIDGNTGGEDRDASIEAFNKPGSEKFVFLLSTRAGGLGINLATADVVVLYDSDWNPQADLQAQDRAHRIGQKKEVQVFRFCTEIMQTKLQYTIEEKVIERAYKKLALDALVIQQGRLAEQKTVNKDDLLQMVRFGAEMVFSSKDSTITDEDIDRIIAKGEETTAELDAKMKKFTEDAIKFKMDDNAELYDFDDEKDENKVDFKKLVSDNWIEPPRRERKRNYSESDYFKQALRQGAPAKPREPRIPRMPHLHDFQFFNNQRLNELYEKEVRYLMQANQKKDTIDGEDEDQLEPLTAEEQEEKEQLLEEGFASWTRRDFNTFIRACEKYGRNDIKSISSEMEGKTEEEVQRYAKVFKERYKELTDYDRIIKNIERGEARISRKDEIMKAIGKKLDRYKNPWLELKIQYGQNKGKFYNEECDRFMLCMVHKLGYGNWDELKAAFRMSPLFRFDWFVKSRTTQELARRCDTLIRLVEKENQEYDEQERQARKEKRLAKNTTPTKRAALRNSEGESAPLSSFKRRRQSLMDDYVGSGRRKRG

SEQ ID NO: 52972 - protein, 171 aa, Zea Mays
MHSFDPPYAHNGVKPDNVLITQRKQSHLAILMDFESAGPARKTIRSQAEALQLQEWASEHCSSHYRAPELWECPSHADIDERTDIWSLGCTLYAMMYGKSPFDYELDESSGESLHSVIKNVQIKWPEEAGSTYPDSLRQFITWMLQPHPAVRPHIDDIIIHVDKLVMKYSN

SEQ ID NO: 52973 - protein, 96 aa, Zea Mays
MLIYDGLHYDALAMSPAEGAPEEFDQTIFPVNHDRSIGPAEGLALNLVREAQRKRSYTDTANFTLRCGVCQIGVIGQQEAVEHAQATGHVNFQEYK

SEQ ID NO: 52974 - protein, 352 aa, Zea Mays
MVAKDSRCLSHMFAAEIFMHRFLLSSAIRTLNPEVADWFYTPVYTTCDLTPWGHPLPFKSPRIMRSAIQFISNRWPYWNRTEGADHFFVVPHDFGACFHYQEEKAIERGVLPLLRRATLVQTFGQKDHVCLKEGSITIPPYAPPQKMKTHLVPPGTPRSIFVYFRGLFYDTANDPEGGYYARGARASVWENFKNNPLFDISTDHPPTYYEDMQRAVFCLCPLGWAPWSPRLVEAVVFGCIPVIIADDIVLPFADAIPWEEIGVFVAEDDVPRLDTILTSIPMEVILRKQRLLANPSMKQAMLFPQPAQAGDAFHQILNGLARKLPHGEDVFLKPGQKVLNWTEGPRGDLKPW

SEQ ID NO: 52975 - protein, 88 aa, Zea Mays
MAAATGYSDAPTDEQLLAYAELPKHGRDMAEVFAVRIPATVGGNLPPRGSIVFYGGHCCSDFIYSWSPLEEEEDTSKQICDSQAGQQV

SEQ ID NO: 52976 - protein, 800 aa, Zea Mays
MTELNDGKPRKIKNARPYSFTLEEDTTSYGTYFRGGIVTQVKPPKVLKFKTLKDAIKEPGEFLMSDFSKFDRPPLLHLAFQALDKFRSELARFPIAGSDDDAQKLIDLAISINETLGDSKLEEIDKKLLQHFASGSRAVLNPMAAMFGGIVGQEVVKACSGKFHPLYQFFYFDSVESLPVEPLEPSDLKPENSRHDAQISVFGAQLQKKLEQSKIFMVGSGALGCEFLKNLALMGISCSQNGKLTVTDDDVIEKSNLSRQFLFRDWNIGQPKSTVAATAAMAINPELHVEALQNRASPETENVFNDAFWESLDAVVNALDNVTARMYIDSRCVYFQKPLLESGTLGAKCNTQMVIPHLTENYGASRDPPEKQAPMCTVHSFPHNIDHCLTWARSEFEGLLEKTPTEVNAFLSNPGGYATTARTAGDAQARDQLERVIECLETDKCETFQDCITWARLKFEDYFSNRVKQLTFTFPEDAMTSSGAPFWSAPKRFPRPLEFSSSDSSHLNFLLAASILRAETFGIPIPGWAKNPKKLAEAVDKVIVPDFHPKEGVKIETDEKATSLSSASVDDAAVIEELIAKLQAISKTLSPGFRMNPIQFEKDDDTNFHMDLIAGFANMRARNYSIPEVDKLKAKFIAGRIIPAIATSTAMATGLVCLELYKVLAGGHKVEDYRNTFANLAIPLFSMAEPVPPKTMKHQDMSWTVWDRWTVTGNMTLRELLEWLKEKGLNAYSISCGTSLLYNSMFPRHKERLDKKVVDVAREVAKVEVPSYRRHLDVVVACEDDDDNDVDIPLVSIYFR

SEQ ID NO: 52977 - protein, 242 aa, Zea Mays
MSDSNVKWIDGLQFTSLYWPPPLDAEQKQAQILAYVEYFGQFTADTDQFPEDIAQLIQSSYPSKENRLVDEVLATFVLHHPEHGHAVAHPILSRIIDGTLCYDRHGPPFSSFISLFSHNSEQEYSEQWALACGEILRVLTHYNRPIFKVERQHTEAECSSTSDQATSSDSTDKRSNNSPGNESDWKPLRPLTPWITDILLAAPLGIRSDYFRWCGGVMGKYAAGGELKPPTTGREGLAALDC

SEQ ID NO: 52978 - protein, 189 aa, Zea Mays
MPNLPYLYAGDFIKVLKKKHASNSYSKMVIYVEACESGSIFEGLMPEDLNIYVTTASNPVENSWGTYCPGMEPSPPPEYITCLGDLYSVSWMEDSETHNLKKETIKDQYEVVKTRTSNSNKYKEGSHVMEYGDKTFKDEKLSFYQGFDPANANIANMLLWPGPKGAVNQRDADLLFMWKRRRLEEELAF

SEQ ID NO: 52979 - protein, 410 aa, Zea Mays
MDINVLAFLIPAGIISCFLPLSDASSFMVLYLVTAVYFSGVMVRLMLVLAPAACILSGIALSEVFSVLTRSIKLQLSKLFDDSPTSSGDSSPESSTNSTKNENRNEKHEIAPKEKTSKKNRKKEKEVAESVPVKPKKENRLLVLPFELSVMGILLLIVLGGFYVVHCVWAAAEAYSAPSIVLTSRSRDGLHVFDDFREAYAWLSHNTDVDDKVASWWDYGYQTTAMANRTVIVDNNTWNNTHIATVGTAMSSPEKAAWEIFNSLDVKYVLVVFGGLVGYPSDDINKFLWMVRIGGGVFPHIKEPDYLRDGQYRVDAQATPTMLNCLMYKLCYYRFVETDGKGFDRVRGYEIGKKHFKLTHFEEVFTTHHWMVRIYKLKPQKNRVRGKLKKLKASAKTSPTLAAGRKNPWQ

SEQ ID NO: 52980 - protein, 394 aa, Zea Mays
MYDDIAHNILNPRPGVIINHPKGANVYDGVPKDYTGDQVTTENFFAVLLGNRSATTGGSKKVIDSKPNDHIFIYYSDHGGPGVLGMPNLPYLYAGDFIKVLKKKHASNSYSKMVIYVEACESGSIFEGLMPEDLNIYVTTASNPVENSWGTYCPGMEPSPPPEYITCLGDLYSVSWMEDSETHNLKKETIKDQYEVVKTRTSNSNKYKEGSHVMEYGDKTFKDEKLSFYQGFDPANANIANMLLWPGPKGAVNQRDADLLFMWKRYEQLNGGTEEKLRALIEIKETVQHRKHLDSSIDFVGRLVFGFEKGPSMLEAVRTSGQPLVDDWDCLKRMVRIFESQCGSLTQYGMKYMRAFANICNSGISEMKMRESSISACSSYNSARWSPMARGHSA

SEQ ID NO: 52981 - protein, 356 aa, Zea Mays
MNLDSSQSAGSSTTAIASTSSSKAPLPNGGCSDMLGCLNNDLTFPPGGYPSLRLPVVTSLEANPVARCRRVFAHAHDYHINSISNNSDGETFISADDLRINLWNLEINSQSFNIVDVKPTNMEDLTEVITCAEFHPSHCNTLAYSSSKGSIRLIDLRQSALCDNHSKIFEEHEAPGSRSFFTEIIASISDIKFSRNGKYILSRDYMTLKLWDLNMNSGPVSTFQVHEHLRPKLCDLYENDSIFDKFECCLSGDGLRVATGSYGNIFRVFGRPPGSIEATTLEASRNPMRRQIANPARPTRTLTSFARGVRRGGENQGVDANGNSLDFSTKLLHLAWHPTENSIACAAANSLYMYYA

SEQ ID NO: 52982 - protein, 117 aa, Zea Mays
MSFFLLAPVTLLTEGVKVSPAVLQSAGLNLKQIYTRSLIAACCFHAYQQVSYMILARVSPVTHSVGNCVKRVVVIVTSVLFFRTPVSPINSLGTGIALAGVFLYSQLKRLKPKPKAA

SEQ ID NO: 52983 - protein, 379 aa, Zea Mays
MMGEAKENDVYEEELLDYEEDDDKTVDGSAAKPTGEVAKKGYVGIHSSGFRDFLLKPELLRAIQDCGFEHPSEVQHECIPQAILGMDVICQAKSGMGKTAVFVLSSLQQIDPVAGQVAALVLCHTRELAYQICHEFERFSKYLTEVKVAVFYGGVHIRKHKDLLKNECPHIVVGTPGRILALARDKDLSLKNVRHFILDECDKMLESLDMRRDVQEIFKMTPHDKQVMMFSATLSKEIRPVCKKFMQDPMEIYVDDEAKLTLHGLVQHYIKLSEAEKNRKLNDLLDALDFNQVVIFVKSVSRAAELNKLLCECNFPSICIHSGMTQEERLTRYKNFKEGHKRILVATDLVGRGIDIERVNIVINYDMPDSADTYLHRCS

SEQ ID NO: 52984 - protein, 118 aa, Zea Mays
MFNLFQKGEPMALKHNGSLYAHVYFARSGYPVDPTDPKYEQKSSFGRTHPVVAFLPKSKAGKKKSLLGDSEEPEEKAPHNKENKEYEDKDEGLTEYISYFGMVVSIVELWRLRPLWQL

SEQ ID NO: 52985 - protein, 239 aa, Zea Mays
MWPEGVPTAASVQEILFFQAQTMEMMYKIIADELKATDNKDMHPEDYLNFFCLGNREEPPSNGSPESEKSTDKSAAALASKYRRFMIYVHAKGMIVDDEYVILGSANINQRSLAGSRDTEIAMGAYQPHYAWSTKNGHPHGQVYGYRTSLWAEHLGTVDDRFKDPSSLECVRFVNQIAVENWQRFTAEEMSTLQGHLLKYPVKVEADGKISPLSDQECFPDVGGKILGAPTSLPDSLTM

SEQ ID NO: 52986 - protein, 423 aa, Zea Mays
MEAAGRLPLLIVSSLLLLLSPERPAEAAPRRIQPLATAALSRLYDTSNYGRLQLNNGLALTPQMGWNSWNFFACNINETVIRETADALVSTGLAALGYNFVNIDDCWSYVKRGKQDQLLPDPKTFPSGIKALADYVHGKGLKLGIYSDAGKFTCQVRPGSLGHENDDAAIFASWGIDYLKYDNCYNLGIKPQKRYPPMRDALNSTGRQIFYSLCEWGQYDPALWAGKVGNSWRTTDDITDTWKSMTDIADKNNKWASYAGPGGWNDMLEVGNGGMTLAEYRSHFSIWALMKAPLLIGCDVRNMTSETMEILSNKEVIQVNQDPLGVQGRKILGQGKYGCREVWAGPLSGNRLVVALWNRCSDTANVTMKLPAVGLDGYAAYSVRDLWKHETISENVVGTFGAQVDVHDTNMYIFSPATIVASV

SEQ ID NO: 52987 - protein, 522 aa, Zea Mays
MAIRSKAWISLLLALAVALSARAEEEPAAAAEGEAVLTLDVDSFDEAVAKHPFMVVEFYAPWCGHCKKLAPEYENAAKALSKHDPPIVLAKVDANEEKNRPLATKYEIQGFPTIKIFRDQGKNIQEYKGPREADGIVDYLKKQVGPASKEIKSPEDATALIDDKKIYIVGIFAEFSGTEFTNFMEVAEKLRSDYDFGHTLHANHLPRGDAAVERPLVRLLKPFDELVVDSKDFDVAALMKFIDASTIPRVVTFDKNPDNHPYLMKFFQSSAPKAMLFLNFSTGPFDSFKSAYSAAAEEFKDKEIKFLIGDIEASQGAFQYFGLKEDQTPLILIQDGDSKKFLKVHVEADQIVAWLKEYFDGKLTPFRKSEPIPEVNNEPVKVVVADNVHDFVFKSGKNVLIEFYAPWCGHCKKLAPILDEAATTLQSDEEVVIAKMDATANDVPSEFDVQGYPTLYFVTPSGKVTSYDSGRTADDIVDFIKKSKETAGAATTTTTQAPPASEKAAAAEPVKDELRGLERWRA

SEQ ID NO: 52988 - protein, 542 aa, Zea Mays
MEREMADAPAAAIPAAEPLAAVAEEGEGEAAAEAVGSTLTMERVAAAKKFIESHYRSQMKNIQERKERRFRLERQLASSQVPKEQQINLMKDLERKETEYMRLKRHKICVDDFELLTIIGRGAFGEVRLCRERTSGNIYAMKKLKKSDMVVRGQVEHVRAERNLLAEVASHHCIVKLYYSFQDTEYLYLIMEYLPGGDIMTLLMREDTLTEHVARFYVAETILAIESIHKHNYIHRDIKPDNLLLDKNGHMKLSDFGLCKPIDCSKLSTLNEDEPMSDDNLRESMDIDSSLSDTANGRRWRSQHEQLQHWQMNRRKLAFSTVGTPDYIAPEVLLKKGYGMECDWWSLGAIMYEMLVGYPPFYADDPITTCRKIVHWRNHLKFPEDAKLSNEARDLISRLLCDVDHRIGSAGADQIKAHPWFRGVAWDKLYEMEAAFKPQVNDELDTQNFMKFEELENPPAKTGSGPSRKTMLNSKDLSFVGYTYKNFDAVKAIKISDLQRNSSLTRPSIGSIFGPPGMDSPMEPNGRGTHMHTVSSGDPMIP

SEQ ID NO: 52989 - protein, 142 aa, Zea Mays
MGSAKALAKELVRSRRAVNRLYENKAQLNSVSMHLGEIVATARTVGHLSKSTEVMKIVNNLMKAPELATTMQEFSKEMTKAGVMEEMVNEAVDSALDSEDMEEEIEEEVDKVLASVAGETASQLPDAARTQKIHEASTSRVL

SEQ ID NO: 52990 - protein, 408 aa, Zea Mays
MKNKSLKATVLNNELTIVASEIVNFDSELPHYKTEGGVYRDPADDRHIFSPTIMWVEALDVLLEKLKPKINFGKVVAVSGSGQQHGSVYWKKGSHAVLSSLDASKSLLSQLKDAFSTMNSPLWMDSSTTKQCREIENAVGGALELAKLTGSRAYERFTGPQIRKIYQTEPDVYEDTERISLVSSFMASILVGSYASIDETDGAGMNLMDIKQRIWSKSALEATAPGLEAKLGNLAPAYSAAGRIAPYFVERFQFDKNCLVIQWSGDNPNSLAGLTLNTPGDLAISLGTSDTVFGITTEAKPSLEGHVFPNPVEPNGYMVMLCYKNGSLTREDVRNRCADKSWDVFNSYLEKTPPLNGGKIGFYYKDHEILPPLPVGFHRYTVENLNDVSSDALLEREVEELDPPSEVC

SEQ ID NO: 52991 - protein, 105 aa, Zea Mays
MNEIIDKYNTHSKNLGKTEQPSLDLNLEHSKYANLNEQLAEASLRLRQMRGEELEGLNVEELQQLEKNLESGLHRVLQTKDQQFLEQINDLERKWRSFFFCTGTT

SEQ ID NO: 52992 - protein, 365 aa, Zea Mays
MRFKMRFEGDDAPERRFSGTIIGIGSLPAMSKSLWADSDWRSLKVQWDEPSSILRPDRISPWEVEPLDAANPQSPQPPLRAKRPRPPASPCMVSELPSGFGLWKSPIESSCTLSFSEPQRARELFPSIPTSTLSSSSNVSFNSKNEPSMLTSQFYWSARHTRADSCAASTNTVVIEKKQEPSSGGCRLFGINICSAEEEVLPEVTAPGVGYEQTAASVELNSDKLSQPSDVNNSDALAASSERSPLESQSRQVRSCTKVIMQGMAVGRAVDLTKLSGYSDLCQKLEEMFDIQGELGSTLKKWRVIFTDDEDDMMLVGDDPWDEFCRMVKRIYIYTYEEAKKLTSKSKLPVSSDSSKLSAANSLSE

SEQ ID NO: 52993 - protein, 692 aa, Zea Mays
MVGESTEAVGAGVGGGSSGQKMPTLEEYGTNLTKLAEEGKLDPVVGRQDQIERVTQILGRRTKNNPCLIGEPGVGKTAIAEGLAQRISNGDVPETIEGKKVITLDMGLLVAGTKYRGEFEERLKKLMEEIKQNEDIILFIDEVHTLIGAGAAEGAIDAANILKPALARGELQCIGATTLDEYRKHIEKDPALERRFQPVKVPEPTVDETIQILRGLRERYELHHKLRYTDDALIAAAQLSYQYISDRFLPDKAIDLIDEAGSRVRLRHAQLPDEAKELDKELRQITKQKNEAVRGQDFEKAGELRDREMELKAQITAIIDKSKEMIKAETESGDVGPLVTEADIQHIVSSWTGIPVEKVSSDESDRLLKMEETLHTRIIGQDEAVKAISRAIRRARVGLKNPNRPIASFIFSGPTGVGKSELAKALAAYYFGSEEAMIRLDMSEFMERHTVSKLIGSPPGYVGYTEGGQLTEAVRRRPYTVVLFDEIEKAHPDVFNMMLQILEDGRLTDSKGRTVDFKNTLLIMTSNVGSSVIEKGGRKIGFDLDYDEKDTSYNRIKSLVTEELKQYFRPEFLNRLDEMIVFRQLTKLEVKEIADIMLKEVFDRLKAKEINLQVTEKFRDRVVDEGYNPSYGARPLRRAIMRLLEDSLAEKMLAGEVKEGDSAIVDVDSDGKVIVLNGGSGVAEPLEPALST

SEQ ID NO: 52994 - protein, 279 aa, Zea Mays
MGSVWNRLGSEVTVVEFAPDIVPSMDGEVRKQFQRMLEKQKFKFMLKTKVVGCDTSGDGVKLTLEPAAGGEQNILEADVVLVSAGRTPFTSGIGLETLGVETDKAGRILVDKRFMTNVKGVYAIGDAIPGPMLAHKAEEDGVACVEFIAGKEGHVDYDTVPGVVYTHPEVASVGKTEEQVTALGIPYRVGKFPLLANSRAKAIDDAEGVVKVIAEKETDKILGVHIMAPNAGEIIHEAVIALQYGASSEDVARTCHAHPTVSEALKEACLQTFDKAIHI

SEQ ID NO: 52995 - protein, 98 aa, Zea Mays
MLNCLVYNALGVSYKRENKLDKAIQQFQKAVELQPGYVTAWNNLGDAYEQQKDLKSALKAFEEVLLFDPNNKVARPRVDDLRPRVSMYKGVPVKSEKR

SEQ ID NO: 52996 - protein, 483 aa, Zea Mays
MDKAYIAALSAAALFLLHYLLGRRAGGEGKAKAKGSRRRLPPSPPAIPFLGHLHLVKAPFHGALARLAARHGPVFSMRLGTRRAVVVSSPDCARECFTEHDVNFANRPLFPSMRLASFDGAMLSVSSYGPYWRNLRRVAAVQLLSAHRVGCMAPAIEAQVRAMVRRMDRAAAAGGGGVARVQLKRRLFELSLSVLMETIAHTKTSRAEADADSDMSTEAHEFKQIVDELVPYIGTANRWDYLPVLRWFDVFGVRNKILDAVGRRDAFLGRLIDGERRRLDAGDESESKSMIAVLLTLQKSEPEVYTDTVITALCANLFGAGTETTSTTTEWAMSLLLNHREALKKAQAEIDAAVGTSRLVTADDVPHLTYLQCIVDETLRLHPAAPLLLPHESAADCTVGGYDVPRGTMLLVNVHAVHRDPAVWEDPDRFVPERFEGAGGKAEGRLLMPFGMGRRSRCGPSGWCLPRCSSASTGTRLMELRLT

SEQ ID NO: 52997 - protein, 61 aa, Zea Mays
MRGGLSEIVNGPYHCCLPRCVVVVAAPAELWWLVGNSRYALFEAHYEHMVLRCAHNAYYDK

SEQ ID NO: 52998 - protein, 132 aa, Zea Mays
MIWAMCKMAQWDTPLHSMAATWRSLPTSCRKRLAWIISSYAHAALSTGSSLLSVCNCHQTMQLCILCSSRSPQRWLDHLHGRTVHKSQTFGEDTGGLEFWWIVLVRVARSPYIIGSGHAGCAVTLGVRSNLA

SEQ ID NO: 52999 - protein, 176 aa, Zea Mays
MASPIPREWVGLQQFPPATQTELHELLGKLKEEDVSTLTILVMGKGGVGKSSTVNSIVGERIATVSAFQSEGLRPMMWSRTRAGFTLNIIDTPGLIEGGYINEQAVDIIKRMDTLDGQVIRAITNSFGKDIWRRSLVVLTHAQLSPPDGIEYNDFFTRRSEALLRYFRMELRGFQN

SEQ ID NO: 53000 - protein, 95 aa, Zea Mays
MSGAGEEDKKPAEGGAHINLKDGNEVFFRIKRSTQLKKLMNAYCDRQSVDMNAIAFLFDGRRLRGEQTPDELEMEDGDEIDAMLHQTGGSVPSTT

SEQ ID NO: 53001 - protein, 153 aa, Zea Mays
MQMSSSYILEAREGLLQSSPTKHKLLSESRNTTEPEESELSPASIQNKHGVSEAPSFQELTSDPVPNVEADKHPISSTEAEIVDKSVIQEELVMKTEAKSLPTEESNPDPADDDDEKEVDDWLQDVDSVPSKTGNNTAVGEEEDVSFSDLEDD

SEQ ID NO: 53002 - protein, 171 aa, Zea Mays
MRMKKSQWQDVIDLNLTGVFLCTQAATKVMMKKKKGRIINIASVVGLTGNAGQANYAAAKAGVIGFTKTVAREYASRNINANVIAPGFIASDMTAELGEELEKKILSTIPLGRYGRPEDVAGLVEFLALSPAASYITGQVLTIDGGMVIGLWYSTVCFEGRVDTRNLHTYS

SEQ ID NO: 53003 - protein, 51 aa, Zea Mays
MDLLPDVLGLQHLVPHCSKLHYSLLCQICILFTVGTRCCFKHGTSGRTVLS

SEQ ID NO: 53004 - protein, 109 aa, Zea Mays
MVNHTKRDLHNFLIRKLYRENLLNELMRETDEVLMRRQRIQEMLEILEQAHRTLEEFPFEVDKLEKGYNLTEHATGLSKIHGVSGDSTNVIYTSSPNCYSPHRASHMVL

SEQ ID NO: 53005 - protein, 131 aa, Zea Mays
MSHSEAKLFEYYAKLRSCIHIMWWSAREASLSDSLTCHRRNQAPPQAVDYAGFGFGMRTTAVFVISHIVTRETSSFIITMYHHPTELWMRLVHRPDKALLCSRASFLYHDSKVCFFPLSIKKKNKEVEESL

SEQ ID NO: 53006 - protein, 131 aa, Zea Mays
MQSVFNRERNKFGRGYESWRENGPPRGYNYIPRDDWYWQTDTSHSEHKNRRTYTPAGPRVYPMSHHYAVLGLDRSRATPYTDAEVKTAFRTKAMEVHPDQNQNDRDAAEEKFKEVVKSYEAIKSERKNGVS

SEQ ID NO: 53007 - protein, 258 aa, Zea Mays
MDRNSRRSKGVGYIEFYDVMSVPMAIALSGQPLLGQAVMVKPSEAEKNLVQSNATSGGAASGGARKLYVGNLHSNITEDQLRQVFEPFGQVELVQLPLDAMTGLCKGYGFIQFARLEDAKAAQSLNGQLDIAGRVIKVSAVTDHVGVQASGATTGDLDDDEGGGLALNASSRAALMLKLDRSGTATSLTGGIGAAGVAVPATSVIGAAGAASLLSPTVSAVGSVPGAPVLPITAQNVIMSTPTEFLLLKNMFDPSLER

SEQ ID NO: 53008 - protein, 174 aa, Zea Mays
MTDLERKVQTLQTEATTLSAQLTLFQRDTTGLSTENAELKIRLQAMEQQAQLRDALNDALKQELERLKHATGEMTNSSEAYNMRFQHVPYNSSFFPLSQQNASPHLGSTQLPLPFHPPHPNVPNHQMVSHRNTLPDIMQQESLGRLQGLDIGKGPLVVKLESSSISASESSSTF

SEQ ID NO: 53009 - protein, 262 aa, Zea Mays
MDLLYKDYQTDHKFTLTTYSSNGVAVTATSTKKADLIFSEIHSQIKNKNMTVDVKANSESNIITTVTVNEIATPGLKTILSFAVPDQRSGKVELQYLHDYAGVNASVSLTANPVANLSAAFGTKALAVGAEISFDSATGNFTKYNAGLMFTHEDLIASLNMNNKGDNLTGAYYHKVSELTNTAVGAELTHSFSTNENTLTFGGQHTLDPLTVLKARINNSGKASVLIQHEWRPKSLVTISAEVDTKTIEKSSKVGIAVALKP

SEQ ID NO: 53010 - protein, 240 aa, Zea Mays
MYVIEYDGKGLLNLKPKKKAASTGQAETHASAGGSTSYQQHLSSTSMPGSSPSGGTDSVGYGVDQSATHLSQLQSSSTNLQTPYDDTFSFLPPNLLTGSANDAMGLELGQLHQVISQGQPIQPANVGYVDWPRNRDSQYADDFTEDIRVKSHQMLESEDMQQLLRVFSMGGASGSLSDDTFNFQPYMPSPLPNPGFESERSHSSGKAVVGWLKIKAAMRWGIFVRKKAAERRAQLVELED

SEQ ID NO: 53011 - protein, 330 aa, Zea Mays
MEPAAEDAAAAAPDSWETADIDGPMSRLILSARRVSSSPDFADDQDPPQPPPTLQPQGAPSAPSDAREDVVAQVDQFLREALEKPRERLSVLRMEQEILKFIHDPSRTEYEFNGLPTSYLRLAAHRLAQHYFLQSIAIPDNSLPDGTGSRIILRKTTFDCRLPAVRLADIPVNLPQEDISVAKVAIKQRPQKNLHGMNSSSAHSSRDNLQKSVEERKEEYNKARARIFNNSNSSTATDERSAEEVTLPSTLHRSTSLELNSSNRIGQGAEITLERSLTTTSASSRSNRSKIDKEPAVNRNKQNNRVAIFRDRESERKDPDYDRSYDSLFN

SEQ ID NO: 53012 - protein, 432 aa, Zea Mays
MLDIKGADASKVILVVGIMTLHSFGEGSGVGVSFAGSKGFSQGLLVTIAIAVHNIPEGLAVSMVLASRGVSPQKAMMWSIITSLPQPIVAVPAFLCADAFQKVLPFCTGFAAGCMIWIVIAEVLPDAFKEATPSQVASAGTLAVAFMETLSTVLLGFTDGNNVEDASGFLVSLVFGLGPLIGGIILVTFSLGFSMPHPLLTGVASGIAFRLAAWRPVQLLMTSKMGLFTTLFLLIGGSLAYHAATSSILRLFNRKRSSVNVIASSSGLSLSALTVQSLLACGAVFLHAYAEGLALGVAARKAYGLGRYMVLPASLHGLPRGAAAASCVYGATDSWRGALAAAALTGLAAPSAAISAILAKIDYDGLDYWMVIACGALIPSFGRVFRRSLRLDVRKSVVGLLVGVAFASVCLMSTRFICLHTPYCNSAPEAVT

SEQ ID NO: 53013 - protein, 465 aa, Zea Mays
MDDSLYDEFGNYIGPELADSDADDDSDAAGASPSSTASRSPSPAARSPSGSPSRPAALMDVDEDEGDPSQQAVVLAEDKKYYPTAEEVYGPGVEALVMDEDEQPLEMPIIAPPRVVKFEERQVSIKAVPMSLVLEGGNGKSYLCNIMDTPGHVNFSDEMTAALRLADGAVLIVDAAEGVMVNTERAIRHAIQERLPIVVVINKVDRLITELKLPPNDAYFKLRHTLEAINDLISSCSTTVGGTQLVDPIAGNVCFASGAAGWSFTLQSFAHLYLKIHGVQFDHEKFASRLWGDLYFHPDSRTFKKKPPKEGANRSFVEFILEPLYKIYSLVVGEQKGNVESKLAELGVTLSNAAYKLNVRPLLRLACRSIFGTGTGFTDMLVKHIPSVKDAAARKIDHIYTGPQDSSIVDAMKKCDPNGPLMVNVTKLYPKSDCSVFDVFGRVYSSTIQTGQSVRVLGEGYLTNP

SEQ ID NO: 53014 - protein, 210 aa, Zea Mays
MCIIDHQALPRLLNLLTQNHKKSIKKEACWTISNITAGNKDQIQAVISAGIIAPLLQLLQGAEFDIKKEAAWAISNATSGGSHEQIKYLVSEGCIVPLCDLLVCPDPRIVTVCLEGLENILKVGEHDKTMGATGDINVFAQMIDDAEGLEKIENLQSHDNNEIYEKAVKLLETYWMEEEDDAMATAGEAAPAVFDFSQGGNPPGGGLNLN

SEQ ID NO: 53015 - protein, 576 aa, Zea Mays
MISARTAAASPASLWKRGGQSEGGGSCDGCRTYRNTLRRAAAAKVRALPSRAVEAVKMGSAAEVEQEEAEVAAAADGVVVEDHYGEDSATEELPIMPWAFSVASGYTLLRDPHHNKGLAFTEKERDAHHLRGLLPPAVVPQELQIKKIMHNLRQYQVPLQRYMAMMDLQERNERLFYKLLIDNVEELLPVVYTPTVGEACQKYGSIFRQPQGLYVSLRDKGKVLEVLRNWPHRNIQVICVTDGERILGLGDLGSQGMGIPVGKLALYTALGGVRPSACLPITIDVGTNNEKLLNDEFYIGLRQKRATGEEYHELMEEFMAAVKQIYGEKVLIQFEDFANHNAFNLLAKYSKSHLVFNDDIQGTASVVLAGLLAALKVWAHEHEPLTTLYDAVQSIKPTVLIGTSGVGRTFTKEVVEAMASFNERPIIFSLSNPTSHSECTAEEAYNWTQGRVIFASGSPFDPVEYDGKVFVPGQSNNAYIFPGFGLGLVISGAIRVHEDMLLAASEALAAQATQENFDKGSIFPPFTNIRKISARIAAAVAAKAYELGLATRLPPPRDLVKYAQSCMYTPVYRNYR

SEQ ID NO: 53016 - protein, 412 aa, Zea Mays
MWGPQFEKATYKNRQRLYLSEQTDGSVPNTLVIANCEVVKPRVAAAEHISQFNEEARSPFVKKYKTIVHPGEVNRIRELPQNSKIIATHTDSPDVLIWDVEAQPNRHAVLGASESRPDLILTGHKENAEFALAMCPAEPYVLSGGKDKSVVLWSIQDHISALGDSSSSPGASGSKQSIKTANEKESPKVDPRGIFHGHDSTVEDVQFCPSSAQEFCSVGDDACLILWDARTGTAPAVKVEKAHSGDVHCVDWNPLDVNYILTGSADNSVRMWDRRNLGSGGAGSPIHKFEGHKAAVLCVQWSPDRASVFGSSAEDGFLNVWDHEKVGKKKNSNVPAGLFFQHAGHRDKIVDFHWNSSDPWTIVSVSDDGESTGGGGTLQIWRMSDLIYRPEDEVLAELENFKAHLASCAPKN

SEQ ID NO: 53017 - protein, 273 aa, Zea Mays
MAHSEGFSVPDVVPCGGRGLSSPHLHWPMVDVDEVVIQRSLWSLEALQLVEGSVASVVECLLALKDNVTTGLRQNITNNAAKTPLRRKLELEESDEPVISVMTPGRRSGEERWKGHWDSKSQQRSILHSGQKVHDAFQLKRASYTDLPPAKVSEMMHPRSIDNAPTQSLLRVVNGILDESIERKRGEIPHRVVYLLRNVVQEIEHRIAIQADHIRNQNSIIKTREDKYRSKIKALETLVNGTNEENEMTVNRLELVEDGWVIVYPSFDRRKFT

SEQ ID NO: 53018 - protein, 321 aa, Zea Mays
MRYAMQQAFKSMMTQSAPNSFGSNSPFPFSMPPQASPTAPSTYPYLEPKKDTSPHVSTVDVSANEVEATGTSKEVDVTETPKPSKKFAFVDVSPEELQQKNLQSSPETVDVKHDSTYSESKEDTEEQVPTISTNTESKEDTEEKVPTNGASFKLNEGAAHGPTESNNSASMLSVETIEKMMEDPAVQKMVYPYLPEEMRNPNSFKWMLQNPMYRQQLQDMLNNMGATPDQWDNRMLDHLKNFDLSSPEVRQQFAQVGMTPEEVVSKIMANPDVAVAFQNPKIQTAIMDCSQNPLNIVKYQNDKEVMDVFMKISQIFPQING

SEQ ID NO: 53019 - protein, 287 aa, Zea Mays
MDATLSTTTTQDSLLFLLPSAATLLSPLLTVLLVAVSLLWLFPGGPAWAFVSRSRATPPGAPGLVTALAGPAAHRALASLSRSLPGGAALSAFSVGLTRLVVASQPDTARELLASAAFADRPVKDAARGLLFHRAMGFAPSGDYWRALRRISSAYLFSPRSVAAAGPRRAAIGERMLRDLLSGAAGREVVMRRVLHAASLDHVMATVFGARYDAASPEGAELEEMVKEGASGGGAGAWWAESTCSWPGSSKSTGTRRTTPLESRPPPETSSTSCWDWMARRSCRTPT

SEQ ID NO: 53020 - protein, 344 aa, Zea Mays
MNQSSCTKINGENSVHFNAVTEFSPMDSSDLCTSDQSKSSRRGPRSREDFPQDQSCWYDDCGDESGRIGELQWKSRERTRSINRSRNAASTSNNRTRERQSYNSCSCGHLEDYGVMDSCFLPTARSGKETKIARKSGVEKPRVQYHRCYTLDSFIVSKGNRAGSTQKNAIPKQIWEPMDARRKTKLHNTVHDSGSVNDVDSLKHVVFDNSGSQNFGVGCESQPQASESSRDECNSDQPCANGNDEGSRHDEELMMNSAGSDSSSSCMSEGDRESSSSSTTSSSAQNPESSSESEESPERINSTVGTQSSRAAASRSLLEACAGPAAALPKHVSTSTSANNNGVS

SEQ ID NO: 53021 - protein, 595 aa, Zea Mays
MQLRNKEIDIEKGVNRRPLYESHPLSSFSWTRTDSMDMGDWSKKCKEALSKFELLKEGKSKEDIVYEKAVQILHGTKDEVHDIVQSALKSSDLKGLHAQCLTDIWIGRERFAFVDLSAGPFAWGPSVGGDGVRTELSLPNVAKTVGAVAEVTEEEAEEKLQDTIRERFSSFGEDYHAVDILLAEIDVYELFAFKHCVGRRIQLALCKELDERMHDLKKELEGYNTGDFDETNKKKALDALKRMESWNLFRDTSVEHHSYTVAHDSFLAQLGSMLWGSMRHVIAPSASHRVYHYYEKLSFQLYFVTREKVRSIKQLPVNVKSIRESLNSVLLHHQNSMFSQNMLSLSEDPSLMMAFSMARRAAAVPLLLVNGTYKSTVSTYLDSAILQHQLQKLNEHNSLKGRHSNHRSTLEVPIFWFIHNEPILLDKHYQAKALSNMVVVVQSDDDSWESHLQCNGRPILWDLRKPVKAAIAATAEYVSGLLPPHLVYSHAHETAIEDWTWSVGCNPSAVTSEGSQLSEFQQDVIARNYIITSVEESIQVINSAIQQLAHESKMVEKYNAVVSLWRRVSAMSKGLRYGDAVKLMSMLEDASNGKC

SEQ ID NO: 53022 - protein, 586 aa, Zea Mays
MEVCKAQSSDTLKLSPDDEIEGEIVYLQSRLLDGVVSMKQRYEDLILKVVQNISYELDSFNKRKWDHIIVNQFLRDLREAKKRGNSERRHKEALAILAATAPSVTPTSRNTTVRKETENNVTPAKRENMPRSITGSSRIGQLSSSPQAKDLSFSNSDVSDETNFGIFNLAKFSKKSALPCDICMRCDTILNRIFVCSSCKATVHLDCYQSLVYPTGPWKCELCHEMPSDSVTSGEQSDQNGPKACLVQCGLCHGTSGAFRKTVKGQWVHAFCAEWLLETTFRRGQHNPVDGMERLHHKDKDTCSICHRCVGACLKCCTLDCQITFHPSCARDAGLYMNTKRLGNMLQHKAYCCRHSIEQRKAYSQQYGPDEIKGMKQMRVELELLRFLCERIVKREKVKKDLVGCAHDILAARRITAVSSLWTSCYTSGPGASSESATTSVNNKSYGGTIQRSDDVTVRLEDVTVDSTVTKKHTVRFSLHNRDTDRNTADSSTSTISYKRKLDDGESLAFKSHPGTPATALLESRDAEKPIDKKLRDMYQKELVMVTSHQALLKNKTPPERYVYTRRSSMSKRKQCSQHVVQRPGG

SEQ ID NO: 53023 - protein, 1073 aa, Zea Mays
MVRKKRTGPGGSGETSGESSGASGQGSSQRPERTQQPGAGRGWVPQQGGRGGGQHQGRGGHYQGRGGPGPHHPGGLPEYHQREYQGRGGEYQGQYQGRGGARSRGGISQPYYGGHRGGSVGRNVPPGPSRTVPELHQAPYVQYQAPVISPSPSGPGSSSQPMAEVSSGQVQQQFEQLAIHGQSSMSQEVQVAPASSKSVRFPLRPGKGTYGDRCIVKANHFFAELPDKDLHQYDVTITPEVTSRGVNRAVMGELVTLYRQSHLGGRLPAYDGRKSLYTAGPLPFTSMTFEITLQDEEDSVGGGQGGQRRERVFRVVIKFAARADLHHLAMFLAGRQADAPQEALQVLDIVLRELPTARYSPVGRSFYSPNLGRRQQLGEGLESWRGFYQSIRPTQMGLSLNIDMSSTAFIEPLPVIDFVAQLLNRDISVRPLSDSDRVKIKKALRGVKVEVTHRGNMRRKYRISGLTSQATRELSFPVDDRGTVKTVVQYFMETYGFSIQHTTLPCLQVGNQQRPNYLPMEVCKIVEGQRYSKRLNEKQITALLKVTCQRPQERELDILQTVHHNAYYEDPYAQEFGIRIDERLAAVEARVLPPPRLKYHDSGREKDVLPRVGQWNMMNKKMVNGGRVSNWACINFSRNVQDSAARGFCHELAIMCQISGMDFSLEPVLPPVTARPEHVERALKARYQDAMNILRPQGRELDLLIVILPDINGSLYGDLKRICETDLGLVSQCCLTKHVFKMSKQYLANVALKINVKVGGRNTVLVDALTRRIPLVSDRPTIIFGADVTHPHPGEDSSPSIAAVVASQDWPEVTKYAGLVSAQAHRQELIQDLFKVWQDPQRRTVTGGMIKELLISFKRATGQKPQRIIFYRDGVSEGQFYQVLLYELDAIRKACASLEPNYQPPVTFVVVQKRHHTRLFANNHNDQRTVDRSGNILPGTVVDSKICHPTEFDFYLCSHAGIQGTSRPAHYHVLWDENKFTADELQTLTNNLCYTYARCTRSVSIVPPAYYAHLAAFRARFYMEPDTSDSGSMASGARGPPPGAARSMRGAGSVAVRPLPALKENVKRVMFYC

SEQ ID NO: 53024 - protein, 52 aa, Zea Mays
MEVHDDPLNAPCDGPTQWPLRNLEELLEELIAIARVTKGKKPFKIDLTPFQE

SEQ ID NO: 53025 - protein, 675 aa, Zea Mays
MANRVLLLLILASRSESGIYSQMLAKIAGHFLRNLKSQLPHSRMLAISALNTLLQGSPHKTSAQNSKQPIDHPEDCNISSTEEILNEIIREEGFMNETLNSLSHVHIISDNDGSSKASYGASSFQSGSDKAITYFYFDFSASWPRTPSWISLLRGHTFYSSFARIFKRLIQQCGMPVISSLQSTLEEFLISKERPRQCVAAEAMAGMLHSDIIGNLECENNWLMAQLHKIMLAPSVESAPEWAACIRYAVTGKERAGTRAPVLRQKVLECLCTPLPHSMATSVLAKRYSFLSVALIEISPPKMSPAEKQYHVKILDELLDSMNHSSAQVREAIGIAMCVTTSNMRLSGLFGTGCSPQGLHGDVSMIEQTGNKYWSERLTDGANELAVSIQNSTQSKQLESTSDSAEDSMDDREQADAKRMETIFHFMIASLKSGRSSVLLDTIIRLVYPILSLQETSNKDLSLLAKSAFELLKWRILHRPFLETAITSILPLVSDPNWRTRSALLSYLRTFTYRHTFILSGSEKSQIWQTIEKLLVDNQVEVREHAAGVLASLMKGIDEDLSKDFRERSYAQAQHIFVARRRNLKFSVGTIHGAVLALTASVLSVPYDMPSWLPSNVSLLARFIREPPPIRSTVTKAVAEFKRTHADTWSIQKDAFTEDELEVLRDTSSSSSYFA

SEQ ID NO: 53026 - protein, 87 aa, Zea Mays
MLFLSLYISTTLKRGARASTTAPPGIAARPWPSALILPRKSRLLSAISICSPSALSYAHAISAALALTPPFSPPHPTSALTLTTPSA

SEQ ID NO: 53027 - protein, 112 aa, Zea Mays
MDLLGGPTDWRRHRRRLPPVRAEGQRHQARVLPEQRLSSARTRQELGTVPILFLHMTPCSVSVWPGLRSLAAVFYFGPKCDISLLSVYVCRNASCKENLEYNCVSFYPITIY

SEQ ID NO: 53028 - protein, 403 aa, Zea Mays
MPVSNKMSSNADVVTSSKTGKDPEEEKNQTSSSDISEDMIKEAIEKRASYFRKNSDTLTLQGVRRTLEEDLKLQKKALDAYKNFITTGLDKILQEPANGTKKKSKNGSSKDTDKTSKGSKRVHEESDSSELNDRKSDMDNSDVDSRPRKKRAEKAKVTKKQKIVTNERKLSTPKAKKVAKQDLGSSTEEQGGNSAEEDNSHSSAEEDNKRKRQQTPAYGKQAEHLKSIIKSCGMTIPPTVYRRVKQAAENKREACLIKELQDILEKEGLSKNPSEKEIKAVKKRKERAKELEGIDMSNIITSSRRRSTSSFIPLPPPPQIEVDSDDDEDDDDDAEGNDAEGDDDDAEGDDEDDAEGDDDDAEGDDAEDDDEVDEENVKGRDEGDNDTAEAANGSADDAEKENN

SEQ ID NO: 53029 - protein, 159 aa, Zea Mays
MFVGRLRDWARHHSGDPEIDEALKNGEDAGLSLAKKVYAYIHRNGYKTKLMAAAIRNKQDVFSLLGIDYIIAPLKILQSLEESVTDPDVKYGYVPKLTPAIGKTYNFTEEELVKWDQLSLSAAMGPAAEELLASGLEGYVNQARRVEELFGKIWPPPNV

SEQ ID NO: 53030 - protein, 294 aa, Zea Mays
MKLFEHKPFDARTVMGFGVLNGISIGLLNLSLGFNSVGFYQMTKLAIIPCTVILETLFFRKKFSRNIKLSLSVLLLGVGVATVTDLQLNVMGSVLSLLAIITTCIAQIMTNTIQKKFKVSSTQLLYQSCPYQALTLFLVGPFLDGFLTNQNVFAFDYTTQVLFFIVLSCLISVSVNFSTFLVIGKTSPVTYQVLGHLKTCLVLTFGYVLLHDPFSWRNILGILIAVIGMVLYSYFCTRETQQKPAEASPQAVQAKEGESNPLISDSLSAAENGGSATDDEPLKVPMWSSKYSKA

SEQ ID NO: 53031 - protein, 281 aa, Zea Mays
MQMDLKDSLSKFKQQQERCQSSLASIAASTSKPKHRAQPAHAPNVPARPSQPIKFSNDTERLQHINSIRKSPVGAQIKLVIELLYKTRQAFTAEQINEATYVDIHGNKAVFDSLRNNPKVSYDGRRFSYKSKHDLKGKDQLLVLIRKFPEGLAVVEVKDAYSNVLEDLQALKAAGEVWLLSNMDSQEDIVYPNDPKAKIKVDDDLKQLFREIELPRDMVDIEKELQKNGFKPMTNTAKRRAAAQINGVKPKAKPKKKQREITKRTKLTNAHLPELFQNLNT

SEQ ID NO: 53032 - protein, 233 aa, Zea Mays
MMTSWLLGRRGPSGFSWSSTADQVTQGISAAGLTAIVTGASSGIGAETARTLALRGAHVIMAVRSLPAAQAVKDAVLAQAPGAKLDVMELDLSSMASVRAFASQFIDRGLPLNILINNAGVMAIPFALSKDGIEMQFATNHVGHFLLTHLLLDTMKRTSHESNLEGRIVNVSSEGHRLAYREGIRFDKINDESVYSSIGAYGQSKLANILHANELARRFEAPSTQLPSTIIGK

SEQ ID NO: 53033 - protein, 188 aa, Zea Mays
MASGGTSSRSFVAGARPRQGVSPVEQNVEWPDEFPFKPEDFSRFDESSDTLFYSVPRFVTHIDDQAIQALTEYYSEVLPPSNTPGVAILDMCSSWVSHYPPGYRQEKIVGMGMNEDELKKNSVLTQYVVQDLNVNPKLPFEDNTFDVITNVVSVDYLTKPIDVFKEMRRILKPSGLAIMSYIYMDLNW

SEQ ID NO: 53034 - protein, 149 aa, Zea Mays
MGLCKYSAKLLKKPDQCRAVYACSHLFWADDQDGIMDGERVLLCLKRALRIANAAQQMASATRGSSGSVTLFIEILNKYLYFFEKGIPQITNTVIQDLIELIRTEKQSDNSVADPSTEAFFSSTLRYIEFQKQKGGSIGEKYEQIKTSS

SEQ ID NO: 53035 - protein, 607 aa, Zea Mays
MPPRRGRGKGKGRAKPRAKPTEPEPESDPELDEAAKSEIEAGDAEAGEESSAESEDSKEDESESDTESMDAEASEEAGENGTEEMDAEPEAKAVEAKAETVATEAEAKPDASDEEAGETGSDREADGKGADPKAKAEESDGEDEEGATAVTDGDSEEEAAETGGESEEDGGDSDTEGDAEESPPSPPRRSRRRKRAATPDDEAEETPTPSRRRRRRKSGERGDSPPPLPDHLRCRRSDGKKWRCSGRALPTVSFCEYHYARANKGKKLPADEEVLAVVLQRQKNKRKGRRSINPPTSPQAATSDPQTRDLPNGLMTISPGSSGPAALSTPVKIGVEIPAPIQRCYRSKNAEPLPVGPVKVVPRAMSVTKTARTCHCCGMKKAARVANCKNCDKNFCNSCINKWYSKLSRKDIKARCPACRGLCNCKPCSLGNSKGSTPKEPPKVERKILSIKISNHQFYKLLPVRLDQEQLDELELEAKIQGTKISNVCVQVAETGQSESLYCNNCKLSMSRLLRCCPTCPFKLCLSCCQKIREGNMSDNTPEDKFKNRLIQQESVHEDGSITCPSIELGGCGNHSGVKDAQAHGSPVPESNGRLLAAAQAETVSEE

SEQ ID NO: 53036 - protein, 57 aa, Zea Mays
MLASASDDHTVRIWGAKVSLKRKDVGSSNCNSNGFHHSNGNAHGNGFAHQCNGNSTK

SEQ ID NO: 53037 - protein, 482 aa, Zea Mays
MAAWSSPPSLRHLLMLRPCLPLSPTCLAGSLRRHIHSRCRLFSSAASSSTLTHGDIASTHGDADGVVEVNPPRGTRDFPPEDMRLRTWLFDQFREVSRLMAFEEVDFPVLESEALFIRKAGEEITQQLYNFEDKGGRRVVLRPEITPSLARLVIKQGKSVSLPLKWFTIGQCWRYERMTRGRRREHYQWNMDIFGVPKVRAEAELLHAIVLLFQRLGITSSDVGIRVSSRKVLQAVLNMYSIPDHLFTQVCVIVDKLGKMTREEIEKELVSTGLSSEAVQGIIDVLSIKSLSKLEEVLGSDVEAVADLKKLFSFAEQYGYADWICFDASVVRGLAYYTGIVFEAFDREGKLRAICGGGRYDRLLSTFGSEDIPACGFGFGDAVIVELLKEKGLLPDMSRQIDDIVFPLDEELEGPASSIASSLRKKGRSVELVEDKRLKWVFKHAERINASRLILVGNSEWERGMVRVKVLSTREEFENGWA

SEQ ID NO: 53038 - protein, 50 aa, Zea Mays
MHGHSAVGASAIRRSHQLIQPFELLTVQYGPLYMITQSTLWGCGQGAKIS

SEQ ID NO: 53039 - protein, 110 aa, Zea Mays
MQRSEQQHKGVNLKSPRRKVGKNATAIPNWKVDPRCPNASNPFHMCAQYCFDHLSETAQTSAAKSDKRRGKGVSEDEGRGETKTNPGCANASNPYHKCGDQCKRKGGGDR

SEQ ID NO: 53040 - protein, 117 aa, Zea Mays
MEIWREEVFGPVLCVKEFSTEDEAIELANDTQYGLAGAVISGDRERCQRLSEEIDAGCIWVNCSQPCFCQAPWGGNKRSGFGRELGEGGIDNYLSVKQVTEYISDEPWGWYQSPSKL

SEQ ID NO: 53041 - protein, 132 aa, Zea Mays
MKGDYHRYLAEFKTGPERKESAESTMMAYKAAQDIALAELAPTHPIRLGLALNFSVFYYEILNSPDKACNLAKQAFDEAISQLDTLGEESYKDSTLIMQLLRDNLTLWTSDLTEDGADEGKEAPKGEAGDGQ

SEQ ID NO: 53042 - protein, 373 aa, Zea Mays
MTPVVCVVGLGLFQLGFPQVGKCVEIGLPMLILAVVVQQYVPNYFSYIHQRVTFLFERYSLLLCIGIVWAFAAILTAAGAYDHASPKTQQHCRTDKSFLMSSAPWIKIPLPFEWGPPIFTAGHSFGMMGAVLVAAFESTGAHFATARLAGATPPPAYVLSRSVGLQGIGMFLEGIFSVPAGSSVSVENIGLLGLTKVGSRRVIQISTGFMIFFSIFGKFGAFFASIPLPIFAAIYCILFGIVAAVGVSFMQFANKNSMRNIYIIGLSLFLGISVPQYFNGYTSSAGGHGPARTNAGWFNDIINTVFASGPTVALIVASVLDNTLEFRGYEADRGLSWFQPFLRRHKGYSDPRNEEFYSFPISVYDVIPDRFRR

SEQ ID NO: 53043 - protein, 83 aa, Zea Mays
MMEGIIATSYNEGDKFYIDPMKLLPLSRFLPQPKGNLKEHLEVVGVGEEGVLGEAVVVVLSAVEEDHQGGVVEVQGVEAVAVL

SEQ ID NO: 53044 - protein, 419 aa, Zea Mays
MEGRRLSRRQLRSLPDAASFSPEVAASPGLVGSGQLGLGLSAAFETLPPILVEVNGFTRTLILNRPKQLNALSSTMIMGLLRCFTAYEKDDGVKLLIMKGKGRAFCAGGDVAAVVRSIHKDSWKYGADFFRNEFLLNYIIATYTKPQVSLLSGIVMGGGAGVSLHGRFRVATDNTVFAMPETALGLFPDIGASYFLSRLPGFYGEYVGLAGARLDGGEMLACGLATHFVQSNSLLSLEESLKKVDTSNAFAVCGIIDQFAQQPSLKESSSLNRLEIINKCFSKRTVEEIISALEVEASNSADEWVATTIQSLKKASPTSLKISLRSIREGRTQTVGECLQREYRMVCHVMRGDFSRDFFEGCRAILLDKDRNPKWMPPRLEQVHDEAVEQYFSRIDDPQWEDLNLPARRSHGRNIESKL

SEQ ID NO: 53045 - protein, 185 aa, Zea Mays
MGRNARFAQIWKSRKGEKADAGDSLREICHLYDAVQVDPDDEKHPAEPRITSFEEGAVLCNFLPLIREYLPSTAEEIEADIISLAQSEDSEVYDIYTVKEVDDTMEATSAASYPRLQVDDGEDECYEDCPYDTDDSNAEDNPLFDYPDESSEDEDDGRNDEDPFGDKEGSDSDYEKEEVEVEEDE

SEQ ID NO: 53046 - protein, 74 aa, Zea Mays
MASKRILKELKDLQKDPPTSCSAGPVAEDMFYWQATIMGPSDSPYAGGVFLVTIHFPPDYPFKPPKMMGTQMTP

SEQ ID NO: 53047 - protein, 427 aa, Zea Mays
MQKTQQQLAELDRREADIKRLAALSATRYVEACQELGLQGINVREELIESAKTLPSTFSKILEVLNSDPVSNAMEYYTTFVKDCHTEDKRNSDSVLPKLKDLQANPPSLHVSVYNEIKSSLGEASKSPGFTVIAGEIDSNVAAADDIDWDISVDTNEIDWDIGAVEQPGEESGDGFGSYEIIDANIELAGSENYNVGVSDKSMNKEDLASSESGICWDITADSSEEIASIQNASSVLEQSQSQMIAEDRSLLLEKEYRNNILDDLLEVKSFLTQRLGEMRNADTSSLQHQVQAVSPFVLQQHAPDSLENMLVEISSAISLLTNQKTLDLIMILNSKRFLDRLVSSLEEKKHHEVKLREGLGDLSVKRMELQNALSSSWPKQEAAITKTRELKKLCESTLSSVFDGRPVYIIGEINTLLSSSVSQLAG

SEQ ID NO: 53048 - protein, 252 aa, Zea Mays
MISNCDGSSTPLDHPADLYDFHVYNDSKTLFNMKSTFDRTSRSGPKAFVSEYAVWRGDAGRGSLLASLAEAAFLTGLEKNSDIVSMASYAPLFVNDNDQTWNPDAIVFNSWQHYGTPSYWMQTLFRESSGAMFHPTTISSSYSGSLAASAITWQDSENSFLRVKVINFGSDAVTLTISTSGLQASINALGSTATVLTSADVMDENSFSNPTKVVPVKSDLSNAAEQMQVTLAPRSFSSFDLALAQSKLVAEM

SEQ ID NO: 53049 - protein, 112 aa, Zea Mays
MKVMSKRCSGEEKLNLNLARQNQRGKISSKRRSTPQKTRRSFGSSVCSRNKTRHYTRSRRSSTKVSLGQVLKRNRRRQSTSLCFGSAWCHLSFIWLGCSNGRTSRIIYQKIV

SEQ ID NO: 53050 - protein, 250 aa, Zea Mays
MENLEIKSKQFEELEERYWHEFNSFQFQLTSHQEERDAVFAKIEVSQVHLELLKRTNVLNDAFYISHDGVIGTINNFRLGRLSNVEVEWDEINAAWGQAALLLHTMAQYFTPKFQYRIKIHPMGSYPRVTDIQNNTYELFGPVNLFWSTRFDKAMTWFLTCLQEFAEFAISLDKQNNVPPEKSLKLPYKIDGDKVGSHTIVLSFNKNENWTKALKYMLCNLKWVLYWFIGNTSFAPPSVSLHTQSLKNKS

SEQ ID NO: 53051 - protein, 627 aa, Zea Mays
MRSLVTPLRMNAGMDDDVAPKKPQPEVFDGPLLSSRDKAKIERRKRKEERQREVQYQMHVAEMETLRAGMPPVYVNHSNDGGPAVRDIHMENFSVTVGGRDLIQEATITLAFGRHYGLVGRNGTGKTSFLRAMALHAIDGIPKNCQILHVEQEVVGDDTTALQCVLNADVERVQLLQEEARLVQQQKDLEIEAEFGQSSDKGKDGFDKDSISKRLEEIYKRLELIDADAAEARAASILAGLSFTPEMQRKRTKQFSGGWRMRIALARALFIEPDLLLLDEPTNHLDLHAVLWLETYLLKWPKTFIVVSHAREFLNTVVTDILHLHGRKLHAYKGDYDTFERTREEHLKNQQKAFETNEKARQHMQTFIDKFRYNAKRASLVQSRIKALERMEHVDAVVSDPDYKFEFPTPDDRPGPPIISFSDASFGYPGGPTLFKNLNFGIDLDSRIAMVGPNGIGKSTILKLISGDLQPTSGTVFRSPKVRMAVFNQHHVDGLDLTVNPLLYMMKCYPGVPEQKLRAHLGSFGVSGSLALQSMYTLSGGQKSRVAFAKITFKKPHIILLDEPSNHLDLDAVEALIQGLLIFQGGVLMVSHDEHLITGSVDELWVVSEGRVTPFSGTFKDYKKMLK

SEQ ID NO: 53052 - protein, 529 aa, Zea Mays
MAHSDIFKIEVGRNEAEKNSISKRASVFLKWIWRECYSHQSTYAMRYGKKRCPELIHSCDYCYQIYLAEERHCSCHKTFKHIHNFLEHSSQCEEKQRTDPNWKMQTVDLSVPVGLRLLRLLLATIEALVPAEALLPFWTDGYRKSWGAKLYSASSAEEVLQMLSVLESAIKRDYLSSNFETTTELLNSSTQDFATQNSAGGSGSATALPWVPDTTAAVALRLLDLDASISYTLHPKLGSNKEQESGDFMKLPPRYPSMNKGKQEIEQFRPIGFDQQDGTLLPNSNGRRSRGHGGRVPRGIGSSSRIQFRDDNSMLYGRAPRKNARGGRGRGRGRGRGLRTVRPRQPSELSARSIPKANLLGSFSMLSKTNHTGTTHSPESSGAEEWAFERREYVKDDENNLVSQSDESEENVEPMNEEYGEHISGYPRDNSDSRPVQMMGDGSDDNDEDAEGDEGEEDGEDYEAEDPGDEDDDVEMDGDDDVEVDEDDDIEMDGDDDIEDDDDDDGGDGAANGDEDGGGTSSYSSEYSE

SEQ ID NO: 53053 - protein, 570 aa, Zea Mays
MEGGGVGDAYGEDRATEEQLITPWAFSVASGYTLLRDPRHNKGLAFSEAERDAHYLRGLLPPALASQELQEKKLMHNLRQYERPLHRYIAMMDLQERNERLFYKLLIDNVEELLPVVYTPTVGEACQKYGSIYRRPQGLYISLKDKGKILEVLKNWPERSIQVIVVTDGERILGLGDLGCQGMGIPVGKLSLYTALGGVRPSACLPITIDVGTNNEALLNDDFYIGLRQRRATGEEYHELVEEFMAAVKQNYGEKVLTQFEDFANHNAFDLLEKYRESHLVFNDDIQGTASVVLAGLLAALKVVGGTLADHTYLFLGAGEAGTGIAELIALEMSKHTGSPIEECRPKIWLMDSRGLIVASRKESLQAFKKPWAHEHGAVETLLEAVRSLKPTVLIGTSGKGGTFTKDVVEAMASQNERPVVFALSNPTSHSECTAEQAYTWTEGRAVFASGSPFPAVELDGRALVPGQSNNAYIFPGFGLGVVISGAIRVRDDMLLAASEALAEQVTEAHYAKGLIFPPFTNIRAISARIAAKVAAKAYELGLASRLPRPDDLVKYAESCMYTPTYRSYR

SEQ ID NO: 53054 - protein, 237 aa, Zea Mays
MAQTGEIRCAMDHILEAERKGEINHDNVLYIVENINVAAIETTLWSIEWGIAELVNHPAIQHKLREELASVLGAGVPVTEPDLERLPYLQAIVKETLRLRMAIPLLVPHMNLNDGKLAGFDIPAESKILVNAWFLANDPKRWVRPDEFRPERFLEEEKSVEAHGNDFRFVPFGVGRRSCPGIILALPIIGITLGRLVQNFQLLPPPGLDKIDTTEKPGQFSNQIAKHATIVCKPLEA

SEQ ID NO: 53055 - protein, 419 aa, Zea Mays
MATTALLRALRRPSSEAALRLATKANVQTTNGYRHLNNRNLSVFNEFSKQLKGEAKSNPEFQKSMKEFSEKLDVVKEDLKVRTKKTTETIYKRVDDVWSEAEETSKKVTANIKEKMFAAKEEVKESFGVGKEESTSCRDGLPEGSKHEKTEASSHSDGTTEDATDSHTLFTKLKSTISSASPVVSGAFAKLKDTKVSTLAKQGYEIVKDELSSNSSRKKKHQARHASAKVEKSTRTDLVLTPTKKTVLGEKWEEFKNKIRGHPVYRRVDEYTKPVVTKGQEVAEDVRERWETSDNPVVQKIQDLNESLLEETSAAVTFREIRQRDPSFSLSDFVADVQEMIKPVLTAYSKGDAETLKNYCTKEVIERCKGEREAYASQGIFFDHKILHISEADVLETKMFGSSPIIILRQIYCVRDREG

SEQ ID NO: 53056 - protein, 72 aa, Zea Mays
MPYNPDDLMIQCEECSDWFHPACIGMTIKEAKKLEHFFCQTCTAENGKMVENSHEATAQSEEKPVESKRRRR

SEQ ID NO: 53057 - protein, 175 aa, Zea Mays
MVKDGQRPFDVFSEELRSADVFLQESQFLVYGNGKDKPPTGLMFDKQQIKGLYFNQTPSKDMALAAVSMRPIPLAPIMEKLSLTPENYGSVRRYFIQALDDHMLSPDAQEKLVRENPPDGIFKIKGGDHCPFFSKPQSLNKILLEIAQIQAPAALLKASSPEETAAAMVTGPAKS

SEQ ID NO: 53058 - protein, 144 aa, Zea Mays
MLLAIALSEDHKPNRSDERKRIESAGGIVMWAGTWRVGGVLAMSRAFGNRLLKQFVIADPEIQEQEINDELEFLIIASDGLWDVVPNEDAVSLVKMEEDPEAAARKLTETAFSRGSGDNITCIVVKFEHDKPGGGGYSPPGDKS

SEQ ID NO: 53059 - protein, 90 aa, Zea Mays
MRVVEVMPHTTVPLQYCAGVLDLQCVLTHQNTSHGTAYTSLRRVTKLSFKEYLGGMPSLPFQKPARVRNSKFLSFTNVQIIQQTLCHTML

SEQ ID NO: 53060 - protein, 311 aa, Zea Mays
MRCEEKEGKHWRAGGRAPVSCGCGAARERDPFVREPHFQFQHESSSNPRLLLASHRHSAGLAMPGAVALAPTFAAASSSAAAASTLAPNPTSRGDPLIIRLCRNAPASATPLVPLVATRRYVRGCRGAALVASPHHAPNPRLRFASAAEGMAAEASTAGAASAAEAKPFAVLFVCLGNICRSPAAEAVFRTLVSKRGLDSKFLIDSAGTIGYHEGNKADSRMRAASKKRGIEVTSISRPIKPSDFRDFDLILAMDRQNYEDILNSFERWRRKEPLPDSAPNKVKLMCSYCKQHTESEVPDPYYGGPQGFEK

SEQ ID NO: 53061 - protein, 345 aa, Zea Mays
MRRLGEVKPPLKHSVIAVFIANEENSSVTGIGVDGLVKDGLLDKLKTGPLFWIDTADKQPCIGTGGMIPWHLKATGKLFHSGLAHKAINAMEMNMEALKVIQKRFYTDFPPHEKEKVYKFATPSTMKPTKWSYPGGGLNQIPGECTISGDVRLTPFYSTSHVMEKLKEYVEDINERFETVLDTRGPVSKYILPDENLQGRLEITFDGDVMNGVACNLESRGYHALCKATKEIVGHVEPYSITGSLPLIRELQDEGFDVQTAGYGLLKTYHAKNEYCLFSDMAQGFQVFLSIISQLEEEIPGHGHLTSLRGCLSPVENGAISPQCSRGHKTFVLQLGIKSLCYNST

SEQ ID NO: 53062 - protein, 608 aa, Zea Mays
MKNLKSILPKEVFDAITASQQESGTLSVDFFRNHASPSWKTDDLVTEKSMDVNDNAKAENSLLEHSVPTNRSPKDPDEHQVDKAAKVARRKLREKRREKRAMDLVHKDDEARIKLENAAIERSKAVDSAVLGKYSIWRKENENENSDSTVRLMRDQIIMARVYSTLAKSKNKNDLYQKLQTRIRESQRAVGEANADADLHHSAPEKIRAMGQVLSKAREELYDCTAITQRIRAMLQSADEQVRSLKKQSTFLSQLAAKTIPNSIHCLSMRLTIDYYILPLEERKFPRSENLENPNLYHYALFSDNVLAASVVVNSTIMNAKEPEKHVFHLVTDKLNFGAMNMWFLLNPPGKATIHVENVDEFKWLNSSYCPVLRQLESAAMKEYYFKADRPTTLSAGSSNLKYRNPKYLSMLNHLRFYLPEVYPKLDKILFLDDDIVVQKDLTGLWDVDLNGKVNGAVETCGESFHRFDKYLNFSNPHIARNFDPNACGWAYGMNIFDLREWKKKDITGIYHKWQNMNEDRVLWKLGTLPPGLLTFYKLTHPLDKSWHVLGLGYNPSIDRSEIDNAAVVHYNGNMKPWLELAMTKYRPYWTKYIKYDHPYIRGCNLSE

SEQ ID NO: 53063 - protein, 743 aa, Zea Mays
MLDASISATRLLSTHGRVTSDAPLHRFHFETFRIPQPPKGRKPQRLQKFPARAPRTLVPSPTGDASPAAGEMHIKEVTLEGFKSYAGRTVVPGFDPLFNAITGLNGSGKSNILDSICFVLGITDLRQVRAASLQELVYKQGQAGVTKATVSIVFDNSDRSRSPLGYEDSPEITVTRQIVVGGRNKYLINGHLAQPSRVQTLFHSVQLNVNNPHFLIMQGRITKVLNMKPPEILSMLEEAAGTRMYEMKKESALKTLEKKQNKVDEINKLLDVEILPALEKLRKERCQYMKWANGNAELDRLKRFCIAYDFVQAERVRDGALNDVKQIKTKIVELDETTENIKAAIQEMDNNISTLAAEKEAKVGGEMKVLSDKVDKLSHVLIKETSVMNNQEETLKSEEKGAEKILTNIEDIKRSILERDAAVKNVENEASDMKRRAEDLTKELDEKEKEYQGVLAGKSSANEKKCLEDQLRDAKAAVGDAESGLKQLATKIKHSEKELKEKKTLLVSKRDEAIAAENELKTRTKDLEGIKASMGSINYDEGQMEALQKDRSAELEIIQKLKDRVRNLSGELANVHFSYRDPERNFDRSKVKGVVARLIRIKDSSTATALEVAAGGRLFNVVVDTEETGKQLLKNGDLRSRVTIIPLNKIQTYMIPDRVQQTARRLVGPDNVTLALELVGYGEEVKNAVAFVFGSTFVCRNMDAAKEVAFNRQISSTSVTLEGDTYQPSGLLTGGSKGTNAFP

SEQ ID NO: 53064 - protein, 55 aa, Zea Mays
MRSPCRDTAVPMERLDRAGRRSGQVREPAAERHRACCNRVEEGQPLAPLPHTPPW

SEQ ID NO: 53065 - protein, 129 aa, Zea Mays
MFLSAQSMAVGTIMHMIIGGLPLLVISVLNHDPALSGHIQDLTWSDILALGYTSIFGSAVSYGVYFYNATRGSLTTLSSLTFLTPMFASVFGYLYLGETFSTVQIGGALLTLVAIYMVNYKSIIGIHHY

SEQ ID NO: 53066 - protein, 81 aa, Zea Mays
MALLKNVMRLSMTPLKGSDAKDISSSVTAIANEKIKAEKEAAAGKKKQGARKKQLHIEKGDDDFIPGRGGGYDDPDEYDFM

SEQ ID NO: 53067 - protein, 161 aa, Zea Mays
MNLLSALDAAKATVGEPEGHGQRTGGNPREAAGEEAQQLTIFYGGKVVVFDRFPSAKVKDLLQIVSPPGADAVVDGAGAGAAVPTQNLPRPSHDSLSADLPIARRNSLHRFLEKRKDRITAKAPYQVNSSVGAEASKAEKPWLGLGQEQEGSDGRQAGEEM

SEQ ID NO: 53068 - protein, 2175 aa, Zea Mays
MQVFWCILDLDRPDTQTINSLVVPCVEFIYSYAECLALHSNEKTSVSVGPAVALLKELLFAPYEAVQTSSSLAISSRFLQVPFPKQTMIANDDAPENQAKASASAMNSTSANSQVMIEEDPVTSSVQYCCDGCSTVPILRQRWHCSICPDFDLCETCYEILDADRLPAPHSKDHPMSAIPIEVDTFGGEGSEIHFSVDELTDSGVLHADRSVQTSPSSIHIFDASESADLPETITDQATVSISASKRAINSLVLNHLIEELRGWMGTTAGTRAIPLMQLFYRLSSAVGGPFMDSSKPENFDLEKFVKWLMDEVNINKQFPAKTRCTFGEVLILVFMFFTLMFRNWHQPGSDNSHSKSSGSSDLTDKGPAQVLGSTTITLPSSSADLDKNEFASQLVRACSALRQQKFLNYLMDILQQLVHIFKSSSINGEAGSSGSGCGSLLTIRRELPAGNFSPFFSDSYAKSHPTDLFMDYYKLLLENTFRLVYSMVRPEKEKSAEKDRCYKVPNTKDLKLDGYQDVLCSYISNPHTAFVRRYARRLFLHLCGSKTHYYSVRDSWQCSHEVKKLNKIINKSGGFRNPVPYERSVKLIKCLSTLCDVATARPKNWQKFCLKHMDLLPFLMDNVYHFSEECVIQTLKLLNLAFYSGKDANHNAQKAETTDLGGSTRTSSQSPDMKKNRKADDGSEGSSEKSCMDMEQVVEMFSDKEGDMLKNFINIFLLEWNSAGVRHEAKCVLFGVWYHAKNRLRETMLSILLQKVIHLPLYGQNIVEYTDLITCLLGKVNDFSAKQNHSELVNKCLTSEVISCIFDTLHSQNELLANHPNSRIYNTLSCLVEFDGYYLESEPCVTCSCPDVPYSRTKLETLKSETKFTDNRIIIKCTGSFTIQSVTMNVYDARKSKSVKVLNLYYNNRPVTDLSELKNNWTLWKRAKSCHLTFNQTELKVEFPIPITACNFMIELDSFYENLQASSLESLQCPRCSRSVTDKHGICSNCHENAYQCRQCRNINYENLDSFLCNECGYSKYGRFEFHFMAKPSFSFDNMENDDDMRKGLAAIESESENAHRRYQQLMGFKKPLIKLVSSIGEQEVDSQQKDAVQQMMVSLPGPTCKVNRKIALLGVLYGEKCKAAFDSVSKSVQTLQGLRRVLMTYLHQKSSSDTNALPAFSIPRSPNSCYGCSTTFVTQCLELLQVLSKHENCRKQLISAGVLSELFENNIHQGPRTARTLARAVLSSFSESDEDAVHELNNLIQKKVMYCLEHHRSMDIAQSTREDLLLLSETCALVDEFWEARLRVTFQLLFSSIKVGAKHPAISEHIILPCLRIISQACTPPKSDCGDKESGLGVSSLTLHSKNDDTTGNTASNNPNTKIQSDISGKIYDGSRRDQDIPLLSYSEWEGGASYLDFVRRQYKVSQAVKGSAQKTRHDSYKSDYLVLKYGLRWKRRACLKSSKSDFSKFALGYWVSDLILSSCSQSIRSEICTLISLLCPSNSPRQFQLLNLLMSLLPRTLSAGESAAEYFELLGTMIDSESSRLFLTVRGCLTTLCSLITKEVSNVESQERSLSIDISQGFILHKLVELLNKFLEVPNIRARFMSDRLLSEVLEAFLVIRGLVVQKTKLINDCNHLLKDLLDSLLLESTENKRQFIRACISGLQRHVKEKKRRTSLFILEQLCNLICPVKPEPVYLLILNKAHTQEEFIRGSMTKNPYSSVDVGPLMRDVKNKICNQLDLIGLLEDDYGMELLVGGSIISLDLSISQVYEQVWRKHHGQTQHCLSNVSAITGASSIRDCPPMTVTYRLQGLDGEATEPMIKELEEEREESQDPEIEFAIAGAVRECGGLEIILSMIQSLHDDEFRSNQEELTSVLNLLKYCCKIRENRCALLCLGALGLLLETARRAFSADAMEPAEGILLIVESLTMEANESDISIAQSVFTTSTEAIGAGEEARKIVLMFLERICHPSGAKKSNKQQRNEEMVARILPYLTYGEPTAMEALIQHFEPYLRDWSEFDQLQKQHEDNPKDDNISQKLSTQRSAIDNFVRVSESLKTSSCGERLKDIILEKGITKAAVEHVKESFASAGQTGFRTSEEWTTGLKLPSIPPILSMLKGLAKGHLPTQKCIDEEGILPLLHALEGVPGENEIGARAENLLDTLANNENNGDGFLGEKIQELRHATRDEMRRRAL

SEQ ID NO: 53069 - protein, 329 aa, Zea Mays
MLSSGNTAAGLPHKRDVSLSVPSSVLHQVPEGHVGVYWRGGALLKTITPPGFHLKLPLITQYEPIQVTLQTDQVRDIPCGTKGGVMISFDKIEVVNRLRKEFVHETLLNYGVHYDKTWIYDKIHHEINQFCSAHSLQQVYIDMFDQIDETMKEAIQRDCTRYAPGIEIISVRVTKPNIPGSIRRNFELMEEERTKALIAMEKQKVAEKEAETQKKIALSEAEKNAQVSKILMEQKLMEKDSSKRQEQIDNDMYLAREKAVADANYYRILKEAEANRLKLTPEYLELRFIESIANNSKIFFGEKIPNMIMDQRLLKNYLDAAPRKDHYEM

SEQ ID NO: 53070 - protein, 407 aa, Zea Mays
MDEHGLFYALDLGGTNFRVIRVQLGGRDRRVVKQQYEEVSIPPHLMVGTSTELFDFIAAELEKFVRTEGEDFHLPDSKQRELGFTFSFPVHQTSISSGTLIKWTKGFCINGTVGEDVVAELSRAMERQGLDMKVAALVNDTVGTLAGGRYADNDVVAAVILGTGTNAAYVEHANVIPKWTGLLPRSGNMVINMEWGNFRSDKLPRSEYDKSLDFESLNPGEQIYEKMISGMYLGEIVRRILLKLAHDASLFGDVVPPKLEQLFILRTPDMSAMHHDTSHDLKHLGAKLKDILGVPDTSLEARYITLHVCDLVAERGARLAAAGIYGILKKLGKDKLLGDFSQQRTVVAIDGGLYEHYKKFSACLEATLTDLLGEEVASSVVVKLANDGSGIGAALLAASHSQYAEAA

SEQ ID NO: 53071 - protein, 73 aa, Zea Mays
MNGVIDQLEVILLMSGSQTGPCTSQTGPHGIQTRVQTPKSQQFQYNEPSHGDEVQSERRAHQHQVEFFEHVHQ

SEQ ID NO: 53072 - protein, 139 aa, Zea Mays
MTYAQVAVYGFSEKVGLLSFPQKDGGFEMSKPYSNQTASIIDDEVREWVGKAYKKTVELITEHKEQVAQIAELLLEKEVLHQDDLTRVLGERPFKALEPTNYDLFKKGFEDGGDNSQAPAENAELPDDSSPPVGDVVPT

SEQ ID NO: 53073 - protein, 68 aa, Zea Mays
MEFCVSQEASRLTSLFLVFMPTTQDNTATPMELEDFISFDWIWMRWTLLVRRERVHGLGGAYFCSSFS

SEQ ID NO: 53074 - protein, 400 aa, Zea Mays
MRLGMIDKARRHFTQAGHLQHSDPAEWHKLQEVEVHLGRCTDARKIGDWKSALREADAAIAAGADSSQLLLALRSEALLRLHKLEEAESTLASLLKLDSALPSSLTAAKLSGMLAESYIHIVQAQVDMAFGRFDTAVAAAEKARDLDPGNAEIGMVLNNVRLVAKAREQGNDLFKAAKFLDASIAYGEGLKYDPLNSVLHCNRAACWSKLEKWGKAVDDCNEALRIQPNYTKALLRRAASYAKLERWVDCVRDYEVLRKEFPSDKEVAEALFHAQIALKATRGEDVSNMKFGGEVEMVSNVEQLNAAISSPGVTVVYFMSTMNQQCTQITPSINILCTECPSVNFLKVNVNSSPMVARTENVRIVPTFKIYKGGVKVKEMICPSLHVLRYSVRHYSVSSS

SEQ ID NO: 53075 - protein, 200 aa, Zea Mays
MLLASRGSLPSSAPVARKPEAPILAPAKVTAPEVLHATQMLFQKPQHVSPPSSAISKPIPGILQAASLPRSASSSNLDSPFPKSSVPFPVSPVSQAPRAQPATIAATTAAAIMPRAVPQARKASLARFLEKRKERVTTAAPYPSAKSPMESSDTFGSGSANDKSSCTDIALSSNHEESLCLGQPRNISFIQESPSTKLQI

SEQ ID NO: 53076 - protein, 725 aa, Zea Mays
MFPPKGPNHYGQQLPYGVQQPYGQIPSSTGFAAPAAAGGTDGGRFGARAGQGAAAQYGGPYASVYGTQQVGGLGGKGPASSSLPSFPTRPTSLPESSNFSSAPVGSGLARPNDDYMAVRGYAQKLDQYSTDYPLERRMYGEHSANLGRRDGLSDLDRRYTDQTATGHQVHDHMEQSSSMRHQQLLKGQLQPGSDTRQADYFAGRSAPAHQASQEIGVYGRVEADNRNISILGNAPYGRQQSASLLEGAPRTNIDSLYGQGSSGTGFGAGLPPGRDYASVKGLPHPSSDPDHRDSILPRVHPAVSMVDDRRVDRIGYRRELDLRDEERRRDLILEREKELERERERERERELRDFRDRERERERERERDHERLLRERERERERERERERERERERLRERREKERERDRKHRTDPRREHTPPRGPGDRRRSSSVRSEKPVRRISPRRDAVHRHRSPVKEIKREYICKVFPFRFVDDERDYLCLTKRYPRLAVTPEFSKIVLNWAKENLNLPLDTPVSLEHDIHDSDDNADEGAIISTEKTPSFNTPATIWNAKVLLMSGMSKGAFADITSLRSTEERVVHLNNILKFALFKKDRSLFAIGGPWNAAIDGGDPSVDCSCLIQTAIRCVKEMVQVDLSSCTHWNRFVEVHYNRIGKDGLFSHKEITVLFVPNLSECLPSVDIWKNNWILYKKSKAEREELTVKKEKSPGDSKEQMQVSGELNKGKSLDA

SEQ ID NO: 53077 - protein, 491 aa, Zea Mays
MTSTVTTPSRPLAAGSRPRRSGPAVLSLSKGGGGQRRQRRLAPSTSCAVLASPDKQSTANKLPLSSRKQEEEVEKATDYNEVAAALETIYKLSPAVEVEEKKRQGGNEDDGGGEAKKKRKRRVAGRSTVVVRSRRRRGGRRMDLGKRVEMKGAAAASREQQQGGEEQGEREFEEMLLREHSVSTDMGSLDWKRMKIPPVLTSSQSARLFKTMQPMKESLREELQRDPTDAEVAEATGMTVHQLRRRLDVGRAARNKLIKHNLRLVPYALNKYYPDMGGDERFDELCQAGANGLITAIDRFEPKRGFRISTYALFWIRHSIVRAMTLSSFTRFPFAMESERQEIGRAREELAFELGRPPTDEEVRARVGLSPQRYRDVLRMARPTYSLHARNRVTQEELIGEVTDAEAVGVDAGGKHDALLRLAIDDLLDSLKPKESLVIRQRFGLDGRGRRTLSEVAGNLSISREMVRKYELKALMKLKHPTRVEYLRRYM

SEQ ID NO: 53078 - protein, 237 aa, Zea Mays
MVFEYMDHDLTGLADRPGMRFIVPQIKCYMKQLLTGLHYCHVNQVLHRDIKGSNLLIDNEGNLKLADFGLARSFSSDHNGNLTNRVITLWYRPPELLLGSTKYNLAVDMWSVGCIFAELLNGKPILPGKNEPEQLTKIFELCGTPDDTIWPGVTKMPWYNNFKPHRPLKIRVKDFFKHFDRHALDLLEKMLTLDPSQRISAKDALDAEYFWTSRAMSAAVNTMRIRAPRWRRLCRRP

SEQ ID NO: 53079 - protein, 83 aa, Zea Mays
MNHGFVCRLHKETHRLIKPVFEESAMDRNVPKQNKMQVVLHKNQVHINQLHSGRLNCNTTTSAITEKSGAHSSTLLIENGWRL

SEQ ID NO: 53080 - protein, 53 aa, Zea Mays
MGSSTSVSSSPLCHETSRSRRSAAQKTWGKWCSEGSRGRGEARTSTLPLSTPP

SEQ ID NO: 53081 - protein, 152 aa, Zea Mays
MGWQGKDPSTDFRGGGFISLENLLYFSKKYPKSFHELLRKQNGDRALWEYPFAVAGVNITFMLIQMLDLQAAKPTSLVGAVFLNLLLENDRAFDILYCITFKLMDQKWLEMHASYMDFNVVIKSTRRQLERELLLEDIQRIQDMPSYMLLTC

SEQ ID NO: 53082 - protein, 433 aa, Zea Mays
MMVLLSSWSAKGHVLDVFASALDQVGLAEMKVAIERTGGLVVLSESFGHSVFKDSFKRIFEGGEQSLGLSFNGTIEINYSKDIKVQGIIGPCTSLEKKGAVCADTIVGQGNTTAWKMCGLDRNTSLTVFFDVSPSERSSQPGHQNPHLYIQFVTSYQHPEGQMRVRVTTICRKWVDGSTNTEELVEGFDQETAAVVLARYISFKMEMEEEFDATRWLDRSLIRLCSRFGDYRKDDPSSFSLHSNFSLFPQFMFNLRRSQFVQVFNNSPDETAYFRMLLNRESITNSVAMIQPSLISFSFDSPPSPVFLDVASLAADRILLLDAYFSVVIFHGMTIAQWRNMGYQNQPEHEQFAQLLQAPHEDAQMIIKGRFPVPRLVVCDQHGSQARFLLAKLNPSATYNSAHDVAPGSDIIFTDDVSFLVFCEHLQRLAVQS

SEQ ID NO: 53083 - protein, 123 aa, Zea Mays
MATHIRLSSCRTTAYIEKSSPFPTDGKQGWWSTGFSYGLWIASLVASGFSVVPIASQTWKAYFGLMRSETPKDDSRQAASILFPDKDQSLKLKKHHGRAEALLLAAYGKGLVLPSGKFSKTSV

SEQ ID NO: 53084 - protein, 409 aa, Zea Mays
MLVLAPKLSQRTISGSLLKYLSKLQVDEEPGIRTNTTILLGNIAGYMNDGTRKRVLINAFTVRALRDTFPPARAAGIMALSVTSSYYEMTEIATRILPNIVVLTFDPNSDVRTKAFQATDQFLQIAKQHHEKIQGFWYFSWFRSQLNTGDNSVAESTGVKLKPGNAGLLGWAMSSVTQKGKPFDHAPISTANANNSQASTTSTATPDTQASTLAYAPSTSTSLDQAASASARSSVDGWGELEDGNIHEENSSDKDGWDDVDPFEDKPSPSLLSNIQAAQKRPVVQPKQPVANSSKPNPLKAPKSEDDPLWGPIAAAPPKSAVKSADIKPSTSHNDEDDLWGSIAAPPKSSGKPLKPAVANSDDLWGAIAAPPPATKARPLASSGRGRGTKPAQPKLGAQRIGRTSSTGM

SEQ ID NO: 53085 - protein, 663 aa, Zea Mays
MAAKQAIIEYSTENLQPPILTIEDAIQRNSYFQVPPFLAPKPVGDYNKGMAEADQKILSAEVKLESQYYFYMETQVALAIPDEDNCITIYSSTQIPEVTQNVVAKCLGIPFHNVRLISRRVGGGFGGKAMKAIHVACACAVAAFKLRRPVRMYLDRKTDMIMAGGRHPMKVKYSVGFKSDGKITALHIDLGINAGISPDVSPMLPPAIIGALKKYNWGNLAFDTKVCKTNVSSKSAMRGPGDVQGSFIAEAIIEHVASALSVDTNTIRRKNLHDFESLVVFFEDAAGEASTYSLVTMFDKLASSPEYQRRAAMVEHFNRSNKWKKRGISCVPITYEVNLRPTPGKVSIMNDGSIVVEVGGVEIGQGLWTKVKQMTAFGLGQLCPDGGESLLDKVRVIQADTLSMIQGGFTGGSTTSETSCEAVRQSCVALVERLKPIKENLEAEAGTVEWSSLIAQASMASVNLSAHAYWTPDPTFRSYLNYGAGISEVEIDVLTGATTILRSDLVYDCGQSLNPAVDLGQVEGAFIQGVGFFTNEEYTTNSEGLVIHDGTWTYKIPTVDTIPKQLNVELINSARDQKRVLSSKASGEPPLLLAASVHCAMREAIRAARKEFSVCTGPANSAITFEMDVPATMPIVKELCGLDVVERYLESMSTAGPTTTAKA

SEQ ID NO: 53086 - protein, 93 aa, Zea Mays
MKCRRDFKRWLCFSKVQLIVVIWLLRSLVLPASISNDLYAENTMYIGELGGVTDADWALDNGGYLRWFNVIYGDNMNHVGGCRVLLSETSLCD

SEQ ID NO: 53087 - protein, 493 aa, Zea Mays
MKYVSGPYFEPDFDPLLDRFGTPGVVVDNETREDCTLVKVDSVNRDGVLLEMVQLLTDLDLVISKSYISSDGGWLMDVFHVTDQIGRKLTDPSLPEFIQRALVPTHRPGNGPSPRFTTCLGNVVGPGGPDVSGCAALEFTVHDRPGLLSSITSVLADNGCHVASGQAWTHNGRAAGVLYVTDTAGGAALLPGRCARIERLVNAVVDARENVTGERHWVRVSEPAQGRVHTERRLHQLMHDDRDYESGPAPTPVDEDLFSVGEKAATARTARRAVTRVSIDSWEERGYAVVKMTSRDRPRLLFDTVCALTDMQYVVFHATVGSQGPLAIQEYYIRHKDGRTVDNSAERQKVSRCLVAAVERRATHGVRVEVRAADRSGLLSDFTRVLREHGLSLLRVELKRHKDEAFGIFYLVTDTGGEVRAESLRAVQARVAEMDISLDVVKEAPGWPPVRKTSVPAPPAAGSQPQERPRPSLGSLLWSHLGKLSNNFNNIRS

SEQ ID NO: 53088 - protein, 413 aa, Zea Mays
MGLITATDRDIILEGLDQIERLIQEGKFEWRKDREDVHMNIEAALIERVGEPAKKLHTARSRNDQIVTDLRLWCRDAIDRILIRIKQLQVSLVILASKYVDLIVPGYTHLQRAQPVLLPHLLLSYVEQLERDAGRLVNCRERMNFCPLGACALAGTGLPIDRFQTAKDLKFTAPMKNSIDAVSDRDFVLEFLAANSIAAVHLSRIGEEWVLWASEEFGFLIPSDKVSTGSSIMPQKKNPDPMELVRGKSARVVGDLMTVLTLCKGLPQAYNRDLQEDKEPLFDSVKAVLGMLEVCTEFAQNISFNSKRIQSSLPAGYLDATTLADYLVKKGVPFRTSHEIVGRSVALCVSKNCQLAELELADLKSVHPVFEDDVYEYLGVENAVNKFISYGSTGSEQVKKQLEDWRIQLGVSS

SEQ ID NO: 53089 - protein, 492 aa, Zea Mays
MVRKKRTGPGESSGESSGAPGHGSSQRPQATQQGTRGGGQHQGRGGYLGPGVPPSQHPGGGPPEYHQPLDYQGRGGYQGRGGPPSQHPGGGTPPGSQPRGYQGHGGYQGRGGPPSQYPGGGTPPGSQPRDYHGRGGPRPRGGMPQSYRGGHVGGSVVPSVPSGPSRPVPELHQAPDVQHQAPVVATPSSPGAGSSSQPGKAEVSAGQVQQQFQQLAIRNQSLASQAGQMAPASSKSVRFPLRPGKGTHGSRCIVKANHFFAELPNKDLHQYDVSITPEVTSRGVNRAVMAELVKLYRHSHLDGRLPAYDGRKSLYTAGALPFASKTFEITLQDEEDSLGGGQRRQRVFRVTIKFAARADLHHLAMFLAGRQPDAPQEALQVLDIVLREMPTAKYCPVGRSFYSPKLGRPQQLGEDMSSTAFFEALPVIDFVSQLLNRDISVRPLSDSDRVKIKKALRGVKVEVTHRGNMRRKYRISGLTPQATRELSYVHVS

SEQ ID NO: 53090 - protein, 298 aa, Zea Mays
MPKPSLPLATSQTSMSTPPTDLVPVPEAGYYKEDNQTSMSQPPSDAISGEFGVKLRLDGVQKKWGRPTYSSSTPSSSISSQPTPNGASHSDGGGSSSQPRESSYGSKRQQGTEVSAEKQRLAASLFGSAAAKADRKAQASRKTAKDSPSTEKVATTNVTAQPVKEQVIPAAPPPDLLDLGDEPVSSSPPSADPFSQLEGLLGPASAAPVLSGTPATSTSKAPGLLSIFSDDVPTGVTSVSTDPTLGDVNSMGSRKGAAAVASMKGPSLQDALQKDAAARQVGVTPTVNNPNLFKDLLG

SEQ ID NO: 53091 - protein, 215 aa, Zea Mays
MRPEDVGLSPDLSFFRARDATRGGGTPTITHTTIYKCPNFSMVILFLPRNAVIPLHNHPGMTVFSKLLLGSMHVKSYDWLNTADPDPSSATSTTSSSSSDGPCLRLAELVVDDVFTAPCDTSVLYPTAGGNMHRFTAMAPCAILDVLGPPYSIEEDRDCTYYAELPYAHHSLVAAGEDVERGQGQGHLAWLEEIDMPRELKMCSVHYGGPPISDE

SEQ ID NO: 53092 - protein, 381 aa, Zea Mays
MTATDNKNYVDDGGNVLPSKLEDITESDWTRLENYASTGEKVEVELINCSAKGFVVSLDSLIGFLPYRNLATKWKFLAFETWLRRKGGDPSLYKQSLGLEDSFEVNDTNLEPESSSVSKIAGEDQESLSSKPKFEDLIRAYNQEKSKFLSSFIGQRLRVSVVLADRNSKRIFFSMKPKESEEMIQKKKNLMARLNVGDIIQCTIKRFVYFGIFVEVEGVPALIQQWEVSWDDTLDPAVSYKIGQVVDAKVIQLDYNNIRIFLSLKDVKPNPSVGALESVVGEDLSFGGALEPVQADFEWPEVDALMEEMRRTEGVRDVYKGRFFQSPGLAPTFQVYMAPVVGPKYKLLARYGNSVQEVMVETALGKEELKEAVLMCTNRVS

SEQ ID NO: 53093 - protein, 1077 aa, Zea Mays
MAKPMKYDDEEEISSSAEEEDQSDAAGSVSGEEGDDDDEDAAAPPAEEAEGEGQQEEEVDEEEIEAVTTGAGAEDEEDAGAVTAAEGDDESQSTEDDEPVARDKDDDDETDAVVGKREKARLKELQKMKKHKIQEILDTQNAAIDADMNNKGKGRLKYLLQQTEIFAHFAKGSQSNEKKPRGRGRHASKMTEEEEDEEYLKEEEDALAGAGGTRLVSQPSCIKGKMRDYQLAGLNWLIRLYENGINGILADEMGLGKTLQTISLLGYLHEFRGITGPHMVVAPKSTLGNWMKEIQRFCPILRAVKFLGNPEERNHIRDDLLQPGKFDVCVTSFEMAIKEKSALRRFSWRYIIIDEAHRIKNENSLLSKTMRIYNTNYRLLITGTPLQNNLHELWALLNFLLPEIFSSAETFDEWFQISGENDQQEVVQQLHKVLRPFLLRRLKSDVEKGLPPKKETILKVGMSQMQKQYYRALLQKDLEVINAGGERKRLLNIAMQLRKCCNHPYLFQGAEPGPPYTTGEHLVENAGKMVLLDKLLPKLKERDSRVLIFSQMTRLLDILEDYLMYRGYQYCRIDGNTGGEDRDASIEAFNKPGSEKFVFLLSTRAGGLGINLATADVVVLYDSDWNPQADLQAQDRAHRIGQKKEVQVFRFCTEIMQTKLQYTIEEKVIERAYKKLALDALVIQQGRLAEQKTVNKDDLLQMVRFGAEMVFSSKDSTITDEDIDRIIAKGEETTAELDAKMKKFTEDAIKFKMDDNAELYDFDDEKDENKVDFKKLVSDNWIEPPRRERKRNYSESDYFKQALRQGAPAKPREPRIPRMPHLHDFQFFNNQRLNELYEKEVRYLMQANQKKDTIDGEDEDQLEPLTAEEQEEKEQLLEEGFASWTRRDFNTFIRACEKYGRNDIKSISSEMEGKTEEEVQRYAKVFKERYKELTDYDRIIKNIERGEARISRKDEIMKAIGKKLDRYKNPWLELKIQYGQNKGKFYNEECDRFMSRTTQELARRCDTLIRLVEKENQEYDEQERQARKEKRLAKNTTPTKRAALRNSEGESAPLSSFKRRRQSLMDDYVGSGRRKRG

SEQ ID NO: 53094 - protein, 808 aa, Zea Mays
MRPAKLYKLKHLTKVEVISNDPSGCTFVLGFDNLRSQSVAPPQWTMRNIDDRNRLLFCILNMCKEILSYLPKVVGIDIVELALWAKENTLTIDNQVSTQDGQETSVATQTERKVTVTVENDLVSQAKEEEEDMEALLDTYVMGIGEADAFSERLKQELVALEAANVYQLLESEPLIEEVLQGLDAASATVDDMDEWLRIFNLKLRHMREDIASIESRNNGLEMQSVNNKGLMEELDKLLERLRIPQEFAASLTGGSFEESRMLKNVEACEWLTGAIRSLEVPNLDPCYVNMRAVREKKAELEKLKTTFVRRASEFLRNYFSSLVDFMISDKSYFSQRGQLKRPDHADLRYKCRTYARLLQHLKSLDKSCLGPLRKAYCHSLNLLLRREAREFANELRASTKAPKNPAVWLEGSGGSGHNGSSSDTSQVSDAYSKMLTIFIPLLVDESSFFAHFMCFEVPALVPAGSPNANKSKSGGNDPDDDLGLMDPDGNDLKPDSTSAELGTLNEALQELLDGIQEDFYAVVDWAYKIDPLRCISMHGITERYLSGQKADAAGFVRKLLDDLESRISVQFSRFIDEACHQIERNERNVRQTGILAYIPRFAVLASRMEQYIQGQSRDLIDKAYTKLVSTMFATLEKIAQSDPKTADIVLIENYAAFQNSLYDLANVVPTLAKFYHQASESYELACTRHISSLIYLQFERLFQFNRKVDELTYTIAAEEIPFQLGLSKTDLRRVLKSSLSGIDKSISAMYRRLQKTLTSDELFPSLWDKCKKEFLDKYESFVQMVTRIYGNEPIMSVNEMKDVLAGF

SEQ ID NO: 53095 - protein, 491 aa, Zea Mays
MDLHVVCRIFQKHGSGPQNGAQYGAPYMEEEWEEDDDAIENGSTHDASGQIAATTCAVDEESNEDDENAYCETNRPARVEPSHLPSVHEMLNPPEMAPLQGQDSKETSDGSCSDVAISLEEILQEPLSNISVENMHRLEGQNATDDNISVDNLLSAYPTKDNGYVGQYNTMNGSAPADEAHARWPLRTYSNQNYVNGPLADEFFDTGNDTNGVAYSRQQQADGFPAPRQVDESMVFYDAPSDYNLVDGKDDFVYLNDILNEPLGNESLFDGDDMMAYFDATENDFKYDILGSGQGLDYPLADMPLNFAQKSDKEDKFTFEGISEVPEANPQYGASSSGSHEDLYTDTEFLGVPTDDTADKTYGNRLASMLGSIPAPPAMASEFPPSTGKSAGMLSAVSSSSIRFTAGIIQLDGLTFSSGSGQWPLQKNGDLSLLVSFAVEGDVASKLPVGLGRATRISTVPMVLRSGFYLFFMSAMILLFSYKVGSCIYSR

SEQ ID NO: 53096 - protein, 507 aa, Zea Mays
MKKYADNLLRSLEGITSRLSQLEIYCYKLERSIGELRSDVLRDETDHRLKSLEKHLNEVHRSIQILRDKQELAEAQKELAKFQLTQDTSKKKEDVPTSIPEQKKLEENPDTSNQQLALVLPHQVNLPSLAPRASESVQQYKNQPVQPSDPTPPVPQQDRYVLSQAIVYYPQRQAPGIQDTQGQKLQPEVQYLPARSPAQDVPVHAPSQPPQAGNQTQPQPYPPYQQQWHQQSSQPAPAPVAQTQQTFSQPFPPPAQQPQLSNVQQFPPQPVQQPQSNAQQYPPPVQPQQSSPQLPQAMQPQHPPMQTQMRPQTPPNYPHYPPHQPLNPTPETLPGNVAMQGSYNTAVPSGANRPELPYSYGGAGIPLSQSQPLPQHNMQRHQLPPSSQGSFGPPPSKGSYAGSPQYAPQGNPQGYSTGYAYPPNGPPAVQPQQMPPGGVGMSHPASHMMRGHPYGEMMEKAITMGYPRDQVLNVTQRMAESGQSMDFNTLLDRLNEAGSGAPPPRAW

SEQ ID NO: 53097 - protein, 74 aa, Zea Mays
MHNIERLEKELHQLLPPYMSEGIRVLPPSFGTDSAWFGAKMISNVSTFTEAWCAKKKQFRQKTGRSGTLFANSW

SEQ ID NO: 53098 - protein, 84 aa, Zea Mays
MSGARHVFLLLCQFVNYLEVVRLPVYYPSEQEKDDPKLYANNVRKLMAVEGNLILSDLGLAEKRVYHAALNGNSLARALHQKDD

SEQ ID NO: 53099 - protein, 424 aa, Zea Mays
MPQVYHESREDAERVRGRHLLGMSSWRAPHENARKPIRIYLNYDAVGHSPDRDCKNVGDIVKLGEPPVSSAPGTPICDPHGDPPLVGDCWYNCTLEDIAGKDKRQRLRKALGQTVEWFRKALAVEPVKGNLRLSGYSACGQDGGVQLPHAYVEDGVANADLVLLVTTRPTTGNTLAWAVACERDQWGRAIAGHVNVAPRHLTAEAETLLSATLIHEVMHVLGFDPHAFTHFRDERKRRRGQVTAQSLDKKLGRMVTRVVLPRVVMHARHHYGAFSQNFTGLELEDGGGRGTSGSHWEKRLLMNEIMTGSVDTRSVVSRMTLALLEDSGWYQANYSMAEHLDWGQNQGTEFVISPCNSWKGAYHCNTTQLSGCTYNREAEGYCPIVNYSGDLPKWAQYFPQANKGMPKCSINYYVYDIKQDAELY

SEQ ID NO: 53100 - protein, 430 aa, Zea Mays
MSNEMYSTIARVTDGIYEGIAIGGDVFPGSTLSDHILRFNNIPQVKMMVVLGELGGKDEYSLVEALKQGKVQKPVVAWVSGTCARLFKSEVQFGHAGAKSGGELESAQAKNQALKEAGAIVPTSYEALESAIKETFDKLFEEGKISPVTEITPPLIPEDLKTAIKSGKVRAPTHIISTISDDRGDEPCYAGVPMSTIIEQGYGVGDVISLLWFKRSLPRYCTQFIEICVMLCADHGPCVSGAHNSIVTARAGKDLVSSLVSGLLTIGPRFGGAIDDAARYFKDACDRSLTPYEFVEGMKKKGIRVPGIGHRIKSRDNRDKRVQLLQKYAHTHFPSVKYMEYAVQVETYTLSKANNLVMNVDGAIGSLFLDLLSGSGMFTKQEIDEIVEIGYLNGLFVLARSIGLIGHTFDQKRLKQPLYRHPWEDVLYTK

SEQ ID NO: 53101 - protein, 298 aa, Zea Mays
MLRNGETGDWIGTFQGHKGAVWSCCLDRNALRAASASADFSAKVWDALTGDELHSFEHKHIVRACAFSEDTHLLLTGGMEKTLRVYDINRPDAAPRELDKSPGSVRTAAWLHSDQTILSSCTDMGGVRLWDVRTGKIVQTLETKASITSAEVSQDGRFITTADGSSVKFWDANHFGLVKSYDMPCNVESASLEPKSGSKFVAGGEDLWVHVFDFFTGEEIACNKGHHGPVHCVRFAPGGESYASGSEDGTIRIWQLSPVNADDDEAANANGKANAAVNEVTTKLEGGFHIPKEGQAGG

SEQ ID NO: 53102 - protein, 627 aa, Zea Mays
MAAQGQAAAGSASESGGSPAASAAAAAAAAFPATSLYVGDLHESVQDAQLFDVFSQVGGVVSVRVCRDINSRKSLGYAYVNYNNTSDAARALELLNFTPINGKPIRIMYSNRDPSSRKSGAGNIFIKNLDKSIDNKALYDTFCAFGNILSCKIATDPSGESRGYGFVQFEMDESAQSAIDKLNGMLINDKKVYVGPFVRKQDRENVSNNIKFSNVYVKNLSDTVTDDELKEMFGKYGTITSAVVMRDSDGNSRCFGFVNFENADAAAQAVQELNGKIFNDKELYVGRAQKKSEREMELKEKFEKNIQEVAEKFQNTNLYLKNLDDNIDDEKLREIFAEYGNITSCKVMRDSYGVSRGSGFVSFKSAEDANRALTEMNGKMVGSKPLYVALAQRKDDRKAKLQAQFSQMRPVAMAPSVGPRMPMFPPSVPGVGQQLFYGQPPPAFINPQGQQPQRPAGRRAGSGGMQQPMPMGSQQQIFPRGGRGYRYATGRGMPDPGMHNVGAVMPSPYEMGGMAMRDAGVSQPVPIGALATALANASPDQQRLMLGENLYPLVEQLEREQAAKVTGMLLEMDQTEVLHLLESPDALKAKVAEAMEVLRSAQHLQQSNASTEQQLANLSLNDGVLSS

SEQ ID NO: 53103 - protein, 1094 aa, Zea Mays
MESEVIREDNKEQSTADIVGPHEQGTCGASALVENEHLCADMRADSFVAVTEPDSQEDYAVESCMRDDVLICTESGSADIESEVNGKDSKQEQSNADVVEVIGQGVVRADALMANGHLCADIQADSSEAATKPDNIANESKLTEVAESGEDAAASGELDAIDASSQTNGHIYVASGADSFIIASESKSHSFETDGQETDQQEEEVPQTEAELLDGVLKPTERNCARSVEELIGEEVDTDGHPSVDGTADASGEQEAKPMQVEGEATCGILEFEEVDKDGEDSLCNDCMVGVVSSNEETELPMKERTDEAVPSVNVGESEQVTEDTSQDIMQGGLARGVFIGTIFVKPVSDPHVESSLVHKVKAEVHLVDEITAADLKAENMVEVKRTDREVDEIEVKAPGTHEIGNSSEVEPKEEFEMEVDDAVSLHEAAASASENGSEEKSSNIAVDQVEPVNLNVDELAVDDDQPSFNPGYGSAKSSDVAETKNVEAQVTEQKGNAHHASGEWHGDHTQVIGPQRIYIIKVPKFAGDDLWDKIQAAQAHLDQLTQERDAINRRRQKQKAICDEYREKFEAARQEEREARAAHGDKKNDLNSVRSVLEKLHQANSVEELDELIAKKERIMQHETISLKEEKLLIKEINELKSQRKQLSATMGSKAEINEAFDQKDHIHERHKVLKKDSDVLFSNLKVLEENTRKIQKSFADERTALRKLTEEHRAANEIRQKAYSDWTELRSEPSKKNEYFFKYRDARNAAENFRANGDINGLISHCNSQIERVMEIWNKNEDFRKQYVESNKVSTLKRLGTHDGRKLGPGEDPPVIPSRRPSNICPLSASSPEMITLASTPAPVLAAAAAVPSKENSFPALAAPQTSKRAKSKASGSSAQIKNKSVIVSEEEDLEQTLKEKAHQLELARKAEELDRKAEELARKEEELRKERDAAEKERLRMEQKAKAKEAEERKRRKAEKDKERAEFKARKEAEEREKKKAKRDKKKGAAPADSSAIGDSHAAASATADTDSNASDNPREADVSQPAVAPRRPARPAAAIKQLNRLQPMPAPLRNRGRRKLRQYILIAAAVLTVLALFVAGNYIPRLRSHS

SEQ ID NO: 53104 - protein, 582 aa, Zea Mays
MAEPAPAPPVTAPLVGLLYDERMCAHATPNGEEHPENPERLRSIWRKLNAAGVASRCVALKAKEAEDKYIASVHSKRHIKLMKEISSTIYDASRNKIARKFNSIYLNKGSSESAVLAAGSVIEVAEKVAAGELSSAIALVRPPGHHAEHDEAMGFCLFNNVAVAANYLLNERPDLGIKKILIVDWDVHHGNGTQKMFYDDPRVLFFSVHRFDYGSFYPSEGDASHCFIGEEAGKGYNINVPWEHGKCGDADYIAAWDHVLLPVTKVFDPDIILVSAGFDAALGDPLGGCCITPNGYALLLTKLLGFAQGRIVMALEGGYNLRSIANSVCACAKVLLGDKFTFNTPEMQPFESTWRVIQAVRNELKTCWPVLSSKLPENVSLRIKPAPSEAEGMNIPCCGSRDTSSPKGTVWKTVPHRLLFGRSSTPCWGTGGVAFLNPEINYNEKSYVCMYKITLEQFNDILFQENRLVLEDGKDGNTVYPDSPLIGSSEIKFISTNRAVHLEPIKDSWYSNVLYLGNEDEVPILTMTCPASDIERYKSGELRLAPPSETYAATLIKGLVEGKQMDADGAASYINAAAARAL

SEQ ID NO: 53105 - protein, 858 aa, Zea Mays
MDSDNDCGSDAGAEWVWVRRPSEVEAAAAAAGWLADEEARPLKVVFGSPAKYFTDAAPIGNGRLGAMVWGCVESERLQLNHDTLWTGGPGNYTNPNAPAVLSKVRSLVENGKYPEATSAAYDLSGDQTQVFQPLGDIDLVFGEDIKYTNYRRELDLHTATVTVTYTVGDIVYTREHFSSNPHQVIVTKISANKPGNVSFTVSLTSPLDHKIRVTHANEIIMEGSCPGQRPEEIKTAADQPIGIKFSAILYLQINGANSTVEVLNDNMLKLDCADSVVLLLAATTSFQSAFIKPSESKLDPTVSAFTTLSIARRTSYSQLKAYHIDDYQTLFQRVSLQLSQGSNYDLRRSRLVQSAETSSQGANVSDYGFQISGCTRLTSLNSFVKPTVERIVTFKDNEDPSLVELLFQFGRYLLISCSRPGTQISNLQGIWSNDTSPPWDAAPHPNINLQMNYWPALPCNLSECQEPLFDFIGSLSINGAKTAKVNYEASGWVSHQVTDLWAKTSPDAGDPVWALWPMGGPWLATHLWEHYCFTLDKHFLEKTAYPLLEGSARFLLDWLIEGHRGYLETNPSTSPEHYFIAPDGKEACVSYSTTMDISIIREVFSALILSADILGKSDTNVVQRIKKALPNLPPMKVARDGTIMEWAQDFQDPEIHHRHVSHLFGLYPGHTMSLEETPDLCRAVANSLYKRGDEGPGWSTSWKMVLWARLHNSDHAYKMILQLITLVDPEHEVSREGGLYSNLFTAHPPFQIDANFGFPAALSEMLVQSTGTDLYLLPALPRNKWPQGYVKGLKARGGVTVNISWKEGSLHEALLWSSGGQNTLSRLHYGDQIATVSLSSGQVYRFSMDLKCLKTWPL

SEQ ID NO: 53106 - protein, 87 aa, Zea Mays
MYIPQTLETCSRVPDHRRGTKARDNRCVNESIAMASRLVAAAASSSSLSSASPLARLISRRGLAGAAVCSSKPLNVGGYFLWWLQAF

SEQ ID NO: 53107 - protein, 732 aa, Zea Mays
MQIFVTKIVDIMKEEKLYSWQGGPIILQQIENEYGNIQGHYGQAGKRYMLWAAQMALALDTGVPWVMCRQTDAPEQILNTCNAFYCDGFKPNSYNKPTIWTEDWDGWYADWGESLPHRPAQDSAFAVARFYQRGGSLQNYYMYFGGTNFERTAGGPLQITSYDYDAPIDEYGILRQPKWGHLKDLHAAIKLCESALTAVDGSPHYVKLGPMQEAHVYSSENVHTNGSISGNSQFCSAFLANIDEHKYASVWIFGKSYSLPPWSVSILPDCETVAFNTARVGTQTSFFNVESGSPSYSSRHKPRILSLIGVPYLSTTWWTFKEPVGIWGEGIFTAQGILEHLNVTKDISDYLSYTTRVNISEEDVLYWNSKGFLPSLTIDQIRDVARVFVNGKLAGSKVGHWVSLNQPLQLVQGLNELTLLSEIVGLQNYGAFLEKDGAGFRGQVKLTGLSNGDIDLTNSLWTYQIGLKGEFSRIYSPEYQGSAEWSSMQNDDTVSPFTWFKTMFDAPEGNGPVTIDLGSMGKGQAWVNGHLIGRYWSLVAPESGCPSSCNYAGTYSDSKCRSNCGIATQSWYHIPREWLQESGNLLVLFEETGGDPSQISLEVHYTKTICSKISETYYPPLSAWSRAANGRPSVNTVAPELRLQCDDGHVISKITFASYGTPTGGCQNFSVGNCHASTTLDLVVEACEGKNRCAISVTNEVFGDPCRKVVKDLAVEAECSPPSVNQEPRYDI

SEQ ID NO: 53108 - protein, 69 aa, Zea Mays
MSSVFPSAHLAFASIDLNAHTVFAITTALAILQTVCLRNLSLLSYLSADGVMATIAVILCLFWVACSGL

SEQ ID NO: 53109 - protein, 656 aa, Zea Mays
MLKGRYIRAFFVYGGCNLVLAAAAAAICAYIAPAAAGSGIPEVKAYLNGVDAYSILAPSTLFVKIFGSILGVSAGFVLGKEGPMVHTGACIANLLGQGGSRKYHLTCNWLRYFKNDRDRRDLITCGSAAGVAAAFRAPVGGVLFALEEAASWWRSALLWRTFFTTAVVAVVLRGLIEFCRSGKCGLFGQGGLIMFDLSSTVAVYSTPDLIAIIVLGIIGGIFGGLFNYLLDKILRVYSIINERGAPFKILLTITISIITSMCSYGLPWLAACTPCPVDAVEQCPTVGRSGNYKNFQCPPGHYNGLASLFFNTNDDAIRNLFSNGTSTEFQMSSLFIFFTAIYCLGLVTYGIAVPSGLFIPVILAGATYGRIVGTLLGSISDLDPGLFALLGAASFLGGTMRMTVSVCVILLELTNDLPMLPLVMLVLLISKTIADSFNKGVYDQIVVMKGLPYMEAHAEPYMRHLVAGDVVSGPLITFSGVEKVGNIVHALRLTGHNGFPVLDEPPITETPELVGLVTRSHLLVLLNSKNFMKGRVKTSGSFVLRRFGAFDFAKPGSGKGLKIEDLDFTDEEMDMYVDLHPITNTSPYTVVETMSLAKAAILFRELGLRHLLVVPKTPDRPPIVGILTRHDFMPEHIHSLFPNLNPHKYHSASMAG

SEQ ID NO: 53110 - protein, 156 aa, Zea Mays
MEVREAIENIFIMMGFTEMPTNNFVESSFWNFDALFQPQQHPARDSHDTFFLKAPATTKQLPDDYLEKVKQVHQSGGYGSKGYGYDWKRDEAEKNLLRTHTTAVSTRMLYKLAQEKPFTPKRYYSIDRVFRNEAVDRTHLAEFHQIEVLPYNASFF

SEQ ID NO: 53111 - protein, 116 aa, Zea Mays
MILTFGSLANSTPYLGGILLVIVLAWLGAASSLDKQFSSLAKQDMEREKAAQDQGKLERSLLSKPAEGGTGDVLVEQQTNGSATSKATGTESSPSNSSLPPPPPPPPPPPNSIDRS

SEQ ID NO: 53112 - protein, 482 aa, Zea Mays
MAQAAVEPALNGGSLIGRQPVVPRMKRKTPSELRGEQLKRRTSEKLGDDLLPSATLDRSNNGLRNTEQQKISKYINTRVTEVFPVRKARNLGKENSKDVLQNNEKVSKFVNGTPASNFASSSLLCGHGDTAKLDTLVPTMEAAKPGFKKVEKCSENALRSVSELHVGDEKQTGSNKFDMEKVLKGFGARDAFVASGLNGPNGQVGGTVSKPSDICPSKITVPGEKAPLDFTLKTSLQFVSSSSVKWCHKLNTSFGRSSITGAIGQSCPRGCQNLECSKLESKKEFLFSKALQSWVYPQSLLPSSIISAMLSSTAGGESDFLLKRHQDWEDSFQNLYYMLRKNMLNIFYVYTTQFVALFISGSCLEKKQSSNAYLSQSTRGLRSLLRKHGVCFSMPLCSTEVEQATEDDLIELSEIERRNVGQSLLSFTGNENVHGLYDVLLNYKSLLNSLSAVDVPVLYSPQPFQNGCLHIPEKGDHVSATC

SEQ ID NO: 53113 - protein, 110 aa, Zea Mays
MIRWIAHGIPRVPWDGHGRFDGASVYKLDKDGKIYEHKVHNVAMNPPTKFKVLPVHELIRSLGCPSTAKPTYFEASSQYLCAGPSYLRLAWIRCYISLCRMLSLANLGEG

SEQ ID NO: 53114 - protein, 465 aa, Zea Mays
MKELREKLVHEKATAIIITALDEVAWLYNIRGSDVDYSPVVHSYAIVTLHSAFFYVDKRKVTVEVQKYMSGNGIEIREYETVQSDASLLASGKLQSSVHVEKYMDEVESSKIWIDSGSCCLALYSKLSPHQVLTLQSPIALPKAVKNPTELDGLRKAHIRDGAAVVQYLAWLDNQMQENYGASGYFSEIKGSHKNEHLATKLTEVSVSDKLEGFRATKENFKGLSFPTISSVGPNAAVIHYKPEASTCSEMDADKIYLCDSGAQYLDGTTDITRTVHFGKPSAHEKSCYTAVLKGHIALDIAVFPNGTTGHALDILSRAPLWREGLDYRHGTGHGIGSYLNVHEGPHLISFRPSARNVPLQASMTVTDEPGYYEDGAFGIRLENVLICKDANAKFNFGDKGYLAFEHITWAPYQTKLIDTGLLTPVEIDWVNTYHSDCRKILEPHLNEQEKQWLMKATEPVAARG

SEQ ID NO: 53115 - protein, 93 aa, Zea Mays
MQSAAFKILRTRLKTVPFSENIKRTSSANPYSQILQVTEDGNRNQDTQNYSAINFPSLLQQFEHMQLQHRNHLKDQLQSRKSASALTLSQELC

SEQ ID NO: 53116 - protein, 304 aa, Zea Mays
MYKVIQLLAGICEGDATMKDYRLVRNCICGQIYDSSPVDFVSDVGTQFLQKPAVGNLSQSTILRSWMAKVLASGMDTLFPSRIEAQRAEYWHTLYSAAGLGPVLIFCSEDDNLAPCHIICGFARRLIELGTDVKLMKWSDSQHVGHYNSHEIEYRKAVDDTLKKALVTFCHRSQLYDSNMAGDQEYKIAHSVCSLHNAAANSNESLRRVANSPSDHFFLPSSKDHDESREPSSLIEDQRRHISHPPCMEPKGVLGQILFDVCVPNNVEGWDIKPTVSPNGRPTFASARQLGPFNPIRYFRRSRL

SEQ ID NO: 53117 - protein, 164 aa, Zea Mays
MIFFSIFGKFGAFFASIPLPIFAAIYCILFGIVAAVGVSFMQFANKNSMRNIYIIGLSLFLGISVPQYFNGYTSSAGGHGPARTNAGWFNDIINTVFASGPTVALIVASVLDNTLEFRGYEADRGLSWFQPFLRRHKGYSDPRNEEFYSFPISVYDVIPDRFRR

SEQ ID NO: 53118 - protein, 2156 aa, Zea Mays
MSSIASQLKAIKSALGAAPEPARRPVTRPSVLFDAKEAADIDLRAILPIALSGLEHLTSVDERFAKYSNTLFRETSLEVNREQLTPKENDKLNKSISTYLRLLAGYLHLPSALKTLEYLIRRYLVHVYNSDELLLSALPYHDTHAFVRIVQLVNLGNSNWAFLGGVKSSGAPPPRSVLVQQCIRDKAVLETLCNYATPTKEFSHSKTVVCFCTAVIVECLGAVPKLDTDVVQRVLGFVFDSLNPAVTRDQEYKAGALMIVGVLGTRATLAPKLVQNLILFVARTAQHDAFESVDLPWLRVSVMALISLVQSQSVHVFPKKPLMVLKDIRDFSGILSVLSSEYNIEKFIRLYVESLIDYSIVDGTCHTHLIETIESLPMKNFIESVVCKILGNCIKVSRATGIPDINHTELWAKKIFKAIERKYPLELRDAIHKFLENSETNSPGGDSLAEVFGILFDENKNLPTEISDSNIWFSLDHPKATVRQSALSKVATSGIFNNRTLNPQKFINMQDAILRSLYDDDLSVVQAALSIEGLAAVANPDSLLKAYDCVLTKCIKIINKGGSKALKASDVAVSCLEKLVTEYQSHHMEHAKDIATLVFRLLIVHPKTLRVNIKALELAKKIRWEFYASSSLVYDGVDFDKMKNMSADSIASINMNNIKAFAETFLADPNKHVEWLANSGSGSRFSKTLFLLIVLQTLVSTEALDEQVNLCHACLPVLKDECHHIQPKDSDVGDEISITNLEMCSLELVKHFFNRDTEALNVRILVCIFWGIVRVQSSCIKQNPVVGSGGNTMLDDLFLFFLVSPAKNIFQKHLQYLVNCIGAPFQFISKYFLDEDLSERVQVESLLVFASICSKCASSDNNSLDESICVQLLLGFPSIILPLAHVNKDIRASAIKCIEGLSLVWQRLSTSVPRNGNNTKLPQCLSSPTFGSFLELLVNQKTMICSDAKFLPAYISSMLSPCKDILVPENLHERFDPHTKDTILTFILRSALRLPPYGKFMVLSVLKGVGSILFHAEDVKSLFFDLLDRRDQYQNRHNCKQILSTHEMHTLCLLLEVLFSTPDHVNIGFNMFEPLMKALKVDASSPGDSVVVMPCLTVLQNLQPGFFDNLKTDTKEKVVGRLISLVRTESFVVRNAARDALLRINVHSSTLVKFIELISTLGDARGHSKRIKRNEDRDLNVFCNFAEIFGENSVASILVSLLDILFLKKDVKQRSRLLQPLFQILSKLLSDQWVSVIVSQYNDQQDTSSEIPDLSSFVKEVQHLVLLALKDITDTLQSGHHDAMVSSSDVGLLIDCVRSIQDIGTRNHGFSLIASLGKACPQLVSESIVDLFVAIGDAIKQDDSHSQRVLEDLLSVLVPCWLSRTTSIEKLLQIFIKALADVPEHRRLTLMVYLLRTMGKENNLSTVIMHLLHSVVERISHSFSVHHGDDYRLAMSQEWEYGLAVNVLDQFSYKLWFPCLSKLLKNIRVHEKQDLHLMLHLAMRLILFKLQDTELNFELESEEAANSIQGSLGALMEEVILCGVYARDKKRDICTDITKEVRDFANTILKTITGWMRASTYLMGITLLLDHSDNHVKRKTLRILSETARGNSLVQKNQRKARKLKHISGTTIKVDKSSGPYFSKLCLKILELIDRVGDSDTKVKVAAISSLETLAKEYPSDNPVYSNCLATIIDQIGSDEAAVSSALIHTVGSLVNVIGSKALPQLPLIMKNIMLMSHQISCCPSGNYAHGSTRTAAELSNQDITVLLSALTTIEVIVEKLGEFVNPYLKEILDLVVLHPECSTQMHAKLDAKAARVRELLTVKVPVRLILSPLLNLYSLTANCGDASLTLAFSMLASLVGTMDRLAVGTYHSKIYEHCLAALDLRRQHPDSLKNINMVEQSIIHAIISLTMKLTEGTFRPLFLRTLEWAEAEVDESSSKKSLDRAIVFYKLVNKLAEKHRSLFTPYFKYLLEGSIQYLSEDDALGGSKHKKKKTKLVDVQVEQKDKLLGLKLWNLRALVLKSLHQCFLYDNDQKILDSSNFQVLLKPIVSQFVVEPPKSVESVLDAPSIEEVDETIILCLGQMAVTARTDVLWKPLNHEVLMQTRSDEVRPKMLGLKVIRYMVQHLKEEYVVLVPETIPFLGELLEDVELPVKTLSQEILKEMETLSGESLQQYL

SEQ ID NO: 53119 - protein, 151 aa, Zea Mays
MRYYCDYCDTYLTHDSPSVRKQHNAGYKHKANVRTYYQQFEEQQTQSLIDQRIKEHLGQAAAFQAGAPFNQHLLAFPGAMARPRLPILPTPGMPHGFPQAPGAPLMPGIRPPAIYQANPQASAGPTSGAPPAPPTAPQPAFSYAPPSEGNH

SEQ ID NO: 53120 - protein, 425 aa, Zea Mays
MVELDPYLNTDAGTMSPFEHGEVFVLDDGGEVDLDLGNYERFLDIKLTRDNNITTGKIYQSVIDKERKGEYLGKTVQVVPHITNAIQEWIERVAMIPVDGMEGPADVCVIELGGTIGDIESMPFIEALGQFSYRVGPGNFCLVHVSLVPVLNVVGEQKTKPTQHSVRGLRGLGLTPNILACRSTKELEDSVKEKLSQFCHVPAANIITLYDVSNIWRIPLLLCDQKAHEAILKVLNLERVDSIAREPKLDEWVARAAIFDTLHDTVRIAMVGKYTGLSDSYLSVLKALLHASVDCRRKLVVDWVASTDLEDSTAIEAPDAYKTSWNLLKGADGILVPGGFGDRGVEGKILAAKYAREKNVPYLGICLGMQIAVVEYARHVMNFTDANSTEFDPNTKTPCVIFMPEGSKTHMGATMRLGSRRTFFK

SEQ ID NO: 53121 - protein, 50 aa, Zea Mays
MNGTCKLVMCVVYQKESERNNSRRVRCCHCQYLAVLLCFACLEGKRNVLL

SEQ ID NO: 53122 - protein, 1162 aa, Zea Mays
MQEVIVQQEEQPVEIALDQSRTDSIVLPGSREDRWRSLSWLLGARGRFVLTSERPNKKRKLLGADAGLEQLVLLPSPEGEAGSVCDVCCLGESDMVSNRMLHCKNCEISVHQKCYGVHVVPDRFWFCVWCTRNIGMPRRLTRSDACRTVLMPCVLCPKEKGALKPFKRDPGPSIDGGNQEFVHLFCSLWRPEFYVEDMESMEPVTNVVDTQENQSKLVCSLCKVMHGACVRCSHGACRTSFHPICAREFKLQIEIWGKFGHDNVEMRAFCAKHSSVKSISSIQNDKSVSELDSAQVELHDGKPVTGKEQQVRFTRSNKDKFVNSTITTSSCSLNEAHTNEVATISPVLGRTQETQSADMAADQPSSDGNLMSDSGDVSGILRKLVDQGKISLDDIELEPSLRSESVEAAFQPETTAYSPGLKLKMIKWLQNSECAPSVQVKSFKEGSLAQGTLPRSESKNLTTATFQSGQEEAISSIDHHFLENDNANNGDLVQNGFHRCPDPDVNQISGRHLLNMDGYCCYIHPIIEKRLQGLWSNSLEQTIQKNGYHEELSWSLHDEDFGGSSTKLVQLTGKTAMEVCKAQSSDTLKLSPDDEIEGEIVYLQSRLLDGVVSMKQRYEDLILKVVQNISYELDSFNKRKWDHIIVNQFLRDLREAKKRGNSERRHKEALAILAATAPSVTPTSRNTTVRKETENNVTPAKRENMPRSITGSSRIGQLSSSPQAKDLSFSNSDVSDETNFGIFNLAKFSKKSALPCDICMRCDTILNRIFVCSSCKATVHLDCYQSLVYPTGPWKCELCHEMPSDSVTSGEQSDQNGPKACLVQCGLCHGTSGAFRKTVKGQWVHAFCAEWLLETTFRRGQHNPVDGMERLHHKDKDTCSICHRCVGACLKCCTLDCQITFHPSCARDAGLYMNTKRLGNMLQHKAYCCRHSIEQRKAYSQQYGPDEIKGMKQMRVELELLRFLCERIVKREKVKKDLVGCAHDILAARRITAVSSLWTSCYTSGPGASSESATTSVNNKSYGGTIQRSDDVTVRLEDVTVDSTVTKKHTVRFSLHNRDTDRNTADSSTSTISYKRKLDDGESLAFKSHPGTPATALLESRDAEKPIDKKLRDMYQKELVMVTSHQALLKNKTPPERYVYTRRSSMSKRKQCSQHVVQRPGG

SEQ ID NO: 53123 - protein, 108 aa, Zea Mays
MQVSILAGTLARLDREAPYYKKDGYNDFNTFYMQAASGTKGGSSGSPVVDCQGRAVALNAGSKSSSASAFFLPLERVVRALDLIRDSWDAFGTKTESVYIPRGTLQAT

SEQ ID NO: 53124 - protein, 361 aa, Zea Mays
MCHRHGVMHRDLKPENFLYASKKESSPLKAIDFGLSVFFRPGERFTEIVGSPYYMAPEVLKRNYGPEVDVWSAGVILYILLCGVPPFWAETEQGVAQAIIRSVVDFKREPWPRVSEPAKDLVRRMLDPNPLTRFTAAQVLEHPWLHDSKKMPDISLGDTVRARLQQFAAMNKLKKKALRVIAEHLSVEEVADIKQMFEKMDVSKNGKLTFEEFKAGLRKLGNQMPDSDLQIMMDAADIDKNGTLDYEEFVTVSVHVRKIGNDEHIQKAFTYFDRNKSGYIEIEELREALADELEGTDEDIINGIIRDVDTDKDGKISYDEFAAMMKAGTDWRKASRQYSRQRFSNLSLKLQKDGSLGAETR

SEQ ID NO: 53125 - protein, 246 aa, Zea Mays
MNIYIVGLNQLFDIEIDKVNKPTLPLASGEYTLATGVAIVSVFAAMSFGLGWAVGSQPLFWALFISFVLGTAYSINLPYLRWKRFAVVAALCILAVRAVIVQLAFFLHIQTFVFRRPAVFSRPLLFATGFMTFFSVVIALFKDIPDIEGDRIFGIRSFSVRLGQKKVFWICVGLLEMAYSVAILMGATSSCLWSKTATIAGHSILAAILWSCARSVDLTSKAAITSFYMFIWKLFYAEYLLIPLVR

SEQ ID NO: 53126 - protein, 302 aa, Zea Mays
MRGGDHCKSMNQFVWSFLCGLGEAKFLNRTFVMDLNICLSGAHTVDGKDVDGKDFRYYFDFEHLKESVPVVEEGDFLKDWKRWDKKKGPGRITVRKVPSYKVTPMQLKRDKSNIIWRQFNGHEPENYWYRVCEGRAAKVIQRPWYAIWKSKRLMNIVTEIAGRMDWDYDGLHVVRGWKAQNKQMYPNLDSDTSPDALVDKVTKLVKPMRDLYIATNEPFYNYFDKLRSHFHVHLLDDYKELWSNTSEWYNETTTLSRGKPVPFDAYMRVIVDTEVFYRSKTQVETFNNLTRDCKDGINTCNL

SEQ ID NO: 53127 - protein, 108 aa, Zea Mays
MSMQLAAWAKELRGMESYCIKEFADALEVIPYTLAENAGLNPISIVTELRNRHARGEKNAGINVRKGQITNILEENVVQPLLVSTSAITLACECVRMILKIDDIVTVR

SEQ ID NO: 53128 - protein, 257 aa, Zea Mays
MTCRMTASKQNKRQTNCTNSEQCRPGKKAKFDTSHCLVSLKPHISLKWDQYLRKVVPEKEQVGILWSDLAPFMESQKHCSGLADVMYVPPEIFSLKSLKGVLSYEAWSTSLTEAERKFLIQFLPSETDAEENVKLLLTGQNHHFGNPFLSWSSSLCYGDIHPDALLNKEKHIKKDEKAYHVNLLNYHSNMVETLKSWRKRWLSCGDTENLFRDNPSNQMQGVMQLKATNSGMPMKVAQRIDVSKFMSYIKVLKSHFS

SEQ ID NO: 53129 - protein, 598 aa, Zea Mays
MLLWPLMAGDITCGSLLQKLQLIWDEVGESDEDRDKVLYQLDQECLDVYKRKVDQATNSRDLLIQALDDSKIELARLLSGLGEKAIARTPEKTTGTIKQQLAAIAPTLEQLTKQKNERRREFVNVQSQIDQICGEIAGTIEVGEQVTTPQVNEDDLTLERLEDFRSQLQELEKEKSNRLEKVLEYVIMVHDLCTVLGMDFLSTVTGVHPTLDDSVGDNCKSISDDTLSKLDKTVATLNEDKKLRLSKLQELAGQLYDLWDLMDAPKEERRMFDHVTCNRSASVDEVTAPGSLALDLIEQAEVEVQRLDQLKYSKMKEIAFKKQNELEDIYAGAHIVIDTAAAHEKILALIEAGNIEPSELIADMDAQIAKAKEEALSRKDILDKVERWMSACEEESWLEDYNRDDNRYNSSRGAHLNLKRAEKARILVNKIPALVETLVAKTRAWEENRGLSFMYDGVPLLAMLDEYVMLRQEREEEKKRTREQKRYVEQQLNTDHEGPFGSRVSPNRPASSKKAIGPKLNGSVSNGTPPNRRLSISGQQNGGGHGVRSGGKDSKKDTAKTASPGNSAAATAPVGLTATAKEDAASQISVTDLVPSTP

SEQ ID NO: 53130 - protein, 89 aa, Zea Mays
MWSNAVRGGPQTTTRNSGGACDGSRAAHLWQSSHKPGEAPELPKGPVEVEVKHPHGSTLLPLCLISMVRGFYLPRSEANRPSRSRVRRM

SEQ ID NO: 53131 - protein, 110 aa, Zea Mays
MATVFSRDAWRCVWHMIQNDLVHGWGLDFALRKCVEPAHEKIGVVDSQWIVHQVIPSLGNQGKAENGKAPWEGVRARCRKEWGMFQTRLTDAEKAYYLEHGITPPKSTVA

SEQ ID NO: 53132 - protein, 214 aa, Zea Mays
MPVILGSKDYVDAWLNDVSVKLEEITAPYEGADLVWYPVTSALGKASFDGPECIKEVHIGATDKPISKFFTKKSTAYDLSGKYENMSRELAHAYKAAKVECDGSVENQGGDGNQHQSREKQTTNCTIKDEPVTLEPQVFETPWSIEHEDTMTLAGATLETQRDLGFKRKIEDTQVEASMKPSQLTRKEKAVKAASDGQASLLSYFARKQGRSMK

SEQ ID NO: 53133 - protein, 365 aa, Zea Mays
MVGTSMELFDFIAAALAKFVGTEGEDFQLPEGRQRELGFTFSFPVNQTSISSGTLIKWTKGFSINGTVGEDVVSELSRAMERQGLDMKATALVNDTVGTLAGGRYMDTDVVAAVILGTGTNAAYVEHANAIPKWTGLLPKSGKMVINTEWGSFKSNKLPLSEYDKAMDFESLNPGEQIYEKMISGMYLGEIVRRILLKLAHEASLFGDVVPPKLELPFILRTPDMSAMHHDSSHDLKTLGAKLKDIVGVADTSLEVRYITRHICDLVAERAARLAAAGVYSILKKIGRDKVPSGGGKMPRTVVALDGGLYEHYKKFSSCVEATLTDLLGEEASSSVVAKLANDGSGIGAALLAASHSQYQYGASD

SEQ ID NO: 53134 - protein, 362 aa, Zea Mays
MAFPQISRRALGLLLVIAAAAAIVSPATADEVVALTEADFEKEVGQDRGALVEFYAPWCGHCKKLAPEYEKLGASFKKAKSVLIAKVDCDEHKSVCSKYGVSGYPTIQWFPKGSLEPKKYEGQRSVEALAEFVNSEAGTNVKIAAIPSSVVVLTSETFDSIVLDETKDVLVEFYAPWCGHCKHLAPLASVFKQDDGVVIANIDADKHTDLAEKYGVSGFPTLKFFPKGNKAGEDYDGGRDLDDFVKFINEKCGTSRDPKGHLNQEAGLVPSLNPLVKEFLNAADDKRKEVLSKIEEDVAKLSGSAAKHGKIYVTAAKKIIDKGSDYTKKETERLHRMLEKSISPSKADEFIVKKNILSIFSS

SEQ ID NO: 53135 - protein, 1437 aa, Zea Mays
MKRGARDDALMGSQLKRPNVGRSDPSAQPQHMPVPGLASAAAPPPQAGAAPPAQPQQTSGAALTNQKLTTNDALVYLKAVKDKFQDKREKYEEFLEVMRDFKSERIDTNGVIGRVKTLFNGYPELILGFNAFLPKGYAIKLQEEKKPVDFVEAINFVNKIKNRFQHDERVYKAFLDILNMYRKDNKSIQDVYHEVAGLFKDHKDLLEEFQHFLPDTSVAPQAVASSRGGLVKREDRSSLPPANRTLHNEKRERACLSHADRDFSVDRPDVDHDRQRRRLDKEKERKVERDRRDYEREDKDGEHDSRDLEIGQRKRKPFPRKMEDNAGAETHQGGPSENHGIHSVSSSSYDDKDALKSVYTHEFHFCEKVKEKLEHEAYQEFLKCLHIYSQEIITRSELKNLVNDILQHYPDLMEGFNEFLEHCENIDGFLAGVFNKRPTTRIVKTEDKEKDRDRDREDRDRDREKEREKERERLDKGSTFNSKDGSCHKPPMFSGKEKYNLSKPISELDLSNCQRCTPSYRLLPKNYPMPPASNRTDLGASVLNDHWVSVTSGSEDYSFKHMRKNQYEESLFRCEDDRFELDMLLESVNAATKRVEELIEKMQDNSVKPESPIRMDEHLTPLNLRCIERLYGDHGLDVMDVLRKNASVALPVILTRLKQKQEEWSRCRSDFNKVWAEIYAKNYHKSLDHRSFYFKQQDTKNLSTKSLLTEIKEINEKKRKEDDVLLAIAAGNRRPIVPNMSFEYVDSEIHEDLHKIIKYSCGEICNSSDQLDKVMRIWTTFVEPILGVQRKHGSEDPDLVKPKSRTTKSGIANVGESNTGAGIVSKHNNDDESEQGLPSRARIANGVAANAQNGFHDADRIARRGEESLNVTLNGRVHGAASADETPSLSTQNIASTERSAENAAVVRTEQHKANLELTPGVNGSRSSHGAVEVAGEGKAVNETLPSAVGGETGRLGPSFNGISEGIKGRLNNDGSAPHISKVEREEGELSPNGDFDEDHFVPFEDGTSKGKEGSTSRSFQGRHGEVVPSAEAAGENDADADDEGEESAQRSTEDSENASEAGEDASGSESGDGEECFREDHDEEEEDMDHDDQDTKAESEGEAEGTTETHDVEGGISLPLSERSLYSVKPLAKHVPTALHDREKFSRIFYGNDSFYVLFRLHQILYERLLSAKTNSFTAEKKWRNSKDTNPPDLYAKFMSALYNLLDGSSDNTKFEDDCRAIIGTQSYVLFTLDKLIYKVVKQLQAIATDEMDNKLLQLYLYEKSRSPGRFFDLVYHENARVLLHDESIYRFECCSSPTRLSIQLMEYGHEKPEVTAVSIDPNFSSYLFGEYLCSTSDKKLSEGVYLARNKRKYSDNDEPSDFLKAMDGIKVVNGLECKISCKTSKVSYVLDTEDFLSRLRKRRKILRGGSVSDSSQFSKIYAAKVQRFNRFLSKA

SEQ ID NO: 53136 - protein, 62 aa, Zea Mays
MEFAAKQLNLAYKKMISRAYHDSLFMARLQPQAGGVCITRGHGEWGEGPSLDNGYAVAGVTC

SEQ ID NO: 53137 - protein, 627 aa, Zea Mays
MAQAAVEPALNGGSLIGRQPVVPRMKRKTPSELRGEQLKRRTSEKLGDDLLPSATLDRSNNGLRNTEQQKISKYINTRVTEVFPVRKARNLGKENSKDVLQNNEKVSKFVNGTPASNFASSSLLCGHGDTAKLDTLVPTMEAAKPGFKKVEKCSENALRSVSELHVGDEKQTGSNKFDMEKVLKGFGARDAFVASGLNGPNGQVGGTVSKPSDICPSKITVPGEKAPLDFTLKTSLQFVSSSSVKWCHKLNTSFGRSSITGAIGQSCPRGCQNLECSKLESKKEFLFSKALQSWVYPQSLLPSSIISAMLSSTAGESDFLLKRHQDWEDSFQNLYYMLRKNMLNIFYVYTTQFVALFISGSCLEKKQSSNAYLSQSTRGLRSLLRKHGVCFSMPLCSTEVEQATEDDLIELSEIERRNVGQALHLDALSDVDNTTQSLLSFTGNENVHGLYDVLLNYKSLLNSLSAVDVPVLYSPQPFQNGCLHIPEVKCREMRRADMSSGGFDTEQGSAFASTAGNVCYSMEVKDAVLPPWVVSGLCAAMSLDATSFDLTIATEPSSMGLNVALDSMGTTTTDVQPEGSTPSSCSAPTTPLVGAVPDAALVPALHSASLRRLTYTDGGGYVAHTTV

SEQ ID NO: 53138 - protein, 420 aa, Zea Mays
MHLDPCEGVYDNPLLYEKGWNKKLNYVIAISKDGVRDVTKRYTRKWHEVLSRRIITSEETVVSVLSSITGKYRTGLSPDALSVIENREKEESEELRKSAYLQVETALSLPGRLSGSVEWRKARSELGQADSLSCSSCPIRKCVDGHVSNIYDALSAFLSHFFDKKIPKERIIEAFEALKTLMLTLKSSNFKSRSATLDQKAHHLFEEIFPSIERLLSAISLKAELGTAGYQSVTVSGNPVHSSLALPVALDAVNEILSNYKNNTFFTEGNHFPRGNRVCSGSVLASREQLPIGIATAAFDGIHSSKWEEPDGAKGCWLIYTMQDGKSCELESYDLMSANDAPERDPMDWVLEGSADGGSTWNILDARNSEMFESRFLRKTFTVDKRYKANAFRFRFLRVRDSHSNPRFQIGSIDLYGKTI

SEQ ID NO: 53139 - protein, 96 aa, Zea Mays
MGLLDQLWDDTVAGPRPDSGLGKLRNDDAQGRGLEEAAPERQDGRRRRRPRHAEEPHCVRLGGDQFAGPLKQPAGPRRGHSTRMEEASHHQQQLAD

SEQ ID NO: 53140 - protein, 110 aa, Zea Mays
MFFLLVATANAIIVSVLMSLAAAGGFLAIFFACLVAVYIGAVSVAIFVISATVISAVVGILVATGWVGFFWIIWFTARKSMVLTKHSFGMTSSAIQSYSASRQVKQKPVD

SEQ ID NO: 53141 - protein, 1203 aa, Zea Mays
MKQLRLRFQFFASAMSFNIMPEEQQVNESFLPSRFRNFWQRLQLRYGFSRSFRKIESNQVEARRFALVWNEIISKFREEDIVSDREVELLELPPELWNVRVIRWPCFLLCNELSLALGQAKEVTGSDRRLWRKICKNDYRRCAVIEVYDSAKHMLLEIIKEGTEEHGIVTQLFSDFDGSMKMEKFTVEYKMTELHNIHTRLVALLVLILKPTKDVTKIVNALQTLYDVVVRDFQAEKRSMEQLRSEGLAQSRPTRLLFVDAVVLPEEDNATFYKQVRRMHTILTSRDSMINVPQNLEARRRIAFFSNSLFMNIPRATQVEKMMSFSVLTPYYKEEVLYSKDQLYKENEDGISILYYLKQIYPDEWEYFVERMKREGMSDINELYSEKERLRDLRHWVSYRGQTLSRTVRGMMYYYEALKMLTFLDSASEHDLKTGSRELATMGSSRIGSSRHDGVAGGSGYYSRASSSHALSRASSSVSSLFKGSEYGTVLMKYTYVVACQVYGQQKAKNDPNAFEILELMKNYEALRVAYVDERQINGNEKEFFSVLVKYDQQLQREVEIYRVKLPGELKIGEGKPENQNHALIFTRGDAVQTIDMNQDNYFEEALKMRNLLEEFNRYYGIRKPKILGVREHVFTGSVSSLAWFMSAQETSFVTLGQRVLADPLKVRMHYGHPDVFDRLWFLGRGGISKASRIINISEDIFAGFNCTLRGGNVTHHEYIQVGKGRDVGLNQVSMFEAKVASGNGEQTLSRDVYRLGHRLDFFRMLSFFYTTVGFYFNTMMVVLTVYAFVWGRFYLALSGLEDYINKNTSSSNNAALGAVLNQQFVIQLGLFTALPMIIENSLEHGFLTAVWDFMKMQLQFASVFYTFSMGTKTHYYGRTILHGGAKYRATGRGFVVEHKKFAENYRLYARSHFIKAIELGVILTLYASYGSASGNTLVYILLTLSSWFLVSSWILAPFIFNPSGFDWLKNFNDFEDFLNWIWFRGGISVQSDQSWEKWWEDETDHLRTTGLWGCILEIILDLRFFFFQYAIVYRLHIADNSRSILVYLLSWTCILLAFVALVTVAYFRDRYSAKKHIRYRLVQAIIVGSTVAAIVVLLEFTKFQFVDTFTSLLAFLPTGWGIISIALVFKPYLRRSEMVWKTVVTVARLYDILFGVIVMAPVAVLSWLPGLQEMQTRILFNEAFSRGLHISQIITGKKAHVF

SEQ ID NO: 53142 - protein, 1247 aa, Zea Mays
MSYNKTAERRPDDLIEMMTCTVKPSVDFVIDSRNSLHGPATNHVSRIDYGTMANDDSNKKPSPANTSVQSAESDFAVDQKQQSQSWTPISGSISANENHKNSDSHSTRSTVTPPDYAFLQVSDSDTQTQSIKVQQPLKQQPKLLNKKESAAKEDVRIVDDNCSPTSAHITSSSNMSHTDKKVDANPTSASAAMKEAMNFAEARLKAAKALLEGKGDSFKLRKKPSHLKSTRSTEIKSPISVEADTSEQKLWVKKSSEEEKNPDDSLSDKHKKLTAVRLDHFDDNGKKVLPLEKPEHMVQHCTESCQTSSKLQKLGNWKSGNDFFELTRDDQKCKNDEATEGGDKCEQMNPITSVINDHNEIEFNAAGSDLDRYEKLWEVNDGRSVGVKPVNLRENKTAPVDKDSVSVILESSTENKAHQKTHNSIGEGLVTLKNAKESHGTDKCFELPSMSGASTKLDVFKDVSGSFPEARSSVNASDLGDHGNISPNLSPLAGTSQEDTTSKLVSEVSCDGGMQHTSRSNEKLQESSDVSDVAISQGSNIKSFILEELKESDVCDAFMRGPNGKGQEAENYGREKFSFIDGSLLLRPHFHNKGAKMNVISEEVQKVKNEEKLGPCTHPEVTIVDLDGDCPKDLNDVILQNDDFADPEESNMPNVFEVASKLIKRDLDQEMHGSLGHGEEENMEEGTDVHLCDINGKEVDETLLENSVCTDTEEGCAHCNQEDQNSSDSTNRGKSDVDNMCYTSCDEVRSESFSGDEVVIKTTIDKIGDVSNRGGRELSTERSTCEDHGNAIIMEEKDTTTRISKAEHASSPLETMCGVTKSAEAPTTRENMTTADSACEKDKGSSQRVQEENESERRLEKEREVEEKERRKLEKERELAEEKERRKFEKERELAEEKERRKMEKEKEHAEEKERSKLEKEKELAEEKERHKLKKERELAEEKERRRLEEAERERERKKDRLAVERATREAHERAFAEAREKAEKMALERINAARQRASAEAREKEDRASVEPAAERATREARIKAERAAVERATAEARERAIEKAKAEKALAEARERRERYKSSFKESFKSTNQDIRQESQFHRATSSNFIRNPDSSNRAMVEVESALRHKARLERHQRTAERVTKALAEKNTRDLLAQREQAEKHRLSEFLDPEIKRWSNGKEGNLRALLSTLQYILGADSGWQPVPLTDLITAVAVKKAYRKATLCVHPDKLQQRGATIRQKYICEKVFDLLKDAWNKFTSEER

SEQ ID NO: 53143 - protein, 158 aa, Zea Mays
MAENLAPEKRHSFVHNGQKVFEWDQTLEEVNMYIELPKGVPTKLFHCSIQASHVEVGIRGNPPYLNHDLTHPVKTDSSFWTIEDGEMHITLQKREKGKTWSSPIQGQGILDPYAADQEQKRLMLQRFQEENPGFDFSQAQFSGTCPDPRTFMGGIRSE

SEQ ID NO: 53144 - protein, 423 aa, Zea Mays
MAWARLASRSRLRPAASAAGRSRHASTPAPPPPPSPPTTRTVPAATSAPPLRRLLLLPRHRFADATPSASTAWLLGARWRQGHGRRCFASAAYPAQATPGEASELVDVPLAQTGEGIAECELLRWFVAEGDQVDEFQPLCEVQSDKATIEITSRFKGKVHKIHFVPGDIVKVGETLLKMVVGDSQIVSPDNIVPSAGKSLGVESAVFSSEGNVPGGNLSTPAVRHLAKQYGISINEIVGTGKDGRVLKEDVLNYAVSKGVCKQQSLASEGNIGQVELLEEGKALLDEDFYEDKKILLRGYQRSMVKSMSLAAKVPHFHYLEEINCDSLVQLKTTFQNENKDQTIKHTFLPFLIKSLSMALSKYPMLNSSFIEETNEVVFKGPHNIGVAMATTHGLVVPNIKKVQSLSILEVLIVRTMNYSKFG

SEQ ID NO: 53145 - protein, 320 aa, Zea Mays
MFLGMGRPAWREARATLQKILSADEPVLRDNEALRNKCLIPMSDIEMVLPITVGGYTDFFCSVHHARNCGFIFRGPQTPVNPNWFYLPIGYNGRASSIVVSGTDVIRPRGQGHPTGNSAPYFGPSQKLDFELEMAAIVGPGNELGKPIDINDAEEHIFGLTLMNDWSARDIQAWETIPLGPFLGKSFSTTISPWIVTLDALKPFMCEAPKQEPEPLPYLAEKNHINYDIPLEQLTHHTINGCNMRPGDIFATGTLSGPEPDSLGCLLELTWNGQKEIPVGNLTRKFLEDGDEVILTGCCKGEGYNIGFGTCTGKVLPALP

SEQ ID NO: 53146 - protein, 317 aa, Zea Mays
MRYWHPFTEEAIEQIKRDGITKLVVLPLYPQFSISTSGSSLRLLESIFREDEYLVNMQHTVIPSWYQREGYIKAMATLIENELTKFQEPQKVMIFFSAHGVPLAYVEEAGDPYKAEMEECIDLIMEELEKRGITNPCILAYQSRVGPVEWLKPYTDETIIELGQKGVKSLLAVPISFVSEHIETLEEIDVEYKELALESGIKHWGRVPALGCEPTFISDLADAVIESLPYVGAMAVSNLEARQSLVPLGSVEELLAAYDSKRDELPPPVIVWEWGWTKSAETWNGRAAMLAVLALLVLEVTTGEGFLHQWGILPLFR

SEQ ID NO: 53147 - protein, 1085 aa, Zea Mays
MKLRESAVFSGNLGELERKTRKRKKVLATLKVLWSVIEDMTKDISPEDANKLISEEMKRVMQKDAARTEDVVPYNIIPLDSLTSTTNAIVNFPEVRAAISTLQYYTDLPRLPGTFSVPDARNSDILDLLQCVFGFQGDNVKNQREHIIHLLANEQSRVGKLSGNEPKIDEGAVHAVFSKALDNYIKWCNYLPLRPVWDNNDSLTKEKKLLYVCLYYLMWGEAANVRFIPEGLCYIFHHLARELGVILQKQTAEPAESCNSGGGVSFLDNVIYPFYEIIAAEAANNKNGRAPHSEWRNYDDFNEFFWSHKCFHLRWPWNLSDPFFSKPSRKYKGLLSRNHHYGKTSFVEHRTFLHLYHSFHRLWMFLIMMFQGLTIIAFNDGSFDRKTILQLLSLGPTYVVMKFIESLLDILMMYGAYSTSRGSAITRVAWRFCWFTIASVAICYLYIKTLQDGTESATFKIYVFVISAYVGIKIIFSLLMSVPCCHGLAEACYRWSAVRLVKWMHQENNYVGRGMHESPLDYIKYATFWIAILGAKFSFTYFLQIKPLVEPTRTIINFTGLQYAWHDFFSKNNHNALTILSLWAPVLSIYLLDIHVFYTVLSAIYGFLLGARDRLGEISTVEAVHRFFEKFPGAFMHRLHVEVPKRKQLLSSGQEIELNKFDASRFSPFWNEIVRNLREEDYINNFELELLLMPKNDVGVLPIVQWPVFLLASKVFLAKEIAEDCKDSQEELWLRISKDEYMQYAVVESFHSIYHILTSILEKEGRLWVERIYGGIRDSISKRTIQSDLHFKKLLNVIAKLVAVLGILRGTTESSDLKKGLVNAIQDLYDVVHHEAFSVDMSGHIEDWDQINLARAEGRLFNKLKWPNDPKLKDLIKRLYSLLTIKESAATVPKNLEARRRLQFFTNSLFMEMPVARPVSEMVSFSVFTPYYSEIVLYSMAELQKKNEDGITTLFYLQKIYPDEWKNFLTRINRDENAADSELFGNPNDILELRLWASYRGQTLARTVRGMMYYRKALMLQSYLERIQSEDLESTLGLAGSADRHFELSPEARAQADLKFTYVVTCQIYGKQKGEGKAELQTYPY

SEQ ID NO: 53148 - protein, 345 aa, Zea Mays
MLLTVLEGAIRPDCLSSDFETSECLNSQVGSASVLPWVPDTTSAVMLRMLDLDSAILYVQNQKMDRDDGGFMKFPSRYTVAKSKQETTPETAGLDLYDGRWLPGSGRRGRGRGSRGGSRGGRGRSRGGRIPRGVSSSSRIEFKGGIVASDKAPRKNVRRGRGRGRGRRRGRRTVRPRQPSVGRARSIPKENLLGSFSMLSSSKAATIEESPRSSGADEWGLETRTTYTECDENSSGSQSEDNEENGQPMDDDYEDQVPDYSIGYSTGSRHHVMMSMMDHDSDEEDEDAEGDENVEEDADLAVDDADVEMDEDDEIGDDGEDGGVGGEMNADEDPDATSYSSDYSD

SEQ ID NO: 53149 - protein, 353 aa, Zea Mays
MGDDNQKLTLIKLASMIEVAAKKGARDLNLQGKLMNQIEWLPDSIGKLTGLVTLDISENRILALPEAIGMLSSLAKLDLHANRIAQLPESIGDLSNLIYLDLRGNQLASLPASLGRLVKLEELDVSANHLTSLPDSIGSLTRLKKLIAETNDLDELPYTIGNCVSLVELRVGYNHLKALPEAVGKLESLEVLSVRYNTIRGLPTTMASLTKLKEVDASFNELESIPENFCFVTSLIKLNVGNNFADLQSLPRSIGNLEMLEELDISNNQIRVLPDSFGNLQRLRVLRAEENPLQVPPRDVALKGAQAAVQYMAEYVAKKATRSQPMKTKKTWAQFCFFSRPNKRKHDRIDTAS

SEQ ID NO: 53150 - protein, 2184 aa, Zea Mays
MANLGGGAEAHARFKQYEYRANSSLVLTTDSRPRDTHEPTGEPETLWGRIDPRSFGDRAVQNRPPELEEKLSKSRTKKSKRDAAAALDSADLPRRDAKRRRRAASAQEVSVLSLTDDAVYKPQTKETRAAYEALLSLIQQQLGGQPLDVLAGAADEVLATLKNDKVKNPDKKKDIEQLLNPISSQLFDQLVSIGKLITDFHDAAAGDASGAPSADAVDTTLDDDVGVAVEFEEDEDEESDFDQVQDELDEDEEDDMAELNGPGGMQMGGELDDDDMQNANQGLTVNVQDIDAYWLQRKISQAYGDGDIDAQQSQKLAEDILKIIAEGDDRDVENRLVMLLDYEKFDLIKLLLRNRLKIVWCTRLARAEDQEQRKNIEEEMASDPSLAPILEQLHATRASAKERQKNLEKSIRDEAKRLLNNDAAAAGADGARDHRAAEWDMESGWLKGQRQLLDLESLSFHQGGLFMANKKCELPTGSFRTPHKGYEEVHVPALKAKPYETGEKIVKISDMPEWARSAFDGMTQLNRVQSRVYDTALFKPDNILLCAPTGAGKTNVAVLTILQQIGLHMQDGEFDNTKYKIVYVAPMKALVAEVVGNLSKRLAGYNVTVRELSGDQNLTKQQIDETQIIVTTPEKWDIVTRKSGDRTYTQMVKLLIIDEIHLLHDNRGPVLESIVARTVRQIETTKENIRLVGLSATLPNYEDVALFLRVRKESLFYFDNSYRPCPLAQQYIGITVRKPLQRMQLMNEICYEKVMAAAGKHQVLIFVHSRKETAKTAKAIRDTALANDTVSRFLKNESASQEILGTHAELVKNNDLKDLLPYGFAIHHAGMARVDRELVEELFADKHIQVLVSTATLAWGVNLPAHTVIIKGTQIYNPEKGAWTELSPLDVMQMLGRAGRPQYDTHGEGIILTGHSELQFYLSLMNQQLPIESQFISKLADQLNAEIVLGTIQNAREACSWLGYTYLYIRMLRNPTLYGLPADILESDKTLDERRADLIHSAANLLDRNNLIKYDRKTGYFQVTDLGRIASYYYISHGTISTYNEYLKPTMGDIELCRLFSLSEEFKYVGVRLDEKMELAKLLDRVPIPVKESLEEPSAKINVLLQAYISRLKLEGLSLSSDMVYIRQSAGRLLRALFEIVLKRGWAQLAEKALNLCKMVDKQMWSVQTPLRQFTGIPKEILMKLEKKELAWERYYDLSSQEIGELIRYPKMGRPLHKCIHQLPKLNLSAHVQPITRTVLGFELTITPDFQWDDKVHGYVEPFWVIVEDNDGEYILHHEYFMLKKQYVDEDHTLNFTVPIYEPLPPQYFIRVVSDKWLGSQTILPVCFRHLILPEKYAPPTELLDLQPLPVSALRNARYEGLYSAFKHFNPIQTQVFTVLYNSDDSVLVAAPTGSGKTICAEFAILRNHQKALSGESNMRVVYIAPIEALAKERYRDWERKFGEFAKVVELTGETAADLKLLDKGEIIISTPEKWDALSRRWKQRKHIQQVSLFIVDELHLLGSDKGHVLEVIVSRMRRISSHIGSNIRIVALSASLANAKDLGEWIGATSHGLFNFPPAVRPVPLEIHIQGVDIANFEARMQAMTKPTYTAITQHAKNNKPALVYVPTRKHARLTALDLCAYSSVEGAGTPFLLGSGDEMDTFTRGVEEETLKNTLKCGVGYLHEGLSELDQELVTQLFLGGRIQVCVASSTMCWGRPLPAHLVVVMGTQYYDGRENAHTDYPITDLLQMMGHASRPLQDNSGKCVILCHAPRKEYYKKFLFEAFPVESNLHHFLHDHMNAEVVVGVVENKQDAVDYLTWTFMYRRLAKNPNFYNLQGVSHRHLSDHLSELVETILNDLESSKCVAIEEDMYLKPLNLGLIASYYYISYTTIERFSSMLTQKTKVKGLLEILASASEYAELPGRPGEEEFIERLVRHQRFSIEKPKYGDPHVKANALLQAHFSRHTVVGNLAADQREILLSAHRLLQAMVDVISSNGWLSLALSTMELSQMVTQGMWDRDSVLLQVPHFTKDLARRCQENEGKPIESIFDLAEMAVDEMRDLLQLSNSQLQDIIEFIKRFPNVDMTYEVREGDDISAGDNVTVQVTLERDMTNVSSEVGPVHAPRFPKPKEEGWWLVIGDSSTNQLLAIKRVALQKRARVKLEFSAPAEAGRKDYMIYLMSDSYLGCDQEYEFTVDVKDAGGD

SEQ ID NO: 53151 - protein, 1047 aa, Zea Mays
MAQSLELLLIQFLMPDNDARRQAEEQIRRLARDPQVVPALVHHLRTAKTPNVRQLAAVLLRKKITSHWPKLPADSKASLKQALIDSITLDHSHPVRRASANVVSIIAKYAIPAGEWPELLPFLFQCSQSPQEDHREVALILFSSLTETIGATFQSHLNNLQPILLKCLQDETSSRVRIAALKAVGSFIEYVNDGGDIVKMFRDFVPSILNISRQCLANGEEDVASIAFEIFDELIESPAPLLGDSVRSIVQFSLEVSANQDLEINIRQQAIQIISWLVKFKASFLKKHKLVVPILQVMCPLLTETANEDEDSDLAADRSAAEVIDTMAINLPRHVLAPVLEFASLSFHHINPKYREAAVTSLGVISEGCCEHLKDKLEDCLKIVLEALKDQEQMVRGAASFALGQFAEHLQPEILSHYASVLPCILNALEDPSDEVKEKSYYALAAFCEDMGEDILPYLEPLICRLVMSLQSSPRNLQETCMSAIGSVAAAAEQAFTPYAEKVLEMMKGFMVLINDEDLCARARATEVVGIVAMAVGRARIEAILPPFIEASISGFGLDYSELREYTHGFFSNVAEILGDSFTQYLPHVVPLVFSSCNLDDGSAVDIDDADSIENGFGGVSSDDDVNDEPRVRNISVRTGVLDEKAAATQAIGFFALHTKSAYAPYLEESLKILIRHSGYFHEDVRLQAVISLKHILTAVRAIPPAHADVLEKQKDVLDTVLNIYIKTMTEDDDKEVVAQACMSVADIVKDCGFAAIEPYMLRLAEVTLVLLRQESSCQQVESDGEDDGDIDHDEVLMDAVSDLLPAFAKVMGSYFDPIFAKLFDPLMKFAKSPHPPQDKTMVVATLAEVAQEMGAPISAYVDKIMPLVLKELASSDATNRRNAAFCAGEICKNGGAAALKYYGDILRSLHNLFSNSESDDAVRDNAAGAIARMIMVQPQSIPLNQVLPVFIKALPLKEDHEESMTVYGCVCGLLLSSHPQILPLVPDVIHVFAQVVVSPDESDEVKTNIGKAISHLISVYGQQMQPILSALPPAHANALASFASRR

SEQ ID NO: 53152 - protein, 97 aa, Zea Mays
MDPFVWSLCTDVQEENHIPSMESLKSVRPDDPSIQAILIDRRTDFELGMLESYASSILSSSADAKDVVIQLAKLISSRMGGTTSNEENLLTNKSIYS

SEQ ID NO: 53153 - protein, 83 aa, Zea Mays
MSFRAREMYKKVVRRVGGEGKLPAELMKSVKDMLPDSNVIMGRAKRGIFAGRHIRFGNKVSEDGGNNSILLLRYFELRQSSIA

SEQ ID NO: 53154 - protein, 63 aa, Zea Mays
MKKCGAPRPTPGGNTSSSRKDNSNKEAPEGSWTCPECNNLNYPFRTVCNRKGCSYSKPAPANN

SEQ ID NO: 53155 - protein, 634 aa, Zea Mays
MIGIDLAYNLHSAFGNWFPGSKPLLQQAMNKIMKSNPALYVLRERIRKGLQLYSSEPTEPYLSSQNYGEIFSNQIIWFVDDTNVYRVTIHKTFEGNLTTKPINGAIFIFNPRTGQLFLKVIHTSVWAGQKRLGQLAKWKTAEEVAALVRSLPVEEQPKQIIVTRKGMLDPLEVHLLDFPNIVIKGSELQLPFQACLKIEKFGDLILKATEPQMVLYNIYDDWLKSISSYTAFSRIVLILRALHVNNEKAKMLLKPDKTIVTEPHHIWPTLNDEQWLKVECALRDLILSDYAKKNNVNTSALTQSEMRDIILGAEIAPPSQQRQQIAEIEKQSRETTQLTAVTTRTTNVHGDELIITTTSPYEQQAFASKTDWRVRAISATNLYLRVNHIYVNSDDIKETGYTYIMPKNILKKFICIADLRTQIAGFLYGLSPQDNPQVKEIRCIAMPPQHGTHQMVTLPANLPEHEFLNDLEPLGWMHTQPNEAPQLSPQDLTSHAKILENNKQWDGEKCIILTCSFTPGSCSLTAYKLTPSGYEWGRSNKDNGSNPHGYLPTHYEKVQMLLSDRFLGFYMVPDNAPWNFNFMGVKHDPQMKYNMKLGMPRDFYHEDHRPTHFLEFSNIEEGEAAEGDREDTFT

SEQ ID NO: 53156 - protein, 215 aa, Zea Mays
MGISRDSMHKRRATGGKQKAWRKKRKYELGRQPANTKLSSNKTVRRVRVRGGNVKWRALRLDTGNYSWGSEALTRKTRILDVVYNASNNELVRTQTLVKSAIVQVDAAPFKQWYLTHYGVDIGRKKKVPVAKKDATEGQEGEAIAEETKKSNHVQRKIEKRQQDRALDTHIEEQFGSGRLLACISARPGQCGRADGGISFYWPATSLRVKSSSST

SEQ ID NO: 53157 - protein, 902 aa, Zea Mays
MAGTLLQSVALGTPFGGRMRTHCWRSHGTRRPASMLAVSLSRPVKMSAFVGLRSVHSFSVTPTVSNSRSAVASYRSSRQTRRSRFVTQAMFERFTEKAIKVIMLAQEEARRLGHNFVGTEQILLGLIGEGTGIAAKVLKSMGINLKDARVEVEKIIGRGNGFVAVEIPFTPRAKRVLELSLEEARQLGVAARVLESLGADPSNIRTQVIRMIGETTEAVGAGVGGGSSGNKMPTLEEYGTNLTKLAEEGKLDPVVGRQPQIERVVQILGRRTKNNPCLIGEPGVGKTAIAEGLAQRISTGDVPETIEGKKVITLDMGLLVAGTKYRGEFEERLKKLMEEIKQSDEIILFIDEVHTLIGAGAAEGAIDAANILKPALARGELQCIGATTLDEYRKHIEKDPALERRFQPVKVPEPTVDETIEILRGLRERYEIHHKLRYTDEALIAAAKLSYQYISDRFLPDKAIDLIDEAGSRVRLQHAQVPEEARELDKELKQVTKQKNEAVRSQDFEKAGELRDREMELKAQITALIDKSKELSKAEEESGETGPMVNEEDIQHIVSSWTGIPVEKVSSDESDKLLKMEETLHKRVIGQDEAVVAISRSIRRARVGLKNPNRPIASFIFAGPTGVGKSELAKALAAYYFGSEEAMIRLDMSEFMERHTVSKLIGSPPGYVGYTEGGQLTEAVRRRPYTVVLFDEIEKAHPDVFNMMLQILEDGRLTDSKGRTVDFKNTLLIMTSNVGSSVIEKGGRKIGFDLDSDEKDSSYSRIKSLVIEEMKQYFRPEFLNRLDEMIVFRQLTKLEVKEIADIMLQEVFDRLKAKDINLQVTEKFKERVVDEGYNPSYGARPLRRAIMRLLEDSLAEKMLAGEVKEGDSAIVDVDSEGKVVVLNGQGGIPELSTPAITV

SEQ ID NO: 53158 - protein, 120 aa, Zea Mays
MPFEGMSNLQAAYAAAFQQKRPALPEETPQELVFIVQSCWVEDPAMRPSFSQIIRMLETFIMTIHPPPLSEPNEGEESEETRSSLSSRSSSGSSLVSRATSKLSVVRHLFVSKKTGNGKA

SEQ ID NO: 53159 - protein, 238 aa, Zea Mays
MLLVSQAANGSLSARRLPSKPPGPSTTNPYPLFANPRLLRRRLALSGAGADQAPRRAAPTPAAAGEGPSASSTEDPVLVRVADDGVPLEGVIQIEKPGDAAAESKLVSYAHGLPVLDAETFKTADPFIAGWLLSAYLLGGFGDDAKGRNGVGSAVITAAKSWAVGIPLGLAIRAVTSGHLPPTPFILVTMGSTGVLLTAWRALVSQLFSNQQKQQDDVYRRGSPFELFELLTSLVRRW

SEQ ID NO: 53160 - protein, 64 aa, Zea Mays
MDDVMLCDAELGEEKKSGGMLGSSAPEAEAASPVSSDIDSIKHPEQAADSAVSEYPMGEQNPEI

SEQ ID NO: 53161 - protein, 163 aa, Zea Mays
MKLADGLFLESCREVASKYPGIQYNEMIVDNCSMQLVSKPEQFDVMVTPNLYGNLVANTAAGIVGGTGIMPGGNVGQDYAIFEQGASAGNVGNENLVEQKKANPVALLLSSAMMLRHLQFPSFADRLETAVKRVVAEGTYRTKDLGGSSTTQEVTDAVVANLD

SEQ ID NO: 53162 - protein, 115 aa, Zea Mays
MEPRIGNKFRLGRKIGSGSFGEIYLGTNIQTNEEVAIKLENVKTKHPQLLYESKIYRILQGGTGIPNVRWFGVEGDYNVLVMDLLGPSLEDLFNFCSRKLSLKTVLMLADQMMSF

SEQ ID NO: 53163 - protein, 72 aa, Zea Mays
MAARLAQLRAQAVQAAEFASKHGGSYYKELMEKNKQYVVQPPTIEKCQELSKQLFYTRLARALVLTNTPYVS

SEQ ID NO: 53164 - protein, 532 aa, Zea Mays
MRYSASCPDGWQGGPVQNRCFMYISASLSWDRSEAVCHNYSGHLAAVSSVQELNFVKSLCGSSSTGCWVGGHHYSTSTGNGWKWSDDSSVWNETVFLGEPLPANCSDPACKVATSNDFCTLVTNGQPSTITEKRCSESHGLICRMNHVDRCYHDHCHKEYFISIIAVSGFILATTLAVVVWLLVYRRSKKRRRSREVLSASAAALVAPQWKVFTSEELRSITKNFSEGNRLPGNAKTGGTYSGILPDGSKVAIKRLKRSSLQRKKDFYSEIRRVAKLYHPNLVAVKGCCYDHGDRFIVYEFVANGPLDVWLHHIPRGGRSLDWAMRMRAATTLAQGIAFLHDKVKPQVVHRDIRASNVLLDEDFGSHLMGVGLSKFVPWEVMHERTVKAASYGYLAPEFIYRNELTTKSDVYSFGVLLLEIISGRRPAQSVESVGWQTIFEWATPLVQSHRYLDLLDPLIQESPDAGVVQKVVDLVYSCTQHVPSVRPRMSHVVHQLQQLELKSAASEQQLRSGTSTSATSPMLPLEVRTPR

SEQ ID NO: 53165 - protein, 219 aa, Zea Mays
MEQAAMPQVPRVKLGIQGLEIGELKKLVEEGKVKYIGLSEASPDTIRRAHAVHPITAVQMEWSLWSRDIEPEIVPLCRELGIGIVAYSPIGRGFFGGRGVIQQVSSESSLQRHPRFTTESLEKNKQIYLKIEDLAKKYQCSPAQLALAWVLRQGDDVVPIPGTTKTKNLDANVDSLKVKLTAEDLKEIGSQIRAEDVAGGRQYNSYAHTSWKYADTPKK

SEQ ID NO: 53166 - protein, 191 aa, Zea Mays
MCYFDADGKRYYPFGQGSGTQVVQQFGIPHLFDLPIRPTLSASGDTGIPEVVADPQGDVANTFQNLGACVVQQCAKIRQQVSTAVSYDRSIKAIRVKVPDSDEEFLLHPATVRRNDRSAQSVDEWTGEQKVQYSDIPDDIEPEEIRPMGNYAVSITWPDGFSQIAPYDQLEMLERLVEAPSPAAASAVASS

SEQ ID NO: 53167 - protein, 396 aa, Zea Mays
MIDKARRHFTQAGHLQQSDPTDWQKLQEVEVHLGRCTDARKIGDWKSTLREADAAIAAGADSSQLLLALRSEALLHLHKLEEAESTLASFLKLDSALPSSLTAAELSGMLAESYVHIVRAQIDMALGRFDAAVAAAEKARDLDPGNAEIGMVLNNVRLVAKAREQGNDLFKAAKFSDASMAYGEGLKYDPSNSVLHCNRAACWSKLEKWEKAVDDCNEALRIQPSYTKALLRRAASYAKLERWVDCVRDYEALRKELPSDKEVAEALFHAQISLKATRGEDVSNMKFGGEVEIVSSVEQLRAAISSPGVSVVYFMSAMNQQCTQITPSVNTLCTECPSVNFLKVNIDSSPMVAKAENVRIVPTFKIYKGGVKVKEMICPSLHVLRYSVRHYSVSSS

SEQ ID NO: 53168 - protein, 301 aa, Zea Mays
MDGPRWTEEVDDLVDAGDVDGAIALLEDQELSEKCPSQECATGSKDSEVSANTNKSNEDEEDDWEAIADSGALDDTLVRSLEQGARVSSCSSPEKSSTPSSGPKRRGRGSFLYNKSVLYSDQCGSERELDNKQSKPQVGSKDHVNEPENNAVTAATQFGTRHVLVFYDFPPSTRTTDLERIFEKFGDHGVAIRWINDTSALAVFRTPSAANEAQACIPPRYKVRSLKPDDDLLTKIDGRDLDPPKPRPKTSARTAQRLIAHGMGLKQFTNFGSDELKKQEGERKDRIAARQAMRDEAWGSD

SEQ ID NO: 53169 - protein, 549 aa, Zea Mays
MVGIATFDSAIHFYSLKRAQQQPLMLIVPDVQDVYTPLQTDLILPVSECRDNLEQLLESIPSMFENNRVADSAFGAAMKAGFLAMKSTGGKLLVFQSVLPSLGIGSLSAREAEGRANITTGDKEAHKLLQPVDNTLKTMALEFAEYQVCVDVFLTTQSYVDIASISVVPQTTGGRVYYYYPFSALSDPAKLFNDLRWNISRPQGFEAVMRVRCSQGLQVQDYYGNFCKRVPTDIDLPAIDSDKTVMVTFKHDDKLPENVECGFQCALLYTTVYGQRRIRVINLSLSCTNLLANLFRYADLETQFSCFLKQAANGIPTSPLPRIRDEATNTCINILQSYRKHCASVTSSGQLILPEALKLLPLYTLALVKSLGLRTDGRLDDRSYWISVASSVSVVLAVPLVFPRLIPIHDLTSRDDDDSLIPSPLMLNSENVQEDGVYLLENGEDGLIYVGNMVNPATLEQIFGVSSLAALPAQLALEQFDNELSRKVNEVVNEIRRQRCSYLRLRQCRRGEPSGDFFRSFLVEDKAPGVFSYVEFLVHVHRQIQSKMT

SEQ ID NO: 53170 - protein, 116 aa, Zea Mays
MILQASLVKDPAVSVNRIIWSLDGTLFGVAYSRHIVQIYSYNGGDDIRQHLEIDAHIGGVNDIAFGFYLAWATQHFHSLCFLNFFLHRHPKEDINSRGGKASQSVIETTLMSCCKI

SEQ ID NO: 53171 - protein, 250 aa, Zea Mays
METSAEHFGLPLPPPSQAKGKDFKKGANFAITGATALEYSFFKAHGIDQRIWNTGSINTQIGWLQDMKPSLCKSEQDCKDYFSKSLFVVGEFGGNDYNAPLFSGVPFSDVKTYVPLVAKAIANGVEKLIELGATDLLVPGVLPIGCFPLYLTLYNTSSKADYNARTGCLRRYNRLAFHHNRELKQQLDELQKKYPKTKIMYGDYFKAALQFVVNPGKFGEFSPFLCLLLQVYLLVAGSKGIPFHEMKRTL

SEQ ID NO: 53172 - protein, 182 aa, Zea Mays
MGGLKNVYAIGAGMVAALTNESATSKSVYFAHCTSEMIFITHLLTEQPEKLAGPLLADTYVTLLKGRNAWYGQMLAKGELSPDMGDSIKGKGMIQGISAVGAFFELLSQPSLSVQHPEENKQVAPAELCPILKRLYRILIKRELPARDILQALRDETMNDPRERIEMAQSHAFYRPSLLGKP

SEQ ID NO: 53173 - protein, 1911 aa, Zea Mays
MRTIAEEDAIAAESMRDAALKDGALLRHLLNAFFFPAGERRDVSRQLVALWADSYQPALDLLSRILPPGLVAYLHTRSDEDSRSQYDEAPLSRRQRRILQQRRVHGTKTMAVQEQGIPPNGVEDGEPFRHISAGTYGGADVHQRHVGLYSSTHSPSPGINIDPSHTVSVPHGSVPEALSENNQQIEAPQLDSHVYSVDSNANGNLVSSLHSDFSVPAQVVVENTPVGSGRLLCNWYGFWRAFSLDHNRADLIWNERTRGELRAALQAEVHNLDVEKERTDDIVLGSSVTEDAAGSDNLPRISWNYAEFSVSYPSLFKEVCVGQYYLRLLLESGSNYRAQDFPLRDPVAFFRALYHRFLCDADIGLTVDGAVPDELGSSDDWCDMGRLDGFGGGGGSSVRELCSRAMAIVYEQHYKVIGPFDGTAHITVLLDRTDDRVLRHRLLLLLKALMNDLSNVEACVLVGGCVLAVDLLTVAHETSERTAIPLQSNLIAATAFMEPSKEWMYIDKDGTQVGPLEKDAIRRLWSKKSIDWTIKCWASGMSDWKRLRDIRELRWALSVRVPVLTPTQIGDTALSILHSMASARSDLDDAGEIVTPTPRVKHILSSPRCLPHVAQAMLTGEPSIVEAAASLLKAIVTRNPKAMIRLYSTGAFYFALAYPGSNLLSIAQLFSATHTHQAFHGGEEAALSSSLPLAKRSVLGGLLPESLLYVLERSGPSAFAGAMVSDSDTPEIIWTHKMRAENLIRQVLQHLGDFPQKLAQHCHSLYDYAPMPPVTYPNLKDEMWCHRYYLRNLCDEIRFPNWPIVEHVEFLQSLLVMWREELTRRPMDLSEEEACKILEISLDDLVLVENGSSKRPSDLSSANSGNKTENIDEEKLKRQYRKLAIKYHPDKNPEGREKFVAVQKAYERLQASMQGLQGPQVWRLLLLLKAQCILYKRYGDVLEPFKYAGYPMLLNAVTVDKDDSNFLSSDRAPLLIAASELIWLTCASSSLNGEELIRDGGIPLLATLLSRCMCIVQPTTPANEPAARIVTNIMHTFSVLSQFESGRVEVLKFGGLVEDIVHCTELEFVPSAVDAALLTAANVSVSSELQNALLRAGFLWYVLPLLLQYDSTAEENEICEAHGVGARVQIAKNLHAVHATQALSKLSGLSSDDILYPDNKPAYNALKALLTPKLADMLRNHPPKELLSNLNSNLESPEIIWNSSTRGELLKFVDQQRASQGPDGSYDLTESQSFTYEALSKELIVGNVYLRVYNNQPDFEISDQEEFCIALLKFIAELVQQWNSVNLEETIHQHGSVIEASISENDQVSDSTIEGKMDNSSGKQSTDGDSEVIINLQCGLTSLQNLLTSNPGLAAVFATKERLVPLFECLALHVSPESSIPQICLSILSLLTKHAPCLEAMVAERMSLILLFQILHCNPPCRDGALAVLYSLASTPELAWAAAKHGGVVYILELMLPLQEEISMQQRAAAASLLGKLVGQPMHGPRVAITLARFLPDGLVSAIKDGPGEAVVSSLEQTTETPELVWTPAMAASLSAQLATMASDLYQEQMKGRVVDWDVPEQASGQHVMKDEPQVGGIYVRLFLKDPKFPLRNPKRFLEGLLDQYVSSVAATHYEAIATDPELPLLLSAALVSLLRVHPALADHVGYLGYVPKLVAAMAYEGRRETMASGQATSASKAEPSEHDNSAHSEATVQTPQERVRLSCLRVLHQLASSTTCAEAMAATSAGTPQVVPLLMKAIGWQGGSILALETLKRVVGAGNRARDALVAQGLKVGLVEVLLGILDWRVGGRQGLCNQMKWNESEASIGRVLAVEVLHAFATEGAHCARVREVLNSSDVWSAYKDQKHDLFLPSNAQSSAAGIAGLIESSSSRLTYALTAPPPQPSLVRLPSSSPSPPSAPANPSGRHSYQRL

SEQ ID NO: 53174 - protein, 432 aa, Zea Mays
MVIVLRLIVLSIFLHYRITNPVRNAYPLWLLSVICEIWFALSWILDQFPKWFPINRETYLDRLALRYDREGEPSQLAAVDIFVSTVDPMKEPPLVTANTVLSILAVDYPVDKVSCYVSDDGAAMLTFDALAETSEFARKWVPFVKKYNIEPRAPEWYFSQKIDYLKDKVHPSFVKDRRAMKREYEEFKVRVNGLVAKAQKVPEEGWIMQDGTPWPGNNTRDHPGMIQVFLGHSGGLDTEGNELPRLVYVSREKRPGFQHHKKAGAMNALVRVSAVLTNGQYMLNLDCDHYINNSKALREAMCFLMDPNLGRSVCYVQFPQRFDGIDRNDRYANRNTVFFDINLRGLDGIQGPVYVGTGCVFNRTALYGYEPPIKQKKGGFLSSLCGGRKKASKSKKGSDKKKSQKHVDSSVPVFNLEDIEEGVEACIHAVKF

SEQ ID NO: 53175 - protein, 82 aa, Zea Mays
MSSGGADKPGSGGGAVKTPSDFLKSIRGRPVVVKLNSGVDYRGILACLDGYMNIAMEQTEEYVNGQLKNKYGDAFIRGNNVQ

SEQ ID NO: 53176 - protein, 97 aa, Zea Mays
MQTNIGVPSSTSLKHQPRQSLLLFRSVMGFKMTTMINFSFQEFQLKIIIPLENLLSIELLHLLLEHQNQEMMLEMIMMMTMMMKNLLLMKTTTTTMI

SEQ ID NO: 53177 - protein, 238 aa, Zea Mays
MPCCSSVTYRFQKLGIRPPKGVLLYGPPGTGKTLMARACAAQTNATFLKLAGPQLVQMFIGDGAKLVRDAFQLAKEKAPCIIFIDEIDAIGTKRFDSEVSGDREVQRTMLELLNQLDGFSSDERIKVIAATNRADILDPALMRSGRLDRKIEFPHPSEEARARILQIHSRKMNVNPDVNFEELARSTDDFNGAQLKAVCVEAGMLALRRDATEVTHEDFNEGIVQVQAKKKSSLNYYA

SEQ ID NO: 53178 - protein, 948 aa, Zea Mays
MLLDLQKKVRSDISAEYWLQKKCAYPERQLFDWGLMRIRYPLSMYGIGDILSMDADDVHRKKRFTERMSRLEEEEKNQADIRKRKFFAEILNASREHQVQLGTTFKQRKQRNDGVQAWHVRARQRISRQEKNRLNLLKIGDQVAYMKMVEESKNERLKMLLDKTNELLEGIGKAVQRQKDAEHVSQHEGSEVPKGSESEDCSQISGVKSESPGESPSDDDADFAGSADESKFNAGRRLDFTVHSIEEKVTEQPSALEGGELRPYQLEGLQWMLSLFNNNLNGILADEMGLGKTIQTIALIAYLLENKEVAGPHLIIAPKAVLPNWSNEFKTWAPSIGTILYDGRPEERKLLREKNFDGLQFNVLLTHYDLILKDKKFLKKVHWHYLIVDEGHRLKNHECALARTLVSGYQIRRRLLLTGTPIQNSLQELWSLLNFILPNIFNSSQNFEEWFNAPFACDVSLNDEEQLLIIHRLHQVLRPFLLRRKKDEVEKYLPVKTQVILKCDMSAWQKAYYEQVTSREKVALGFGLRSKALQNLSMQLRKCCNHPYLFVEHYNMYQREEIVRASGKFELLDRLLPKLQRAGHRVLLFSQMTKLLDVLEIYLQMYNFKYMRLDGSTKTEERGRLLADFNKKDSEYFMFLLSTRAGGLGLNLQTADTVIIFDSDWNPQMDQQAEDRAHRIGQKNEVRVFVLVSVGSIEEEILDRAKQKMGIDAKVIQAGLFNTTSTAQDRRALLQEILRRGTSSLGTDIPSEREINRLAARTDEEFWLFEKMDEERRLRENYKSRLMDGNEVPDWVFANNDLPKRTVADEFQNIMVGAKRRRKEVVYSDSFGDQWMKSDEGFEDIPKATQRSKKTAYSSDIQVEFSERRKRPRSVENSADGVSNPTWTPDKGRAGVSSYSKDETEDDGEDEVITSGLQKGNSFTWNTLGRRRSSHFSSSSDSRGRPTF

SEQ ID NO: 53179 - protein, 258 aa, Zea Mays
MLPLQRPELFNRGQLMKPCKGILLFGPPGTGKTMLAKAVATEAGANFINISMSSISSKVDGMLGRRENPGEHEAMRKMKNEFMVNWDGLRTKEKERVLVLAATNRPFDLDEAVIRRLPRRLMVNLPDASNRRKILSVILAKEDLADDVDLEAIANLTEGYSGSDLKNLCVTAAHRPIREILEKEKKERASAETENRPLPLSHTSNDVRALRISDFIHAHEQVCASVSSDSSNMNELVQWNDLYGEGGSRKKTTLSYFM

SEQ ID NO: 53180 - protein, 116 aa, Zea Mays
MSREGKVSVTSNPGETPTMSMPRSKRQDLDLTVDDFEEDEIDPELRYSFQRNSRFLKRVFSVDTLVKPLPPVMAYSVSRNINFFFRIFTQFWDEEGIANAQKSLGLGNEDGSRRMR

SEQ ID NO: 53181 - protein, 142 aa, Zea Mays
MQWCRYSLIIKEWRRAMTRAQERRPLKNQLVLLAQCRVCRIYSCIIQKWRMAMTRTQERRRPLKNQLVLLAQWRLYSCMIKKWRTTRRIRHTRCRLHQLQRSLCFVLLGRLYLCNVEWRDCASLKVWLDRPCFLTGSLVTAI

SEQ ID NO: 53182 - protein, 78 aa, Zea Mays
MLETEELGVSILHDLSQQRQSLLHAHDVLDEVDNNVGKSRRTIGGMMRRMDRNKWIIGLIIAVLVLAILVILYFKFVH

SEQ ID NO: 53183 - protein, 54 aa, Zea Mays
MICMDMHKTVIRDCFFKNKKKIRGEEGMGTLCSEFTSFTERWYYCLMCNIFLPF

SEQ ID NO: 53184 - protein, 175 aa, Zea Mays
MLKPRQRYLSTLSSDLPQTQPASASHAFQAVAILRLVVVFVVVAAAAVVAATDGHTCPGELERALPRPGLRAAALLLSSPDAIHQHDRLAHRSRRRAGGGSSGDGFSLHRFRVGNFFLFGQINGGKARRSVSHSDLEGHPVRAKRQRTAGEAPVTSTALPSCLLAVAAEPASACC

SEQ ID NO: 53185 - protein, 461 aa, Zea Mays
MPRQRTLTSEAAGGRLLLVVVAVLLCLSVPLGRAAPPGAEVAEFPGFTGKLPSKHYAGYVTVGQHEQRKRHLYYYLAVSERNPSLDPVVIWINGGPACSGFSAFLHSFGPFRMEGSQVHINDGPRVAVNPYSWTKMASLLLVDSPAGVGYSYADHEDDYTTDDTSRVADLYDFLSKWFAEYAEFLSNPFYVAGCSYSGVIVPVLAHEIIKRNEESGGVKINFKGYSLCNPAIDVDIENNAHVPYAFRMGLISDELFQSLVTTCNGKYWNNSNPSCQENMEQFYTQIKGINMEHILCPPCRYKMGITNQFIEYDSGQMFESLSKTSKHGLECNDQELALEKLFDTRSGREKLHAKKVEVSGPWKRCPKRVLYTRDILTLIEYHLNITSKGYRVFIYSGDHSLLVPFTSTLEWLKKLNYKEIEKWHPWYLENQIAGYSIRYENNILFATIKRGGLHMIAVAAR

SEQ ID NO: 53186 - protein, 156 aa, Zea Mays
MYSFLSDPSFLSTRCGHCDAWTWLRPLPSWTHVISKCPYPPPDPTTACRPIRVLPRARMAFRHARYFSVACTGRQCSGQNEVRSVTLGPASRSRPAPGPNKAVPGRCSCARSAVATPMPRIFHWASAPSDGIRTAAAAPRSAIKTLRGTHSLSVLS

SEQ ID NO: 53187 - protein, 326 aa, Zea Mays
MILAADSSASDLIRGIATECGVDFDEDPEAMVIDHMNYAVTDVEGDHTLIAGDDLIHSDVILGSEKIEAPVLFRGIGHMANPSNSLVLKVLSASPSAYSANPKTKLASPPSLTGSAISLVSVMQARNNARVLLSGSLDLFSNRFLKSGVQKADSKTRYERAGNEQFVAEISKWVFHERGHLKAVNVRHHKVGETNEPGMYRINDDLEYSVEIYEWSGTSWKPYVADDVQLQFFMMSPYVLKTMSTDNKGLYSTTFKVPDVYGVFQFKVEYQRLGYTGLSFTKQIPVRPYRHNEYERFITSAYPYYTASFSTMGAFFVFSFVYLYHK

SEQ ID NO: 53188 - protein, 178 aa, Zea Mays
MDTLKIPLITEHTTIDDVSVWEWSGSAYDEGAEASEWFSTYFGKPSRLVRFKEASETRPTDPDYAQGYKIMFTDCFPFLIASQGSLDALNEILKEPVPMNRFRPNILVDGCHPYSEDLWKTIKINNLTFLGVKLCNRCKVPTINQEDGVPGTEPTETLQTFRSDQVLRPSHKNKRQDH

SEQ ID NO: 53189 - protein, 174 aa, Zea Mays
MEHLYLTRKQVQNQQVEALMSSAASNSIVLAGTGVPRLNSSFRRSLSIATSMHLDNDVEDLEMLLEAYFMQLDGIRNRILSVREYIDDTEDYVNIQLDNQRNELIQLQLTLTIASFGIAANTFIAGAFAMNIPGSLFNTDGSLFWPFVGSTSSGCFVITVLLLGYAWWKKLLGP

SEQ ID NO: 53190 - protein, 67 aa, Zea Mays
MLGGRPLFVLFGSSIVQYSFSNGGWGAALADIYARKADVLLRGYIGWNTRRAVQVMDKVFPKFKLLG

SEQ ID NO: 53191 - protein, 52 aa, Zea Mays
MCVCDGNSELLANNISLHGEGQLTCMVNRMWEKEVLVALNRSSFAAWHQDQR

SEQ ID NO: 53192 - protein, 230 aa, Zea Mays
MDSMGLGVLVEQLGELKLGELLDTPPPGLDEAIAISKVMQFLEAQEYSMFSRIVFDTAPTGHTLRLLSLPDFLDASIGKILKLRSKIASATSAIKSVFGQEVQQQDAANKLEQLRERMVKVRELFRDTESTEFIIVTIPTVMAISESSRLHSSLQKESVPVRRLIVNQVLPPSTSDCKFCSIKRKDQTRALDMIRTDPELKGLNIIQAPLVDMEIRGVPALNFLGDILWK

SEQ ID NO: 53193 - protein, 332 aa, Zea Mays
MYLHAVIKQFSTTGYERSDSIVIDEVELQRHQQLEKLYTSTRSVRDFQKDIVRAAEGLVSIGNKHIEVGTKFSEDCYRYGSENNASDEALRKAASLYGGALRNIEKEYEDFNRILSSQTIDPLRAMAMGGPLEDARGLAQRYSRMRHEAEILSTEIARRKARVREAPIAEHTTKLQQSEARMIEHKASMAVLGKEAAAALAAVESQQQRVTLQRLVGTAEAEKLFHLRLAAILDDVEAEMSSEKQRRESAPPIISSHKRAEKAQYFLAEVMHNFNGTTEKELSLIVGDYVVVRQIAPNGWAEGECRGKAGWFPAAYVERRENIPPNKVFPQV

SEQ ID NO: 53194 - protein, 434 aa, Zea Mays
MILCLIKYLLSTMFGRMPRKSSNNTKYYEVLGVSKTASQDELKKAYRKAAIKNHPDKGGDPEKFKELSQAYDVLSDPEKREIYDQYGEDALKEGMGGGSSSDFHSPFDIFEQLFPGSSTFGGGSSRGRRQKRGEDVVHTMKVSLDDLYNGTTKKLSLSRSALCSKCKGKGSKSGASGTCHGCRGAGMRTITRQIGLGMIQQMNTVCPECKGSGEIISDKDKCPSCKGNKVVQEKKVLEVHVEKGMQHNQKIVFQGQADEAPDTVTGDIVFVLQLKDHPKFKRMYDDLYVEHTISLTEALCGFQFVLTHLDGRQLLIKSDPGEVIKPGQHKAINDEGMPQHGRPFMKGRLFVEFNVVFPEPGALSPAQCRSLEKILPPKPGSQLSDMELDQCEETTLHDVNIEEEMRRRQQQKKQEAYDEDEEEDAQPRVQCAQQ

SEQ ID NO: 53195 - protein, 494 aa, Zea Mays
MNGCGKSTLLTAIGCRELPIPEHMDIYHLSHEIEASDMSALQAVVTCDEERVKLEKEAEILAAQDDGGGEALERVYERLDAMDAGTAEKRAAELLFGLGFNKQMQTKKTKDFSGGWRMRIALARALFMNPTILLLDEPTNHLDLEACVWLEETLKKFDRILVVISHSQDFLNGVCTNIIHMQSKKLKLYTGNYDQYVQTRSELEENQMKQYKWEQEQIASMKEYIARFGHGSAKLARQAQSKEKTLAKMERGGLTEKVVRDRVLVFRFTDVGKLPPPVLQFVEVKFGYTPDNLIYKSLDFGVDLDSRIALVGPNGAGKSTLLKLMTGDLVPLDGMVRRHNHLRIAQYHQHLAEKLDLDMSALAYMMKEYPGTEEEKMRAAVGRFGLSGKAQVMPMKNLSDGQRSRVIFAWLAYRQPQLLLLDEPTNHLDIETIDSLAEALNEWDGGLVLVSHDFRLINQVAQEIWVCENQEVTRWEGDIMDFKAHLKSKAGLSD

SEQ ID NO: 53196 - protein, 442 aa, Zea Mays
MLPCSCKKFWNLFHLQPMRDQKGDVQYFIGVQLDGTERVREAAAKDGAILVKKTADNIDEAAKELPDANLRPEDLWANHSKPVLPKPHMKDTASWRAIQKVLENGESIDLKHFRPVRPLGSGDTGSVHLVELLGTGEYFAMKAMDKSVMLNRNKVHRATAERQILDMLDHPFLPTLYASFQTKTHICLIVDYCAGGELFMLLDRQPMKVLKEDAVRFYAAEVVTALEYLHCQGIIYRDLKPENILLHRDGHISLTDFDLSCLTSCRPQVFLPHDIDKKKKRRKSRSNPIFFAEPMRASNSFVGTEEYIAPEIITGAGHTSAVDWWALGILLYEMLYGYTPFRGKTRQRTFANILHKDIRFPASIQVSLAARQLIYRLLHRDPANRLGSYEGAMEIKQHPFFRGINWALVRAATPPELEAPLQDTLEATLPPPAADGAHTDMF

SEQ ID NO: 53197 - protein, 62 aa, Zea Mays
MTSSPLAVRINTNLDAATRLLLETKYRRLPVVDSMGKLVGMITRGNVVSAALKIKKKTEEGA

SEQ ID NO: 53198 - protein, 177 aa, Zea Mays
MAAAIEELRLLGSIPVLEGPGEVDGVVGEEGRPRGGGDDEEILRFMDSVDSYLLLMDSLSSALRQGWLDLASARHSMGTSRVSSTLFDHKEQSAATKLQVVDHDGLKSSESIPHFALSKWSLQEECHSTYDLSERDFTEPKMRHRGSVTTPEKGNHESANTTTLSTGADASNRVLCA

SEQ ID NO: 53199 - protein, 375 aa, Zea Mays
MEHCTAFICTSAQWPHSITTTRRVAYHRSANSSFSAPQRRRRSTLYVMNAASTSAPISPQNITQLPRTNSTVIKSISSDKPSSAMEQLDIERGVCIPFRKYTPEMVRKKVLDSRGSILSLASRGVEIIWKLGFYWSSLVYDFLVGQDEEIVPYRARQLRNLLCDLGPSFIKAGQVLANRPDIIREDYMNELCILQDDVPPFPNQVAFSIIEEELGQPIERLFSKISSETIAAASLGQVYRATLRETGEDVAIKVQRPGIEPIIYRDLFLFRTLASFLNGISLQKLGCNAELIVDEFGEKLLEELDYTLEATNIEDFLENFKDDPTVKIPQVYKQLSGSRVLVMEWIDGIRCYKRSWNRYGRFSHGWSECCFASVT

SEQ ID NO: 53200 - protein, 734 aa, Zea Mays
MAIMIEKNVDVDSDGERVDFNDRATYEFLFKEYWEEIVKGKESMTLDKLEKAYAFLKEKLNCKQDLDLEKVHDEEHSSDDDFVGNSDDDDDNKPSSTTKFNGTSNTMKFFLREDRPMKNGYVGWGSKELMEFLSSIGKDTLNSLDQHGATEVVKVYIQQKGLLARDKKKLVICDDKLKILFRRSKVRYNRIYSLLGKHIAVNMTSEDETFANSDDNNETFVRKKARIGNYSSSTPKCTPEINKRCFAALVRHNIDLIYLKKSLVVDLLREPDTFGSKVIGCFVRIKIDLNDYSFYMHKKVHQHRKLYQLGLVTGTSKSPEEYKINDVSTDILLCISSIPDIKISSLSDEEYEEEECQDLRLLAKNESFKRPTVGDLEEKARSLRREIVNHWISKELQRLERLIDRASEKGWRKEKFEYLDKKQLLRKPSEQQRLLEEVPQVIPETEDNKDTEFQVTGQDKPIQKSTVALQGTNGESIVSLKKGSEEKCTYVTRASFLKSHTGKKSKGTDGERDLSLESLSEEKPEVNKAHTDGGTAVIHNQNRSTTAAIAALPKYLHRHAATEANNAGDISSVQELDGEGVKASTDVDTTGTDVQHGSIEATKANAAGDAPGAFFQKQCAKAADVITIDDDDEDNSHRCYKEEQTAVVDLEADYAGDNHPVQLEANSRGHKHVKVKERIWYYIDPQGDEQGPFTMQHLSIWWSNGFFPGDFRVWRTGQTSNDAILLVDALQMTR

SEQ ID NO: 53201 - protein, 168 aa, Zea Mays
MDKYIEEDAERHDSSSDDDDDDDDNDKVGDAVSLVSLKIDQDDSAEPDCNLASRDSDVPGTFSEENETSCSSEKRLESPSGDNGEAMKPLESEGKTLSQKDDNNDDDSSEDADEEEEDAELTKQLNKQRKKAIAAASGRRRPVSSRNACKDKGKGTMNSKIQRQACQW

SEQ ID NO: 53202 - protein, 60 aa, Zea Mays
MAVSDSLAHPGLAIVVMGVSGCGKSTVAAMLAEALGCSFIEADDYHSEANKGIRSQLVRK

SEQ ID NO: 53203 - protein, 69 aa, Zea Mays
MRTCLVAVNSNSVNSSFNIECGDATDANFEKYNLSRGSVAGILTLDTVADYLPRRGPLKQRRHPPLSIP

SEQ ID NO: 53204 - protein, 120 aa, Zea Mays
MAPSTPALEASVSVSAERHTLPSLLFASLSRYACRLVVVARPVPMSFISFNNYLDVQVPLTLATSLPHGLFLSSVVQDYYSSTKLDRIESIESLVSILCHTTIHVIGIYKGRRLHHFIIF

SEQ ID NO: 53205 - protein, 375 aa, Zea Mays
MAARGGEAAAFGAETDRGDFEVFRSGSAPPTVEGALGAAGADGGLLVDDDLRADPAYQSYYYSSAHLNPRLPPPLLSKEDWRSSHHRLRSAGFGGIGDGRRQQQQASAAEGTVGLPGIDLGRQRSFSTIFQAIEVVDLELQTKMVAELEGHVMRCVRDQNGNHVIQKCIECIPQHAIEFIISTFYGQVVMLSTHPYGCRVIQRVLEHCDDPKTQQIMMDEILQSVCLLAQDQYGNYVVQHVLEHGKPHERSAIIEKLIGQIVQMSQQKFASNVIEKCLVFGNPVERQVLIGEMLGSTSESEPLEVMMKDQFGNYVVQKVLETCDDQQREMILTRIKTHLNTLKKYTYGKHIVARVEKLVAAGEKRLGLQPACTAA

SEQ ID NO: 53206 - protein, 277 aa, Zea Mays
MEIMKGVNQGTSSGPYDIALIQAQIRNLAQEVRDLTLSKPITILNGKSDSGGSLSSYILPAAAVGAMGYCYMWWKGLSLSDVMFVTKHNMANAVQSMSKQLEQVSSALAATKRHLTQRLENLDGKMDEQVEVSKAIRNEVNDVKDDLSQIGFDVESIQKMVAGLEGKIELLENKQDVANTGIWYLCQVAGGLKDGINTRFFQETSEKLKLSHSAQPENKPVKGLEFFSESTMEQKVADSKPIAVTVDAEKPEKTAAVMGTTVHRSIRFSYRKAGLAL

SEQ ID NO: 53207 - protein, 60 aa, Zea Mays
MSRRTRLQSSKFCGWYSWTLSARAHKWTNSSASSLKQKPRWRHARSLRRTMAPVLSAKAL

SEQ ID NO: 53208 - protein, 79 aa, Zea Mays
MRKTLFCASSVCIVELSFVFYVYFLFVNVGLHFEEQSMNHEACSMLIMEGAWLPLWLFKYIVLLLISYTNSKSHSKITA

SEQ ID NO: 53209 - protein, 80 aa, Zea Mays
MALAAIYNLFIINKSGGLIYYKDYGSAGRMDTNDSLRLASLWHSMHAISQQLSPTPGCTGIDLLQAHNFDLHCFQSLTGS

SEQ ID NO: 53210 - protein, 327 aa, Zea Mays
MSGRALKDLNVSQSADLENGKDNSVKSCITKPVLNGNKCANKEEKAPSACHDAVTNGNAAAIADVEYIDSENLVDLPDVDAALSTLAKRLDSKDWVMTCEALNNVRQLAMYHKERLQELLEPLVPLIVKSVKNPRSAVCKTALMTCADIFKAYGDLMVHSIDPLLVQLFLKASQDKRFVCEAAEAALISMTSWISPLLLLPRMLPYLKNKNPRIRAKASVCFSKSVPRLDVVGIKEYGMDKLIQIAATQLSDQLPESREAARNLALELQAFYEKSQASTSDEHEVEASASPDAESWEAFCQSKLSALSAQAILRVTSTTTKDMSLWV

SEQ ID NO: 53211 - protein, 206 aa, Zea Mays
MMEKVSSTQSCSMVATSMLSGINSVFYFSSTVFRSVGVPSNLANICMGISNLSGSIVAMLLMDKLGRKVLLSGSFLGMAFAMGLQAVGANRQYLGSACVYLSVGGILLFVLSFSLGAGPVPGLLLPEIFPNKIRAKAMALCMSVHWIVNFFVSLMFLRLLEQLGPQLLYTIFSSVCVVASIFVRRHVLETKGKTLQEIEVSLLQPQ

SEQ ID NO: 53212 - protein, 166 aa, Zea Mays
MGATFARYLKTFRSADPAWFYLHVACQLAGYGVGVSGWATGIHLGNLSKGITYSLHRNIGITVFALGTLQVFALFLRPKKEHKYRVYWNAYHHSVGYTVIVLGVVNVFKGMAILDVERRWRTGYVAAVSVLAAVAVALEAVTWGVVLRRRKQEEKTSNAGRLPLSM

SEQ ID NO: 53213 - protein, 573 aa, Zea Mays
MPGENVLPLEDSTRVEFFTMSPLASSSIHWLVGIVYMLQISIFVSLLRGVLRNGVLYFLRDPADPNYNPFRDLIDDPVHKHARRVLLSVAVYGSLIVMLVFLPVKVAMRVAPSMFPLDITIFDPFTEIPVDVLLFQICIPFAIEHFKPRATIKALLHHWFSVVGWGLGLTDFLLPKSEENGGQENLNARAERRDRGHGGREMVAPQVEQLMIQHVAAEDNGRGDSNEANDVTEDSDVDDQGDSEYGFVLRIVLLLVLAWMTLLIFNAGMIVFPISLGRLVFEAVPRLPITHGIKCNDLFSFSIGCYILWSVAAGTRYAIDYITSRQLGFLVQQICKWCSIVLKSSVLLSIWIFVIPVLIGLLFELLVIVPMRVPIDESPVFLLYQDWALGLIFLKIWTRLVMLDQMAPLVDESWRSKFERVRDDGFSRLKGLWVLHEIIMPIVTKLLTALCVPYVLARGIFPLLGYPLIVNSAVYRFAWLGSLIFSALFFWGKRFHVWFTNLHNSIRDDRYLIGRRLHNFGEDSHSPERSESGASIGSDDQDRDIVLRDQEEEVGLRMRRNNMHANQQPRFAL

SEQ ID NO: 53214 - protein, 363 aa, Zea Mays
MEALHKQVMPFLLRRTKDEVLSDLPEKIIQDRYCDLSLLQLKLYDKFSSSNAKDEISTIVKANELEESAPQPKATRHVFQALQYLLKLCSHPLLVTGENPPNHLVDLLNEIGLGSGSELHELHHSPKLVALQEILQECGIGSEISSPDASTAVGQHRVLIFAQHKAFLDIIEKDLFQSHMRSVTYLRLDGSVDPEKRFEIVKAFNSDPTIDVLLLTTHVGGLGLNLTSADTLVFVEHDWNPMKDLQAMDRAHRLGQRKVVNVHRLIMRGTLEEKVMSLQRFKVSVANAVINAENSSLKTMNTDQLLDLFTSTPASRKASDEQSKRKSGGKGLKSILNGLDELWDQSQYADEYDLNQFLAKLNG

SEQ ID NO: 53215 - protein, 251 aa, Zea Mays
MQKNLPSELDDISGWTEDLFTARKSAINLLGVIALSKGPPVASAASKRKKGDKNKGKSEMSSIGELLVIPFLSKFPIPSHGEDASSVAVQNYFGVLMAYGGLQDDMSSSIYQSLMKSLTMEYVEDITCYPVCASASVAIAELIENSYVPPNWLILLQVVLKRISTGDENESALLFKLLGTIVEGGQEKVLSHIPEIVSNIASTVMELRLPVPDPWPQENIEWNSNLVAAKCGDLNSYKVRLNISANSCILV

SEQ ID NO: 53216 - protein, 418 aa, Zea Mays
MFVCATLSAIMLVHGRFQKRAAKFAQEFTANANNVAQEVITLVRTVRVYGTEKQEFKRYANWLDKLYDVSFRQTVAYGGWSLSLNYLYHSTQVIGVVIGGLAIMSGKLTAEQLTKFTLYAEWLILSTWWIGDNWSSLMQSVGASEKVFRLMDLLPSKQLSSEGLKLEKLKGQIQYADVSFSYPSRPTVPILGGLNLTLNPNEVVAIVGLSGSGKSTIINLLLRLYEPTNGQILIDGVPLTELDIRWFRERIGFVGQEPRLFRMDISSNIKYGCPRDVSHEEVIWAAKQAYAHDFIMALPDGYNTIVDDALLSGGQKQRVAIARALLRDPSILLLDEATSALDAESEHYVKSVITKVSRDSKAKRTVVIIAHRLSTIQTADRIIVMENGNIVEDGKHIDLIEKGGLYSRLARRQNDDLK

SEQ ID NO: 53217 - protein, 611 aa, Zea Mays
MDMVAIPDFAAGAMENYGLVTYRETALLFDEMHSAAANKQRVAVVVAHELAHQWFGNLVTMEWWTHLWLNEGFATWVSYLAADQFFPEWNVWTQFLEESTVGFKLDALAGSHPIEVDINHVDEIDEIFDAISYRKGASVIRMLQNYLGAEVFQNSLAAYIKRFAYSNAKTEDLWAALEEGSGEPVRTLMHSWTKQQGYPVINVKLKDGKFQLEQTQFLSSGSTGVGQWVVPITLCCCSYSRQAKFLFHGKQEDFDLSASGFTDCQKKDGFWIKLNVNQTSFYRVSYDEELAARLRYAIETNKLGAADRYGVLDDAYALCMAGKQKLVSLLHLISVYKDETEYTVLAHIITTSLHIAEMMVIAAPEELVHLKKFLIDFLEPFALKLGWDAKSDEGHLNALLRGTLLTALAELGHEATINEAVRRFNVFLEDRETPLLPPDVRKAAYVALMQTVSKSNKTGYESLLRIYRETDLSQEKVRSLASSPDHDVVREVLNFILSPEVRNQDAIFLLRGVSSGAHEVAWQWLKENWDYILGAYSGTLLTYFVNITVSPLATDEHGDEAEEFFKSRTKANIARTVRQSIERVRINAQWVKNIKAEADLGNVLKKLAYKH

SEQ ID NO: 53218 - protein, 133 aa, Zea Mays
MEMGSELSKTVATFIVQKILLDDVGLRYICATAERFFAVGSVLANMVVSLADQPSTRLLKHIIRCYLRLSDNPRACAALQSCLPDMLKDGTFNNCLRDDPATRRWLQQLLHNVTGGGMGGAPQPGMDPMNMGM

SEQ ID NO: 53219 - protein, 57 aa, Zea Mays
MLRLLRPCDSKVAMMELSKRASCGRLKSDCSWVIVASSVNIFLDCLVSQLLLSDLWT

SEQ ID NO: 53220 - protein, 373 aa, Zea Mays
MVIDEQGHSDQGSDGSDIDAVSHFTEKFDGETIGDTEMADEENLTKDQIEAEIKKIKEANADDEEFPDEVETPLDVPAKKRFAKYRGLKSFRTSSWDPKESLPLDYARIFAFDNFTRTQKHVFAKIAELDGGMKNCAQVGSYVRLYVKNVPTDIASKLCHPSRRIPVVVSGLLQHESKMSVLHFSIKKHDSYEAPIKSKEPLIFNVGFRQFTARPLFSSDNINCNKHKMERFLHHGRFSVASVYAPISFPPLPLIVLKNRDGEQPAIAAVGSLKSVDPDRIILKKIVLTGYPQRVSKLKSIVRYMFHNPDDVKWFKPVELWTKHGRRGRIKETVGTHGAMKCLFNSSIQQHDTVCMSLYKRAYPKWPEQLYHV

SEQ ID NO: 53221 - protein, 800 aa, Zea Mays
MVLQVNSREKLFSIHRKPLPLEPSLLLREANRRRAFLSAGNLSELYDSSDGSGLDANSKLPPNRSASNLMTRTMSGPATSETSLPVDRPMRLSEIHVAAEHALKQTISDPDFMTSLSSLEEFEKRYMELTKGAADNYHRSWWKRHGVVLDGEIAALFFKHGNYDLAVKSYEKVCALYSAEGWEELLADVLPDLAECQKILNDEAGYLASCVKLLSLDSGLFSSKERQGFQSEVVRLAHSEMKHLVPLDVSSLITFAGNAGPPLELCDGDPGTLSVAVWNGFPDDITLESLSLRLSASSSADEGIKAIKSSDSHVLVPGRNIISFDIPRQKPGSYVLGALTGQIGKLSFRSHGFSQDGPVETDEFMSFEKPTRPVLKVRKPRALVDITPAVSSALLMNELQWIGLIVKPIDYSLKGGILHIDAGAELKIEESQMIEIEIYVSDMECANSANSSIKAGKVEKVPIENGKIELPDWASDVTTLVWFPVRAIDDTIARGESLVSQKQSVVDGMRMIALKLEFGVFRNQVFERTIAVHFTNPFHVSTRVVDKCNDGALLLQVILSSGVKATLHVKDVRLDLQSGFDHLGKGDGRPALSLFPLVIAPSSKAGILFMLRLSGTKDVDDAENADSTLNITYGISGDRKTGAHSPIPVKSGDSEELVFKIALRLKRPVLDPCVAVGFLPFSTDCLRVGQLVNMRWRVERLKTPEDASISIDEILYQVEANPQNWMVAGRKCGHVSLSNEQGSRMEITVTCVPLVSGYVHPPQLDLPEVGEANISCNPAGPHLVCVLPPAISTSYCIPAI

SEQ ID NO: 53222 - protein, 413 aa, Zea Mays
MLPTAHKKLLFHLGLKYQSLRWCISMNASFIMKMLEAFEPPFDMSQSNLSLDEQHDSPKEYTKRHEPSRETDNNKGGEDHMAGCSQPVGNMGMSQGAGIACNGDKNTGAAAYFQDKDVSASSAIENVALRHCTASSLKLNVPPIDVDKVRCIVRNIVRDWGDEGQKERDECYKPILEELNRLFPNRSDQRPPSCLVPGAGLGRLALDISSLGFVSQGNEFSYYMLICSNFILNHTQEANEWSIYPWIHSNCNSLSDNDQLRPVSFPDIHPSSAGITEGFSMCAGDFVEVYSEESQESAWDAVVTCFFLDTAHNIVEYIEIISKVLKDGGVWINLGPLLYHFADSYGPDDDMSIELSLEDVKKVAYHYGFTMEVEKMIETTYTANMKAMMQNRYRAAFWTMRKDASRSKACKPR

SEQ ID NO: 53223 - protein, 149 aa, Zea Mays
MKFLCKDLSKACAKDPPPVPKDRVPGEPFARKPSKDAEMEKILRSMEGMPGAPSMKMYSRDDLMKNNFGTEDDDEEDDEDEDDNFPKNLGKALKNKGSQKKDLKQQVVQQFKDTSKKLKGHVNKVSGMVKKWWKGAKKPAKSSKSKTEL

SEQ ID NO: 53224 - protein, 205 aa, Zea Mays
MASPIPREWVGLQQFPPATQTELHELLGKLKEEDVSTLTILVMGKGGVGKSSTVNSIVGERIATVSAFQSEGLRPMMWSRTRAGFTLNIIDTPGLIEGGYINEQAVDIIKRFLLGKTIDVLLYVDRLDAYRMDTLDGQVIRAITNSFGKDIWRRSLVVLTHAQLSPPDGIEYNDFFTRRSEALLRYIHSGAGIKKREYGEVTAAC

SEQ ID NO: 53225 - protein, 116 aa, Zea Mays
MTFFSVVIALFKDIPDIEGDRIFGIRSFSVRLGQKKVFWICVGLLEMAYSVAILMGATSSCLWSKTATIAGHSILAAILWSCARSVDLTSKAAITSFYMFIWKLFYAEYLLIPLVR

SEQ ID NO: 53226 - protein, 90 aa, Zea Mays
MQASDRFNINSQLEHLQAKYVGTGHADLSRFEWAVNIQRDSYASYIGHYPMLAYFAIAENESIGRERYNFMQGSDIYSILVKEPFVYRTE

SEQ ID NO: 53227 - protein, 309 aa, Zea Mays
MGMAAVKAVAAITAIIAGGRLLLRPIYKQIAENQNAEIFSANTLLVIFGTSLLTARAGLSMALGAFLAGLLLAETEFSLQVESDIAPYRGLLLGLFFMTVGMSIDPKLLLSNFPAISVILSLLIIGKTLLVTFVGRVFGVSAIAAIRVGLLLAPGGEFAFVAFGEAVNQGLLSPQLTSLLFLVVGISMALTPWLAAGGQFLASKFEQHDVRSLLPVESETDDLQDHIIILGFGRVGQIIAQLLSERLIPFVALDAGSDRVAAGRALDLPVYFGDSGKQRGTAQKLELKELVLLQLLWILLVQTTELSGR

SEQ ID NO: 53228 - protein, 633 aa, Zea Mays
MQKSDHHEQKLTSPRGLIHKILRRTNSRRSPTAADQQPSPVSPETSNSSIFSKQKDVDDAIKDSEKLSTHTIRIEDEKSDLLGSEIYSGKLTLDNKTKSSSNEQSGSGSSSNCFDARLSTEALIWGSNILKLEDIVSLAGFKMEVVKTTHAGHAKSLVSTIDFSTCPDGIVCVGGDGIVNEVLNGLLCRDDQNMSASVPIGIIPAGSDNSLIWTVLGVKDPISAALSIVRGGLTPIDVFSVEWIQSGTMHYGTTVSYFGFVSDVLELSEKYQKHFGPLRYFVAGFLKFLCLPKYSFELEYLPVSDVNGAEHKILVGQEKVDASDLYDDVIRRSRAECLPRASSLSSIDSIMSTGIMSGAELEVCSPRANNEPSEVVRGLDPKSKRLSLGRASTFKEPEEVLHPHSHGTSTPSWRRSKSKSRTEKAKPGLSATHDAKSSKVNADKEDTSSTISDPGPVAVWDSGPKWDDEPKWDNQPNWEPETSIELHSPREDIELGLTKELVPSLDERWTVRKGRYLGVLVCNHSCKTVQSLSSQVVAPKAEYDDNCLDLLLVGGSGRLRLLRFLVLLQFGKHISLPNVEYVKVKSVRLKAGPNTHDGCGIDGELLHVKGQVRCSLLPQQCQLMGRPVKNPVQ

SEQ ID NO: 53229 - protein, 477 aa, Zea Mays
MHYNTSEHARRRRGSIEPGVGKWVSYLNREKKLDTLVGHRPVAPVAPKGLYLYGNVGSGKTMLMDMFYGATEGVIKHRRRFHFHEAMLEIHDHMHDVWKRRDDDKSIHSSAFSWISSLPFDTKIKEWLIGEEKYKQQTQEKHILLAVADKFLVDRQANKTGASILCFDEIQTIDVFAVVALSGILSRLLSTGTVLVATSNKAPEDLNQDGMQRDIFLELLSKLDESCNEILVGTEKDYRRLIPTEGSTEVHYFWPATSDARSMYEAMWHDITDQSGENIVSVTIPVMFGRSIEIPQSCNGVARFDFEYLCGRPVGAADYIAIARNYHTIFISEIPAMSMKIRDKARRFITLIDELYNHHCRLICLAASSIDDLFQGTEEGPLFDLESFQFETESEGTKLRRDVLAEGNAGSGPSTTGLVAILSGQEEMFAFRRAISRLIEMQTPLYLERVLAVHPSFRRPGLARNNRPAVPQPAPAV

SEQ ID NO: 53230 - protein, 191 aa, Zea Mays
MEKIEAGNVLHRAFSVFLFNSKYELLLQQRSATKVTFPLVWTNTCCSHPLYRESELIEENCAGVRNAAQRKLFDELGIVADELPVDQFILLGRMLYMAPSDGKWGEHELDYLLFMVRDVKLNPNPEEVADVKYVNRDQLKELLRKADAGEDGVKMSPWFRLVVDNFLMGWWDHVEQGTLQGAADMKTIHKL

SEQ ID NO: 53231 - protein, 163 aa, Zea Mays
MSVSTESLDLRFRLKGNVSGNRPLHVVMFEKRVNKTCTVVYTIIVGSLSKRRAVQYQRFPFAVRCVAEHGVIPALGAVPRRRQAQVQTDSAGTASAANVGFLNRRGVPRAELTFGLGCQRSPAVPTHVAAQRLADRELEPADGAAVQPRPRRALARLIQPRSA

SEQ ID NO: 53232 - protein, 393 aa, Zea Mays
MQNRDTSLMQGTPYTHIHEIVFSTIDKPKLLSQLSALLSDIGLNIREAHVFSTHDGYSLDVFVVDGWPVQDADGLHKALEASILRNEGSWSGSSHSSAAERTLPFQVKGGEWEIDKRLLKMGGMVASGSCGDLYHGTYLGEDVAVKVIRAEHLNKNVWNEFTQEVYILREVQHKNVVRFIGACTKPPQFCIITEYMSGGSLYDFVHKQHNVLNLRTLLKFAVDVCRGMCYLHERGIIHRDLKTANLLMDKDHVVKVADFGVARFQDQGGVMTAETGTYRWMAPEVINHQPYDNKADVFSFAIVIWELITSKIPYESMTPLQAAVGVRQGLRPGLPKKTHPKVLDLMQRCWEADPSARPAFPDILAELEDLLAQVQGTPGKTAHAPSNNSNTKD

SEQ ID NO: 53233 - protein, 140 aa, Zea Mays
MGNVEGCCIGNATLCAAASETSKVSISILMKRCEVILGQFLADENDLGEHPLPSVRVEETICVLQELARLIIDIDAANTLNIPPYLKQALGENKSHGRAHLLSLLPTFSELVVSREARVRELVQVLLRLISSELGLHQLT

SEQ ID NO: 53234 - protein, 196 aa, Zea Mays
MRFSALLLIVALLCLGGGGGGRVTASTEFNFPAVFNFGDSNSDTGGRVAAGFESIFPPYGSSFFGGPAGRFCDGRLVIDFLMEAMDMPLLNAYLDSLGTPSFRTGVNFAQAGCSITPAKPTSVSPFSFGLQIKQFFAFKNKVTKLLSEGDMHSRYIPQQDYFSEGLYTFDIGQNDLAELPMPLSPKLTNWCTGILL

SEQ ID NO: 53235 - protein, 344 aa, Zea Mays
MPKLLMSNSQKGWPFFQRLLVALFKFMEPYLRNAELPEAVDLLYKGTMRVLLVLLHDFPEFICDYHFSFCDVIPSSCIQMRNVILSAFPRNMRLPDPSTPNLKIDLLAEISIAPRIMSDVDGTLKSKQLKTEFDEYLKRPEGSSFLSVLKQNLLLPQNEAAVAGTRYNVPLINSLVLYVGIQAVQQLQQNKANASASVQQIKHTPTMDSFQIETATEMFTNLITSFDTEGRYLLLNAIANQLRYPNSHTHYYSFIILHLFAEATQEIIQEQITRVLLERLIVNRPHPWGLLITSIELIKNPRYNFWNRSFTHSAPEIEKLFESVARSCGAKAVDEGISVQDGSH

SEQ ID NO: 53236 - protein, 967 aa, Zea Mays
MTFIDGAKHKDYRITEDIRNAGFSINPDELASITSKHDAKALKMHGGVDGVSKKIRSALDHGISASDLDTRQSIYGVNRYAEKPSRTFWMFVWDALQDMTLIILMVCALLSAAVGLASEGWPRGMYDGLGIMLSILLVVMVTAVSDYRQSLQFKELDNEKKKIFIHVTRDGSRQKVSIYDLAVGDIVHLSIGDQVPADGLYVHGYSLLIDESSLSGESEPVYVSQDKPFILAGTKVQDGSAKMMVTAVGMRTEWGRLMSTLSEGGEDETPLQVKLNGVATIIGKIGLLFATLTFVVLMVRFLIEKGLTVGLSKWYSTDALTIVNYFATAVTIIVVAVPEGLPLAVTLSLAFAMKKLMNDKALVRHLSACETMGSAGTICTDKTGTLTTNHMVVDKIWASEVSKSVTDSSSLEDLASAVSPATLSLLLQGIFENTSAEVVNEKDGKQTVLGTPTERAIFEFGLKLEGLGAEDRTCTKVKVEPFNSVKKKMAVLVSLHDGGSYRWFTKGASEIVVEMCDMMIDGDGNSVPLSEAQRKIVLDTINSFASDALRTLCLAYKDVDGLEDDDDDADSPTSGFTLICIFGIKDPLRPGVKDAVEACKSAGIVVRMVTGDNINTAKAIAKECGILTDGDLAIEGPEFRSKSPEEMRDIIPKIRVMARSLPLDKHTLVTNLRGMFREVVAVTGDGTNDAPALHEADIGLAMGIAGTEVAKESADVIVLDDNFTTIINVARWGRAVYINIQKFVQFQLTVNIVALVINFVSACITGSAPLTAVQLLWVNMIMDTLGALALATEPPNDDMMKRPPVGRGESFITKVMWRNIIGQSLYQLVVLGALMFGGEQFLNIKGADSKSVVNTLIFNSFVFCQVFNEINSREMEKINVFRGMVTNWIFIAIIAATVLFQVVIVELLGTFASTVPLDWRLWLLSVGLGSVSLVVGAVLKCIPVAKSNGAPASPNGYAPLPSGPDDI

SEQ ID NO: 53237 - protein, 309 aa, Zea Mays
MPGARDGHHGRQLLGDCGRQCPPRHQRRHLTCLHHRSARHQCRDHSLRVRRLLSWHDLFSRVRRLGLARLRPPGAGRRRYPIHLQPRHNRRSPLHVRSGRRWDPCRHAKRVPCICPLFATVGGYSRAHAPSRLPMLLTVCRRRPLHSSSASPPLLLSSRNTTPPSLASTACPPSAWSSMRGWCTASPLLPPFPLPRQPSTPPLQAWAWTPMSLQPPCPPCHAGGPRCPVSGTVVALRAPLHVAGLIHGGSFPMSPSVGYSDDTSYNVPPPSTPAASPLQSIPGTPTSAAVPMRAFVMPVNSSSLSYLLV

SEQ ID NO: 53238 - protein, 324 aa, Zea Mays
MDDMLNAKELVQWENGLSFNDIAARQGIRIRRHCRPTASLKEIEEELGAPLNILEKIIWDKEIEVAEGHAKKPLEEVIQAATKAPPSRDFYGALEAAYKRNGVPALIAEVKKASPSRGVLRENFNPVEIAQAYEKNGAACLSILTDEKYFQGSFDNLEKVRSSGVKCPLLCKEFVIDKWQIYNARSKGADAILLIAAVLPDLDIRKFLQICEELGMTALIEVHDEREMERVLKINGVKLIGINNRSLETFVVDTSNTKMLLEKHGDIIREKGILVVGESGLFTPDDVAYVQNAGVSAVLVGESLVKQECPGRAIVGLFGKELLH

SEQ ID NO: 53239 - protein, 842 aa, Zea Mays
MKAFVDHNKFGNLPYGFRANTWLIPPIYVDPATKCPALPVEDENWGGNGGGCGRDGRYDRRCWSKEFSVLSRMPCKSDEERVIRDRKAFLLHNLFVDTAIFRAASTIRRLIDQSMNSIGSRGTTHGSNVFEEHIGDMNITVKKDEADASSKVDDKVDGVAFCKTGAMDIAQKNLLKGLTSDENVLIKDSSTLGVVIVKHCGYTATVKVSGRAKDSNDVKQTHDVSDNFDGMLNIDVPDHPDGGSNALNVNSLRIPLQSVTHPETVVGKQNPSPKSHAYNPARKLACKILEDSLVKLDSMPSINSRIIRWELGSSWLQQLQKKDSPASENVKRNATKADKESAVKGLGKHFEQLKKIKKKECNIDGSSSEKEECNSNCSSMNGMQVSDKISVDETNKGADVSKLMSEDAFFRLKSLGAGLHEKSLEELTKMAHNFYDETALPKLVADFASLELSPVDGRTMTDFMHTRGLNMSSLGRVVELAEKLPHIQSICIHEMVIRSFKHIVRAVIAAVDDMQNISAAIAETLNILLGSPRLENGADTDAHIDNNLRLKWVGLELVARDYDMNSPNPFDKSDIVSIVPVCKHVVYSSIDGRNLLESSKMALDKGKLDDAVSYGTKALSKIIAVCGPYHRLTANAYSLLAVVLYHTGDFNQATVYQQKALDINERELGLDHPETMKSYGDLSVFYYRLQHIEMALKYVNRALYLLQFSCGLSHPNSAATYINVAMMEEGMGNVHVALRYLHEALKCNKRLLGADHIQTAASYHAIAIALSMMDAYSLSVQHEQTTLQILQEKLGQDDLRTQDAAAWLEYFESKALEQQEAARRGMPKPDSSIASKGHLRSS

SEQ ID NO: 53240 - protein, 307 aa, Zea Mays
MAVGYNSIEAEDWELATNGEEMSKLEALLLDKNRKMEHELTQLKVKISEKTSVLEEAEKRIVELTSKVEEQQKLILKLEDDILKGYSSTDRRGSLLNDWDIQEIGSSEASEGSDPRHASADQDQSSMLKVICNQRDRFRARLRETEEELRRLKEKHEMLTVELEKTKADNVQLYGKIRYVQDYSHDKIVSRGPKKYAEDIESGSSDVEAKYKKMYEDDINPFAAFSKKEKDQRYKELGLRDKITLSSGRFVLGNKYARTFIFFYSIGLHLLVFTLLYRMSALSYLNTTTQQDEIILDAGNQRLTHML

SEQ ID NO: 53241 - protein, 113 aa, Zea Mays
MAAYRHPTKGNRGCGVERRGEWTKARHGWRCCCIGTGTGTGKGDETRGVGWYSAGTGALTGAENQLRLTSDAAAETQTPLVCVLFRPCSCLVRMQQRSLSFGSIDVLPALLFN

SEQ ID NO: 53242 - protein, 215 aa, Zea Mays
MSRRGDWVYENNGGTCVAIAGADYCVVAADTRLSVGYSILTRDHSKICDLADKCVLASSGFQGDIKALHKNLAARELLYQHQHNKRMSCPAMAQLLSNTLYYKRFFPYYAFNVLGKGCVFTYDAVGSYERTGYSAQGTGSTLIMPVLDNQLKSPSPLLLPARDAVTPLSESEAIDLVKDVFASATERDIYTGDKLEIVVINKVGTKREYIDLRKD

SEQ ID NO: 53243 - protein, 1052 aa, Zea Mays
MAATVASEHSIDRKLSALVEQARPSAAAMLAAAEAVDAVAELIKRVPQQQATPEAARGFLRDLGLETEKLSFTFRPPEVVRLAGSHAAGAVARPEVAADLLVRLPKECFHEKDFLNHRYHAKRCLYLCVVEKNLRCSKLIRKVSWSTLQDEARKPVLHVYPATEIVDLPGFHVRIIPTADSLFNVSKLNVSTRNNVRAYTKDGVNLPTPKYNCSILEDMFLEENANFISSTFANWKALQEALVLVKVWARQRTSIYTHDCLNGYLISAILVFLTVDSGGSMITRSMTTRQIFRVLMNFLATSKAWAKGLVIQSMKKRTVTKEDIATCLKTFDVAVFDISGHINLAFRMTRSAFLELQDEAVCALSCLDKCRDGGLEELFMTKVDFCAKFDTCLRINLKGNSKVTGLSYCVDDESWRILEKDVQSLLQQGLTDRTKMIRALWRSTPSEWKIVEGFSEFGSSPLLVGMMVSSLEKSFRLVDIGPNPENRVEAVKFRKFWGEKAELRRFKDGNIAESTVWECQSWEKHTIIKRIADYVLMKHLSLQKDDLIHVVDQLDFCLLVDGQDPVSSSGALLEAFDTIAKQLRLLDDIPLKISTVQPLDSAFRHTSVFPPEPHPLAYGRNSQRLPKFATTCIRSLEVMIQLEGSGNWPLDPVAMEKTKTAFLLKIGESLEDRGMFVSASENEVNVLTSGYSFLLKIFHERGLVMQKPVGDDKTQSVLSEDKMLFQRSQHSSMINGLHGRYQVYGPVVRLAKRWISAHLFSSFISEEAVELVVAHIFLKPFPFHAPSSRVAGFLRFLRLLSSFDWIFSPMVIDINNDFNLMDEKEINDNFMLSRKSYERNPHDIEPAMFLATSYDKTSEAWTKQSPSKSVLKRVAAYAKSSAELLTNLMLHGPSGEYTWECLFRTPMSNYDAVILLHQEKLCCPHHVLFPAENPDGKLVVWGKPSKDFCPYMPLNKGAVKGLHDAREKLLVNFDPTTYFLRDLKCAFSKTFKLWYGSVGGDAVGLTWENPKKRGREEADEAAPEPTSILKEVGDVGKGLVRGVYLVKAPKFQ

SEQ ID NO: 53244 - protein, 222 aa, Zea Mays
MLRRCRAAWQLRGKRGGRAGEGVEDEESEYRAALHCHRYTVYNTVCQGSSSFDFVTERRDDGGRRVGEPGEHEPDDEHRVVKVEEVIDAAGHHRPGHRVPEHRREAELPGRQHRGTPRRHQTPPALGEGGEVGVGGEERLQERVGGRRGRELLEAAGERGEDVGAGDGERACSGDAREGQVAYGEEEWRPRGGVVLSRVGAGGGHWCVWCFEADGRPQTRGY

SEQ ID NO: 53245 - protein, 202 aa, Zea Mays
MTAASEVRRGINLVYGGGSIGLMGVIARTVRHGGCHVLGVIPKALMPIEISGESVGEVRVVDDMHQRKAEMARQSQAFIALPGGYGTMEELLEMITWCQLGIHDKPVGLLNVDGYYDPLLALFEKGAAEGFISTDCSQIFVSAPTASELLTKMEQYTRVHQEVAPATSWEISELGYGRGGDAGAATPPAAAAGGAEEGKGGS

SEQ ID NO: 53246 - protein, 316 aa, Zea Mays
MELMIAARKAVPELQLVYGIAVDRVYTGTLMTSLDMAGLSITIMKSGESILKRLDAPTKAPAWPVGSEGNRPPAKFPVPLPPSPSMKDDEILAPSQELSKQGCILEAVIEASATEIINLMDSLNEWDSKVGDGDCGSTMYRGATAILEDMKKRYPMNDAAGTINEIGATIRRVMGGTSGILYAILCKAAYASLKQSSTVTANKWADALEASIAAVSKYGGASAGYRTMLDALIPASAVLKQRLEAGDDPVTAFIASSEAASAGAESTKQMQAKAGRSSYIAPDLLASIPDPGAMAAAAWYRAAALAVKNKVHGSKS

SEQ ID NO: 53247 - protein, 302 aa, Zea Mays
MALLSHSRVLRMELDIQNFMQNPQLQEFEFQNFPTSYLRCAAHRVAQHYGLETIVADSLVEGSVSRIVARKTAESRYPAIFLSEVPSNQARNDHETAEKLKFVIYQRPKAFQNGSADSRNKSGVPKTVDERIEEYNKARARIFNGSISADSDAASIMGTLSTGKDEPVNVDPSVDETKVSTMNSRSRVAVFKDTEKDRSDPDYDRNYKRYVRSSVPGFNLSPGVFNFVVPQFMQYDIGYVQSPGMSTNQHTMYFGQPDLTIGSSGAAVYRHWPTPTMMYPHCYDNVSPMMSQVPLYQSFNHD

SEQ ID NO: 53248 - protein, 89 aa, Zea Mays
MLNNFLPLVEIFQIHCSTRFRYCRSTRRGLPYLSFPSQSRFLHTSICTSLCAGSMSTWAEVWARAQQASIYGLRHFTPPVCRSLFRVSG

SEQ ID NO: 53249 - protein, 324 aa, Zea Mays
MASEKSKILVVGGTGYLGRHVVAASARLGHPTSALVRDTAPSDPAKAALLKTFQDAGVTLLKGDLYDQASLVSAVKGADVVISVLGSMQIADQSRLVDAIKEAGNVKRFFPSEFGLDVDRTGIVEPAKSILGAKVGIRRATEAAGIPYTYAVAGFFAGFALPNIGQLLAPGPPADKAVVLGDGDTKAVFVEEGDIATYTVLAADDPRAENKVLYIKPPANTLSHNELLSLWEKKTGKTFRREYVPEEAVLKQIQDGLRDRPGQGGGRQRTVPGCQVHHRRRVPQPLPLSLRSQQTGRHVRPRRGHDVWTSSSSAAYLNITSSIP

SEQ ID NO: 53250 - protein, 590 aa, Zea Mays
MDYLRTVVPSQLLAERGSNLVVINPGSGNVRMGFASQDVPFNIPHCIARHINPQEGEEPRFSVRDQMLNCHATSSQNAERESAYDIIAALMKIPFLDDEEMPSPNQPLPPKMGRVDGFSSQQNRDDNKFTWTDVSERIIKPSTPFDRSVYKDAEEDTLPSTSDDDNGQDFKENKYKEMIFGEDALKIPPSESYCLSRPIRRGHFNVSHNYSVHQVLEDLRTIWNWILTEKLHINPRDRGLYSAILVLGETFDNREIKEMLSIVLHDLGFSTAVVHQEALSAAFGNGLSTTCVVNIGAQVTQVVCVEDGVALPHTALALPYGGDDISRCLLWVQRRHGTWPNFQTDPMSNPIDMLMLNKIKESYSQIKTGSIDAAVLVHSYDNERSGGHQKTRLSAINVPPMGLLYPRVLVPEEYPPPPRSWFQDYDDMLEDTWQTSDGLYPSGNGGFGMWDSYPMFPTRLKKFDNIGLVEAIISSVLSTGRVDLQKKLFGSIQLVGGAASTAGLAQVLEQRVRTKISANQSIEKVEVLQSRTYPLFVPWKGGVILGVLDIGKDAWIHREDWIKNGVHIGSGRKYKDSYFLQAQVMCYYNV

SEQ ID NO: 53251 - protein, 837 aa, Zea Mays
MTVRAAAVLVATAALALLLPGWAAAEWSLTKKGSVVTYDGRSLMIDGKRDLFFSGAIHYPRSPPEMWPKLIERAKEGGLNTIETYIFWNAHEPEPGKYNFEGRFDLIKYLKMIQEHDMYAIVRIGPFIQAEWNHGGLPYWLREIDHIIFRANNDPYKKEMEKFVRFIVQKLKDAELFASQGGPIILTQIENEYGNIKKDHATDGDKYLEWAAQMALSTQTGVPWIMCKQSSAPGEVIPTCNGRHCGDTWTLRDKNKPMLWTENWTQQFRAYGDQVAMRSAEDIAYAVLRFFAKGGSLVNYYMYHGGTNFGRTGASYVLTGYYDEAPMDEYGMYKEPKFGHLRDLHNVIRSYQKAFLWGQHSSEILGHGYEAHIFELPEEKLCLSFLSNNNTGEDGTVIFRGDKHYVPSRSVSILAGCKNVVYNTKRVFVQHSERSFHTSDVTSKNNQWEMFSETIPKYRDTKVRTKEPLEQYNQTKDDTDYLWYTTSFRLESDDLPFRNDIRPVLQVKSSAHAMMGFANDAFVGCARGNKQVKGFMFEKPVDLKVGVNHVVLLSSTMGMKDSGGELAEVKGGIQECLIQGLNTGTLDLQVNGWGHKAALEGEYKEIYSEKGLGKVQWKPAENDRAATWYKRYFDEPDGDDPVVLDMSSMSKGMIFVNGEGVGRYWVSYRTLAGTPSQAVYHIPRPFLKSKDNLLVIFEEEMGKPDGILVQTVTRDDICLFISEHNPGQIKTWDTDGDKIKLIAEDHSRRGTLTCPPEKTIQEVVFASFGNPDGMCGNFTVGTCHTPNAKQIVEKECLGKPSCMLPVDHTVYGADINCQSTTATLGVQVRCGGGKKGA

SEQ ID NO: 53252 - protein, 517 aa, Zea Mays
MLLQRLKKKIKKGKRGPHRSWNNSLVVIKGLPKLTGSIDRMPTKAFAGDLKLLTLNLRNHSEYAVKGIKMKLSNPRFLIPGDSSDIGLKFPHCLKRHVQSESSVVSAKTMKDNFKSLLFAFPQDIEIQAGAALSWPIWFHAATPGNVSLYISLYYEMGSSSDIKYRTLRMHFNLEVLPSLDVSFSVSTSSSRLQEYIVRMDVMNKTPSESFVLHQLSCVGDKWAVSALAACSSINSVETVSENQAVSYFFKIKDCEADSCKEAESDSCTSDMALCPGSSTDLFDIARSPFVDFHHQERCRQVKMAKGPCSLLDFVLISKAVDNSSKPTPDFELLSHHTCHCSALSQNPIWWLMEGPRTISHDFSKSYCEANLQLVIHNSEAHKILVRVVTFDVIPEKTVHPHDSTSAQGGWYDVSLESDVKAISSSKSTHQEKRSSKSIPPYVWCSLSCAQIELQPDSCARVPLKVCIFAPGTYNFSNYELQWKVHLSEGPHVGENENRLSGGGLGYPFYVTVLQGV

SEQ ID NO: 53253 - protein, 393 aa, Zea Mays
MLACIAFSCPNLQSLDISMANSAVNRITGDELSRFVSEKRSLSVLKLDGCSSLGFLNISSSSLSTLWMSGLCSLTKAVMNCPNLTELSLDFPKQNNDSTDLAALIDSLGRTCPNLRNMHVSSIRLCNEAVFALESANLRGLCMLSLVLGSKITDAAVASIVRSYSSLELLDLSGSGITDNGLGMISKAFPDTLTRLLLALCPNITSSGVQVAAAQLPLLRLMDCGNSICANPQPEAGRSYFGDLTGGIKFCSKLPVQKKQQQQQAACQKLIIKHGALKKLSLWGCSAIDALYVNCPELVDLNLNACTNLHPERLLIQCPKLKDVHVSGCRDMLIGAVRNQVLNEFAAAEPRLPCKRLADGSKRVHVPHFMIEQLEEQEKWGGPRKSQCTVHLT

SEQ ID NO: 53254 - protein, 182 aa, Zea Mays
MKGTRVKKGITTKLSVSWAPDVYDPPITSDSHTVKGHHTSSTKGNYKYKTSKSSSTTRRKKDKKHSRHSSSNGGGSKRDKKHSYRSSASSSRAITSGSQYCDAYSGGGINSRTVPESAKISPLVVAENVTPQEMVPVLKTLEPIKCTTSCGKEKPFALLSRQFSPARYKGMFTFWNQNQLAS

SEQ ID NO: 53255 - protein, 302 aa, Zea Mays
MENPNSLVIWEAQFGDFSNGAQVIFDQFLSSGESKWLRQTGLVVCLPHGYDGQGPEHSSARLERFLQMSDDNPYVIPEMDPTLRKQIQQCNWQVVNVTTPANYFHVLRRQIHRDFRKPLIVMSPKNLLRHKDCKSNLSEFDDLAGHPGFDKQGTRFKRLIKDQNNHKDLEEGINRLVLCSGKVYYELDEERRKTERTDVAICRVEQLCPFPYDLIQRELKRYPNAEIVWCQEEPMNMGAYSYINPRLLTAMKALGRGGIEDIKYVGRAPSAATATGFYSVHVQEQTELVQKALQRDPINYPF

SEQ ID NO: 53256 - protein, 300 aa, Zea Mays
MTMCNKWSRDENLVRAVICAGLYPGVSSVLNKEKSISLKTMEDGQVMLYSSSVNGKETKIPFPWLVFNEKVKVNSVFLRDSTAISDSILLLFGGCIKQGGLDGHLKMLGGYLEFFMNRDLASTYVSLKRELENLIHCKLQNPRMDIQTSEELLSAIRLLVTEDPCSGRFVYGRQEPRSKKAKTMLSPSSLSEAGGNGGDNAKNQLQTYLTRAGHSNPTYKTKQIKSYLFRSTVEFNGMQFVGQPCANKKLAEKDAASEALNWLTGDGGAITDSRGAQDADPMSLLMQPPRRRRHSHRRRN

SEQ ID NO: 53257 - protein, 232 aa, Zea Mays
MAPTAAKDSGSADRWREVQAFEDSKLGVKGLVDSGVKSIPAMFHHPPESLKDVISPPALPSSDDAPAIPVVDLSVARREDLVAQVKHAAGTVGFFWVVNHGVPEELMASMLSGVRQFNEGSLEAKQALYSRDPARNLVTNDRYKSVDHRVPANKSSDTARVSVAAFFNPDEKRTERLYGPIPDPSKPPLYRSVTFPDFIAKFNSIGLDGRVLDHFRLEDDGPTRLAAPAHHV

SEQ ID NO: 53258 - protein, 367 aa, Zea Mays
MVFLVLPILRCVGFEKPSAIQQRGIVPFCKGLDVIQQAQSGTGKTATFCSGILQQLDYGLVECQALVLAPTRELAQQIEKVMRALGDYLGVKVHACVGGTSVREDQRILASGVHVVVGTPGRVFDMLRRQSLRPDNIKMFVLDEADEMLSRGFKDQIYDIFQLLPSKIQVGVFSATMPPEALEITRKFMNKPVRILVKRDELTLEGIKQFYVNVDKEDWKLDTLCDLYETLAITQSVIFVNTRRKVDWLTDKMRSRDHTVSATHGDMDQNTRDIIMREFRSGSSRVLITTDLLARGIDVQQVSLVINYDLPTQPENYLHRIGRSGRFGRKGVAINFVTRDDERMLFDIQKFYNVLIEELPANVADLL

SEQ ID NO: 53259 - protein, 347 aa, Zea Mays
MFVTASQQLAKNLEHHTLNEHGLSKRYVRSLQISEVVNHMKDLIEFSHKNGLGPKESLNSYSKTMAKFQNMHDSRQLMAAANLANNQSNTKLMGTKEEASASATNQTPGVGAIGNNALQHATPLNSYQNMLRSSSANPVLLQQEASSVFKGPTAMHSGIQLEAARSFRGPNQVQFQHPAAIQQQQPMPQQSNFQGFGGVNPQYQHHVLNQLLQEVKNNNHVKAQQLPPDAPKASGGLAPGVAIPNVAAAGEQGQHINSNTRDHNGAVKGAAPAGTGPSNVINNTASMPPGRNNSFKSVSSSPAAATGGIAVNSKVDDSFHQLEDLDLDGLITNELMESGLFGAGQGW

SEQ ID NO: 53260 - protein, 503 aa, Zea Mays
MWEPLIRGSKLQNRISASPPPLEAASLPRGMVTMRCDITTCSSSHVSLLVSGSAQTCFDDQLLESHIKNEIIEKSQLVRALSNSEDKLPSSEPLTSMSTACGASTFEVWMSLPKWAAQVLKHLAPDISYRSLVALGIGCINGTPVASFERRDADRLLFFCTSQCKDLANENGPYFHLPRWSASLTKDRTKLGSESKQNLLGANGVLEDKKHMMEGPSSFSAVKAKLKPATMRPIPHSQKQQMHPFMCLPETSFHETSIVKPSLTVAPTVKHNSVSYAPTTHRKSTSGPSHTPSVIQLNPLPMKKHGCDRLSIQVCSEEDFLKDVMQFLIQRGHNRLVPHGGLAEFPDAVLNAKRLDLYNLYKEVVSRGGFYVGNGINWKGQVFSKMRNHTATNRMTGVGNTLKRHYETYLLEYELAHDDVDGECCLLCHSSAPGDWVNCGLCGEWAHFGCDRRQGLGTFKDYAKTDGLEYICPHCSLANYKKPPLPPKVANGFSNTAYVPRSV

SEQ ID NO: 53261 - protein, 678 aa, Zea Mays
MYRASNFIPDPNQVLLDANPLRSLAPMFPAPMGVNVNQSSTPPLVCVTPVGQFPIGFGAGNLPAFGSFTTFSATTNGVSYTGTSGNGAIDATPISAYKTRSSISLDDDDDEPYSGNQGLASERKARRGRPPGSGRDGSNGKLKRPKPTYKNFVAGKELVFLSSTSDPREFVESVHMTFEALRRRHLQMDETQDASRRADLKAGAIMMASNIRANSGKRVGTVPGVEIGDIFYFRMELCVIGLHAPSMGGIDYMTTKFGKDEDSVAICIVSAGGYENEDDDTDVLVYSGQGGNNRNTEERHDQKLERGNLALERSLHRKNEIRVVRGFKDPFCLTGKIYIYDGLYKIHESWKERTKYGVNCFKYKLLREPGQRDGAALWKMTQRWIDNPATRGRVLLADLSSKAEILPVCLVNEVDHEKGPVHFTYTNQVKYLRPLSSMKKLQGCGCQSVCLPGDASCACGQHNGGDLPFSSSGLLSCRKPIVYECGESCNCSTNCRNRVTQKGSRLHFEVFRTTNRGWGLRCWEPIRAGSFICEYAGEVIDELKFNLNDSEDDYIFQTVCPGEKTLKWNYGPELIGEVSTYVSPDEFEPLPVKISAKNMGNVSRFMNHSCSPNVFWQPVQYDHGDDGHPHIMFFALKHIPPMTELTYDYGVAGAESSGSGSRRTKNCVCGSQNCRGLF

SEQ ID NO: 53262 - protein, 412 aa, Zea Mays
MIGGSAYGGQKAICCSSDLAKLGACKEGSVIYRPSQVNPGWPKLFVASFEGSDLIATLPSRTIQITKTGMYNMYFIHCDPSLASLEIEGKTIWKNPTGYLPGRMAPLKNFFGLMSFAFVVLGIYWFYQYMKSWKEVLPLQNCITLVITLGMLEMALWYFEYAEFNETGVRPKGITFWAVTFGTVKRTAAEVIVLIVSMGYGVVAPTLGGLTSKVVMLGGTFFLATEILELVENLGAVNDLSGKARLFLVYPVAILDAAFVVWIFISLAKTIGKLQARRLMAKLDIYRKFATALIVSVLVSVGWIGYEIYSKSTDVFNERWQHAWIIPAFWHVLSFLLLCVICYLWAPSQNSMRFSYDASEFFDRKDNLSLIRPATSASKNGWSLSSAPEAKATKDVNTVADFEGDDEENKRE

SEQ ID NO: 53263 - protein, 232 aa, Zea Mays
MPSVFLAYLMKRICGVNAKKKHLSWGNDGKKRGGGFTKLCSLSPALQEFVGASELARTEVVKKLWAYIRENNLQDQNNRRKILPDERLKKIFNVNSIDMFQMNKALTKHIWPLNSEGPVSPDRSTPKEKPQKKDRNEGKKQKGGSSGAGSGLLVPLQLSDDLMKFIGTGESMLSRSDVVKRMWDYIKENNLQDPSDRRKIICDEKLKDLLGVETFTGFTVSKLLAPHFTKTK

SEQ ID NO: 53264 - protein, 194 aa, Zea Mays
MTHYVLLLCSFKEQLQQHVRVHAMEAVMGCWELEQSLQSLTGASPGEGTGGTMSDDEDNQVDSEANMFDGNDGSDGMGFGPLILTEGERSLVERVRKELKNELKQGYKEKLVDIREEIMRKRRAGKLPGDTASVLKAWWQAHSKWPYPTEDDKARLVQETGLQLKQINNWFINQRKRNWHSNPTSSAEKTKKKR

SEQ ID NO: 53265 - protein, 57 aa, Zea Mays
MIEGQTFTIEPIISMGSIECDMWDDGWTAVTTDGSLAAQFEHTILITRTGAEILTKC

SEQ ID NO: 53266 - protein, 79 aa, Zea Mays
MAGSAADAEQEQKRAAAAAYDYEGDARWAEYWSNVLVPPNLASRPDVVDHLKRKFYQRYIIAGTCLVASGCSCSEWLSV

SEQ ID NO: 53267 - protein, 190 aa, Zea Mays
MSGGIARGRLAEERKAWRKNHPHGFVAKPESLPDGTVNLMIWQCTIPGKQGTDWEGGYFPLTLHFSEDYPSKPPKCKFPQGFFHPNVYPSGTVCLSILNEDSGWRPAITVKQILVGIQDLLDQPNPADPAQTDGYHLFIQNTRGALDCRRSSILHWSESFALLGGSMLHIRIVVASVLNERPNVTWCLEK

SEQ ID NO: 53268 - protein, 213 aa, Zea Mays
MAPSRIHVTCALVYGPSPTGRIHQGVCSTWMKNTIPLEYSEECSWAPIFVRQSNFKLPADPSTPIIMIGPGTGLAPFRGFLQERLALKQSGAELGTSILFFGCRNRNMDYIYEDELQTFLEEGALSELIVAFSREGPTKEYVQHKMVEKATEIWNIISHGGYLYVCGDAKGMARDVHRMLHTVVQEQGSLDSSKTESYVKSLQMEGRYLRDVW

SEQ ID NO: 53269 - protein, 123 aa, Zea Mays
MFDLCLNALAVHGHLIVIGMISQYQGEDGWKPKNYTGLCEKILAKSQTVAGFFLVQYAHLWQDHLNKLFDLYASGKLKVSLDPKQFLGVASVVDAVEYLHSGKSVGKVVVCIDPSYGQIVAKL

SEQ ID NO: 53270 - protein, 57 aa, Zea Mays
MSATLGVRMQRCSPRHPKPTTQLGMGGPQFVALDPSTCTTIDIHTSLLPPLRLQAIA

SEQ ID NO: 53271 - protein, 269 aa, Zea Mays
MYMNKKEVVDALSHHSRIEPCITELVWQQLEQQNPLFFKAYDMRLMLKNQIMVFNRLLQDQFEIMNKEFSSGIPSMSLPNDSNSNLLKQDSCFLPETAPGNAMPDGIMHNGSSSGIINDTPSGDQLLNASKDLHGLHSQIDASTSLQSDQNATAVLYGVDNETSATIKTESCYSSNADFAFCGNTFLESCQSIGDASGGGSFSSSELNGQPLNDSILDMESSSFSFLNQMPQSFMFSDLADDFNQNAEITPFLTPETNFSDSTGGDHTG

SEQ ID NO: 53272 - protein, 290 aa, Zea Mays
MTTLRKLLLTGNPMRTLRSSLVSGPTTTLLKYLRSRLSSDEEASGSRSTPTKDDQIAAARRLSLSSKELDLSGLGVTSVPAAAWETSDVVKLDLSKNSIEDLPNELSLCSSLQSLVLSNNKIKRWPHTVVSSLPCLSSLKLDNNPLVEISSTDLVPLSKLEVLDLSGNASALPEPSAVSALPQLQELYLRRMKLHEFPNGLLGLKLLRILDLSQNHLTTVPEGIKNFTALIELDLSDNNITALPAELGLLEANLQVLKLDGNPLRSIRRTLLERGTKAVLKYLKEKLPSE

SEQ ID NO: 53273 - protein, 345 aa, Zea Mays
MATPTIDGASDVLSYLGSKDTTGRNIAQKVVVTDLREEVVVYIKGSPFVLRELDQPVDTLKHVGISGPMVENIETRLKEDILSEVKQLGGRLLLHQEEFNAATNQCSVVGYWEHIDLEDVMTPAEVYSTLRDKGYCIEYKRIPLTREREALAADVDAIQSSIDESARYYLFISHTGYGGVAYAMAITCLGLSADAKFVMEETAETHFVSTSLAKNVSIKTKTDIALKQGDYRDILNLTRVLVHGPKSKEEVDTVIDRCSGAGHLREDIMHYRKALQDCSHDDDDDCDEEHSYLTDMGTKALRRYFFLITFRSYLYSTTSCKTTFTSWMKARPELGHLCDNLKLDK

SEQ ID NO: 53274 - protein, 357 aa, Zea Mays
MPGIRVTDIWTTPVRKDSRKPEKPSSPVSERRSTHLSVPSSRHTPLHSPPEVPILSSNPIALSSLAASRGGEDELAARMLWVDKYRPKTLDKVTVHDQVAQNLRKFVSEQDCPHLLFYGPSGSGKKTLILALIKQMFGAGAEKVKLENKTWKIDTGTRTFEIELAMLSSAHHVEMTPSDAGFQDRYVVQEVIKEMAKNRPIDAKGKRAFKVLVLNEVDKLSREAQHSLRRTMEKYSSSCRLILCCNSSSKVTEAVRSRCLNVRVNAPSEDQIVQVLEFIGKKENLHLPAGFAARIAAQSNRNLRRAILFFETCKVQQYPFTSNQVAPPLDWEQYVSEIATDILTEQSPKRFSHAYVC

SEQ ID NO: 53275 - protein, 108 aa, Zea Mays
MAASSALRLILGSSSASRRQILSEMGYKFTLISADIDEKAIRKENPEELVVALAHAKADAILEKMQNNGMMKEILDSQDTTLMITADQVYFASPILLNIMIHSSPAFS

SEQ ID NO: 53276 - protein, 299 aa, Zea Mays
MGTPPPFQESGHCDVCRCTFNTFRRRHHCRSCGRTLCHEHSSYYMALPQYGIYTDVRVCYGCFNKSSSQGHADNPVSAGSISGAADSFSGLSLGKEDDSSPMKNSTVQSTAALIECKCGMPLCICEAPKPEPSPTPVKNINTVPPTTQSNPRPKKPANTQQKASATSSSNSSPFLNIGLMNNDSNDKGIVDYEVSGEGLREAIKGGDVKGVKKLLTQGVDSNYCDKQGFTLLHLAALFNQTEIALILMDHGANVESKNGQGETPLDCAPAMLQYKMRQRVEELAASASKGPLGRGLADE

SEQ ID NO: 53277 - protein, 1022 aa, Zea Mays
MVSQAPVAGASLAASLCKKSNRVARVLAYALLEWILIALLSWMGRSELGERDLACACCGVALESGFYSPPFLLTTSAPRGSDCGLKQEEEAAMPNGDVVVVSKEGPVIELFDDKPFVEDDSIGVLAAEVVANVERPVALESIDSLVVTMGTVSSQSGGEGKEAVDHGVVRQNNVDMENTVSSNEEKIMPSDDKVDVVDRLIDEQIVAVVLVPACIEATLDGGINADKTVDAFADHQSLEDDSGLEVKDQKISFEDEVFEGEQAEQVTQQQELCAMPTDPSDHEFVERLDRSTELEHFPLAESKHKMNSMPVEASKHVAVTQIEGKQVQQAEVNQELDSIPKCSREHADEELQGERTAQAGLEQECDSVPIDYGEHGSLTSYAHTDDEQDEAMQKVTSVTRIEEKQVQQAEVNQELDSIPKCSREHADEELQGERTAQAGLEQECDSVPIDSGEHGCLTSYAHTDDEQDEAKQKVTSVTRIEEMQVQQAEVNQELDSIPKRSREHADQELEVERTAQAGLEQECDSVPIDSEEHGCLFSYAHTDDEQDEVKQKVTSETADVLHYAADTFNVNTNSWKEDIEEDSTEAALTAIHQICYEPLTSIVKFSLDHSVSEEDREPDTPTHIEGICDSQELLDSKAVVSDAKSVDSSVATLSTDLESTELVSVDQLKSALASTRKSLNTLYSELENERNAAAIAADETMAMINRLQEQKAAMQMEAIQYQRLMEEQSEYDQEALQRLNELVVKREKEKQDLERELELYRHKVHLYEVKVRKLSRHKADDQNGSSSTSSSAEDSDDLSQSFYEGDESSHGINGSNGSIPTDVVLQETARHLVTLDGSLADFEEERLSILEQLKVLEDKLFDLDDEESDNMKHFSEENHLSGASNGFSDDDSCFKLHDKRKNVTYRGKKLLPLFDDATVEAGNVPQGNDAQHSTEVTLDLAREQHKLAIANEIDQVHERLHALEADREYIKQCVRTLKKGGKGFDLLQEILQHLRDLRRIEQRASARNSGELSPHYLHHHTD

SEQ ID NO: 53278 - protein, 425 aa, Zea Mays
MEADSGKLFVGGISWETDEDRLREYFGRFGDVTEAVIMRDRNTGRARGFGFVVFADSGIAERVTMEKHMIDGRMVEAKKAVPRDDQSIASKNNSSIGSPGPGRTRKIFVGGLASNVTEVEFRRYFEQFGVITDVVVMYDHNTQRPRGFGFITYDSEDAVDKALHKNFHELNGKMVEVKRAVPKEQSPGPIARARNGFSSFGPGYGMGMSVEGGMRGYFGASSGFVNSSNGRQIGSYFNGSSNRLGSPIGYVGLNDDSGSILSSMSRNVWGNGNLNYIGNHTNMNSFPQPGSGGGISGDEISWGSLTSAHGMSNISSLGSGNLGRGTGDNNFGLPSGNYVRSNSTGTIGEPFSASANAYESNNPGAYGSSSIYGDSTWRFNSSEVDMPPFGHDLGNDDPDIKSEISASYMGNYTVNNNQTSRGITS

SEQ ID NO: 53279 - protein, 413 aa, Zea Mays
MSSSSASSSAAAHHQQHYRRQTGGSGLVPLAALIKEEARTERQSIAGGESRISARDDDAAGVGSSGVGGEAAEAAVESRLERPLLRYGCAAQCKKGEDFFLLRTDCLRPAISVSSSASPHPIFAVFAILDGHNGNAAAIYTRDNLLNHVLSAMPRGLSREEWLHMLPRALVAGFVKTDKEFQSKGQTSGTTATFVIIDGWTITVASVGDSRCILDAQGGAVSLLTVDHRLEENVEERERVTASGGEVGRLSVVGGAEIGPLRCWPGGLCLSRSIGDIDVGEFIVPVPYVKQVKLSNAGGRLIIASDGIWDALSSEAAAKSCRGLPAELAAKQVVKEALRTRGLKDDTTCIVVDIIPPGQTIRPLSPPKKTSKLKSFIFRKKAKDPSQKLTKQHSAVGIVEEIFEEGSAMLSES

SEQ ID NO: 53280 - protein, 1535 aa, Zea Mays
MEMIGSGSRSCLCHSSFLPGFFTGGEHAEKLSHKRTERSHPLPFLVKEEELSGDELEEFIKNRYSNRVKYAADRSYSREDDDIFPMDCALKEPTIWRVKCMVGRERQMAFCFMQKFVDLRKIGTKVPIITAFALDHIRGFVFVEAEKAGYVTEACKGFCSVYTSRITSVPATEVPSLLSSRTKPFEISRGTWIRMKNGNYKGDLAQVVNMDSGRKKVMIKIIPRVDLHAISKKFGGAVSLKEAAVPAPRLISSQELEFFRPHIEIKRDRQTGEVFEVLDGLMFKDGFLYKKVALSSLIYWGIQPTETELLKFSSSPSNRASADDLDWLSGMYGSKKRNLPAERDMKSSSSKIKSSKAPDLKGSTSTENYDDNDEFNLHDLVLYGRKDFGVIIAVEKDGFRILKGGPEGSAVTVRKQDIKKGCVDKMFTAVDHHKKTISINDTVNVVEGPFQGKQGLVKHLYLGILFIFNESESENCGFFCAQSGSCEKIRKGLGSSTTENSDFPTPMFSEPAYEQNEHRNTEGPYRSTREQLFSIGQMLRIRKGPLKGYLCRVVRIFRNDVTVKLDSLLKIVTVQADLLSVPANRGDNLSGAPASKFGSQDTPFFGSEAGKTSWDRGLPSFGSDSWQPFSSSTLPVQNAGAESEADPWCKKTSAEDDSDPWGKKTDGDSDPWGKEAVSAADGDCNPWGKETVPSAAGDSDPWGKKVFSADGDSDPWGKKAISSAVEVWNTSATQKEGSSGNAWDKQAGVGGSDAAGSSWDRAVVNKESEKSDNWGEACRVMDMGTGADTDPWGSKVKAVDMEGPNSWEKATMPPDNKLEDVSQGWNQHKGNSTEDQAKDNVSKDEDNNRAWSSSLPVTEDGTWGKSKDDNCDGAGGAGGWDASVANWNKSSVLADAQDEGWGKGNWSSAKSEETNNEIGNWNKAGASDQAGPKSFGGDGWNKGGDQNSSWNSPGNFGGGRGFGRGRGRVRGRESGDFNGRNDQGNWKNSWGGDNAEKSSWRSDNQVDNEAGDSGGYRGRGRGGRGQYGGRGRGRDNGWRNGDGPKWGGGDNWNATNPPSNQPWSSSGGTKSYGQNQPSTWNNPEDNKPSVGEQGDPWASKVSSTEGKGQQNDSWSSKMTSRGAEDTSGGWDSKEKGSSCNGGGEGLQNDPWANKIGSNEGKEQEADPWASKMSSAVGADDKNGTWDTTTKGTLSNEKADDPWNSKRGNDDDSKKTDAWGAGSSGGNQESSWSKPIFSLGDQEPTWNNPRFGDDDNVNNRGGFGRGNQGRGRGRSFGGGGGGSSWNESNKNGESGGGRSGEPWNRRGFDGGRGRGRFGRGDRNQGNNLGSGDGGSWGSGRGNGGGRGGYRNWNDNNERRPFGQGGGWSQSSDWNANKGSGEGNQAFSKSKPSWDAQNASGGDDQAGKKSDTDNSWSQNRSSPSILGQPSGDANNKSSAWDGAPNGGAGRGGSGSWGKSDEDGWNSSSGGSAREKPSWGGGAEAPPRKEDDGAWGKGGEGSRSLGGGGEGGSSSSWDKPADGAWSGNNKGGSGSGGW

SEQ ID NO: 53281 - protein, 218 aa, Zea Mays
MNIGSRPSKRKPSGGIDSLRAIPWIFAWTQTRFHLPVWLGFGAAFKNVLQKDIRNLHMLQEMYNEWPFFRVTIDLVEMVFAKGNPGIAALYDKLLVSEELHPLGEKLRANYEETQKLLLQVAGHRDLLEGDLYLKQRLRLRDAYITTLNVCQAYTLKRIRDPDYHVALRPHLSKEIMDSTKAAAELVKLNPGSEYAPGLEDTLILTMKGIAAGLQNTG

SEQ ID NO: 53282 - protein, 353 aa, Zea Mays
MCFNLYVGPDAHGESMDTGDDDVAIQILYCGICHSDLHTIKNEWKNANYPVVPGHEIAGLITEVGKNVKRFNVGDKVGVGCMVNTCQSCESCEGGHENYCSKIIFTYNSHDRDGTVTYGGYSDMVVVNERFVIRFPDGMPLDRGAPLLCAGITVYNPMKHHGLNEAGKHIGVVGLGGLGHVAVKFAKAFGMRVTVISTSPGKREEAMETLGADAFVVSGDANQMKAAKGTMDGIMNTASASMSMYAYLALLKPQGKMILLGLPEKPLQISAFSLVTGGKTLAGSCMGSIRDTQEMMDFAAKHGLAADIELIGTEEVNEAMERLAKGEVRYRFVIDIGNTLNAASLGSSPVPAL

SEQ ID NO: 53283 - protein, 200 aa, Zea Mays
MFDKVELKLRLYGSKSVVKYPRCSLIRHSTYADAEEDQSMFMALSSIWMLLLLFGTSAVLVPTLYTLSIAFGDVFGARHLLYGEKSLDAVTRVNDLALVGLGYLVGYPIASASVGALQGLLSNNLVALKGSCPNCGEQVFAFVKIEKTVRAPHRAECHVCQCPLEYRTKIEKSSSGPRRSWVYGRVYLVKQGHPETEMDK

SEQ ID NO: 53284 - protein, 76 aa, Zea Mays
MRLLGKFVENECEKIDRLMELYTRYSDRVKEETERLDSLDLEDLEMDDDERYNRKLEAGLYTLQEFPDESKSRITS

SEQ ID NO: 53285 - protein, 595 aa, Zea Mays
MHRSLSSSTDLYGNCQSLEKQLPKVGSFSSKQMKGLSRSMPLPPEELRCPISLQLIYDPVVITSGQTYERACIEKWFDSGNTTCPKTRKQLSQLLRTPNYCIKGLIASWCEQNGVPAPSGPPESPELDHMRISCLESSTCVGTDGANTVLFEETAAKDDAKSDMEIFSRQNSGEATSKLRVDEVSPENCFTLQSSKEAAPETCGVVDSLDKGKGSHQDSKDDVPVSERCEQWLHVLNKNDAESMSERLKLVEQIRILLKNDDELRDYAGANGITEPLIHFLKMAIYRGDVRSQEVATMALFNFAVNNDRNKRLLLSAGVIPLIEQMIQERETCEAAIAMYLNLSCIPEAQAIIGSSVAIPFLVNGLGEGGSRSDTCRLDALLTLYNLSLHAPNIPSLMASGIIEGLRGVLTPSSPWTDKALAVLLNLAMTRRGKEEIAASAAMVGAIVLILDNGEPGEKEKAVSCLYVICSGDDGSSQTVLQEGVIPALVSVTANGTARARDKAQRLLRLFREQRQRELELEEMQPRVELHEVASQAAARQEEEEEEEEEMALAVTPAAAASKPRGGGKKPRLRRSGSRRFTKAFTCLLKKWSLR

SEQ ID NO: 53286 - protein, 297 aa, Zea Mays
MIGRILGGIATSLLFSAFESWLVAEHNKRGFDPQWLSITFSKAIFLGNGLIAIVSGLFANLLAENLGFGPVAPFDAAACFLAIGMAVIMSSWSENYGDPSDSKDLMAQFKVAAKAIASDEKIALLGAIQSLFEGSMYTFVFLWTPALSPNEEDIPHGFIFATFMLSSMLGSSVASRLLARKLKVEGYMQIVFSISAVTLVLPVVTNILVPTSSVKGGSISIGGSLQLLGFCTFEACVGIFWPSIMKMRSQYIPEEARSTIMNFFRIPLNLFVCVVLYNVRSHSLVQWQEYTEISAHE

SEQ ID NO: 53287 - protein, 628 aa, Zea Mays
MGRGADEVVKVVDSEDGEGEEEEAEAAAAEGSSKETPMLPRMPVRVLLAEGDDSTRHVISALLRKCGYRASDGVKAWDILKEKSFNIDLVLTEVELPLMSGFLLLSTIMEHDASKNIPVIMMSSHDSVSMVFKCMLKGASDFLVKPLRKNELRNLWQHVWRKQLANGGPDVQHIQEENLAERMEQKTGVTKDDNLNSDGPCKNRECSEQESDAQSSCTRSELEAESKQTNNILEYMQSTERHLSIRSHKDLELNGETKTRTKGNNLIPTREDDLLPKKRTCLNDNNSERTSRDMELVHIMDNQQKHDTQRDVDTMRTTSRRNDEKNSIPAHQLELSLRRTDYGKLENHEKNDRRTLNHSTSSAFYLYNCRTASSLGNAGDGQLCSTSETLVDVENRNGDLAALSEDTTETNRPPIRVVPFPVPVQCFTFDGQPFWNGTPVASPFYPQSAPPIWNSKTPTWQESTPQATSLPQKSQQKEPVEMDAKPVENAEEQFVVGPPSASGKQLHVEIPKDDLRHISPVTGESGISTVLDSTRNTLSSSGCDSTSNQITAPTEPSSNVYRGVPETARAEGLRHLSQREAALNKFRLKRKDRCFEKKVRYQSRKLLAEQRPRVKGQFVRQDHSIQGS

SEQ ID NO: 53288 - protein, 54 aa, Zea Mays
MKDYLEACTKLSYSKARSILLQTKFMLTEAIHPKMLYPLTNKELLQLRDMVQTI

SEQ ID NO: 53289 - protein, 225 aa, Zea Mays
MKGVGGGAASPGDYVYFKSVVPLHKISIGSKLWRYYDFGPKVVPPLVCIPGIAGTADVYYKQIMSLCMKGYRVISIDVPQVWNHHEWIHSFEKFLDSMNIHHVHIYGTSLGGFLAQIFAEHRPRRVKSLVLSNTFLETHKFAAAMPWSPVVNWTPSFLLKRYLLTGIRDGPHEPFIADSVDFVVGQVETLSRDDLSSRLMLNVNVASVGSLMLPDSLITIMDTND

SEQ ID NO: 53290 - protein, 206 aa, Zea Mays
MGRAASHITLECALQTHPNAALIGEEVAAKKETLKNVTNYITDIICKRADLGYNYGVILIPEGLIDFIPEVQKLIAELNEILAHDVVDEAGAWKSKLQAESRELFEFLPKTIQEQLMLERDPHGNVQVAKIETEKMLISMVETELEKRKAEGRYSAHFRGQAHFFGYEGRCGLPTNFDSNYCYALGYGAGALLQSGKTGLISSLCP

SEQ ID NO: 53291 - protein, 191 aa, Zea Mays
MSPSSRPPAVENDNQHEARAMAQHGNGNATSVERLLPKLPRADYFTEPSIEELAAKERAEAGYCGRVRDFVVGRHGYGSIIFLGETDVRCLDLESIVEFNNREVVVYKDDSKKPPVGEGLNKAAEVTLLNIKCVNKKTGEEYCEGTRVERYREMLMKKAEEQGAEFVSFDAAKGEWKFRVKHFSAYGLPCC

SEQ ID NO: 53292 - protein, 628 aa, Zea Mays
MATMLRRCMRDLRPLRSLARVPRPIFGESPTFLKCRSNSTKASPKSSTQNAAPGPQGQPSQSGSNVSKLALGTLVVGAAAIGAHQLGYIDLQFKDKTLPFSLKKEDVGKVVYEDLKIPSEQKVDQTQNMSGPNTEIVQENNNETHTSKDFRNGGVGAPELPINGDQLVPAEEKKSETLAHETNPVPDEPGSDTEMPSEDSPAVDIRTVAIDATESSEVPHEQQTDKIDGTVTPVQSTPTTVSTYDHPTDPDSPKDLTIAGAVEQKSLAETYLLQDEPGLSKDATIKEKRSDEVVREKNSEDGKIVLDIIEAIHAAEKKQADVDAYMYSEERRKLKEKYEKELKDTRARELMYAEEAAILDKELKKEKLKNAAAIKELQEKAEQTLQDELQRKGEETIQQIEKAQEIAKAELAAAVAKEKASQIEQIAEANLNIDALCMAFYARSEEARQSHSVHKLALGTLALEHALSSGSPIRSEVGLLRKSVEGIDKDSLLELAFSSLPEDVLDYGSDTRMGLKQQFNSLKETIRHLSLLPAGGGGILAHAVARVASSIKIKGDNSGDGIESLINKVESMIVNGDLSTAADALEQGLHGTEAEEIATEWVKQARKRALAEQTLALLRACASSTTFS

SEQ ID NO: 53293 - protein, 686 aa, Zea Mays
MEERGERWCHDIGREQAANKPLLKTVFQVMMRLFSPRKTTLLFVIRDKSRTPLENLEPILREDIQKIWDAVPKPHAHKETPISEFFDVQVVALSSYEEKEELFKQQVSDLRDRFQHSIAPGGLAGDRRGVVPASGFSFSSQQFWKVIKENKDLDLPAHKVMVATVRCEEIGNEKVTSFIADEEWQQFEEAVQHDFVTGFGKKLSSLLDRCLSEYDMEAIYFDEGVRSSKRQQLESKLLQLVNPAYQSLLGHLHTRTLEAFKEYFGKALEKEGFAVAACNCTETFLEKFDRGSEDAAIQQVNWDTSKVRDKLRRDIEAHVASVRAAKLSELCAKYEAQLTKALVEPVESLLDSASEDTWPAIRKLLQRETKTAVLGLESAVSAFELDEATEKELLAKLEKHGRSVVESKAKEEAGRVLIRMKDRFSTLFSRDADSMPRVWTGKEDIKAITKTARSASVKLLSTMAAIRLEEDGDNIENTLSLALVDTSRHGTTDRSIQLSDPLASSSWERVAEEKTLITPVQCKNLWRQFKAETEYTVTQAIAAQEANKRNNNWLPPPWALAAMAILGFNEFMTLLRNPLYLFAIFVIYLVGKALWVQSEIGREFQHGFLPAILSLSTKFVPTVMNILKRLADAGQEPAAAPERQREMELQPKSTRNGSLYSNVTSAGSSSVTTSEIGPEYSSPVVQ

SEQ ID NO: 53294 - protein, 344 aa, Zea Mays
MKSDAIFGTDRSAKVSFYRTPTKSSKRLIQAKIVYLEHVPLSWDENKVKEYCEEYGEILKADVFQISKNMENETISFVEFSSRKGALACVTGINKANIVDGSFKLCAYLAWPKSASKVNSAAPSNAATATEKDKTHTEKILVDIDLQHKFQKGDKSKLTSQTKEAIMKKKKSSKLPNDNDTKLTSQGAAEVPQTSKSSEGKRKVGKNKHASVYQKPLKKAINNRNVDESQLTHRSAAVLQTSNTSKGKRKASENRSLYLNEKALKKARGNSNLGGSSRSKSYASDLEPHAGFISPAIRDNGSDAYNRQRTARYDIHPIDVHPYARVVLEIMSGKVGNQPVNCRP

SEQ ID NO: 53295 - protein, 176 aa, Zea Mays
MAIATTTSSSSLTIRLLHPNPNTNPAPRSLQLLRRCARAAVAGGAVPYGAAPRRGIWSIRDDLVVPRSPYFPVDSAAGQERGPSPMVMERFQSVVSQLFQHRIIRCGGPVEDDMANIIVAQLLYLDAIDPTKPLDKINVDTDRDYFMSAKEAKEYGLIDGVIMNPLKALQPLPASS

SEQ ID NO: 53296 - protein, 255 aa, Zea Mays
MDVGAELREAHRLTGHADRVWALAWNPAPGPGSSPVLASCSGDKTVRIWKRAPDGAWQCSDVLEDTHNRTVRSCAWSPNGKLLATASFDATTAVWEYNGADFECVATLEGHDNEVKSVSWSPSGSLLATCSRDKMVWIWEVLPGNEFECVSVLPGHTQDVKMVQWHPILDILVSVSYDNSIRVWAGDGDDEWHCVQTLTEANNCGHSSTVWALSFNLKGDRMVTCSDDQTLKIWDTSADLSQPKTGEGHDSWTAQ

SEQ ID NO: 53297 - protein, 208 aa, Zea Mays
MSQGQWEGCPKSEIYTPEMVNLMESTQPDFSAPSGESLRQVQFRMMEFLNRTVLRLPEKVAMGDTLSQQNELKGFSRQSSSNSVQDGPPWDSLYRLNRHSLQRKKSGKSRLQFVTSGDNEAEDDFSPKEVNQRHLLHEGSVGSSAATSIAIFSHVTPIRCLIAGLLDCNPIMSKRICIDDSSVTVLEHSLKTGWQIKRLNDTAHLRLL

SEQ ID NO: 53298 - protein, 261 aa, Zea Mays
MAPNRMSPVSEKLKLLSGSCYLPHPAKEATGGEDAHFISIDEHVIGVADGVGGWADLGVDAGLYAKELMRNSMSAIKDEPEGTIDPTRVLEKAYISTKARGSSTACIITLKDQGIHAVNLGDSGFVVVRDGRTVLRSPSQQHDFNFTYQLESGGGSDLPSSAQVFHFPVAPGDVIVAGTDGLFDNLYNNEISGVIVEALRVGLEPQIAAQKIAALARQRATDKNRQSPFASAAQEAGYRYYGGKLDDITVVVSYVKSAGAP

SEQ ID NO: 53299 - protein, 503 aa, Zea Mays
MPAAASRGISVEVLSTTGTSPDEVEGETLIFFCVTGFQTDFSASVISTTSASIPQPPLLRIALIGPQTSDQAWPRSPPGVIREIPARRDPRDPCPARSMPACWVWGRSTGVRCRAPSPGVGRYSSGEALGPPQSSCVQRGEAVANGTHRLPSQKTTRPSATPRVRPGVGPSTRAHASTNGSMCSSGAASADRSMDSRSFRSTAAASGTSDLSVAPVVAARRSSSPEMSELKPRTAFHQSPIAACVAGVLQTRDARSRGQRGGGWRGWGEDPGDDAVSGRGGRRSEGERRRWRRSEGRGGGDCVGARRDFRTQGRGEISGRRGAEQRQNRAPHRRRSRSSGSTTGRSRTTCRRRRRRPASSCRRPSPSSACTSHSRTWSRRSRAPTSPSCWAYPTAPSRTSRPPRPPPRPGPPPTSPPRFPSPPSPSETSCSTPATPRSRPSSSPPCRTCSPRSRLARPPRSPPCTPWPCCRRRTRRPPARSTRTSPAAWTRCWTSCTRTARRS

SEQ ID NO: 53300 - protein, 307 aa, Zea Mays
MAPEVLKRNYGPEIDIWSAGVILYILLCGVPPFWAETEQGVAQAILRGNIDFKREPWPNVSDNAKDLVRQMLQPDPKLRLTAKQVLEHPWLQNAKKAPNVPLGDIVKSRLKQFSRMNRFKRKALRVIADHLSAEEVEDIKDMFKVMDTDNDGIVSYEELKSGIAKFGSHLAESEVQMLIEAVDTNGRGALDYGEFLAVSLHLQRMANDEHLRRAFLFFDKDGNGFIEPEELQEALMEDGGADTMDVVNDILQEVDTDKDGKISYEEFVAMMKTGTDWRKASRHYSRGRFNSLSIKLIKDGSVKLGSE

SEQ ID NO: 53301 - protein, 259 aa, Zea Mays
MPETGELSQQNIKDRYYGVNDPVALKLLSKAGEMPSLTPPDDETIRTLYIGGLDSRITEQDLRDQFYAHGEIESIRMVLQRAIAFVTYTTREGAEKAAEELANKLVIKGVRLKLMWGKPQAPKPEEDESGRLGQVSHGGLLPRAVISQQQSGDQPQPPGMEGQQQQAAPASYYFNIPAPPATERTVYPSMDPQRMGAIVKPHDSEGKPGPQQAGQAQASSNPAQGGGYPAPPPYYHGGGQQQPPDGPPAQQQPQQPIQN

SEQ ID NO: 53302 - protein, 55 aa, Zea Mays
MAPTSSLTMGGRIHSCLGIEIGSRACSATNLYTHDEATGSEQSWSRIPHCAPVVP

SEQ ID NO: 53303 - protein, 111 aa, Zea Mays
MIIHEDPRFQPDLSSSYSPVKCNVDCTCDSDKKQCTYERQYAEMSSSSGVLGEDIVSFGRESELKPQHAIFGCENSETGDLFSQHADGIMGLGRGQLSIMDQLVEKGVISD

SEQ ID NO: 53304 - protein, 335 aa, Zea Mays
MYIRQKTSNVRSRSPGQDLPALVVALGPLPEDDGGAVVDAAVVLVAVEGVHVEVDVVHHAHAAEAVPDVAALRPQHRLVNVLGVVGHKAYRVALSQRVLDGFAGDLVHQRERWVPFLVLDASAVPHVLHPYLELVPGVGWRQAHGAVPDGEAVPFAGLAVDADGLFRRQSARQVAVPVPRRVAPSRWRTVPAVARLLHRRRRSVRARRVGLVPPGQHLPALVGALAPLPEHHGGAVVHAAVVLVAVEGVEVEVDVVDHADAAEALAHVVALRPQHRLVQVLRVVGHQLHLHTYACVCVYLWACNATRTYGEKSREQIETAAPAADLRDGTGRASA

SEQ ID NO: 53305 - protein, 621 aa, Zea Mays
MAYGDRVTTFEDSEKESEYGYVRKVSGPVVVADGMGGAAMYELVRVGHDNLIGEIIRLEGDSATIQVYEETAGLMVNDPVLRTRKPLSVELGPGILGNIFDGIQRPLKTIAIKSGDVYIPRGVSVPALDKDALWEFQPKKLGVGDVITGGDLYATVFENTLMQHHVALPPGSMGKISYIAPAGQYNLQDTVLELEFQGIKKNFTMLQTWPVRSPRPVASKLAADTPLLTGQRVLDALFPSVLGGTCAIPGAFGCGKTVISQALSKYSNSEAVVYVGCGERGNEMAEVLMDFPQLTMTLPDGREESVMKRTTLVANTSNMPVAAREASIYTGITIAEYFRDMGYNVSMMADSTSRWAEALREISGRLAEMPADSGYPAYLAARLASFYERAGKVKCLGSPDRTGSVTIVGAVSPPGGDFSDPVTSATLSIVQVFWGLDKKLAQRKHFPSVNWLISYSKYSKALESFYEKFDPDFIDIRTKAREVLQREDDLNEIVQLVGKDALAESDKITLETAKLLREDYLAQNAFTPYDKFCPFYKSVWMMRNIIHFNTLANQAVERAAGTDGQKITYGVIKHRLGDLFYRLVSQKFEDPAEGEEALVGKFKKLYDDLTTGFRNLEDEAR

SEQ ID NO: 53306 - protein, 521 aa, Zea Mays
MLPVATMEKATKWEPGDIKGMESHDAYLIASQLNLLDEHRDTAYVADLQMELQQARDRISAMETERRSAKKRLDHLFKKLAEEKAAWRNREHEKVRAILEDMKADLDHEKKNRRRLEMINMKLVNELKEAKMSAKQLLQEYETERKARELTEEVCNELAREVDEDKAEIEALKRDSQRLREEVDEERKMLQMAEVWREERVQMKLVDAKLTLDAKYTQLSKLQQDVEAFIAACSTANGDVTVVEQAESIIQAIKSVRAQDAEFRYEPPAASEDIFSIFEELRPSEEPVIKEIEPCYKNSSAKCEPEIQEVSPMTDIFLEKKAKANSNKSPKDESDTEDGSSWETISHEDVQGSSGSPDGSEPSVSNKVCDGSIPWKSRNGFERMESEKLKDESADACLTNMNQPKKKESAISKLWKSSRPKNSEICKKDAVETVNARSSNVRLSVGTYSTVESGIQEIGLSPPCVEQWSSPDSMNVQFNRGFKGCIEYPRMSQKHSLKAKLMEARLESHKVQLRQVLKQKI

SEQ ID NO: 53307 - protein, 233 aa, Zea Mays
MFLAGSSVEYKMSISDVVVAPPFIYIDQVKNSLTGRIEVSAQNVWIGKGGAYTGEISAEQLVDIGCQWVILGHSERRHIIGENDEFIGKKAAYALSQNVKVIACIGELLEEREAGKTFDVCFRQMKAFADSISNWADVVIAYEPVWAIGTGKVATPEQAQEVHAAVRNWLKTNISPDVASSTRIIYGGSVNAANCAELAKKEDIDGFLVGGASLKGPDFATIINSVTAKKVAA

SEQ ID NO: 53308 - protein, 157 aa, Zea Mays
MAIVKSDIGGNITRLENKYTSEPSKYEHLYSMVQEEVQNKTAKGSSSCTNGLLWLTRAMDFLVELFRNLLEHPDWTMGQSCTDSYTKTLKKFHGWLASSSFTVAMKLAPNREKFMEVISGTGDINADIEKFCTTFSPFLKENHNFLASVGLDDLKAS

SEQ ID NO: 53309 - protein, 243 aa, Zea Mays
MDDEDVDVKNSARKAAETVLLVIDEEGVETLIPELLRGITDSQASMRRGSAYLIGFLFKNTKLYLADEASDMMSTLIILLSDTDKATVSAALEAFSRVVASVPKEQLPTHIKLVRDAVSTARDKERRRRKGVPILLPGLCLSKALQPFLPIFQQGLISGSAETKEQAAEGLGELIDVTSEKTLKEVVVPITGPLIRILGDRFPWQVKSAILSTLTIIIMKGLSGRGLQLLSESLVLLAHGWIL

SEQ ID NO: 53310 - protein, 66 aa, Zea Mays
MVTILSGLAQSTSQKPDSSAPVQVVKTSVLVRRHRSPLICGTTDEGTSGQRSDDVKRGEEEDKSVA

SEQ ID NO: 53311 - protein, 220 aa, Zea Mays
MEKTLRVYDINRPDAAPRELDKSPGSVRTAAWLHSDQTILSSCTDMGGVRLWDVRTGKIVQTLETKASITSAEVSQDGRFITTADGSSVKFWDANHFGLVKSYDMPCNVESASLEPKSGSKFVAGGEDLWVHVFDFFTGEEIACNKGHHGPVHCVRFAPGGESYASGSEDGTIRIWQLSPVNADDDEAANANGKANAAVNEVTTKLEGGFHIPKEGQAGG

SEQ ID NO: 53312 - protein, 147 aa, Zea Mays
MGGFCCLRDSEAVETLAPNISTGESDPAAAVPAESPHGIEVGVEFKPVERPVEPINLDEPVKCPLPEPSILHDGRIWKEKMSSVSTRVRTDLPVVKEGSQLEPDGSSARSRSAVPRRAILPSVSAPEHNILALLDECDVSGSRGSAE

SEQ ID NO: 53313 - protein, 599 aa, Zea Mays
MVKKPNDVAKAAATSADAAARPSKANPSTPQSVKTSKFKKRKVKANRQKPAVAAAAVDDVAPVGAGTGDGDASASAVLPQPSNVAEASPVVQTPKSTTFVEASPVVQTQKTATDAEVPVHSPMPATAEASALSPKPKPKPAHANADAAAAISVSKGKGVGADNSGGDGRMKSRKERARSGKKEERGDHKVAGFIFMCNAKTKKECYQNRLFGMPGGKIGMVKKIRPGVKLFLYDFDLKLLYGVYKAASHGGLNLVQGAFSGKFPAQVKFKIDKDCRPLPESSLKQAIKENYSAKSKFDPELTTKQVQRLLLLFKPLSAPQSVPNNHFEERRHYEEQRKPYYHFEERLPLLPIEEVRQPRFDDERRPAVRHVPLEDPYRAQAPRFAPVPVESQLGHSLASAQGDHGRYYQPPALAPEPRHIPLVLEPRYVPPAHVPTVPELQHVPAAYYRTSAPSGDSYYRPVDNLVPEGYADRIVANITARDPIISDHTALPVEASARPDRLDDLYRIRGAHVEELYRPREIADRAGITARADRVEELYRYDRLANRAVDPPHSAYLTTAYENNPAYAETSVRPISARVGGSGAPVSSLYSFSGGPVYR

SEQ ID NO: 53314 - protein, 265 aa, Zea Mays
MAIDGCATFFRRDKFSHVKKYEVEFNKAAQSLTDAIIPSAQKRLALNRLIKDNIALIAVLEAKFANHGAENPGKRQLLCVANTHINVHQDLKDVKLWEVHTLLKGLEKIAVSADIPMLVCGDFNSPPGSSPHALLAMGKVDQHHPDLAIDPLGILRPPSKLNHQLPLVSAYSAFARMVGVGYDLEHQRRRTDPATNEPLFTNCTRDFTGTVDYIFYTADSLTVDSLLELLDEESLRKDTALPSPGWSSDHIALLAEFRCKPRIRS

SEQ ID NO: 53315 - protein, 363 aa, Zea Mays
MQWHVYEAGINAIRDGATRYTPNAGTLELRKAICKKLEEENGLSYSADQVLVSNGAKQCITQAVLAVCSPGDEVLIPAPYWVSYPEMARLAGATPVILPTSISDNYLLRPESLASVINENSRILILCSPSNPTGSVYPKELLEEIAAIVRKHPRLLVLSDEIYEHIIYQPAKHTSFASLPGMWERTLTVNGFSKAFAMTGWRLGYLAAPKHFVAACGKIQSQYTSGASSISQKAGLAALNLGYAGGEAVSTMVKAFQERRDYLVRSFRELPGVKISEPQGAFYLFIDFSSYYGSEVEGFGTIKDSESLCLFLLEKAQVALVPGDAFGDDKGVRISYAAAMSTLQTAMGKIKEAMALLRPPVAV

SEQ ID NO: 53316 - protein, 348 aa, Zea Mays
MGSRRALVAGTSGYLLFIAANLLPSWYTMVPASLYLGFTASIIWVGQGTYLTSAALSHARENNLPEGPTLGSFNGEFWGMFASTQVIGNLISLALLRNGKDGGSITGKNLLFAVFLGCMIVGIVLMCLLSKRDEKKDNTPTHSSFGAMLKYIIAPLKDKRMLLTIPLIAYSGLQQAFVWAVFTKSIVTPVLGISGVGGAMAIYGAADVVCSLVAGRLTSGLRSAAFIVSVGAILQAIVLFWLLLFYSPMDGLLGAAIPLFIGALWGVGDGVLNTQLSALLGLLFEDVKEAAFAQLKVWQSGAIAVIFFLSPSITLQAMLLLMAAALVISFGSFLFLTLVVEKSSPVRA

SEQ ID NO: 53317 - protein, 70 aa, Zea Mays
MTDRAVSTRPRRHHPPVPFRPAVCSLSSVTARRGRRIRAPDSQPARVRLWPAPPPRSPHAATGDVDGESY

SEQ ID NO: 53318 - protein, 337 aa, Zea Mays
MTRIFVQRGTAGSSSSSGRSGSQSAQQPAAAAREELPLQPQPQLPELLAIDDVTEHLNEGNENNSSRIKFLRTDDTISESSSYAEERAAREKPPKDDSNVINPTSLVEEPIVLHTPDQIEHGNSVPSGTNSSQMVGAASHPPPPPAPPPKSLLGNSGLWRMGPGSSNSVRIGSPRRPVAWPPVAARTSASGSRPSSPRSLVDGEGYNSADEQGPCYASSYDDSERERMFEHDLRRVKGLEIRKTAEDGNCLFRAVADQVYGDAEAYDMARQMCVDYMERERDHFSQFITESFTLYCKRKRRDKVYGNNVEIQAFAEMYNRPIHIYSYSTALYMFAVI

SEQ ID NO: 53319 - protein, 713 aa, Zea Mays
MEVNSSGEETVVKVRKPYTITKQRERWTEAEHKRFLEALKLYGRAWQRIEEHVGTKTAVQIRSHAQKFFTKLEKEAMNNGTSPGQAHDIDIPPPRPKRKPNSPYPRKSCLSSETQTKELPNDKSTKPNMPLSNGHVKMNFQRKELSEKGSRSEVLNLFRDAPSASFSSVNKSSSNHGAPRRTEASKTESRDMSIMENNSFNPNTQEDVKVISDQEMERLNGIQIRSKCEHSHEGYLDISTQQMKLMPKSVETTYVDEQTARASHTLAESDGTASIPVTVPEGTHPDQTSDQVGINGSMNPCIHPMVSADPKFGSSATPQTFPHNYAAFAPMMQCNCNQDTYRSFTNMSSTFSSMLVSTLLSNPAIHAAARLAASYWPAAEGNTPIDPNQENPADGVQGRNIGSPPSMVSIVAATVAAASAWWATQGLLPFFAPPVAFPFVPAPSAAFPTVDVPRPSEKDRDCPAENAQIECQEARKQVQFEGLRIAASSESDGSGKGEVSLHTELKLSPAQNADATPTTGAGTNDAFRNKKKQDRSSCGSNTPSSSDVDAGNVPEEDNANEKAKQASCSNSSAGDTNHRRFRSNGSTSDSWKEVSEEGRLAFDALFSREKLPQSFSPPQAVDSKEVAKEEEDEVTTVAVDLNKNATSIDHDDLDTMDEPRASFPNELSHLKLKSRRTGFKPYKRCSVEAKENRVPASDMVGTKRIRLDSEAST

SEQ ID NO: 53320 - protein, 1255 aa, Zea Mays
MASAPFPPVAASAASAPPRLAPRHPFAAAAAARRSSLSFRPAARRPVLPLRSSAVAANTLRCTHRRAVSSRSRRRAQELGAAPALAASTWGVGEEKGGCLSCFPKSRRGRSGLARFAPCALPHASGLSFRSRLSGSKVKPSHILHAAGPDEPHVASPTWSDTSLDTRDMDHAISKEELEDVLNTPLPEHPKLIRGQLKNGLRYLILPNKVPANRFEAHMEVHVGSIDEEEDEQGIAHMIEHVAFLGSKKREKLLGTGARSNAYTDFHHTVFHIHSPTKTKEYGEDLLPSVLDALNEIAFHPKFSSSRVEKERRAILSELQMMNTIEYRVDCQLLQHLHSENKLSNRFPIGLEEQIQKWDPEKIRRFHERWYYPANATLYLVGEIDDIPRAVREIEAVFEHTLSENEGNPVPSTSPFGAMASLFAPKLPSGFTTNLTGEKSPATDKIKPVKRERQAVRPPVEHKWSLPEVAQDAKPPAIFQHELIQSFSINMFCKIPVSKVQTYKDLRSVLMKRIFLSALHFRINTRYKSSNPPFTSVELDHSDSGREGCTVTTLTVTAEPQNWRSAIKVAVHEVRRLKEFGVTMGEMTRYMDALIKDSEQLAMMIDSVPSVDNLDFIMESDALGHTVMDQLQGHESLLAVAETVTLEEVNTVGAEVLEFISDFGKPNAPLPAAIVACVPKKVHVDDIGETEFEIYPEEITEAIKAGLEEPIYPEPELEVPKELITQSKLDELKLQHNPSFVPLTKEENAVKVFDSETGISQRRLSNGISINYKITQNEARVGVMRLIVGGGRATEDSESKGSVIVGVRSLSEGGCVGNFSREQVELFCVNNLINCSLESNEEFIFMEFRFALRDNGMRAAFQLLHMVLEHNVWLEDAFDRAIQLYLSYYRSIPKSLERSTAHKLMLAMLNHDERFVEPSPHSLQKLTLQSVKDAVMNQFVGSNMEVSIVGDFTEEEVESCVLDYLGTVRASSSPTIEERIEKISFRPFPSDVHFQQVYIKDTDERACAYIAGPAPNRWGFATEGNDLFNVIQRSDADAEISEPVSLDLTGKRHINVRSHPLFFGITLSLLAEIINSRLFTTVRDSMGLTYDVSFELNLFDKLDLGWYVIAVTSTPSKVHKAVDACKGVLRGLHSSRIVERELDRAKRTLLMKHEAETKTNAYWLGLLAHLQSSSVPRKDVSCIKELTTLYENATIEDLYIAYEHLKVDDSSLFACIGIAGAESGEDTNDDEPDVDLHGMGPMGGRGLSTMTRPTT

SEQ ID NO: 53321 - protein, 341 aa, Zea Mays
MQWYAFHNEEAGGTDPENEAVLRRDIYDRPPTMNWGKGRVTLLGDSVHAMQPNLGQGGCMAIEDGYQLAVELENAWQESVKTETPIDIVSSLRRYEKERRLRVAIIHGLARMAAIMATTYRPYLGVGLGPLSFLTKLRIPHPGRVGGRFFIKYGMPTMLSWVLGGNSSKLEGRLLSCRLSDKANDQLYQWFEDDDALEEAMGGEWYLIATSEGNCNSLQPIHLIRDEQRSLFVGSRSDPNDSASSLSLSSPQISERHATITCKNKAFYLTDLGSEHGTWITDNEGRRYRVPPNFPVRFHPSDVIEFGSDKKAMFRVKVLNTLPYESARSGNRQQQQVLQAA

SEQ ID NO: 53322 - protein, 184 aa, Zea Mays
MGELGLNFEVYRNDELTIEDVKRKNPRGILISPGPGEPQDSGISLQTVLELGPTIPIFGVCMGLQCIGEAFGGKIIRAPSGVMHGKSSPVYYDEELGKALFNGLPNPFTAARYHSLVIEKETFPHDALEATAWTEDGLIMAARHKKYKHIQGVQFHPESIITPEGKKIILNFVRFIEELEKQRS

SEQ ID NO: 53323 - protein, 700 aa, Zea Mays
MGTLSMSDASPIPAKNWDASPVKLEAQGGDAILGMKEEERLLELVKDEQADGILDSLPIDLEAKNGDASLITEAMKKEEEQLEDTRIKVQEEEEARKREEAARLAFDPETQYNKLDELLTKTQLFSEFLLENMDRIADESVETQAEQPQVEEKKKGRGRKRKAKPQYNDKKAKTAVAAMLTRSREERLAEDSTLSEEERWEKEQANLVPLLTGGKLKSYQIKGVKWLISLWQNGLNGILADQMGLGKTIQTIGFLAHLKGKGMHGPYLIIAPLSTLSNWVNEISRFTPSLVSIIYHGGKAARAEIRRKFMPTNVGPDFPIVVTSYEMAMFDAKFLAAYKWKYVVVDEGHRLKNAKCLLLKQLKRIPMDNKLLLTGTPLQNNLAELWSLLNFILPDIFSSHQEFESWFDFSGGNEETDEKKRLHVVSKLHAILRPFLLRRMKEDVEQMLPRKKEIIIYANMTEQQKQIQHHLIEKTFDNYLHEESDIILKRPGIRARLHNLMIQLRKNCNHPDLLESPVDSTGLYPPVEKLLEQCGKFQLFDRLLNFLMAQKHKVLVFSQWTKVLDIIEYYLDSKGHAVCRIDGNVKLEERRRQIAEFNDVNSSMRIFLLSTRAGGLGINLTAADTCILYDSDWAMDRCHRIGQTRPVHVYRLATSHSVEGRMMKRAFGKLKLEHVVIGKGQFEQDRAKPSALDIFFLFER

SEQ ID NO: 53324 - protein, 353 aa, Zea Mays
MIGVEKMHKDTKYVLFLDDDVRLHPGTIGALTKEMEKNPEIFIQTGYPLDLPSGSLGSYCIYEYHMPCSMGFATGGKTFFLWGGCMMMHADDFRQDRYGIVSGLRDGGYSDDMTLAAIAGQHKRLIFSPPVAVFPHPLASDLSFSRYWNYLRKQTFVLESYVSNVNWMMNRALFTSHCYLSWGFVWPYIMALVHVLAALRAPYSKVVKEASDSSWGLFLVGLLFTCTLIELVSMWNLTKVEIQLCNMLSPEGPKVSLDSYNWGLVFIAVLVDNFLYPVSAIRSHFSQSINWSGIRYYLRDGKISKIERENSSKYTDLGGKHLYGKRTYPPNKSLLGYLSRTLVQWHQPKKYDV

SEQ ID NO: 53325 - protein, 623 aa, Zea Mays
MMGGGLMMDQSVVFPGVHNFVDLLQQNGDKNLGFASLMPQTSSGDQCVMGEGDLVDPPPDSFPDAVEDDSDDDVEDIEELERRMWRDRMKLKRLRELQQSRGKDPMASGGGLADGSSKPRQSQEQARRKKMSRAQDGILKYMLKMMEVCRAQGFVYGIIPEKGKPVSGASDNLRAWWKEKVRFDRNGPAAIAKYQADNAVPGAENELASGAASPHSLQELQDTTLGSLLSALMQHCDPPQRRYPLEKGVPPPWWPTGDEEWWPELGIPKDQGPPPYKKPHDLKKAWKSKCLQDKMTAKEISTWLAVVKQEEELYLKMHPGARPPASTGGIASAISFNTTSSEYDVDIVDECKGDEAGNQKTAVTDPTSFNLGAAILSDKFLMPTPMKEETADVEFIQKRNAPAPAEPELMLNNRVYTCNNVQCPHSDYSYGFLDRNARNSHQYTCKYNDPITQSAENKPLPAPPQPQAFQPAFSQANQAANNLDFSLPMDGQRSIAELMNMYDTNFMTSKTMSSSDSVTIMERPNAMPQRIQMDEGFFGQGNGVFDDVNSMMQQQQQQAPPVVQQQQQQQFFIRDDTPFMSQMGDITSTAEFRFGSGFNMSSTAAAADYPGAAQKNDGTNWFY

SEQ ID NO: 53326 - protein, 239 aa, Zea Mays
MPKDHTKPPRLRTLGANTTLSGFGQENMEKVYSDTATTSNDQSKAEDSSVTKKRAASFWFDEDGLFNNDDEGRAERQQCAIAASNIIRNFSFMPENEIIMVQHRHCLETIFHCLENQNREDDELITNMLETLVNLAPVLDLRIFSSSKPSFIKMTEKGAIHAIMGMLSSSVKPWHCAAAELIGRLIINPDNEPFLLPIIPQIYKRLVDLLSVPAYDAQAAAVSALYNVAEVNMDCRLKL

SEQ ID NO: 53327 - protein, 147 aa, Zea Mays
MLVIPELEQELKLLSESKSTRKELRHLRMERDSIEDKIHHLEWSLKLDDISENQKEKLFSEHDNLLKQRGHVRGLHQEAQRQHHQKFHKVWGQLMKTGYQNSRFAHQVERFACLYSSQVTNFGLYSPDKYYRPSEDYMPHEFDVLGL

SEQ ID NO: 53328 - protein, 60 aa, Zea Mays
MASSYSTRPAETRAFTLASAPAGSAKADDHPPESARVTSNVQGKSEATRLHDGDEPLYLA

SEQ ID NO: 53329 - protein, 58 aa, Zea Mays
MGKGTGSFGKRRNKTHTLCIRCGRRSFHLQKSTCSSCGYPAARIRKYFRDALALMRRC

SEQ ID NO: 53330 - protein, 274 aa, Zea Mays
MDRYHRVERARNQSTIEENEIRITAQGLIRNYVSYATFLLQERRIKEIVLKAMGQAISKSVAVAEIIKKRAPELHQDTNISSVSITDVWEPIEEGLVPLEMTRHVSMISITLSPRELDKHTPGYQAPAYVEHPRQQQVPPLQRQPRRPSGQQFQQLEYEDSYARGRGRGRGRGRGRGWARGGYGGYGNNQGGYNQGGGYYDNQGGYGGYDDQGGYGGGYGYNQGRYGNYQENGGYNRGRGGGMRGRGNWGYRGGCGLPVEPASFLSSCSGRVEL

SEQ ID NO: 53331 - protein, 139 aa, Zea Mays
MISDEPTTLVIFERRYNAIEDSHPDLIVGSTDKQPLLETPGEVFQLRKLLPTSLSYDFNIHIMDFQPGEYLNVKEVHYNQHGLLLLEGQGIYRLGESWYPVQAGDTIWMAPFVPQWYAALGKTRTRYLLYKDVNRNPLI

SEQ ID NO: 53332 - protein, 160 aa, Zea Mays
MLLPEDDPNATHIMIATGTGVAPYRGYLRRMFMEDVPTFKFGGLAWLFLGVANSDSLLYDEEFTNYLQQYPDNFRYDKALSREQKNKSGGKMYVQDKIEEYSDEIFRLLDGGAHIYFCGLKGMMPGIQDTLKKVAEQRGESWDQKLSQLKKNKQWHVEVY

SEQ ID NO: 53333 - protein, 83 aa, Zea Mays
MNASYIISVARKLGCSIFLLPEDILEVNQKMMLTLTASIMYWYLKRPTSQSLDSENGSSCETTSITTSDDSASESSIDDNTTR

SEQ ID NO: 53334 - protein, 197 aa, Zea Mays
MPRGEVAVGGHSITKGYFNNEAKTNEVYKVDERGIRWFYTGDIGQFHPDGCLEIIDRKKDIVKLQHGEYVSLGKVESALATSNYVENIMVYADPFHNYCVALVVPAHQALEKWAQNSGMNYEGFGELCQNDRAIKEVQQSLSKAAKAARLEKFEVPAKIVLLPEPWTPESGLVTAALKLKREQIKAKFKGDLDKLYH

SEQ ID NO: 53335 - protein, 245 aa, Zea Mays
MDFLQEQSVETTVAVAVAVAAVAAGGAFLLLRSRKPKGCLDPENFRKFKLVEKKQISHNVARFKFALPTPTSVLGLPIGQHISCRGQDATGEEVIKPYTPTTLDSDLGYFELVIKMYPQGRMSHHFREMKVGDYLSVKGPKGRFKYHVGQVRAFGMLAGGSGITPMFQVARAILENPNDNTKVHLIYANVTYEDILLKDELDDMAKTYPGRFKIYYVLNQPPENWNGGVGFVSKEMIQSHCPAPA

SEQ ID NO: 53336 - protein, 474 aa, Zea Mays
MNNIRQYQLPLQRYMALMDLQEGNERLFYKLLIDNVEELLPIVYTPTVGEACQKYGSIFSRPQGLYISLKEKGKILEVLKNWPERSIQVIVVTDGERILGLGDLGCQCLPITLDVGTNNEELLNDEFYIGLRQRRATGQEYTDFLQEFMTAVKQNYGEKVLIQFEDFANHNAFDLLARYGTTHLVFNDDIQGTASVVLAGLIAAQTLLGGSLADHTYLFLGAGEAGTGIAELIALEISRQTKAPIEECRKKIWLVDSKGLIVSTRKESLQHFKKPWAHEHKPLSNLLDAVNAIKPTVLIGTSGKGQTFTKDVVEAISSFNERPIILALSNPTSQSECTAEQAYTWSKGQAVFATGSPFDPVEYNGKIHVPGQANNAYIFPGFGLGVVMSGAIRVHDDMLLAASEALAQQVTEENFEKGLIYPPFSNIRKISAHIAASVAAKAYELGLASRRPRPKDLVKYAESCMYSPIYRNYR

SEQ ID NO: 53337 - protein, 192 aa, Zea Mays
MWRAREKELELESKMKGRSSRSKDHGDFTGEKRKSERNHSSSSRIEQEGTTYDTSYSDQEDGLRDDEIERFLYSRAKRGRGAVGSRMDEPGPYLDSLSHHQDNGPSPDIRVEEKWERRVQGPEKPPFWGCKSLDGHWRLGTLDGRPSSSEPQSKKEKKSKLDKKDKIEKRKEKGKKKSKHRHHRHRRSSRSE

SEQ ID NO: 53338 - protein, 1543 aa, Zea Mays
MASPPIDSALTLALEHQTRSLLSELDKRLSAMDVKWESRVGELESQVSASSRRLDSVTTDLRADVEIQFSSAADHLHQIEADVKTRVAALQSTMHVFELWRPRVEASVESLHSSVDSIRAEVSKMGIRWSTDARVDGSGQPGLLGAHGSGSGRVPAPEEPPDRPRFGSCFENYYRDSGHVHPGADAHYPVTGMWSSPHSPSFSFNAHCGHSQGDWGQRGPLSRHCGGLPKLNFPTFDGTYPKLWQKRCEDYFEMYATETFVWVKVSTMHFVGAAARWLQSIEPRLPSMSWRQFCQAIHDRFGREQHELVIRKLFHIKQTSTVQDYVDRFSELVDLLVTYEHTTDPLYYTMKFIDGLRDDIKSVILVQRPGDLDTACSLALLQEAGDSSRRPDPVHGDSSYAGRSSWKSAVPQSARWDPSRGLAPESSKTPTQPAPTIDSKVASLRSYRRASGLCQYCAEKWNKGHKCSPTVQLHAVQEMWELFDHDQSDTDPDFQDSSDQFAVMLSQAAISTPAKAQAFRLQGCLQGVELLMLLDSGSSHCFLNTNSVAAITGLTLVSTPLMVTVANGEVLTCTSELVEADWTLQGVPFRTTFKLLSLPHYDAILGMDWLQQFSPMLIDWKNKWLSIPFQDQLIVLRDCQSLVPAGSLLEIRSVSSTSTPQHLFSATTSAVPEPVRSLLQQFDALFQPPTTLPPSRACDHSIPLVDGARPVNIRPYRLSPALKDEVESQVAEMLQNGIIQNSSSAFSSPVLMVKKKDNSWRFCVDYRHLNALTVKSKYPVPIIDELLDELAGACWFSILDLRAGFHQILLKPGEEYKTAFQTHTGHYEFRVMAFGLTGAPGTFQKAMNHTLAPLLRKCTIVFFDDILVYSRSLQDHFTHLQQVFELLSSDHWKIKMSKCSFAQPQVTYLGHIISSAGVATDPAKIQAIVAWPVPKCVKELRSFLGLSGYYRKFIRHYGVICQPLTALLKKGALYVWTADHDTAFCTLKQAMSSAPVLALPDFNVIFQIETDASANGVGAVLSQQGHPLAFLSKALGVKSRGLSTYEKEYLAVQQWRAYLQHQKFVIITDHKSLSQLNEQRLHTPWQHKVFTKLLGLQYRVQYRPGTENRAADALSRYGPAEINAVSVVIPQWLTDIQQTYDSDSKTKELVAKLAIDPAAVAHFSLKDGLIRYKNRLWIGEDPHLQAKIVSALHSSPIGGHSGVPVTYSRVKSIFAWKNMKSFVRSFVQQCQICLQAKPDRAAYPGKLQPLPVPPSAWHTISMDFVEGLPRSGSWDCILVVVDKFSKFGHFVPLSHPYTAHSVAQLFLSHIYRLHGFPAAIVSDRDPIFTSAFWRQLFQLAGTELRLSSSYHPQSDGQTERLNQCLETFLRCFVSACPKKWSSWLPAAEYWYNTSLHSALGCSPFEVLYGRKPRSLGLSFDAAAPVALSAWLQERSVMQNLIHQHLIRAQTRMKKQADKHRSERSFSVGDWVYMKLQPYVQSSVLPRAHQKLSYKFFGPYRVANRVGSVAYRLELPNSSRIHPVVHVSQLKLAKGSGAVVQPSY

SEQ ID NO: 53339 - protein, 114 aa, Zea Mays
MNVWNYVVTAHKPTSVSHSCVGNFTSPNQLNLIIAKCTRIEIHLLTPQGLQPMLDVPIYGRIATIELFRPHNETQDFLFIATERYKFCVLQWDTEKSELITRKTKLVFSISYGK

SEQ ID NO: 53340 - protein, 466 aa, Zea Mays
MLNSLSITIQQTCYTLRVVSLKELVDEGSIETSALTPPEYDKSMHENIDEVCSGIGVPARTASLETSEEVSSWIASLVCAQNKGVKEMDGDLPFGFSKQEDEGFSVTAGWHTSPVIEPEGSIFSGFKQHEEYKVKEVTCLRDPSSSNLEKTVEKRRTKMEKTVSLEELRKHFAGSLKEAAKNLGVCPTTLKRICRQHGINRWPSRKIKKVGHSLKKLQMVIDSVHGSEGTVQLSSLYENFTKTTWSERELQGDATYPLSEEKGPLEPSVPDRYCEGRFTSHTSGSNSLSPSCSQSSNSSHGCSSGSKSQQHVSAPQLAVKKEVFMEENQSSTLLKAASHAELQMLPEERLVTLPRSHSQVLLSEQKPVENITGMQMSKPDSLKIKAMYGEERCIFRLQPSWGFEKLKEEILKRFGIAREVYVDLKYLDDESEWVLLTCNADLLECIDVYKSSSTQTVRILVHSSDQ

SEQ ID NO: 53341 - protein, 609 aa, Zea Mays
MRENITTPNGSAVTVDPNASTHADRLTKIKGILSGETSIQLTLQFLYSHNRSDLQILKTIKQAVEMRNSVCHSATICSNAIMHAGTTVDTFLRENLEWLGRATNWAKFSATAGLGVIHRGHLQQGRALMAPYLPQNGAGGSGSPYSEGGALYALGLIHANHGEGIKEFLRESLRNTTSEVVQHGACLGLGLAALGTSDEEICEDIKNILYTDSAVAGEAAGIGLGLLMVGTASEKATEMLAYAHDTQHEKIIRGLSLGIALTVYGREEEADTLIEQMTRDQDPILRYGGMYALALAYRGTANNKAIHQLLHFAVSDVSDDVRRTAVLALGFVLYNEPEQTPRIVSLLSESYNPHVRYGAALAVGISCAGSGLSEAISLLEPLTSDVVDFVRQGALIAMAMVMIQTNESYDPRVGAFRRQLEKIILDKHEDTMSKMGAILASGILDAGGRNVGIRLKSRSKHDRLTAVVGLAVFTQFWYWYPLTYFISLAFSPTALIGLNSDLKVPTFEFLSNAKPSLFDYPKPATQQTAAASVKVPAAILSTYAKSKARAKKDAESKAKEKADDSSNASTSMQVDGAAAEKKAAEPEPAFQVLTNPARVVPAQEKFIKL

SEQ ID NO: 53342 - protein, 525 aa, Zea Mays
MEGSTKDFQILAGTQDGQIFGDSQFKYMDIELHLDDEILELIGPSESMDGPEFSIKAAKIGITSLYVSTKQSSGHRVLSQVVKVEVYGPLQIHPEYIYLTPGASFVLSVKGGPKTGVSIEYSSLNMGIVEVQNTTGKLSAKSVGNSTVRAAVLANGGILVCEAFGRVEVDIPVAMTLNTQSERLCIGCSMPVYPSLPKGDLFSFYETCQSYSWMIADEKVVTFQSAKSWRYRLDQGLYSDGKKSPWFSNGSSKFFISHMLGRSAGKTKISISVVCDFLLPGTSGSVVSYNASKIILVVPDPPLALALPMTWLFPPFYTTMSLLPRSANSLGEPNSLDLESSVGYSLLRGNGRIIDGSKIQTGESNTVDCIQAKDHSAGRTEIAACLRVAQVAQVRVAAAESSIQIVYLSVNDKVELDIKYADELGYIFNEAHGVVPVKIETNYPDVVSVLMPRDFNGTYDTRERFVLQARSHGTALVRLHTNNVPNKVDFIMVSVGAQIYPRDVILHSGQHLNFTVIGDSHKHTA

SEQ ID NO: 53343 - protein, 432 aa, Zea Mays
MRKILVIYIGICIFEVSQTVERYGRHSYDMLYAVAKTIVLSPNYQCLFLLPYYKEEGEIVSRMGTIAAELINHPSYHVLPSDDSNPPRLLLWHLDPSIIRLDLSVMLKEGFELCARTSQCIGIIGTRHSSQAYAMRNIHRFGAEISLFTCLLPKPSKKLACNTNWTLILYMIISFPVWFSFATALLFYREGSHDSLSETLSKEPTAESISDVSLVQRAAFYLSWVLCPSNDDQCEMLSNNILEISHSWARNNKKCLSYQITMNHRRKLQIPTAAKSEKFHVPINTAAALIAERWALIGAYLIFIWLDVVEDMSSLIFGCEDRCHRSVSQLRNKTAPYPAQGSRFARLAPNPDTQDHQLRIYQANGLPSSLNTLLVLVLVSSRYMVLGNEERIVYSERCTFPLLVLVETPEHKWTAVCRKLVSGYRWNRKLLH

SEQ ID NO: 53344 - protein, 305 aa, Zea Mays
MVIDLLGPSLEDVFNQCNRKFSLKTVLMLADQMITRVEYMHTRGFLHRDIKPDNFLVGLGRKANQVYIIDYGLAKKYRDLQTHKHIPYRENKNLTGTARYASVNTHLGVEQSRRDDLESLGYVLMYFLRGSLPWQGLKAGTKKQKYDKISEKKMLTSIEALCKSYPSEFITYFHYCRSLRFEDKPDYSYLKKNFRDLFIREGYQLDYVFDWTVSRQAVDNNRLRLSGKTGGLVGPSVDRAERAAARQDVPDRFTGQAGAFARRTGSGSGQYGEHTKHRTLLDSLMASKMSLVACAHECGQEKGQC

SEQ ID NO: 53345 - protein, 91 aa, Zea Mays
MPSRHKSTRASETLRHRNRTLSAPPPPLQSRPHRRLSIPTAPTATIHKRCRDVSEQPLPAPPLRADRSVHRVQDLGDHEGGQGARWHPLRL

SEQ ID NO: 53346 - protein, 710 aa, Zea Mays
MAASLLLRAVRRRELASPLGSLGASIQSTCVANVCSKWGSFARPFSAKAAGNEVIGIDLGTTNSCVSVMEGKNPKVIENAEGARTTPSVVAFTQKGERLVGTPAKRQAVTNPQNTFFGTKRLIGRRFDDPQTQKEMKMVPYTIVKAPNGDAWVQTTDGKQYSPSQVGAFVLTKMKETAESYLGKSISKAVITVPAYFNDAQRQATKDAGRIAGLDVERIINEPTAAALSYGMNNKEGLIAVFDLGGGTFDISILEISNGVFEVKATNGDTFLGGEDFDNTLLEFLVSDFKRTEGIDLSKDRLALQRLREAAEKAKVELSSTSQTEINLPFITADASGAKHLNITLTRSKFESLVHNLIERTRDPCKNCLKDAGISTKEVDEVLLVGGMTRVPKVQEVVSEIFGKNPSKGVNPDEAVAMGAALQGGILRGDVKELLLLDVTPLSLGIETLGGIFTRLINRNTTIPTKKSQVFSTAADNQTQVGIRVLQGEREMATDNKLLGEFDLVGIPPAPRGLPQIEVTFDIDANGIVTVSAKDKATGKEQNITIRSSGGLSEADIQKMVQEAELHAQKDQERKALIDIRNNADTTIYSIEKSLGEYRDKIPAEVASEIEAAIADLRQEMASDDIEKIKAKLEAANKAVSKIGQHMSGGGSGGSQSGSGPQGGGDQAPEAEYEEVKNETGHTTLSWLLLHMKPCSARCTRTAKTIGEFC

SEQ ID NO: 53347 - protein, 83 aa, Zea Mays
MEIYVDDEAKLTLHGLVQHYIKLSEVEKNWKLNDLLDALDFNQVVIFVKSVSRAAELNKLLCECNFPSICIHSGMTQEERLLQ

SEQ ID NO: 53348 - protein, 220 aa, Zea Mays
MDMVHPGVVPMHKVNFDAKTEYDMIQNYKVLQDVFNKLRIGKNIEVNKLVKGRPLDNLEFLQWLKRYCDSVNGGIMNENYNPVERRSKGCKERVSKGSNKPSKSLQANRLSGADPTDGGHGVGKVCNTFSEEHYIEQIQKLSEKIADLKVSVDSTEKERDFYFSKLRDIEILCQRPELEHLPMTKAVRKILYAADAKDSPLPEANDIITKSPSLFSNETE

SEQ ID NO: 53349 - protein, 413 aa, Zea Mays
MLVSRFFRVFTQWQWPNPVMLCAIENNDLGFSIWDPRKNPRDRNHLMPIITPAYPCMNSSYNVSTSTLRVIMEQFQFGNKVCQEIELNKANWNALFEPFHFFEAYRKFLVVDIVAEDDDDLRLWKGWIESRLRQLTLKIERDTKGILQCHPYPCEYSDPTIECAHCAFYMGLSRKEGLKKRGQQFDIRGTVDEFMREIGMYSLWKPGMDLAVTHVHREQVPSYVFEQGYKKPCPTMHANQQEQSDGDGTFSPYLESQLKRKYISDGDGHVDLCKSVKRASVSPPGVGTPPHLGNSVSNVVCDSPVKFVSSVVCSGAHASSSHDDINIEQAQLTTSPYGSEDTSASGTSCAAVGAVILADESSKLGNLTSDLEVDTIQTMPLHTSLECVAQKGETKLEEIRRLASNNCAEFLES

SEQ ID NO: 53350 - protein, 239 aa, Zea Mays
MFIYFLGTYLKPHVAILDGITMGGGGGVSIPGTFRVATDRTVFATPEVHIGFHPDAAASFYLSHLTGHVGEYVALTGEKLNGTDMIALGLATHYFMSGHLDLIDERLAKLVTDDPSVIDSSLAQYGDMVYPDKKSIVHRLEVIDKCFSHDTVEEIVDALESEAASSNEEWCILALKRLKEASPLALKVSLRSIREGRYQTLDECLVREYRMSMNGISKQFSHEFCEKLLKLEECILSNL

SEQ ID NO: 53351 - protein, 60 aa, Zea Mays
MALPVGPIVGARAPLRGEHVTVERPLGGALVSCAWRYVPVAALFLPSRLQTRLAGMDEMV

SEQ ID NO: 53352 - protein, 86 aa, Zea Mays
MKGYYDAQYLERLGWVLLDYLVHRKEEHGPDEALLRHDELGNPIVFRVPASEAEACRLRLVGCVLYEADISIYVNHGFAVCLFVRV

SEQ ID NO: 53353 - protein, 381 aa, Zea Mays
MVTIARHLNLTLVVPELDKRSFWADPSDFGDIFDVDHFINSLRDELMIVKELPLKLQLRTKKRLYSMPPVSWSNETYYLKRILPLARKHKVIHFDKSDARLANNGLPIQLQMLRCRVNFEALRFTPQIEALGRKLISTLQRRSGQFVVLHLRYEMDMLSFSGCTHGCSGKETEELTKMRYAYPWWKEKEIDSEVKRLQGLCPLTPEEITLVLKALGFTKDTLIYIASGEIYGGERRLAVLKAAYPKLVRKEKILSPDELRPFQNHSTQMAALDYMVSLASDIFIPSYDGNMARVVEGHRRYMDFRKTIVLDRKKLVELLDLFQGGALSWDEFSDAVKEAHRSRTGQPAERKVVPGQPKEEDYFYANPLECLGSNGGLRDVS

SEQ ID NO: 53354 - protein, 123 aa, Zea Mays
MSIKYRYKDDEVSFIPSISLPSNSLSFAFKRQLTPLDKLSYWYNFDTNYWGAIYKHKAHKHLKWKAGYESDNRLGWASLWVGDAGGSTKEAPLKAKIHLTLKVPQDNIQNSVVVFHVKKRWDF

SEQ ID NO: 53355 - protein, 393 aa, Zea Mays
MELSQQNLAGAKPGSWKEKLSSNAFARKLLSSSIVVEALHFQYDEMDPNSAFNWLERWTISHVWKPASQPRRVSADAKPHTRKASYAMETESVKLKRNARRSSAGPFEPSQTNTAIEIEKTRRNPRKLSSTPAESVPDGQLTELEKVKRSLRKVTNSVAETSKASSPKTEIPNHQEVQCERPLRRAKQVPIHLENQEPDNVNLSDNAKMDILVPDIQPDVEVASDPVTITNEENVDEPPSVVAPVAEIMPLQDINNDENALVNDVEERSKEEHPSTESLKGSKRRSSFSAKPEYPENGSKNSPALPSYMAATQSAKAKLRGNSSPKLSSDSAEKNGFTRRHSLPSSNNGKMVSHSPRTQRPANAGGKDGAKGDKAMLSSRDASERPLKAEWRR

SEQ ID NO: 53356 - protein, 52 aa, Zea Mays
MTLFLKQPASRINTIPNRSMSRIRISEHFALLHQTKKFGHLNALVGNGVSPD

SEQ ID NO: 53357 - protein, 111 aa, Zea Mays
MARIRLVWARIWSVLAQHFIAAGSHNEEKVAMYAIDSLRQLGMKYLERAELNNFTFQSDILKPFVILMRNTHNSKIRGLIVDCIVQSKVGSIKSGWRCVFMIFTAAADDED

SEQ ID NO: 53358 - protein, 88 aa, Zea Mays
MAAPKVRFLTKIYHPNIDKLGRICLDILKDKWSPALQIRTVLLSIQALLSAPNPDDPLSDNIAKHWKSNEVEAVETAKEWTRLYASGA

SEQ ID NO: 53359 - protein, 219 aa, Zea Mays
MLDLLRIVGHHKARLATQIRTVQKSYGNADFDNIPFGEDMYSRVRGRPLLIDTSARISDDKPRPRPVSSREEQKVKTNGSVDIKSSSPENASSSNSEKQEPKKMVPEDTRVKNIKGDNVMPVTPSLDPATSTSKAGKGKTREPEPTERQGDGSVSVANPKKESRPVFEDNIVLGVALEGSRRTLPIEEGNPHLSLSETEVDTEEAASSPKDKIGQSPKL

SEQ ID NO: 53360 - protein, 291 aa, Zea Mays
MQFQMCSVFFTFSLGTRTHYFGRAILHGGAKYRATGRGFVVRHIKFAENYRIYSRSHFVKGMEVALLLVIFLAYGFNNGGAVGYILLSISSWIMALSWLFAPYLFNPSGFEWQKIVEDFRDWTNWLFYRGGIGVKGEESWEAWWEEELQHIYSIRGRILETILSLRFFIFQFGVVYHMNASGGSTALLVYWISWAVLGGLFILLLVFGLNPKAMVHFQLFLRLVKSVALLMVLAALVPGNFVYETQCERCFCFHSSICANWVGNHFDCHGMETCREEIGFVENCSCPSSPL

SEQ ID NO: 53361 - protein, 65 aa, Zea Mays
MSGPWRSSCAVWCARWAMAKASNGCLSTSSESLLSSFVHGAAAFAGGLKSSLVVTWQLHGKVYGS

SEQ ID NO: 53362 - protein, 410 aa, Zea Mays
MELDLNVAEVAPEKPSAALEASDSGSSGSSVLNAEAASAGGGGPAPGEEGSSSTPAVLEFSILRSDSDAAGADADDGDATPSPPRHHQQQLVTRELFPAPQHWAELGFFRAGPQQQPDIRVLPHPHPYPPPPPPAQPQQAKKSRRGPRSRSSQYRGVTFYRRTGRWESHIWDCGKQVYLGGFDTAHAAARAYDRAAIKFRGVDADINFNLSDYDDDMKQMKSLSKEEFVHALRRQSTGFSRGSSKYRGVTLHKCGRWEARMGQFLGKKYIYLGLFDSEVEAARAYDKAAIKCNGREAVTNFEPSTYDGELLLTAEASAEVADDVDLNLSISQPASSQSPKRDKNCLGPQLHHHHGRPFDGSAVLKKTKIDAPSELSSAGRPHRSFLPHLVAAEHLPPRSHPFFITHHELP

SEQ ID NO: 53363 - protein, 282 aa, Zea Mays
MSATYNSRSQDIESSVVAHGDLWRLEASRGGSTSGNGTSPLYLVQLGPLLFVRDSTLLLPVHLSKQHLLWYGYDRKNGVHSLCPAIWSKHRRWLMMSMMCLNPIACSFMDLQFPNGQLTYVAGEGISASGFLPLFGGLLQAQGKYPGETRVSFSCKNKRGTRFTPMFQWPDKSVSLGVTQALAWKRSGLMVRPSIQVSVCPTFGGSDPGVRAEVVHSLKEELNLMCGLSCSRHPSAYTALSIGRSKWNGQVGSSGVVITLETPLNNIGRPSLSVQLNGGFEL

SEQ ID NO: 53364 - protein, 235 aa, Zea Mays
MVEELGRRRVNHGDVYVLRLYNRLNQTKKGEIACATPGEARKWIEAFEQAKQQADYDLMRGVNWNRLQNENEINLDGHRPRVRRYAQGLGKFVRIGKGPEMLLRQSSDLQGQEIVNTNFGGDTGDAFEAHEWRYVRTFNGIRIFEDISITNPKVGKVILLKSVGVVSANPDTVFEVVLDLDKHKRYEWDMLTADLELVERIDGYYDVVYGTYEPKYLNWWKCQKDFCFLLDNGFV

SEQ ID NO: 53365 - protein, 361 aa, Zea Mays
MALAHASAMFPPSSPSHKTWEDPSFFKWRKREAHVPLRSQDTLEAALKYWHERRNVNYHNADTAVWNDDAVRGALESAAFWSKGLPYAKSLSGYWKFLLSPSAESIPERFYYAHFDDSNWSGLPVPSNWQMHGFDRPIYTNVTYPFPLNPPFVPADNPTGCYRTVFHIPKEWKGRRILLHFEAVDSAFFAWVNGVLVGYSQDSRLPAEFEITDCCHPCDSDKENVLAVQVMRWSDGSYLEDQDHWRLSGIHRDVLLLSKPQIFITDYFFKATLDENFSLADIEVEVEIDSHKQDQEHVPTLSIEATLIDNSGLSNSIDADLSSANAVNLKPKPKRTRSPCLGFHGYVLGGKIENPKLWSSE

SEQ ID NO: 53366 - protein, 483 aa, Zea Mays
MATASVTFKSREDHRKQLELEEARKAGLAPAEVDEDGNEINPHIPQYMSSAPWYLNAEKPSLKHQRKWKSDPNYTKSWYDRGAKLFQANKYRKGACENCGAMTHDKKSCMERPRNVGAKWTNVNIAPDEKDTEKDDENAGSEDDEEDGLRIDEAKVDESAQMDFAKVEKRVRTTGGGSTGTVRNLRIREDTAKYLLNLDVNSAYYDPKTRSMREDPLPDADPNDKFYVGDNQNRLSGQALEFKQLNIHAWEAFEKGQDIHMQAAPSQAELLYKSFKVKKEMLKSEHKDKIMEKYGNAASEDAIPRELLLGQSEREIEYDRTGRIIKGQDVSLPKSKYEEDVFINNHTSVWGSWWKDHQWGYKCCKQTIKNSYCTGLAGIEAAEASADLMKANMARKEAAEDEPVQHEEKRLATWGTDVPQDLVLNEKKLQESLKKETARRKEEKDERKRKYNVKFNDEVTAEDMEAYRMKRIHHDDPMKDFLN

SEQ ID NO: 53367 - protein, 174 aa, Zea Mays
MSSYEQKVQSWDKGYQYLLFAAEPYEIIAFKIPSTEIDKSANKFFSYWDPDKKEYLLQLYFKPRPPEANKPPPAPPGTLPNGTGVPGAPTRPPAQAPPPLPQVPPPPPHAPPPAPMGMPPRIPPPPMGGVQPPPPPPPPVANGPRPMIPPPPNFTPGAPPPRPPMHGFPGQQQQ

SEQ ID NO: 53368 - protein, 959 aa, Zea Mays
MVGYIVTSCLLNENNDFLRMVINTVRNDIIGRNETFQCLALTMVGNIGGKEFSESLAPDVQKLLISSSCRPVVRKKAALCLLRLYRKNPDVVNIDGWADRMAQLLDERDLGVLTSVTSLFVSLVSNNVEAYWNCLPKCVRILERLARNQDIPQEYTYYGIPSPWLQVKTMRALQYFPTIEDPNARRALFEVLQRILMGTDVVKNVNKNNASHAVLFEALALVMHLDAEKEMMSQCVALLGKFIAVREPNIRYLGLENMTRMLLVTDVQDIIKRHQAQIITSLKDPDISIRRRALDLLYGMCDVTNAKEIVEELLQYLDTAEFAMREELSLKAAILAEKFAPQLLWYVDVILQLIDKAGDFVSDDIWYRVVQFVTNNEDLQSYAATKAREYLDKPALHETMVKVSAYLLGEYGHLLARRPGCSPKELFAIINDKLPTVSASTVAILLSTYAKILMHTQPPDVGLQQQILTIFKKYESYIDVEIQQRAVEYFELSRKGPALADVLAEMPKFPERESALLKKAEDAEIDTAEQSAIKLRSQQQTSSALVVADHPPANGFAPPVNNLTLVKMPSQTVSDTQESGVSYEEAPKPPVEAPKENGTPVEVQNRDTNITEINNEIKAEPPSTSHSTSPGDLLLADLLGPLAIEGPPAVEQNPAQGLNANQSPAGDLALATLDDQSNSVQPIVNVEEKFHILCTKDSGVLYEDPYIQIGLKAEWRAHHGRLVLFLGNKNTSALTSVRALILPPSHLKMELSSVPDTIPPRAQVQVPLEVANLLASRDVAVLDFSYAFGTSLVDAKLRLPVVLNKFLQTITLTPEEFFSQWKALTVHSLKVQEVVKGVKPMPLSEMANLFMSLHLAVAPGLDNNPNNLVACTTFFSEATRAMLCLIRVETDPQDRTQLRLTVASGDQYLTFELKEFIKEHLVDIPRTQVAPPRAAVQPQLPTTAPATYNDPGTMLAGLL

SEQ ID NO: 53369 - protein, 60 aa, Zea Mays
MVELFRSYMFLCSAQKEKIVSLLQCSWTSRAVLWTHLWLTSRHMAHQFRPIRLLLYPSAC

SEQ ID NO: 53370 - protein, 200 aa, Zea Mays
MIYAHFCGSWGHYTCLSWLPTFFSEELNLNLTEAAWVSVLPPLGSMIITSIAAPFADNLISNGVDTTKVRKICQTIAFVSPATFMMLSSVDLGLPPWEIVAFLTSGVALSSFALSGLYCTHQDISSEYASILLGITNTVGAVPGIVGVALTGFLLDSTHSWSISLFAPSIFFYLTGTVVWLAFASSKPQDFSKSGPESEP

SEQ ID NO: 53371 - protein, 466 aa, Zea Mays
MMYMFSVDGENAGDLGLPGRVYKQKVPEWTPNVQYYSSGEYQRLNHAISYNVHGTVALPVFDPSAQSCIAVVELIMTSKKINYACEVDKVCKALEAVNLKSTEILDHPNVQICNEGRQAALVEILEILTVVCEEHKLPLAQTWVPCKYRSVLAHGGGLKKSCLSFDGSCMGEVCMSTSDVAFHVIDAHMWGFRDACVEHHLQRGQGVSGKAFISHKPCFSKDIRKFCKLAYPLVHYARMFGLSGCFAICLQSSYTGNDDYILEFFLPLDCIDEDDQNALLESILTLMKRCLRSLKLVDDNDLSGVSLHLSNVLKLENEESKTDAQFDGSLRESPEDDRHGGSHKFDNENQKVLDITEGQLLTDDYSQDNGTSVGRPNGSGASDSSLLHKTNKPPERRRGKAEKTISLEVLQQYFSGSLKNAAKSLGVCPTTMKRICRQHGISRWPSRKINKVLFLYLLALHQSLSM

SEQ ID NO: 53372 - protein, 61 aa, Zea Mays
MPLQCTTLLVAALVHLLELAMLTCWITRALKRNLQKLAHGRFMRMSSTSSTSTSCSLFSSL

SEQ ID NO: 53373 - protein, 843 aa, Zea Mays
MRREGAPKERELLCGRIIDRPIRPLFPPGFYHEVQIMVNVLSSDGKQDPDVMAANASSAALMLSDIPWNGPIGVIRVGRIDGAFILNPTVDELGLSDLNLVYACSRDKTLMIDVQAREISERDLQAGMKLAHSEAIKCIDPQISLAKRAGKKKKEYKISLISDTSYEKIRTFSEAPIEEVFTDSSYGKFERGGALEKITQSVKAKLEEENDEDSLKFLHKAVDTVRKQVIRKRIIEEGLRVDGRQLDEVRPLYCESNTYPLLHGSALFSRGDTQVLCTVTLGAPGDAQRLDSIVGPPTKRFMLHYSFPPFSIDEVAKRGGLNRREVGHGTLAEKALLAVLPPESDFPYTVRVNAEVMASDGSTSMASVCGGSMALMDAGIPVREHVAGVSVGLVSQVDPATGDISNYRILTDILGLEDHLGDMDFKIAGTRKGITAIQLDIKPAGIPLDIICESLEPARKARNQILDRMDQEISTARGINDGSSPRLATLSFSNESLRKLLFHRKKIEQETGARVSISDGTVTIVAKTQEIMDKAIEKVEFLVGREIEVGRTYKGIVSSIKEYGAFVEFNGGQQGLLHISELSHQPVTKVSDVVTLGQSLSLRCIGQDMRGNIKLSLKATLPQPRIKKDLKNKDPLPSEVTGWAAVENMSSVDVDAQLSSTEHENGTTEEAAAFSTPSVIIRSAADCDAQDDANGSKKRAKVAKSSPRPNKPASECHDVRKATAKKATGATTKKTKKVKIEESVSNGLETSGSDVPEQSADNTSDQNQSPTKFQSGAMKLGDVVTAKVYQIRAYGLVLELSDGVRGMHKFEANGLKEFEVGQELVVKCSSFNAKGIPLFSLLD

SEQ ID NO: 53374 - protein, 175 aa, Zea Mays
METASFLSVALALAALVPVSLLLVNRLLYGKLPPGPRRRPVVGNLFDVQPVRCRCYQEWARRYGPIMTVWLGTSPTVVVSTSELAKEVLKTHDQQLADRCRDRSTESFSRGGQDLIWADYGPHYIKVRKLCNLELFTQRRLEALRPIREDEVTAMVESVYKAVTAPGSAGKPLVV

SEQ ID NO: 53375 - protein, 312 aa, Zea Mays
MEAEAVVAGAGEQAGISAVIPGWFSEISPMWPGEAHSLKVEKVLFQGKSDYQNVMVFQSSTYGKVLVLDGVIQVTERDECAYQEMITHLPLCSIKDPKKVLVIGGGDGGVLREVSRHISVEQIDICEIDKMVVDVSKQFFPHLAVGFEDPRVSLHIGDGVAFLKNAPEGTYDAVIVDSSDPIGPAQELFEKPFFQSVARALRPGGVVCTQAESIWLHMHIIEDIFVNCRQVFKGSVNYAWTTVPTYPSGVIGFMLCSTEGPAVDFQHPVFNIEEDEHSTKSKGPLKFYNSEIHTASFCLPSFAKRVIESKAS

SEQ ID NO: 53376 - protein, 52 aa, Zea Mays
MAEAEATVGRLMLYSYWRSSCSHRARIALNLKGVDYEYKAVNLLKGEQSDPE

SEQ ID NO: 53377 - protein, 499 aa, Zea Mays
MKDPAHRTKVVLRRLPPAIAQQAVVDQVDARFAGRYDWACFRPGNASQKNHRYSRLYLNFKHPEDVVEFAEVFNGHIFVNEKGAQFKAFVEYAPSQQVPKSNVKKDGREGTVTKDPEYLEFLEFISKPTEHLPSAEIQLERKEAERAAAGKEAPVVTPLMMYVRQQRAAKSMAQRPGSRLSRKVAGVVTSSSSPKRSFEKRRSSTYVVRDSIKEKPTYIMVPKREEHTQREKIVSGNSDATSGGASGSGQSSDKIVILKGRGRVDSNTPDGAAQQSSTPVKNIPPSSSRLDKRSEANGRIIKTVLSNKEVRSSNPSQHEQEGQMFNTEKDKRPPRALNPRTIVKDQVVENAERSHFDEKNNYLHSSAPIGEKVERHARNRDRPDRSVWAPRRYDKSPPGGVSHALSSDFSQMQSHSGDNVSQLTDGHGDRKTDTRGHGGSRGVPVENGHRHANRRGTPCDPKETKISASVPDGKNSKRGSASYGAHERQVWVQKSSSGS

SEQ ID NO: 53378 - protein, 498 aa, Zea Mays
MAATGVVAEPKTKYDRQLRIWGDQGQAALEKASICLLNCGPTGTEALKNLVLGGIGSVTVVDGSKVESSDLGNNFLLDEGCLGQPRAKSICSFLQELNDAVKAKFVEESPAHLIDTNPSFFSQFTVVIATQLPESFLLKLDYICRKADIVLVAARSYGLTGLVRVSVKEHCVIESKPDHFLDDLRLHNPWTELKQFAKSIDINDKDPVVHKNTPYIVILVRLAEKWADAHDGNLPSTRQEKKEFKDLIRAHMLNVDEENYKEAVDSSYKVSVTPGINNEIRQIIDDDSAEVNSSSSDFWILVAALKEFIAKEGNGELPLEGTIPDMTSLTEYYVSLQKIYQAKAEFDCLALEHHVKEILKRIGRDPDSISRAYIKTFCKNSRKLRVSRYRSFEEEFSSPFVPEIQRYFTDEDYSYATNFYILLRAVDRLAANYSRLPGIFDRLKTVAASVASEMGLNGASLSEDLITEMCRFGGAEIHPVAAFVGGVASQEVIKFDLG

SEQ ID NO: 53379 - protein, 213 aa, Zea Mays
MVKWMQDLRSSRERISSITCKRTPSCWDATARNQQWMWISRASVGIGDKKFYFLLPTRSIFASAAAARHAPIIPQQLPPPPYAHARAGRPRLSEFHDRSFEGDYGREVDEIGNGISETAMRGKLVKRNKKSSGDLDIYGGHRINVEAIGTLGEDSRSEIRSRGDRDIDNQQALQAEEKDVVSSVATVLSDLCGPGEWMPMAKLHNECYHMFIN

SEQ ID NO: 53380 - protein, 1620 aa, Zea Mays
MAAPGRRTADVSSSSPSPSPAAPSTGRRLLRTQTVANLGESIFDSEVVPSSLVEIAPILRVANEVEVENPRVAYLCRFYAFEKAHRLDPTSSGRGVRQFKTALLQRLERENDPTLKGRVHKSDASEMQRFYREYYRKYIQALQTVVNKDDRARLTKAYQTAAILFEVLRAVNDSQSVEVDQAILDTHIKVEEKKKLFLPYNILPLDPESTGEAIMRYPEIQAAVYALRNTRGLPWPKDQDKKPEEKNTGKDLLDWLQAMFGFQKDNVSNQREHLILLLANVHIRKIPKADQQPKLDDKALDDVMKKLFKNYKKWCKYLGRKSSLWLPTIQQEVQQRKLLYMGLYLLIWGEAANLRFMPECICYIYHHMAFELYGMLAGNVSPMTGENVRPAYGGDEEAFLTKVVTPIYKVIEKEAERSKTMKSKHSHWRNYDDLNEYFWSVDCFRLGWPMRADADFFKTPKDPYLNHLNGENRSAGNVHWMGKVNFVEIRSFWHIFRSFDRMWIFLILSLQAMIIIAWNGGTPSDIFDAGVFKKVLSIFISAAILKLGQAILDLVFGWKAKRSMSFAVKLRYVLKLISAAAWVVILPVTYAYTWENPTGLARTIKSWLGDGQNQPSLYILAVVIYMAPNILASMLFLFPFMRRILESSNVKVITIMMWWSQPRLFVGRGMHEGAFSLFKYTMFWIILLAMKLIVSFYIEIKPLVQPTKDIMREPIRTFQWHEFFPHGTNNIGVVISLWAPIILVYFMDTQIWYALFSTLIGGIYGAYRRLGEIRTLGMLRSRFESLPEAFNERLIPSDANKSKGLRAAFSSRPKASGDESEREKRAARFAQMWNAIITSFREEDLIDNREKDLLLVPDCKDRELDIFQWPPFLLASKIPIALDMAADSGGKDRDLTKRIKSDPYFSFAIRECYASFKNIINTLVFGQREKDVLVQIFTVVDKHIEEETLITGLNMKNLPALSKKFVELLELLQKNKEEDLGQVVILFQDMLEVVTRDIMEEQDLLETLDSLHGANSRKHEGITPLDQQDQLFAKAIKFPVVESNAWTEKIKRLHLLLTVKESAMDVPINLDARRRISFFANSLFMDMPNAPKVRNMLPFSILTPYYKEDVLFSLQNLEERNEDGVSILFYLQKIYPDEWKNFLERVGCKNEEVLREDEQLEEKLCLWVSYRGQTLTRTVRGMMYYRKALELQAFLDMANNDDLMKGYRAMEVMSEDSPLKTQCKAIADMKFTYVVSCQLYGIQKRSNEPCAHDILRLMTEYPSLRVAYIDEVEAPSKDRIKKIEKVYYSVLVKASVTKPNEPGQSLDQVIYKIKLPGNAILGEGKPENQNHAIIFTRGECLQTIDMNQEHYMEEALKMRNLLQEFEKKHGVRHPSILGVREHIFTGSVSSLAWFMSNQETSFVTIGQRVLANPLRVRFHYGHPDVFDRLFHVTRGGVSKASKIINLSEDIFAGFNSTLREGNVTHHEYMQVGKGRDVGLNQISLFEAKIANGNGEQTLSRDIYRLGHRFDFFRMLSCYYTTIGFYFSTMITVWTVYVFLYGRLYLVLSGLDEALATGKSFSWPLFSSHSRWEQKLTTTEGRYSMEERNTEPLDVGLWCSMPNLLRTIDFIPVAILSRALS

SEQ ID NO: 53381 - protein, 291 aa, Zea Mays
MTKRYTSSSGERRIRVHTAAAPVVTDLSEMYRQADTGAIVSLLGRIAVENSLSDKLDSVRQQLQLKLVRSLKEYRNLYVVQHRIGGRLIFPESLKFLPLYILAICKTLALRGGYADVSLDERCAAGFSMMILPVKRLLNFIYPSLYRVDEVLTMEPNKIDGWLKRLPLTFQCLDTGGLYLLDDGFTFLVWLGRMLPPELVNNILGVSLANFPDLSKILLRECDNELSRNFMKILRYLREKDPSYHQLSLVVRQGEQPRESYLLLSNLVEDQMAGTSSYVDWIQQIHRQTQS

SEQ ID NO: 53382 - protein, 78 aa, Zea Mays
MERGLTIAFALCLHFAPCASSVLSVGMSCCTCNASNQRILKYKFLEMYVLYYGIAFWLQKTLHDTSSRVICDDDLNHQ

SEQ ID NO: 53383 - protein, 384 aa, Zea Mays
MQDTPYTHIHEVVFSTIDKPKLLSQLSALLSDIGLNIREAHVFSTHDGYSLDVFVVDGWPIKDTDGLHKALEASILRNEGSWSGSSHSSAAERTLPFQVKGGEWEIDKRLLKMGGLIVSGSCGDLYHGTYLGEDVAVKVLRAEHLNKNVWNEFTQEVYILREVQHTNVVRFIGACTKPPQFCIITEYMSGGSLYDFVHKQHNVLNLTTLLKFAVDVCRGMCYLHERGIIHRDLKTANLLMDNDHAVKVADFGVARFQDQGGIMTAETGTYRWMAPEVINHQPYDSKADVFSFAIVLWELITSKIPYDTMTPLQAAVGVRQGLRPGLPKKTHPKLLDLMQRCWEADPSDRPAFSDILAELEDLLAQAQGTSGKTVQDPSNSNAKD

SEQ ID NO: 53384 - protein, 52 aa, Zea Mays
MRLWTHYPDCDAFQHLCHWIVISVSPNFCSTSILLRQISYKHAICPINLFIM

SEQ ID NO: 53385 - protein, 333 aa, Zea Mays
MCMLAGEVDMTEIRHQASCKHVQEGSINQRSGKSKVQASPSENSGPNQCSSKGQPGRRNHQIERHCQHHHHHHHTMLNMMTDLSCGPSSKVKEQVAAAPTGSGDRQGQGRGKIEIKRIENTTNRQVTFCKRRNGLLKKAYELSVLCDAEVALVVFSSRGRLYEYANNSVKSTIERYKKANSDSSNSGTVAEVNAQYYQQESSKLRQMIHSLQNANTNIVGDSIHTMGLRDLKQMEGKLEKAIIKIRARKNELLYAEVDYMQKREMDLQTDNMYLRSKIAESNETGQPAMHMTMGAPPTSEYDHMAPFDSRNFLQVSMPQHYSHQLQPTTLQLG

SEQ ID NO: 53386 - protein, 312 aa, Zea Mays
MLEEALQGQYHTSSHVVAVRGVAKPEAAATPARRSRPIPLASVAVWSLVATGAANAAELWDPLALHGSSGLVLADLGIGDWFGGLLFSAGQQANEAVQDQLSALSFSSLAVIFGAGLVTSLSPCTLSVLPLTLGYIGAFGSGKGRSEVVGNSIAFSLGLATTLAILGVAASFAGKAYGQVGQGLPVAASGLAIIMGLNLLEVLELQLPSFFSDFDPRAAAANLPSGVQAYLAGLTFALAASPCSTPVLATLLGYVATSRDPIIGGSLLLTYTTGYVAPLLIAASFAGALQSLLSFRRYSAWINPIRSSMLPG

SEQ ID NO: 53387 - protein, 71 aa, Zea Mays
MIGKKVSEKILDKKELEFYKWEGNLSQLLQNVRNKLNQVASSWSREEKDHCLEETEKSFAYSGGLLRHIFT

SEQ ID NO: 53388 - protein, 112 aa, Zea Mays
MASQPMSSSSPWPGYHQNPAVSFHHQRLYSSACHGFFPNHQVQERPVERRPELGAQPFPSWAWQAQGSPHVPLHHSAASSGFSTAAGANGGMPLPSHPPAQFPTTTNPFFFP

SEQ ID NO: 53389 - protein, 87 aa, Zea Mays
MELAEAAGARRQAHRLQGGKRYYGLYYLEYTLQNPGERRRHIVSAIGMAFNGWYNRLYTVTGQYIDDDDSEKYRPQIEKAVGSFRLT

SEQ ID NO: 53390 - protein, 411 aa, Zea Mays
MITLFATIQIMENGKAYAIEGDVYFSVESFPEYLSLSGRKFDQNQAGARVAFDTRKRNPADFALWKAAKEGEPFWDSPWGRGRPGWHIECSAMSAHYLGHVFDIHGGGKDLIFPHHENELAQSRAAYPDSEVKCWMHNGFVNKDDKKMAKSDNNFFTIRDIIALYHPMALRFFLMRTHYRSDVNHSDQALEIASDRVYYIYQTLYDCEEVLATYREEGTSLPVPSEEQNLIGKHHSEFLKHMSNDLKTTDVLDRCFMELLKAINSSLNDLKKLQQKIEQQKKKQQQQKKQQQQKQQQQKQQQLQKQPEDYIQALIALETELKNKLSILGLMPSSSLAEVLKQLKDKSLKRAGLTEEQLQEQIEQRNVARKNKQFEISDGIRKNLATKGIALMDEPSGTVWRPCEPERSEES

SEQ ID NO: 53391 - protein, 579 aa, Zea Mays
MGGGGAIVHGFRRWFHRRSEGSTSNSNQSSLAGEGEADDGSSDLEVIEDPDLLGLRAIRVPKRKMPLPVESHRKNSVEMEFFTEYGEASQYQIQEVIGKGSYGVVAAAVDTRTGERVAIKKINDVFEHVSDATRILREIKLLRLLRHPDIVEIKHIMLPPSRREFQDIYVVFELMESDLHQVIRANDDLTPEHHQFFLYQLLRALKYIHAANVFHRDLKPKNILANSDCKLKICDFGLARASFNDAPSAIFWTDYVATRWYRAPELCGSFFSKYTPAIDIWSIGCIFAELLTGRPLFPGKNVVHQLDIITDLLGTPSSETLSRIRNEKARRYLSCMRKKYPVPFTHKFRHADPLALRLLERLLAFDPKDRPSAEEALADPYFASLANVEREPSRHPISKLEFEFERKKLAKDDVRELIYREILEYHPQMLEEYMKGGEQISFLYPSGVDRFKLQFAHLEEHYSKGERGSPLQRKHASLPRERVVVSKDGNTEQQINDQERSADSVARTTVSPPRSEDADMDDVKPTSLSSRSYLKSASISASKCVVVRNKHPEPEDDGIPEEMEGTVDGLSEKVSRMHS

SEQ ID NO: 53392 - protein, 263 aa, Zea Mays
MRVVERVQKKTGRKVELLSPIPPPTPPEEKKAEEEPEPPKPEEKKEPPVIAVVLKVHMHCEACAQGIRKRILKMKGVQSAEPDLKASEVAVKGVFEESKLAEYVYKRTGKHAAVVKSEPVPAPPPESGAGDNTGAKEEEKGQEEEKEKEGGGDGGGEEKKKEGGKEEEKKDGEKQEEEKEGGGGGEKVEEKEGDKDAAAAAAASMYMHYPRFPFPGGYYAPPPGYVYQPVYPAPAYAAYAPPHHQPMAPQIFSDENPNACSVM

SEQ ID NO: 53393 - protein, 142 aa, Zea Mays
MSHPIPNTAESHSVQIILPQKQLGRRSDMYVFCCSYSHNVASKGKFIAFVSAQAETDNPEKELKPGIDLLGKVDELFIDIYDRYEPTNDSSADNCFISTSYDATTHFESTVMDVLSLYTKITGKTVDLSVDLSAASAAEDDM

SEQ ID NO: 53394 - protein, 367 aa, Zea Mays
MELITNVTEYEKLAKERLPKMVYDYYASGAEDQWTLKENREAFSRILFRPRVLIDVSRIDMATNILGFSISMPIMIAPSAMQKMAHPDGELATARAAASAGTIMTLSSWSTSSVEEVNSVGPGIRFFQLYVYKDRNIVRQLVKRAEMAGFKAIALTVDTPILGRREADIKNRFALPPHLVLKNFQALDLGTMDKTNDSGLASYVAGQVDRTLSWKDVKWLQTITSLPILVKGIVTAEDTRLAIEYGAAGIIVSNHGARQLDYVPATISCLEEVVREAKGRLPVFLDGGVRRGTDVFKALALGASGVFIGRPVLFSLAVDGEAGVRKVLQMLRDELELTMALSGCTSLREITRAHVITDSDRIGRSRL

SEQ ID NO: 53395 - protein, 66 aa, Zea Mays
MRLDYGVSIMARNCRALRSQSHTRIRCAACLSAADPQPHDLCWSPYNGRALCMTSADALPPKRRWW

SEQ ID NO: 53396 - protein, 349 aa, Zea Mays
MRGAYDFVCIFYLVLRALDTVEDDTSIPTEVKVPILQEFYRHVYNRDWHYSCGTNHYKVLMDKFHLVSTAFLELGQGYQKAIEEITRRMGAGMAKFICKEVETVDDYDEYCHYVAGLVGYGLSRLFYAAGTEDLAPDSLSNSMGLFLQKTNIIRDYLEDINEIPKSRMFWPREIWSKYADKLEDFKYEENTEKAVQCLNDIVTNALIHAEECLQYMSALKNHAIFHFCAIPQIMAIGTCALCYNNVHVFRGVVKMRRGLTARIIDETNSMSDVYTAFYEFSSLIESKIDDNDPNAALTRRHVNSIKQTCKSSGLVKRRGYHLDTSPYRPMLIMIVLLLVAILFGALYTK

SEQ ID NO: 53397 - protein, 361 aa, Zea Mays
MGEVSDDNSNLSFLKRIATSDVPLLKEYGVNGVVVALLLAVVTPVLLSMMFGKKTKQRAVRANVGGEEGFAMRNSRFSSLVEVPWEGATTMSALFEMASKKYSRRRCLGTRKLIKREFVESSDGRKFEKLHLGEYEWDTYAEAFNRACNFASGLVKMGHDLDSHAAIFSDTRAEWIIAAQGCFRQNLTVVTIYASLGEDALVHSLNETQVSTLICDSKQLKKIPAISSKLQSLRHIIYIEDEPVEAETLNQVKHLTTLSFTEVEELGKTSSVDARLPSSSDTAVIMYTSGSTGLPKGVMITHGNMVATTAAVMTIVPKLGMNDVYLAYLPLAHVFELAGEFLQFWIVSEMQCLRKLVRRVA

SEQ ID NO: 53398 - protein, 230 aa, Zea Mays
MHAMWKPAKFKYIYLLATLYVFTLTLPSSAAMYWAFGDELLTHSNAFSLLPKTRWRDAAVILMLIHQFITFGFACTPLYFVWEKVIGMHDAKSIFKRALARLPIVVPIWFLAIIFPFFGPINSAVGALLVSFTVYIIPALAHVLTYRTASARMNAAEKPPFFLPSWTGMFVLNMFIVVWVLVVGFGLGGWASMVNFVRQIDTFGLFAKCYQCPKPPVPAAAQSPAPLPHH

SEQ ID NO: 53399 - protein, 731 aa, Zea Mays
MRAGMSYFHETIWKGVPKFLRRVDTALKNIGINERLPYNAPIIQFSSWMGGDRDGNPRVTPEVTRDVCLLARMMAANLYNAQIEDLMFELSMWRCSDELRVKVDQLYHSSKKDTTKHYIEFWKQVPPSEPYRVILSDVRDKLYNTRERARHLLASGFSEIPEEATFTDVEQFLEPLELCYRSLCACGDRSVADGSLLDFLRQVSTFGLSLVRLDIRQESDRHTDVMDAITEYLGIGSYRKWPEEKRQEWLLSELNGKRPLFGPDLPKSDEIADVLDTFHVLAELPSDSFGAYVISMATAPSDVLAVELLQRECHVKKPLRVVPLFEKLADLESAPAALARLFSVEWYRNRISGKQEVMIGYSDSGKDAGRFSAAWQLYKAQEELINVAKLYGVKLTMFHGRGGTVGRGGGPTHLAILSQPPETIHGSLRVTVQGEVIEQSFGEEHLCFRTLQRFTAATLEHGMHPPISPKPEWRALMDEMAIVATKEYRSIVFEEPRFVEYFRLATPEMEYGRMNIGSRPSKRKPSAGIESLRAIPWIFAWTQTRFHLPVWLGFGAAFKHVLDKDIRNLQTLQEMYNQWPFFRVTIDLVEMVFAKGDPGIAALYDKLLVSEDLWALGARLRANYEETKQLLLQVAGHKDLLEGDPYLKQRLRIRDSYTTALNVCQAYTLKRIRDPGFQVKPRPHLSKDIMDMGKPASELVKLNTTSEYAPGLEDTLILTMKGIAAGMQNTG

SEQ ID NO: 53400 - protein, 349 aa, Zea Mays
MLSLQQQHGGAVAAGGDARHHAPQPSVLGGGADWLVFGGRADLEEPARNAPSPALFLLPPAGLDDRAAQPEPNPKPAQLAGGDRADCFDFGLGEVGTKAVDEERHLALAHQNYRSGKYREALEHGNVVYEKNPRRTDNLLLLGAIYYQIRNYDMCIAKNEEALAIDPHFAECYGNMANAWKEKGDIDLAIRYYLTAIQLRPNFCDAWSNLASAYTRKGRLNEAAQCCRQALAINPRLVDAHSNLGNLMKAQGFIQEAYSCYIEALRIDPHFAIAWSNLAGLFMEAGDLDKALMYYKEAVKLKPSFADAYLNQGNVYKALGMPQDAIMCYQRALQARPDYAMAYGEHFHA

SEQ ID NO: 53401 - protein, 234 aa, Zea Mays
MGSALPPPSCVNDASVLLEFVMSSVTCMEETANLKVFELVATWADAIANWDSWEEMEDQGVFNTIKEAVNFHQRFDLDGLFLKTLPSQSENGSQSSVIGRVSNFVTRAIAAYPSATWRACSCVHTLLHAPKFSLGAQDTRKTISESFAQAAFSRFKSVSDSPAGLWKPLLLAISSCYICYPDAIEQVLNNVDGNGFAIWASALAQVSSSLFNPGLSSESEIKLAAEGSSGRWGQ

SEQ ID NO: 53402 - protein, 366 aa, Zea Mays
MVYSATTFKHAFDYKPTDIYWCTADCGWITGHSYVTYGPLLNGATVLVFEGAPNYPDPGRCWDIVDKYGVTIFYTAPTLIRSLMRDGTEYVARYSRKSLRVLGSVGEPINPTAWRWLYDVIGDSRCPISDTWWQTETGGFMITPLPGAWPQKPGSATFPFFGVQPVIVDEKGREMEGECSGYLCIKKSWPGAFRTLYGDKERYETTYFKPFAGYYFSGDGCSRDKDGYHWLTGRVDDVINVSGHRIGTAEVESALVSHPKCAEAAVVGIDHEVKGQGIYAFVTLVDGVPYSDDLRKSLVTTVRSQIGAFAAPDKIHWAPGLPKTRSGKIMRRILRKIASRQLDELGDTSTLADPGVVDQLIALSDS

SEQ ID NO: 53403 - protein, 135 aa, Zea Mays
MVPVPFIILYLKKLATFLSQNSASATRIMDLLFERARRKAAPVEEFQWLGLMLFVAVPFPGTGAWTGAFIASVLGMPFWSGFTANFVGVVLAGLLVNLLMNLGLKYAIVTGVVLFFVSTVMWSVLRSLKKSVNVK

SEQ ID NO: 53404 - protein, 56 aa, Zea Mays
MPPRLLSIVFIIPLRAYIICVMVTSLMFLFFIFISFLIFCTMGVQISTIKLHFISP

SEQ ID NO: 53405 - protein, 616 aa, Zea Mays
MLSLPRTAAAVTVYALVALIAGAAAAGGGEQPLSRIAIHRATVAPQPGAFVDASPALLGREGEDREWVTVTYSNPRPSKDDWIGVFSPANFNDSICPPENEWVEPPLLCTAPIKFQFANYTNRDYGNTGKGSLRLQLINQREGFSFALFSGGLSNPKLIAHSKSVTFINPKTPVYPRLAQGKSWNEITVTWTSGYGTNEATPFVRWGIEGQIQTLSPAGTLTFSRDTMCGPPARTVGWRDPGFIHTSFLKDLWPNLLYTYQVGHRIFNGSIVWGHQYSFKAPPYPGEDSLQRVVILGDMGKAEVDGSNEFNDFEPGSLNTTNQLIKDLKNIDVVFHIGDITYANGYLSQWDQFTAQVEPIASTVPYMVGSGNHERDWPGSGSFYGNLDSGGECGVPAQNMFYVPAENREQFWYSTDYGMFRFCVANTELDWRPGTEQYRFIEHCLSSVDRQKQPWLIFLAHRVLGYSSATFYADEGTTEEPMGRESLQPLWQKYKVDIAMYGHVHGYERTCPVYENACVAKGSDLYAGAFTATTHVVVGGGGASLADYTAARARWSHVRDRDFGFVKLTAFNHTRLLLEYKKSRDGSVHDHFTISRDYRDVLACGVDNCPSTTLAS

SEQ ID NO: 53406 - protein, 345 aa, Zea Mays
MVVGDSQIVSPDNIVPSAGKSLGVESAVFSSEGNVPGGNLSTPAVRHLAKQYGISINEIVGTGKDGRVLKEDVLNYAVSKGVCKQQSLASEGNIGQVELLEEGKALLDEDFYEDKKILLRGYQRSMVKSMSLAAKVPHFHYLEEINCDSLVQLKTTFQNENKDQTIKHTFLPFLIKSLSMALSKYPMLNSSFIEETNEVVFKGPHNIGVAMATTHGLVVPNIKKVQSLSILEITKELARLHEMASQNRLSAADIEGGTITLSNIGAIGGKFGSPLLNLPEVAIIALGRIQKLPRFDDDENVYPSSIINVTVGADHRVVDGATVARFCNEWKSLVEKPELLLLHMR

SEQ ID NO: 53407 - protein, 70 aa, Zea Mays
MDMSESIMDFLRPLVCSRKHYIGIIRNHDPYSLGKKNNDPRSLILVGVILLFFRMSYLWTLVLQSLLLNR

SEQ ID NO: 53408 - protein, 358 aa, Zea Mays
MQLVMSSFNMVAGAGAAKPYTAVALQTISRHFRCLKDAINDQISVIRKKLGEDDNTSGKEGKLTRLRYIDQQIRQQRAFQQYGMLQQNAWRPQRGLPENSVSILRAWLFEHFLHPYPKDSEKLMLSRQTGLTRSQISNWFINARVRLWKPMIEDMYKEEIGEAELDSNSSSDNGQRNKDKAPSPEENEDLQTPTSQACQTSQLGQSKAIVGGVMGFSGVLAGGFHTEANPDDSFMSLMLKAQRPGETEGTGLLHDAVAHHSDDGARFMAYHLAEFGRYGNSSNVSLTLGLQHAENSLAVPPNTQPGFPGVRDQDMYNATAPPLNVASTSSEYDSASQIDQQQQRQRFEPSPLMHDFVA

SEQ ID NO: 53409 - protein, 73 aa, Zea Mays
MQTLQTRCEGGLDHLVPISTLWGARIMVRLMKEMFSGTGTRQSLEATTENRLWRGWQGLGRHYQTESKLRIDS

SEQ ID NO: 53410 - protein, 678 aa, Zea Mays
MTTSAADDGSSLAPTITEGETTADAGAGAGVECVEGKEMKVGAAAPVEEPDKEAAREEDPGDDDDYEEEEEEEEEEEEEEEEEEEEVEEETETANGKEAELMEPLAALKPGEEVKPEKLEGEKEELDEEPEASEEDPEEVEELKEEGDGIAEEGLVDGSEANDDKDADQLSSGSDSGGSRSRGMQNSELAGGLEIFVDDLPQDCVKEDIAMAFSQSGEVKSVRIIKNSSTGKNQDIAFVCYTSIEAAKKVLAEFKEGIEVKGKMVRVSACQDNNTLYLGNICKGWTRDQVLNTLKSIGIQECEISFPSYKGGSRGFAFLKFTSHYYARAALRRLMKSDAIFGTDRSAKVSFYRTPTKSSKRLIQAKIVYLEHVPLSWDENKVKEYCEEYGEILKADVFQISKNMENETISFVEFSSRKGALACVTGINKANIVDGSFKLCAYLAWPKSASKVNSAAPSNAATATEKDKTHTEKILVDIDLQHKFQKGDKSKLTSQTKEAIMKKKKSSKLPNDNDTKLTSQGAAEVPQTSKSSEGKRKVGKNKHASVYQKPLKKAINNRNVDESQLTHRSAAVLQTSNTSKGKRKASENRSLYLNEKALKKARGNSNLGGSSRSKSYASDLEPHAGFISPAIRDNGSDAYNRQRTARYDIHPIDVHPYARVVLEIMSGKVGNQPVNCRP

SEQ ID NO: 53411 - protein, 61 aa, Zea Mays
MFVLFFEYPTKLVVLVSWEPMLRCTNEICERHAKAARSERQPEEERPETEAVPQALRYIRR

SEQ ID NO: 53412 - protein, 112 aa, Zea Mays
MFDLLFITALASLWRHTTRRVVGPDGMDYLQNVFCIIGLVMFHGRVQWCSMKTVACKIFMTSCGIVSLRGVVVMVHSFAILERSLRTATECATIVLPLLSRRILMSPTIQKL

SEQ ID NO: 53413 - protein, 162 aa, Zea Mays
MLKLDRSGTATSLTGGIGAAGVAVPATSVIGAAGAASLLSPTVSAVGSVPGAPVLPITAQNVIMSTPTEFLLLKNMFDPSLETDPDFDLDIRDDVQDECSKFGAVKHIFVDKNTAGFVYLQFDSVTAAGKAQQALHGRWFAGKMITATFMSDQEYSTKFPNL

SEQ ID NO: 53414 - protein, 1408 aa, Zea Mays
MAKMNEIVKLADELLPSLPVGTISLPVYSGVHMKGCSVKKSTSSKQGEHGSTANELSGREKLLRDQPELLQQFGMDLLPTMTQVYGSSVSGPIRHRCLSVIGKLMYYSSAEMIQSLLSTTNISSFLAGILAWKDPQVLIPALQIAEVLMEKLPEIFLKMFVREGVVHAVESLICPELSGQVTPHVDSITSSHNRRNRRRNNAVNTGNNLPDGPKGSNSMIANSPPSMAEVPNNSLRALVSNHAKSFKDKYFPSEPGSSDIAVTDDLLKLRALCAKLNTTADTIKTKAKGKSKVVSDNSFDVLCNIEEQLDDIIAEMLSELSKGDGVSTFEFIGSGVVTALLTYLSCGTFGREKVSEANIPNLRHQAVRRYKTFISFALPNDKDGNKTPMAFLVHKLQSALSSLERFPVVLSHSGRASTLGGSRLTTGLGSLSQPIKLRLCRAPGEKSLKDFSSNVVLIDSLASLAAVEDFLWPRVQRTEPVLKPPMSSANNSGSGAASSTACAPSIPSETQSVRRTSLRSKSSAATSGAIKKDYQEGSINTSKGKGKAVLKLSLDEPKGPHTRNAARRKATSEKDVELKPSHGHITSEDEDLDASPVEIDDALILDDDDEDVPDDEDDDHEAVLRGSLPSCVPERVHDVKLGDADDSSVASLANDNQAQPSSGSSTKNTSSRGLDTAEFRSPATFGSRGAMSFAAAAMAGLTPVGGRGIRGSRDRNGLPLGARATEHYNKLIFTAAGKQLNKHLTVYQAVQRQVVHAEDDEDRFGGSDLPDDGNHFWDDIRGDVFTITYQKADNTAEKGSVGGSASVPKSSKSDSCRTLSEKQCTSLLDSILQGELPCDLEKSNQTYNILSLLHVLEGLNQLSPRLRLQSACDDFAEGKVATLNGLYDVGAKVPSKEFINSKMTPKLARQIQDVLALCSGSLPSWCYQLTKACPFLFPFETRRQYFYSTAFGLSRALHRLQQQPGNDNNTAFEREVRIGRLQRQKVRVSRNRILDSAAKVMEMFSNQKAVLEVEYFGEVGTGLGPTLEFYTLLSRELQRVDLGLWRSHSSDNSGMQIDANADDLIRSKNHESESLTESRNIVQSPLGLFPQPWPPTAAASEGSKFFKVVEYFRLVGRVMAKALQDGRLLDLPLSTAFYKLLLGQELDLYDILSFDTEFGKTLQELQILVARKQFLDSCSSESQKIDLCFRGAPVEDLYLDFTLPGYPEYVLKEGGENAEVNICNLEEYISLVVDATVKTGIMRQVEAFKAGFNQVFDISSLQIFSPQELDYLICGRCELWEPETLPEHIKFDHGYTSKSPAIINFLEIMAEFTPEQQHAFCQFVTGAPRLPPGGLAALNPKLTIVRKHSSVANNNSNATGATESADDDLPSVMTCANYLKLPPYSTKAIMLKKLLYAINEGQGSFDLS

SEQ ID NO: 53415 - protein, 75 aa, Zea Mays
MVCHVMRGDFSRDFFEGCRAILLDKDRNPKWMPPRLEQVHDEAVEQYFSRIDDPQWEDLNLPARRSHGRNIESKL

SEQ ID NO: 53416 - protein, 372 aa, Zea Mays
MVVHVSEIDPMKWPGSKWRSLLVRWEDGVECNGQDRVSPWEIEIAGGSVSVAHSVSASSSKRTKLCPQGNLDVPTMWNGNGCTDSVETGKFPRVLQGQDLMSFRTRHVPSAPQTVEAAKLQSSGASRFLSNARGCALGGPTSRLAVHNSDFTYQSVGFNESIGFSEVLQGQEISRAVPMFQGMMSEACSLKGGYGLHSYMRTPVAVTGLSATTQECSLTLSTPPGAQVPSVYPDNIFNRTVVRQLGLASKFDGGATNAQQSVPFDRPREIWSKPQHEISDQTKMDHFETRRASAPGDDAAKHGSGGEVVRKTSCRLFGFSLTEKILPADDDGIKEVTYEPECQNPRMLDLFGYNCSAPSAALPALCAAPFGM

SEQ ID NO: 53417 - protein, 592 aa, Zea Mays
MAAAPHQAQGPADSVIPLQSEPALDNNPSKSANARDQILSGTENVTTGNARGGSSLKSQKGPPEKASSVGKPGEQPFPYHQNVYAPQPQPLYPGGYMNPSGQWEEYPHYVSMEGLHSVSPGIYNDNQSLMLSPGYANNPQMMYGAYSPVSTVGDGQQYLPMHFPFSSPYYQPPASPSMGYSSSATGISQGDPMLQQEYFLPDGLLYSPTQGYHQPFSSFDRAPTQLNNAPGLFGQGNLPLASGMHHGSMYGPGSYKGRQQGSKFGGSTTSWSSAGRRFGTIDLSGNQQRGSMPFGSHNGSLEFMNEQNRGPRATKPKIQGTENTSGDERSEKIVPLIDSELYNRSDFITEYKDAKFFVIKSYTEDHVHRSIKYKVWASTASGNRKLDSAYHAAKEKEEHCPIFLFFSVNGSGQFCGVAEMIGPVDFDRSVDYWQQDKWSGQFPVKWHIIKDVPNNLLRHIILENNDSKPVTNSRDTQEVKLEQGLQMLTIFKNHEAETTIVEDFDFYEQREKALQENRRQQQPPTTYPQKLVDTNAQGPVADISDAFAKAVQLKDTANSGTTPKAEGASAENGSAATAKVEGSANLNTGPVE

SEQ ID NO: 53418 - protein, 146 aa, Zea Mays
MSLAIGYLNKYLELFMADHDAWRELAETYVSLQMYKQAAFCYEELILSQPTIPLYHIAYAEVLYTMGGLENLQTAKKYYASTIQLTGGKNTRALFGVCLLTKGRNKEEEGSELQRLAAEVLLNNYKQQAPSKAPLISSLLKNMKLS

SEQ ID NO: 53419 - protein, 506 aa, Zea Mays
MYTDISPENAIIQGQRRLSKGVDYLVEASAAEAEAISATLAAVKARQVNGEMEHSPDREQSPDAAPSAKQNSSLIKPDPALMNNSTPPPGVRLHHRAVVVAAETGGALGGMVRQLSIDQFENEGRRVIYGTPENATAARKLLDRQMSINSVPKKVIASLLKPRGWKPPVRRQFFLDCNEIADLDNAERIFSSEPSVLQLKAPIKIFGDLHGQFGDLMRLFDEYGAPSTAGDIAYIDYLFLGDYVDRGQHSLETISLLLALKVEYPHNVHLIRGNHEAADINALFGFRIECIERMGERDGIWTWHRVNRLFNWLPLAALIEKKIICMHGGIGRSINHIEQIENLHRPITMEAGSVVLMDLLWSDPTENDSVEGLRPNARGPGLVTFGPDRVMEFCNNNDLQLIVRAHECVMDGFERFAQGHLITLFSATNYCGTANNAGAILVLGRDLVVVPKLIHPLPPAITSPETSPEHHIEDTWMQELNANRPPTPTRGRPQAPNNDRGSVAWI

SEQ ID NO: 53420 - protein, 515 aa, Zea Mays
MHFEKDKALARRFQPVLVDEPSQEDAVKILLGLREKYETYHKCKFTLEAINAAVYLSARYIPDRQLPDKAIDLIDEAGSRARMESFNRKKEGQSSILLKSPDEYWQEIRAAQAMHEVVLSNKEKYSPNENAEESGSANVEALHRDNIESTSTSSLSADEPVVVGTEEIARVASLWSGIPVQQLTADDKKLLVGLDDELRKRVIGQDDAVVAISRAVKRSRVGLNDPDRPIATLLFCGPTGVGKTELTKALAASYFGSESAMLRLDMSEYMERHTVSKLIGSPPGYIGYGETGTLTEAVRRKPFTVVLLDEIEKAHPDIFNILLQIFEDGHLTDSQGRRVSFKNTLIVMTSNVGSTSISKGRQSIGFLKEDTESGSYFAMKSLVMEELKAFFRPELLNRIDEMVVFRPLEKTQMLAILDIILKEVKGRLLALGIGLEVSDAMKDLICQEGYDKSYGARPLRRAVTHIIEDVISEAILFGEFKPGDTILMDIDAEGKPCMGHLDQQIVQVSDPTRAI

SEQ ID NO: 53421 - protein, 621 aa, Zea Mays
MKGSRRMVIGYDEGAIMIKMGREVPIASMDTGGKIIWAKHNEIQTVNIKTVGAGFEVTDGERLPLAVKELGSCDLYPQSLKHNPNGRFVVVCGDGEYIIYTALAWRNRSFGSALEFVWSSEGEYAIRESTSRIKIFSKSFQEKKTIRPSFSAERIFGGVLLAMCSSDFICFYDWVDCRLIRRIDVNVKNVYWADSGDLVAIASDTSFYILKYNRDVVASYLEGGKPVDEGVEDAFELLHEVNERVRTGIWVGDCFIYNNSLWRLNYCVGGEVTTMYHLDRPMYLLGYLANQSRVYLIDKEFNIIGYTLLLSLIEYKTLVMRGDLEHANEILSSIPKAQYNSVAHFLESRGMLEEALEIATDADYKFDLAVQLGKLDVAKAIVIEAQSESKWKQLGELAMSTGKLEMAEECLLQAKDLSGLLLLYSSLGDAEGIEKLASLAKEHGKNNVAFLCLFMLGKVEDCIQLLVDSSRIPEAALMARSYLPSKVPEIVAIWRNDLSKINPKAAESLADPSEYPNLFEDWQVALTVEKSVASQRDHYPPADQYLNHAEKSGMILVEAFKRMQVIEHEEPEDAAEENGEPDQQASEEKEMHNTDDADEHEETVSVNGNEGEEQQVLTEHE

SEQ ID NO: 53422 - protein, 661 aa, Zea Mays
MANLNITNILEKMTGKDKDYRYMATSDLLSELNKESFKADQDLEPKLTITVLQQLEDASGDVSGLAVKCLAPLVKKVGEDRVVEMTNKLCDKLINGKDQHRDTASIALKTIIAEVTTPSLAEKILLSLAPQLIKGVNTAKSAEIKCECLDILADVLHRFGNLITKDHEYMLNALLSQLGSNPASVRKKSISCIASLAPSLSDDLLAKATLQVVQLLKNRGAKSEITRTNIQMIGSLSRSVGYRFGPHLAETVPLLISYCTSASENDEELREYSLQALESFMLRCPRDISPYCEGILNLALEYVSYDPNFTDSMDEDTDEEAKEEDDDDESANEYTDDEDASWKVRRASAKCLSAIIVSRPEMLSKMFLEACPKLIERFREREENVKMDIFNTFIELLRQTGNVTKGQGDIDESSPRWLLKQEVPKVVKSINRQLREKSIKTKVGAFSVLKELVVVLPDCLADHFGSLVPGIEKALNDKSSTSNLKIEALVLTRLVMASHSPSVFHPYIKALSAPILSAIRDRYYKVTAEALRVCGELVRVLRPNLETTSVDFKPYIGPIYNAILGRLANQDQDQEVKECAISCMSLVVSTFGDGLERELPACLPILVDRMGNEITRLTAVKLLRIHLYVLISRVSWIMLFLSSQLSFARPTELLGRRRWEL

SEQ ID NO: 53423 - protein, 378 aa, Zea Mays
MPRAATGAITAAFLRAQAPHMAPLASRIARAFPGLATAAATRFAPSSSASSPRLGLVPRLRSARSFSGARASPVSGAVSGSSTSEEGQQLQSELIFLGTGTSEGIPRVSCLTHPTKICPVCTKAAEPGNPNRRRNTSILLRHATPSGTTNIVVDAGKFFYHSALQWFPTFGLRTIDGVIITHSHADAIGGLDCLRDWTNNVQSSIPIYVAERDYEVMKMTHYYLIDTSVVIPGAAVSALQFNIIKEEPFMVHNLEVIPLPVWHGQGYRSLGFRFGDVCYISDVSDIPEETYKLLENCELLIMDALRPDRSSSTHFGLPRALEEVRKIKPKKTLFTGMMHLMDHEKVNSDLARLIGTDGLDIQLSYDGLRIPGIAMADL

SEQ ID NO: 53424 - protein, 378 aa, Zea Mays
MVVLPRHYSPGIRGAPPPSVLSPATNRRAPAPPQPPFSLPPSSPPCPGAQGAEAGGPAGGHGRGLRLAARRPGGRRGWRRRPAVAQGRDQRRRPRAAGVPRVHQLHVPADPPVPQWTHAVFHMQGQSTQPLPYLQARAGRHQVSGAGESRRVAGAPLQVLLAGVPGDHALLQQDKARGAVRPETVQLPLRRLRVRRGRRHPFPRLPPEGRPQGGHAQRLHLQPQIREIQPAGGGERHLDADGVPLLRPLLLPALRGVPARDGARVHGLPPLHGGRERGQELQLQPRGRRQREEDGVGGHPKERPRQPPQGEGQPRRPHHPEEHGALLLRRGPEGAQAQDHRTDLERAADTRRRMYSKSVQLIKQSSNKQHLACPSFSF

SEQ ID NO: 53425 - protein, 188 aa, Zea Mays
MVGSPDLISIPGETGRTYEANVDDVGYRLVAIYTPVREDGVEGQPVSVSTEQIAVEPELYREVKQKLDDGSVKFEVLCDKDRTPKKAQVMGHLERRVLEVNRKRIKVVKPGSKTSFPSTEVRGTYAPPFHVELYRNDQHRFKIVVDGDTEVDLMVQTRHMRDRIILTIRGLAQKFNSTSLNTLLRIES

SEQ ID NO: 53426 - protein, 205 aa, Zea Mays
MIENHLALILGQRQSDATIAAISKLRVGQVYAASVMYGYFLKRVDQRFQLEKTMKSLPWGSEEEDGALYQVMTTDSMPSAQSSSSHPEMGSWTAAPDFNAGGPSESIKPCRLRSYVMSFDPDTLQRYATVRSKEAFGIIEKHTEALFGKAEIVVTPGGTVGSSKDEHIRISFAGLRRLVLEAVTFGSFLWDVESFVDSSYHFVTS

SEQ ID NO: 53427 - protein, 87 aa, Zea Mays
MRINMAISAAFEYGEVEGRGIRMAKRVVRALGLIFGCVFTASLAYTAASNMVELSLQYTPRMFYYYQELIVTVAASVLLYITASWYR

SEQ ID NO: 53428 - protein, 477 aa, Zea Mays
MKVEEQTVKLEMELFVKEKETFKVLKELQETKQVIDGLKIQIEKVTWEDTNAAKGHADTGMVHPLPAVEQNTEPPVQSAKGTQSPLTTLIKLNQAKAFLNTDTVNMLKSQIQKEKGSLEKTRERLQFNLGKASSLEADLTKTVARLQAAKAPQPVLEPSEIWLQMKHLNADKARHKKASEDLRNEICELTAAIEHTRSKTKTLQFRILMAEKLKEASQRGESVALAEMEKLSNGRDPNGSTSDAVTLSVEEHSTLVLKAQEADGAARKKVDAAMQGLDQANRCKLELLERVEEAMAAVETSRKALEEAQRREESETKAKLVAEETLRKLRSDQIIQNWRPTNSSSVKFKNTALLAPRRAAAGAGIYDVNGLSLVAAGPNSVKTVSIGQILSMKLDRELEMTRTTTTSARKKKVSLGQILSQKYEMFSPLRIDHDCASHRQFQQPRRKRMGFVVYALLLARQRHRRRKAASCTRGGLS

SEQ ID NO: 53429 - protein, 278 aa, Zea Mays
MESFTNGNVRLLKHERSIVAEDDLDQRWQEATGESVSEVIFLSKHTAVSKRPALTVHPIGVPHLKEDETPPQGGTPGWAAIPSPRIGPWLRLMQKIAVEQGLVPEFEVTLEATHHGPVTSTPTMFVEIGSTEDHWGRQDAAQAIALVLWKGLGLEDGNAVGTWQRNCEKVLLGIGGGHYVPRHMDIVIKDGVWVGHLLSGYSLPMDMSSQVNVKSSEEVAGMWKHSIKVSYEATKAAFPGGEVIAHLDHKSFKGWQKNAVTCFLQEQNIRIGKPSDFL

SEQ ID NO: 53430 - protein, 685 aa, Zea Mays
MVQLNGRSVSPGTKVPLTGGDEVIFSSCGKHTYIFLYPLNDKVPKTVLSSAVSLLEAPVASVKRIRTDKRTGDTSAVAGTEMMTSTSNQKDVAAVPPASAGENSQRVVRPLASSASDKLKGRAVSPEKEFANGENANEVNSNIEDSPMVVAAAPISPDAAANDTCQQNGFVSDSHLGAEIGKTATYKIRPVLRMITGSTISEFDLTGDDLFKALEDQRDHIIRELNASTNVPPSRCQAFKDGMKQGIINPSDIDVTFENFPYYLSENTKNVLLSSAFIHLKKKEFIKQFVEISSINQRILLSGPAGSEIYQETLVKALAKHFSARLLVVDSLLLPGAPSKDPEFQKDVGKADKSGDKAAAEKFAIYQKHRSSLADTVHFRRPAAPTSSVNADIVGTSTLHSASLPKQESSTATSKSYTFREGFVNYSSLLLNVLSYFFSQGMILLPGDRVRYVGPAQPCSLSQRGPSYGYRGRVMLAFEDNGSSKIGVRFDKQIPDGNDLGGLCEEDHGFFCSAELLRPDFSAGEEVERLAMTELIEVISEENKSGPLIVLLKDVEKSFTGVTESLSSLRSKLESLPPGVLIIGSHTQMDSRKEKAHPGGFLFTKFASSSQTLFDLFPDSFGSRLHERSKESPKTMKHLNKLFPNKILIQLPQDEALLTDWKQQLDRDVETLKAKSNIGSIRMGL

SEQ ID NO: 53431 - protein, 1051 aa, Zea Mays
MLPRKRGVDAGEDQDLHNKALRAAAVAQDKEKVVAEMGGRAPEIDEDLHSRQLAVYGRETMKRLFGSNVLISGLQGLGAEIAKNLVLAGVKSVTLHDDGKVELWDLSSNFFLSEKDVGQNRALACVPKLQELNNAVIISTITGDLIKEQLSNFQAVVFTDMSIEKAVEFDDYCHSHQPPIAFIKSEVCGLFGSVFCDFGPEFTVLDVDGEEPHTGIVASISNDNPALVSCVDDERLEFQDGDLVVFSEVHGMTELNDGKPRKIKNARPYSFTLEEDTTSYGTYIRGGIVTQVKPPKVLNFKTLKEAIKEPGEFLMSDFSKFDRPPLVHLAFQALDKFRTELTRFPIAGSADDVQKLIDLAISINETLGDSKLEEIDKKVLQHFASGSRAVLNPMAAMFGGIVGQEVVKACSGKFHPLYQFFYFDSVESLPVEPLEPSDLKPENSRYDAQISVFGAKLQKKLEQSKIFMVGSGALGCEFLKNLALMGISCSQNGKLTVTDDDVIEKSNLSRQFLFRDWNIGQPKSTVAATAAMAINPKLHVEALQNRASPETENVFNDAFWESLDAVVNALDNVTARMYIDSRCVYFQKPLLESGTLGAKCNTQMVIPHLTENYGASRDPPEKQAPMCTVHSFPHNIDHCLTWARSEFEGLLEKTPTEVNAFLSNPGGYATAARTAGDAQARDQLERVIECLETDKCETFQDCITWARLKFEDYFSNRVKQLTFTFPEDAMTSSGAPFWSAPKRFPRPLEFSSSDSSHLNFLLAASVLRAETFGIHIPDWAKNPKKLAEAVDKVIVPDFQPKQGVKIETDEKATSLSSASVDDAAVIEELIAKLEEIFKTLPPRFHMNPIQFEKDDDTNFHMDLIAGFANMRARNYSIPEVDKLKAKFIAGRIIPAIATSTAMATGLVCLELYKVLAGGHKVEDYRNTFANLAIPLFSMAEPVPPKTIKHQDMSWTVWDRWTITGNITLRGLLGWLKEKGLNAYSISCGTSLLYNSMFPRHKDRLDKKVVDVAREVAKVEVPSYRRHLDVVVACEDDDDNDVDVPLVSIYFR

SEQ ID NO: 53432 - protein, 749 aa, Zea Mays
MSLVVKLRYILKLLSAASWVVILPVTYAYTWKNPTGLARAIKSWLGDGQNQPSLYILAVVIYLAPNLLSATLFLFPVIRRALERSNLKVVTFIMWWSQPRLFVGRGMHEGAFSLFKYTMFWVLLLATKLVVSFYVEIKPLVQPTKDIMKEPIRTFKWHEFFPHANNNIGVVIALWAPIILVYFMDTQIWYAIFSTLIGGVYGACRRLGEIRTLGMLRSRFESLPKAFNQCLIPSDTSKRRGFRAAFSKPSKTSEDTREQEKIAARFAQIWNLIITSFREEDLIDDREKDLLLVPYCKDRDMDIIQWPPFLLASKIPIALDMAADSGGKDRDLKKRMKSDPYFTYAIKECYASFKNIIYELVIDSRERGYIQKIFDAVDEHIAEETLIKELNMSNLPTLSKKFIELLDLLESNNKEDHDQIIILFQDMLEVVTRDIMVDQLSELLELIHGANNKRSEGMTSLDQQDQLFTKAIDFPVKKTQAWNEKIKRLRLLLTVKESAMDVPTNLDARRRISFFANSLFMSMPDAPKVRQMLPFSVLTPYYKEDVLFSSQALAEQNEDGVSILFYLQKIYPDEWKNFLERVHCESEDQLHETEHSEEQLRLWASYRGQTLTRTVRGMMYYRQALVLQASLDMARDDDLMEGFRAADLLSESDESPLLTQCKAIADMKFTYVVSCQQYGIQKRSGDPHAQDILRLMTTYPSLRVAYIDEVEEPSKDKNKKIEKVYYSALVKAAVTKPDDPGQKLDQGYI

SEQ ID NO: 53433 - protein, 105 aa, Zea Mays
MGALSRPEEVLALVKLRVAAGQIKRQIPPEEHWAFAYSMLQKVSRSFALVIQQLGPELRNAVCIFYLVLRALDTVEDDTSIPTEVKVPILQEFYRHVYNRDWHYS

SEQ ID NO: 53434 - protein, 187 aa, Zea Mays
MFFHLAPSSCPWQRRHCRRSQSLLSTPTLLSLSLSLSLSLSLSLSWRTPRAAGRNPNGEPEPPPRPRAAASSVSRYDYHAGFWGVMGRECIGIVPPFIREFNYPMAKNCAGGDTGVFVNGRELHQRDLDLLVGRGLPRTSGMSYSIEMSGNVIDEATGKKLRSLGKLAPTIEKLKRGFGMHVPEEFR

SEQ ID NO: 53435 - protein, 590 aa, Zea Mays
MNFLYRTTQPAATELPRISEQDHRNALQKTTSTLEGLIADDSHHQPSSAHIEDGAANNGSRDISGDSSSVDLKSPVPLGTHADVMEDEGWITIPCKALPESWNDISEMVQLQALDRSFLFPGEQVPILACLSASKQDVQVISPFRIAAVMSKNGTSMQNFTNKSSPVSANGHDNGAAGESGYQDVEPNGEASPSGHDILETQSLLQMEDHKQQIEHVLRRFRESNFFVRIAESVEPLWSKKSVTSTTMADERSDNQGNSKSSRSNVYNTISDKGVFDGNTSGGVARDVVKCYSLQNGDIVVVLQVNVSVNKLEDPVLEVLQFEKTSSVQTPNNIRPPPISESQEFMPEKPAKTPDIINDGQLSFRGVPLEPERYSNIAPTHAKDIVVFIDAITIVFEEASKGGAPLSLPIASIEVGHGHSLPNLALRRGEEHSFILKPATMSSRERKTNSHAPLALSLPTMTGATLNTHTPKAGEPYADLSDQYAVLILTLEATNMTSENLTLTVLAPEASGSSSVVSLNSSPTTPNGSFDGVNESSKRSGLGKDGIGFRRLNSVLATPKEGVFLPAQAPLSNLSCYHYQMELSHLILCK

SEQ ID NO: 53436 - protein, 563 aa, Zea Mays
MDDPSSASNKHKRKRGRKPKASPPFPDRSSPSPSAAPAPAGRRGRKPRRHEAPADADATRPPSPPRRGEPKPVANGGDVVAVAESGPASWDEVVRVVPCMDAVVKVFCVHTEPNFSLPWQRKRQYSSSSSGFIIGGRRVLTNAHSVEHYTQVKLKKRGSDTKYLATVLAIGTECDIALLTVNDDEFWEGVSPVEFGTLPALQDAVTVVGYPIGGDTISVTSGVVSRIEILSYVHGSTELLGLQIDAAINSGNSGGPAFNDRGKCVGIAFQSLKHEDAENIGYVIPTPVITHFIEDYKKSGEYTGFPILGVEWQKMENPDLRKAMGMKPDQKGVRVRRVEPTAPESGCLRPSDIILSFDGVDIANDGTVPFRHGERIGFSYLVSQKYTGEKALVKVLRDSKVHEFKIRLATHKRLVAAHVKGRPPSYYIVAGFVFAAISVPYLRSEYGKDYEYDAPVKLLVKHLHAMAESPDEQLVVVSQVLVSDINIGYEEIVNTQVLAFNGQPVKNLKNLATMVENCKDEFLKFDLEYDQIVVLETKTAKAATQDILTTHCIPSATSDDLKA

SEQ ID NO: 53437 - protein, 185 aa, Zea Mays
MPAADAKHYGHFEVYNTLRARGAKVPKTRKTPMAVSNPKQVPEYELNPLELEFRRGEEVTKGTYLAKWYGSKVFVKILDKDSFSDAESINAFKHELTLLEKARHPNLVQFVGAVTQNVPMMIVSEYHQKGDLASYIEMKGRLKPHKAIRFALDIARGLNYLHECKPEPIIHGNLSPKLQKHHSGR

SEQ ID NO: 53438 - protein, 125 aa, Zea Mays
MIFLQTNLDKVEGTQKVKQKLKGHKGRDEQQIYGLKLGFGNKDATRENLITGFGDMNPAEKSVMLQKGSGCCSRVADCLCCMCCIKACNRMNDQCAVLMAQICAALACLGCYECCAEVCCGGSES

SEQ ID NO: 53439 - protein, 134 aa, Zea Mays
MGIREALMRAEKQLKLSKRKDWYKILGVSKTASAAEIKRAYKKLALQWHPDKNVDNREKAENMFREIAAAYEVLGDEDKRVRYDRGEDVEEMNMGGGGGFNPFGGGGQQYTFQYDGGFPGGGFPGGGGFQFNFG

SEQ ID NO: 53440 - protein, 252 aa, Zea Mays
MLVQDPTRRNDVDAIFEQARQAGIKGMPPPLGGESSSSRSFTGTGRLLTGETISSAAPQEPVPIRVRHNIHLWNNGFSVDDGPLRYYDDPENAEFLESLKMSKCPKELVPTDGEHVDASVIRRMEDYREPVRPRSAFQGVGRTLGGGPSPDESATAAPASAAPAASRSAGVVVDDSQPFTSIQLRLADGTRMVARFNMHHTVGDIRSFIDAARPGAARPYQLQTGFPPKQLADPTQTVEQAGLANSVIMQKM

SEQ ID NO: 53441 - protein, 55 aa, Zea Mays
MEELLKPVDESQDLYKRQQLRELAMLNSTLREDSPHPGSVSPFSNGGMKRAKPSQ

SEQ ID NO: 53442 - protein, 633 aa, Zea Mays
MSTAAVLPSPASTRHPAGGGALTADRAAALLAGCASASRAAEIHAAAVRASVDQDKAVAFRLQRAYAASGRLDLAVALLRRTPDPTAVFYTSAIHAHSSRGLHRAALALLSEMLLSHHGLLPTAHTLSASLPACGGLAVGRALHGYAVKLALSGEPYVATALLGMYARAGEAAAARALFDGMRPDPHVVSVTAMLSCYAKMGQLDDARGLFDALPRKDLVCWNAMMDGYTQHGRPSEALRLFRQMLRSGVEPDEVSVVLALSAVAQLGTAESGRWLHSFVANGGRRARVRLNARVGTALVDMYYKCGSLEEAVAVFRDLGGGGDRDVVAWNAMINGYAMHGRSREALEAFGQLRAQGLWPTDITFIGVLNACSHSGLVDEGRALLAAMEEEYGIVPKVEHYGCMVDLLGRAGRVEEAFDLVRSMKAKPDAAMWASLLGACRLHKNLALGQRVADYLVANGLANSGTYVLLSNMYAAAGKWREVGRVRSMMRASGVQKEPGCSAVEVGRRVVEFVAGDRSHPRSAEIYAKLEEVNSIARARGHVPHTELVLHDLDDAAKERALAVHSEKLALAFGLISTPPRTGIKIVKNLRACADCHAVLKLVSEATGRKIVFRDRNRFHHFVDGSCSCGDYW

SEQ ID NO: 53443 - protein, 108 aa, Zea Mays
MWTHLLLELLCYLNGHEGPLQKNNEQTPDHNSQALVDGAKHALVERSNLNGGGTKLDMVGSGWGILFVEKLVPIIANLFLEAPPNERFSVSPEVIQGLGRYLLFMIYI

SEQ ID NO: 53444 - protein, 221 aa, Zea Mays
MGISRDSMHKRRATGGKQKAWRKKRKYELGRQPANTKLSSNKTVRRVRVRGGNVKWRALRLDTGNYSWGSEALTRKTRILDVVYNASNNELVRTQTLVKSAIVQVDAAPFKQWYLTHYGVDIGRKKKVPVAKKDATEGQEGEAIAEETKKSNHVQRKIEKRQQDRALDTHIEEQFGSGRLLACISARPGQCGRADGYILEGKELEFYMKKLQRKKGKGVAS

SEQ ID NO: 53445 - protein, 663 aa, Zea Mays
MVNFGKKLMADQIPEWKGYYINYKLMKKKVKQYGQQLQQGEKDRRRVLKDFSKMLDDQIEKIVLFLLEQQGLLASRIEKLGKQRAILQEQPDISGIAELREAYREVGINLIKLLKFVDLNATGIRKILKKFDKRFGYRFTDYYVTSRSNHPYSQLQQVFKHVDPIIDMINSSVDKLTRSTNFLRFLGQHAMIVDEESPSTAGEEEIEDQKYHFMSLMLNLVNTFLYMVNTYIIVPTADDYSVSLGAASTVCGVVIGSMAVAQIFSSIYFSAWSNKSYFKPLVFSSIVLFLGNICYAMAYDMKSLTVLIIGRLLCGMGSARAVNRRYISDCVPARIRMQASAGFVSASALGMACGPALAGLLQWKFKVYMVTFNQSTLPGWVMAVAWLLYLIWLWFSFKEPNRATEVNEAPQNPASGQTVDIGRLENGIAQPLLKDSVDKQNEDEDEVDDIEETADDSRKPATSIGSAYRLLTPSVKVQLLIYFMLKYAMEILLSESSVITNHYFSWNTSAVAIFLAILGLTVLPVNAVVGTYISNMFEDRQLLMVSQITLLVGIIFSFKVTSTYYVVQYVVSALVTFVSAEVLEGVNLSLLSSVMSSRLSRGTYNGGLLSTEAGTLARVVADCTITAAGYLGVGKLLNVTLLPSLVICVASIACTFLTYNSLF

SEQ ID NO: 53446 - protein, 64 aa, Zea Mays
MTFFSVFDVPVFWPILLCYWIVLFVLTMKRQIVHMIKYKYVPFSIGKQKYGGKKSAVSPSSSKD

SEQ ID NO: 53447 - protein, 169 aa, Zea Mays
MGSTSSMLTQYDIEEVQDHCNHAFSQQEIVSLYHRFCQLDRNGGGFVSADEFMSVPEFAVNPLSQRLLRMLDGLNFKEFVAFLSAFSPRTSLQQKIEFIFRVYDTDCNGKVAFDDILSILRDLTGSFMTEQQRQKVLIHVLEEAGYTKDSHFTLPDFMKLEGSAIFSLD

SEQ ID NO: 53448 - protein, 95 aa, Zea Mays
MYKSYEDTNLWIVENVPRGVHINFLKAERSLHRWALEDLQRIYTAEELAADEGGGVEMHVLEDAGHWVHADNPDGLFRILSSTFRIETTIRGMQD

SEQ ID NO: 53449 - protein, 439 aa, Zea Mays
MAGVYKWKLASYKQMERTKVASERLSLRSNSTKHHDTVHLGLGHFGKDGNLICRSLKSILKPKARQYAIVKVHNKDVDEGCSSKDNEIISSPSDRKEGSQLRALESYFSKFNPSQQLYSLPQKKHKSGPSSSNEVDAIIADEDANLKNRADSLQVQIDRGHTGIKSNQNTPNEVYKEYLIFDEKSLLDMHTDDQASGFCLTNLLAGVNIAVLLFEIASPVKNSENEYLSLPLLYGAKINNLILSGEWWRLLTPMCLHSGFLHIALGCWALLIFGPRVCRAYGQRTFFLIYILGGICGNLSSFVHTPEITVCGTGPVFSLIGAWLVYQGQNKQVIDKDVSESMFWQAVIAAALSFLLSIFGRIDNWAHLGATISGIFFGYLTCPSVEFDNSAKNGQKEAVALIRQQAHPCKSAAVFFITILAFAVLAFAYGTQFNNMDLE

SEQ ID NO: 53450 - protein, 461 aa, Zea Mays
MGLATTPACFMSTILPRFNYDGSIMMTASHLPYTRNGLKFFTKRGGLTSGDVENICDRAAHKYVARKTGVGGGGRGTPPVVMRVDLMSAYAQHLRDIIKQRVAHPTHYDTPLRGFKVVVNAGNGCGGFFTWDVLEKLGADTTGSLHLEPDGRFPNHIPNPEDATAMSLTRGAVLAQGADLGVVFDTDVDRSGVVDAGGAAINGDRLIALMSAIVLGEHPGTMVVTDARASDGLTRFVESRGGRHCLYRVGYRNVIDKGVQLNADGVETHLMMETTGHGALKENYFLDDGAYMVVKIIIEMVRMKLAGVEGGVGSLIRDLQEPAESVLLRMDVMGEPKDAKERATHAVEAFKNYIQEDKLFGWVLDDCGDCSVAEGCLMDTNNDPIDVDAHMYRAKLYDENQRAVGMVHIRQSVHNPNIALNMQSYAPGGCKSMAKDLLERFLLASGLNGFLDISQVEKFVQ

SEQ ID NO: 53451 - protein, 76 aa, Zea Mays
MVRHEVGAPSKIQAQWRRPLRSFCFSKSLSRQRGRTGEGAVLLGYGRGTGELSGPRRVWQPYNARKAHACRAISGV

SEQ ID NO: 53452 - protein, 991 aa, Zea Mays
MVCTSHAFDTKAWEVDTLRGHMNNVSCVMFHAKQDIIVSNSEDKSIRVWDATKRTGIQTFRREHDRFWILAAHPEMNLLAAGHDSGMIVFKLERERPAFCVSGDTVFYVKDRFLKFFEYSTQKEVQLAPIRRPGSVSLNQSPRTLSYSPTENAVLICFDADGGSYELYIAPKDSAGKADYLQEAKKGAGGSAVFVARNRFAVLERSSNQVLVKNLKNEIMKKSPLPIATDAIYYAGTGNLLCKAEDRVAIFDLQQRLVLGELQTPAVKYIVWSSDMESVAFLSKHVVVIASKKLVHQCTLHETTRVKSGAWDENGVFIYTTLNHMKYCLPNGDSGIIKTLDVPIYITRVIGNNIFCLDRDGKNKLIAVDATEYIFKLALLRKRYDHVMSMIKNSQLCGQAVISYLQQKGFPEVALHFVKDEKTRFNLALESGNIQIAVASAKEIDDKDHWYRLGIEALRQGNVGIVEYAYQRTKSFERLAFLYLITGYLDKVGFMYKIAGQNNNLMGQFHNALYLGHVNKRVEILENAGQLPLAYVLAVTHGLTEIAERIAAELGEHVPLLPEGKSHSLLIPPAPLTACGDWPLLRVVRGIFEGGLDSTGRAELEEDDEASGADWGDEDLDIVDASEVVANGGDYFDAEGEPNEEEGEEGGWDLEDLELPPDTETPKSAGNARSPVFVTPTAGIPVSQIWTQKSSLAGEHAAAGNFDTAMRLLSRQLGIKNFAPLKPLFLDLHMGSHSYLRALAAAPVISVAVEKGWNESASPNVRGPPALIFSFSQMEDRLKAAYKATTEGRFPEALRQFLSILHTIPVIVVDSRREVDEVKELIEIVREYILGLKMELKRKELRDDVTRQQELAAYFTNCKLQRIHMRLVLSSAMALCFKQKNYATAAHFARMLLENSPQEAQARKARQVLQACQDKDDSHQLNYDFRNPFIVCGATYVPIYRGQKDISCPYCGSRFAPSIEGQLCTICELAIVGADASGLVCSPTQMK

SEQ ID NO: 53453 - protein, 152 aa, Zea Mays
MIRFILLQNRQGKTRLAKYYVPLEDSEKHKVEYEVHRLVVNRDPKFTNFVEFRTHKVIYRRYAGLFFSICVDITDNELAYLECIHLFVEILDHFFSNVCELDLVFNFHKVYLILDEFILAGELQETSKKGVNCVVITHYKKPEMPCTIQRTE

SEQ ID NO: 53454 - protein, 188 aa, Zea Mays
MGAESQSPPLPKVNKSQSMNKPAVHSVPVEVERIDIGEPENPGPKYNNRSTYQSVTVDPFALSPDPNEQENLDILGDDDGNASPNNLAAGQEASVRGFDINLPNQDDMDDEIADVDVNDDTDLWINAADALRAQVNAEEHQEQQDSSSSSGSSSSSSGSESGSGSGSSSSGSDGSDADSASSGGDVDI

SEQ ID NO: 53455 - protein, 65 aa, Zea Mays
MLEYSCDEANALLKKNLENAKASLEVLVADLQFLRDQQTITQVTIARVFNWDVHHRRSKQAVKEP

SEQ ID NO: 53456 - protein, 90 aa, Zea Mays
MSFRAREMYKKVVRRLGGEGKLPAELMKSVKDILPDSNVVMGRAKRGIFAGRHIRFGNKVSEDGGNNSILLLRYFERWLSFTAARSCWSI

SEQ ID NO: 53457 - protein, 1091 aa, Zea Mays
MDEENVVELLQRYRRDRQVLLNYILSGNLIKKVAMPPGAISLDDVDIDQVSVDYVLNCAKKGEPLDLGDAIRLFHDSLDYPYVNNTGAVDEFYLLTKPEYSGPAPTREPPPIPATAPSSVVIPPPDVEPAPIIVSSPVTATNLPKSQPFDSPTEKELTIDDIEDFEDDEDEFDGRRASRRHQTDASDLSLLLPSFETGITDNDLREAAYEILVAAAGASGGLIVPQKEKKKEKRHRLMRKLGRSKSESVDINTQRQPGLVGLLETMRAQLEITESMDIRTRQGLLNAMVGKVGKRMDNLLIPLELLCCISRTEFSDMKAYLRWQKRQLNMLEEGLINHPVVGFGELGRKVNEIRSLFRKIEESESLPPSAAEVQRTECLRSLREVATSLSERPARGDLTGEVCHWADGYHLNVALYEKMLGSVFDILDEGKLTEEAEEILELLRSTWRTLGITETVHDTCYAWVLFRQFVLTGEQGLLKVVIDNLRKIPLKEQRGPQERLHLKSLRSSVDAEGSYQDFTFFQSFLSPIQKWTDKKLNDYHLHFSEGSSLMADVVTVAMLTRRILGEENDKVAESPDRDQIDRYITSSVKNTFLKMAHSVEFKADTTNEHVLASLAEETKKLLKKDTAIFTPVLTKWHPQAAVVSASLIHKLYGNKLRPFLEHAEHLTEDVVSVFPAADALEQYVMSVMASVTGDDGLDSLCRHKLVPYQIESKSGTLVLRWVNGQLERIETWVKRAADQEVWDPISPQQRHGNSIVEVYRIIEETADQFFAFKVPMRDGELNSLCRGLDKAFQVYTQLVTAPLVDKEDLAPPIPVLTRYKKELGIKAFVKKEVQEVRTVDERKASEITQLTMPKLCVRLNSLYYGISQLSKLEDSINERWARKKSENTNIRRKSEKSKSAVPNQKNQFDGSRKEINTAIDRLCEFTGTKVIFWDLQQPFVENLYRNGVAQARLDTITEVLDLVLNQLCDVIVEQLRDRVVTGLLQACLDGFLRVILDGGSTRVFSPNDAALLEEDLETLKEFFVSGGDGLPRGTVENLVSRVRPVINLIKQETRVLIDDLREVTQGGKSKFGADSKTLLRVLCHRNDSEAS

SEQ ID NO: 53458 - protein, 1108 aa, Zea Mays
MVGRTIQVQGFALTDSAESVKLFLERIAGAGTICALKLRHPRNISANSRAFAIVQFQSQESASLVENAAQRQVLKIGRFYLRTRPADRDIVPRPRIPMFSLEDIVLHLGCLVKENILSALFRASNVSVQFGFDMKKIYFYLSYNFTKFKLELSYESIWEMQLHRPPAYRSRTQFLLIQVQAAPKIYKLLPGRPGLMFEDPFFNWFRDDTDEQWTRTIDFTPSASIGQSSILCLEVPQQCELPRIGDYFVYYKEQNLDFECRNGYSYSCGSNLVPIVKSPDYIEVPYEILFKINHLVQNGTLSGPTVDHSFFRHVSPKFEPIDHIKRALLKMTYLKSTCLNPTDWLSVQYSRIRKSRHASQKLSNISLDDGLVYVHRVQVTPAKVYFYGPEINVSNRVVRHFSADIDNFLRISFVDEDCEKLRSADLSPRSTSGNDARRTALYNRVLSVLSNGINIGDKHFEFLAFSSSQLRDNSAWMFASRQGLTASDIRKWMGDFRDIRNVAKYAARLGQSFSSSTETLKVHKSEVERIPDITNGTKYIFSDGVGKISANFAVEVAMKCKLKRFAPSVFQIRYGGYKGVVAVDTRSNHKLSLRKSMSKFQSENITLDVLAYSKYQPCFLNRQLITLLSTLGVSDNVFELKQKEALRQLNRMVTEPQAAREAVELMPMGEVTNVVKELLSCGYQPDHEPYLSMLLQTFRASKLLELKTKSRIFITQGRAMMGCLDETCTLKYGQVFVQASYSADDHRKVVVTGKVVVAKNPCLHPGDIRVLQAVDVPALHHLFDCVVFPQQGPRPHPNECSGSDLDGDIYFVSWDPHLIPSRLVDPMDYTPASAETLDHDVTIEEIQEYFTNYIVNESLGIIANAHVVFADQERMKAESPPCVQLAKLFSIAVDFPKTGVPALIPHELHVKEYPDFMEKLDKVTYESKGVIGKLYREIKKHTPHIKHFTREVARRSYDTDLIVDGYEDYITEAIEFKEEYDFRLGNLMDHYGIKSEAEIISGCILKMAKNFTKSSDADAIRMAVRSLRKEARSWFNEMSTGEDGQDAMEAKASAWYHVTYHQQYWGSYNEGYDRPHLISFPWCVYDKLVAIKQGRNLLTRMDRNLRFR

SEQ ID NO: 53459 - protein, 758 aa, Zea Mays
MNKLLMEENDRLQKQVSRLVFDNGYMKNRLHSPSVATTDTSCESVVTSGQHNQQQNPAVLHPPQRDANNPAGLLAIAEETLAEFMSKATGTAVNWVQMVGMKPGPDSVGIIAVSHNCSGVAARACGLVSLEPTKVAEILKDRASWYRDCRHVDVLHVIPTGNGGTIELIYMQTYALTTLAEPRDFWTLRYTSGLDDGSLVICERSLTQSTGGPSGPNTPNFIRAEVLPSGYLIRPCDGGGSMIYIVDHVNLNACSVPEVLRPLYESPKILAQKMTAAALRHIRQIAHESSGEMPYGAGRQPAVLRTFSQRLSRGFNDAVSGFPDDGWSCLLNTDGAEDITVTINSSPNKLVGSHVSASPLFSAMGGGIMCAKASMLLQNVPPALLVRFLREHRSEWADPGIDAYSVASLRANPYTVPGLRAGGFMGNQVILPLARTLEHEESLEVIRLEGHGFSHEEVLMSRDMFLLQLCSGVDEDAPGACAQLVFAPIDESFADDAPLLPSGFRVIPLDAKTDVPTATTRTLDLASALEVGSGGSGMRASCDGSGTCATRSVLTIAFQFSFENHLRESVAAMAKQYVRGVMASVQRVAMAIAPSRLGSRIELKHPPGSPEALALATWIGRSYRAHTGTEIRWSDTEGADSPLMLFWKHSDAILCCSLKPPAFTLKFANSAGFDILETTMVNIQDLPLEAVLDEEGQKALSAQLPAIMQQGLAYLPGGVCRSSMGRQASYEQAVAWKVVGDDGAPQCLALMLANWTFI

SEQ ID NO: 53460 - protein, 129 aa, Zea Mays
MKTEETQFGKKGADQVADGEKKEDAPAPLESKNSKKKKSKKEKSSKELKEAQDQANGLEAAAVAEPDEDTASVDVKERIKKVASMKKKKSSKEMDAAAKIAASEAAARSARLAAAKKKEKSHYNQQPVR

SEQ ID NO: 53461 - protein, 216 aa, Zea Mays
MPPRRKRRAPPAKSQRQTEPDPQPQVPPGADAPLEERLIWGSQQESERRITAIKAIKDAEAGNIHYQLQLARSYYSEEQLEGNAMQYFQENLHNLSVVPNEEYDVLELKWNNGGEWMIGDFADDRTLRASIASFTAADGLQFPRDSDFYTRTSNFSDFAWSEQPEGQMAGASEAFQTPGAVSNRLSCGMTPKTVRLPKNVSQAEAPLGVFLLTTFL

SEQ ID NO: 53462 - protein, 492 aa, Zea Mays
MKDVATENFQRICEAYEILSDDNKRQVYDIYGMEGLNSGLELGPKLTKPEEIKEQLERLRRRKEEEKLFKHALPNGSIIANFSVPQYLNDGSIMRGMAMLSQVELPVSKQNTVVVGGNLIVNGSAGSGAATTVLRHQLSPVSSIEFMATAGLRSVIGGQMFRQISPHSTATSGLAVSLRDGSINLSNAWTRQLSDNTVGNIQLVLGDESSISVGWQKKDEKRTATGEVKFGTNFFGASAHYTHRFSSKSHARIAGRVGSTILDFEIGGGRRISEFSTVRMMYNIGIQGVSWKFELHRAGQKLIIPVLLSTDLNPLFVTSAFAIPSTLYFLLQTYVVKPYYLKREKQKTLEKMEGLSTQLTEARKAAEKAQKLLEPVSNRKKNRQLENNGLVITKALYGSRQKIKMSSELNDIHNDMASQVFDVTIPLNFLVTEAGQLKLHDGIKKSGIMGFYDPCPGDPKLLLVEYTFHGHKYKVMVDDYEALLIPQDIHQF

SEQ ID NO: 53463 - protein, 364 aa, Zea Mays
MALSKEQKLTISEQQHTASSEQQVALDAELQLWNHTFGYVKSMALKAALDLGIPDAIHQHGGSATIPQIVTRITLHPSKTPCLRRLMRVLTVTGVFGTQEPHDDGGGCDDELVYTLTPASRLLVGPPGQNVSPLLNVMLCPIFVSSFLDLRGWFQHEMPDPSPFKVTHGRDIWELAAHDAGFSRLFDAGMVADSGFIMNVVVRECGSGTVFQGISSLVDVGGGFGGATQAIAKAFPHLECSVLDLPNVVAGAPADTAVKYVAGDMFESVSSADAVFLKILKNCKKAIPAQGGKVIILDIVVGAGSSSCDRKNVETQCLFDLYIMTINGVERDEREWKKIIFEAGFTSYKIIPVLGTRSIIEVCP

SEQ ID NO: 53464 - protein, 130 aa, Zea Mays
MSGNPVGVDNTSRRKFDKEEYLERARQREQREKDEARKGKERGPPVQRQPLKHRDYEVDLDSRLGKTQVVTPIAPLNQQAGYYCSVCECVVKDSANYLDHINGKKHQRALGMSMRVERASLEQLLLVQNP

SEQ ID NO: 53465 - protein, 454 aa, Zea Mays
MSVQEYLEKHLLSRKIEEAVNAAVRAKAPDPVLFIAGHMRRAAPAVITRVRARQILDGHGAPAVEVELHTNKAIHRASAAGSGALEGAAADAAGAAERRKILAKVVADSVRMINDKVSEALVGMDPQEQSQIDQAIMDLNKARHKAELGVGANAMLAVSIAACKAGAAEKEVPLYKHIANLVGKSATTLPVPAITVINGGKHAGNGLPIQEIMILPIGAKNFEEAMQMGSETYHHLKDVILEKYGSDSCNIGDHGGFAPNISSISEGLDLVIAAIERAGYNGRIKLAIDVAATDFCTGKKYDLEFKSTKKSGQNFKTADDMIEIYSQLCSEYPLVSIEQPFDKDDWEHSKKLTTLELCQVAGDDLLMSDPERIKRAVNEYTCNALVLKANQVGTVTEAIEVVKQAKDAHWGVMVSHRSGDTEDSFIADLAVGASAGQIKAGAPCRGECLTNYNQ

SEQ ID NO: 53466 - protein, 586 aa, Zea Mays
MGYIEPAEFARLGLLAITLVSIASPDNELRMLGYECLGTFKKSLEYAQRSKETWQLQLLLTYLQNGISEQWQKIPSIIAVFAAEASLTLLDGSHAQFTVMRNFLMHSTSVNLQSIPLFPTLLQSSSVHFKAERLWMLRLLSAGSNLADDAKIYKRGRVLELALAFCSSPVSDFESKVLVLKVLKKCVKLPVLAHHLVKESGILLWLLSVISVRSEVSDGSESSCSRVTELALEVVNGLISSRLITDWLQETALEQLSTISSYLSVLINNAKLLKGNVHLLTSALSVITSTMRLSMKRKIYQPHFTLSLHGVFNLCQTIGGSSRSTEHKLVMELGIDAILMNGPIPILSEMDKSRISMVVSWATSSIFWLYSNQRSLLEISCKEPPRNESLLSKILRLLAASVILGKISSIFHGKSVDLAGNTSETLCSFLDNAYERAETAKSCSVNDTLAVIILHLQDHMPKNSDSLPSVIAALCLLLLDRSSKQVNKHLANNRGKIEMLCSKIGCPAESNPAWRWHYYQPWKDSALQRTGMERLEEEQACRSLLVLFSSAFSACLSEFPVLSLDDVEKSGLFQWERDLMAKQSST

SEQ ID NO: 53467 - protein, 399 aa, Zea Mays
MYIFGGNHNGRYLSDLQALDLKSLTWSKVDAKLQAEPADSTKTTQIAPCAGHSLISWGNKFLSIAGHTKDPSEGVTVKEFDPHTCTWSIVRTYGKPPVSRGGQTVTLVGTTLVLFGGEDAERCLLNDLHILDLETMTWDDVDAIGTPPSPRSDHAAACHADRYLLIFGGGSHATCFNDLHVLDLQTMEWSRPKQQGPTPSPRAGHAGGTVGENWYIVGGGNNKSGVSETLVLNMSTLTWSVVSTVEGRVPLASEGMTLVHSNYGGYDYLISFGGYNGRYNNEVYTLKLSLKSDSQSTLKEETLSDTTSRVIEPEAEIYQDGKIREISVDNADSDLNNRNDEASEQLLADLKAQKEELEATLSREQLQTVQLKEDIARAETRNAELTKPLCIFRSILRFD

SEQ ID NO: 53468 - protein, 85 aa, Zea Mays
MDLKKLLDKDQHPLHRCEAKWWTIPRPVDNCRWEGRHGSLALLPQQRPPAPFLARREMDRRIHGSLAGWSISKIFESCFLLWSHD

SEQ ID NO: 53469 - protein, 442 aa, Zea Mays
MDKAEFELWKSKLTDKEQNDATGFFTVIKRHDSLSSSSLTQSDGSDQTKTKDDLFIVPYSKEYRPFLEKAAELLEKASACSDSPSLKNLLRTKANAFLSNDYYESDIAWMELDSNLDLTIGPYETYEDSLFSYKATFEAFVGIRDDTATSQVKLFGDQLQDLEKNLPMDNIFKSDSISAAPIRVINLLYNAGDVKGPQTIAFNLPNDERIVNERGTSMVMLKNISEAKFKHILKPIADACIREEQKEYVDFEPYYTHIVCHECCHGIGPHSITLPSGKKTTVRRELQEFHSALEEAKADIVGLWALNFLIKKGLLPKSLSQSMYVSFLAGCFRSIRFGLEEAHGKGQALQFNWLYEKGAFVLQSDGKFSVDFTMVEDAVESLSREILTIQAKGDKPSAQSLLQSRATLTQPLRMALERIEHMQVPVDIAPVFSTANKLFADI

SEQ ID NO: 53470 - protein, 162 aa, Zea Mays
MQETRVEYFRGKDFNAFIKNYPEVREILGPDKDLEVEDIVNTLLTKNLVIRCDRVMKTVRPGKKKLSSWPAHLEIHNEQVFTENDGFYAWMFLKRRTLWQTVLSFVWPLFALAVCLFPVYPYQCKIVVLYSCAGALLFIVSILLLRAAIFGILWVLLGKRGG

SEQ ID NO: 53471 - protein, 90 aa, Zea Mays
MPLRKSRKMSPPYRVILHNDNYNRREYVVKVLMKVIPGMTVDNAVNIMQEAHVNGLSVVIVCSQSEAEEHCTSLRGNGLRSSIEPASGGC

SEQ ID NO: 53472 - protein, 625 aa, Zea Mays
MESITPGSVGIVYSIRPDSSLLLGLCYLSNPWLCEPEEVEHVDPFKIGDQVCVKRSVAEPRYAWGGETHHSVGKIIDIESDGLLIIDIPNRAAPWQADPSDMEKIENFKVGDWIRVKVTVPSPKYGWEDVTRNSIGIIHSLQDDGDVGVAFCFRSKLFLCSVADIEKAQPFEVGEKVHVSPSISEPRLGWLNETAATIGAISRIDMDGTLNIKVSGRKSLWKVAPGDAERLSAFEVGDWVRPKPSIGSRPTYDWNSVGRINIAVVHSIQDSGYLELAGCFRHGKWLTHNTDIEKVQTVKIGQHVRFRAGISEPRWGWRDANPDSRGIIAGVHADGEVRVAFFGVPGLWRGDPADLEIENIFEVGEWVRLRNDVEQWRSLKPGSIGVVHGVGYQGDAWDGTIHVAFCGEQERWIGPSSQLEGVSKFVVGQRVRIRGCIRQPRFGWSNHSHSSIGTISSIDADGKLRIHTPAGARAWLTDPAEVEKVEDEEEVCIGDWVKVKDSVGTPVYQWGDVNHSSIGVVHRADDGELWIAFCFCERLWLCKAWEVEKVRPFRQGDKVRIRSGLVSPRWGWGMETYASKGEVVGVDANGKLRIKFRWRDRLWIGDPADVVLDDAHLLTEASNGF

SEQ ID NO: 53473 - protein, 238 aa, Zea Mays
MNWLFFHSRRPRLFSPRRACRSAHSAATTLPPPPRASAARGPDMEGAAGEEGASTPAARGGAEAGAGAGAGGGMLKGRSCKGCLYYSSKLRSRARGPVCVGVTRALPQVSERKVGKLELEAIQEGRYLADFRYACIGYSMYLNGKETPTGVRDKPRAHLPVCAGVELLIDRKVPTNVKKEAPKPRQYKPGHAGDDFLTKFQRNAGLVASGVAKNLNRVGTYIKDTVSDMMQPHRKRPK

SEQ ID NO: 53474 - protein, 191 aa, Zea Mays
MALAASHHGLLPFAPAATPTPSRGHLRFRAARPLPRPARRICCQSINSANVLGASSTTSDEAVPVPVVQIDQDSDRDATIVQLSFGDRLGALLDTMKALKDLGLDVTKGSVTTDSAVTQTKFHIMRFGRKVEDPDMLERIRLTIINNLLQYHPESSEKLAMGEFFGIKPPEKKMLFCIVLSRFGHLFNYDL

SEQ ID NO: 53475 - protein, 238 aa, Zea Mays
MMRQLLAAGGTHSVVLTQEGHVWTWGQPWPPGDIKQISTPVRVQGLEKVRVIAVGAFHNLALTEDGILWAWGNNEYGQLGTGDTQPRSHPIRVEGLSDLSLVDIAAGGWHSTALTIQGEVYAWGRGEHGRLGFGDDKSSRMVPLKVELLAGEDIVQVSCGGTHSVALTRDGRMFSYGRGDHGRLGYGRKLTTGQPMGVDIDLPPPKTRSSRDGQWQAKYVACGGRHTLAIVVWAETTD

SEQ ID NO: 53476 - protein, 81 aa, Zea Mays
MESGRLIFNAPGSGAGQMLFLDCGAGGGPGGGLLHRGGRPMLGLEEGRGVKRPFYTSPDELLEEEYYDEQLPEKKRRLTPV

SEQ ID NO: 53477 - protein, 309 aa, Zea Mays
MDAAADDKPEISDDTAHQISVDPWYQVGFVLTTGVNSAYVLGYSGSIMVPLGWIGGTCGLLLAAAISMYANALLARLHEVGGKRHIRYRDLAGHIYGPKIYGLTWALQYINLFMINTGFIILAGQALKATYGLFSDDGVLKLPYCIAISGFVCALFAIGIPYLSALRIWLGFSTLFSLMYIVIAVVLSSRDGITAPARDYSIPKSSQSTRVFTTIGSIADLVFAYNTGMLPEIQATIRPPVVKNMEKALWFQFTIGSLPLYAVVFVGYWAYGSSTSGYLLNSVTGPVWVKAVANLSAFFQTVIALHPHV

SEQ ID NO: 53478 - protein, 234 aa, Zea Mays
MSIIKDPDLRRKEQWEKSQANKGLNLANMLGFGDLGSPPLSAAEEYSLHSRYLAKANSMNLSDVAEMKIIYRGGVDSEGRPVMVIVGAHFLLRCLDLERFVLYVVKEFESLIQKPYTIVYFHSVASLQPQPDLGFMKRLQQILGRKHKKNLHTIYILHPTLGLRTAVMAMQLFVDGEVWKKVVYVDRLVQLFRYVPREQLTIPDFVFQHDLEVNGGKGIIVDPRTKHIYQRPSG

SEQ ID NO: 53479 - protein, 356 aa, Zea Mays
MVFIFAEQKVLDAAMNDINNSFGKGSVTRLGSAGGAFVETFPSGCLTLDFALGGGLPKGRVVEVYGPESSGKTTLALHAIAEIQKLGGNAMLVDAEHAFDPAYSKALGVDIENLIVCQPDNGEMALEIADRMCRSGAIDLICIDSVSALTPRAEIEGEIGMQQMGLQARLMSQALRKMSGNASKAGCTLMFLNQIRYKIGVFYGNPEVTSGGIALKFFASVRLEIRLIGKIKSAKGDEDVGVKVRVRVQKSKVSRPYKQAEFEIIFGEGVSKLGCVLDCAELMDVVAKKGSWYSYKDIRLGQGREKALQYLRESPTTCDEIEKVVRAMIPEGSRHMSLLAFGQSSSTEDEQAYDEQ

SEQ ID NO: 53480 - protein, 143 aa, Zea Mays
MGSGSGTLKQKKRVKHAKNKYLKPGALAQIRYSRSTSRDIGKKRILLNAKDELELPPQPEVLLESNTLVLSPARLNFEPFGSNTGQVLPKTPRTPNASVSCGDSGLESLPLDLLIKIMCCLHHDELKVVFHVSKRIRKALTFN

SEQ ID NO: 53481 - protein, 415 aa, Zea Mays
METKDVSPLAAAAAAPVLAPASQQQQQQPPQPQQHHHQPPQPQHQHQHQPPPPPFPQQAAPAAASSPAASMPGGMRLSFDHMPGKAPGEQHHHHHHAAPPMLYAAPPQGAGAPGGSVLGMGELMRKKRGRPRKYAPDGSMALALAPISSASAGGGGGAAAPGQQQQHGGFSIGSPPSDPSAKRRGRPPGSGKKKQFEALGSWGIAFTPHILAVKAGEDVASKIMTFSQQGPRTVCILSANGAISNVTLRQPATSGGLVTYEGRFEIISLSGSFLLAEDGDTRSRTGGLSVALAGSDGRVLGGCVAGMLMAATPVQRGRNLSQPKRGRSNRWLLPRRRRHRWLPSCRLRWPPALRRRGRPARRLMTPAARSTTVRCRSATPVSTSTLTSTSSTCRLPTRPGAGPSRCTSRTGMILT

SEQ ID NO: 53482 - protein, 267 aa, Zea Mays
MFGEHVGIIGSTKELGSWKSQVDMDWTPNGWVCQLDVPGEALLEFKFVIILNKGKDKIWEDGDNRVVNLPKNGSFDMPCHWNKTKEPLDLLGSSEIKLSGDTEVIGEDAKLSENIALEEMGSICNAGVGDLTPKHESSTLGGQWQGSDTVFMRSNEHHNTENCRKWDMTGLDAVSLKLVEGDKASRNWWRKLELVRVLLSEYVQDQSHLEALTYSAIYLKWIYTGQIPCFEDGGHHRPNKHAEISRQIFGEIERIYYGKNTSSQGGL

SEQ ID NO: 53483 - protein, 302 aa, Zea Mays
MRESVGPFRPCCPCMHACIVVDPAFLVHSDTYALVVSTENITLNAYMGNNRPMLVTNTLFRVGGAAILLSNRRADRRRAKYQLIHTVRTHRGAHDQSFGCVTQEEDDAGCVGVSLAKELMVVAGEALRTNITTLGPLVLPMSEQLRFLATVVLNRVFRARVRAYLPDFKLAFDHFCIHAGGRGVLDELERSLNLSAWHMEPSRMTLCRFGNTSSSSLWYELAYCEAKGRIRKGDRVWQIAFGSGFKCNSAVWKALRTVDGGEEGNPWTPEIDVLPIHVPKVSPIDETTYKFADGATYKISLG

SEQ ID NO: 53484 - protein, 295 aa, Zea Mays
MSTIALCGSEAQKQKYLPSLTQFKTIGCWALTEPDYGSDASSLRTAATKVPGGWHLDGQKRWIGNSTFADVLIILARNADTNQLNGFIVKKGAPGLKATKIENKIGLRMVQNGDIILNKVFVPEEDRLTGINSFQDINKVLAMSRIMVAWQPIGISMGVYDICHRYLKERKQFGAPLAAFQLNQEKLVRMLGNIQAMLLVGWRLCKLYESGKMTPGRSSLGKAWTSKKAREVVSLGRELLGGNGILVDFLVAKAFCDVEPIFSYEGTYDINSLVAGREITGIASFKPAVSAKSRL

SEQ ID NO: 53485 - protein, 85 aa, Zea Mays
MSAVREWAASQNSKVLEAVAVNNLGKWKTATQMTALTLLLASRDPSLPAQGALVAPGVALLYVSTGLAVWSLVVYMRKIWRILLK

SEQ ID NO: 53486 - protein, 391 aa, Zea Mays
MGEDAACSAFDSEKVTLEEFRNMKQSLMRNNKLVVRIAGRYFPWDAAAPIVLGMISFSEEQVFEPKGMINVERVEQSAAPGGSWSIWPFSFRRTRTITAIQPVCESIVETSVSTPKELTHFKELDRERNKSRVKRIERKVRSLTPTSDELASLDLREGRNVVTFTFSTAIVGKQQVDCHIYLWRWNTRIVISDVDGTITKSDVLGQFMPLVGVDWSQNGVAHLFSAIKENGYQLLFLSARAISQAHITRQFLFNLKQDGKALPDGPVVISPDGLFPSLYREVIRRAPHEFKISCLEAIKDLFPHDSNPFYAGFGNRDTDELSYLKVGIPMGKIFIINPKGEVAVNRRVDTKSYTSLHALVHGMFPPILSSSEQEDYNAWNYWKMPLPDVDL

SEQ ID NO: 53487 - protein, 568 aa, Zea Mays
MVRKSSQDWELVWYQPSNECEYYATCGPNAKCTASQDGKAKCTCLKGFHPKLQEQWNAGNWSQGCIRSPPLGCETNQSGDGFLPMGNIKWPDFSYWVSTVGDEPGCRTVCLNNCSCGAYVYTATTGCLAWGNELIDMHELQTGAYTLNLKLPASELRGHHPIWKIATIISAIVLFVLAACLLLWWKHGRNIKDAVHGSWRSRHSSTQSQQNSAMLDISQSIRFDDDVEDGKSHELKVYSLDRIRTATSNFSDSNKLGEGGFGPVYMGTLPGGEEVAVKRLCRNSGQGLEEFKNEVILIAKLQHRNLVRLLGCCIQREEKILVYEYMPNKSLDAFLFNPEKQRLLDWKKRFDIIEGIARGLLYLHRDSRLRVVHRDLKASNILLDADMKPKISDFGMARMFGGDQNQFNTNRVVGTFGYMSPEYAMEGIFSVKSDVYGFGVLILEIITGKRAVSFHCHEDSLNIAGYAWRQWNEDNAAELIDPVIRASCSVRQVLRCIHIALLCVQDHADERPDIPTVILMLSNDSSSLPNPRPPTLMLRGREIESSKSSEKDRSHSIGTVTMTQLHGR

SEQ ID NO: 53488 - protein, 242 aa, Zea Mays
MVEELVVDDTPETSRGIIGLCSDPSTGLFYAYDESSIFQVSTSDEGCDMWQVYLDMNHYAAALSHCRNPFQRDQVYLVQADAAFAAKEYYIAASFYAKINYILSFEEISLKFISIGEQDALRTFLLRRLDNLTKEDKMQITMISTWATELYLDKINRLLLEDTTVTIINSVAEPNSSEYRSIVNEFRAFLSDSKDVLDEATTMKLLESYGRVDELVYFAGLKEQYEIVVHHYIQWLQLRHQV

SEQ ID NO: 53489 - protein, 349 aa, Zea Mays
MALVETEGSYTMKQNFTNLDIHVGQSYSFLVTMDQNASSDYYIVASARFVNESLWTRVTGVAILQYSNSKGKASGPLPDPPNDEYDKTFSMNQARSIRMNVSTGAARPNPQGSFHYGSINVSQVYKLRNEPPVIINGKKRTTLSGISYSPPDTPLRLADLYDKKDVYTLDFPTMPIDGPPVIRTSVINSTYKNFLEIVFQNNDSTVQTYHIDGYAFWVVGMDYGEWTENSRGTYNKWDGVSRCTTQVFPGAWTAVMLSLDSPGFWNVRTENLDTWYLGQETYIRVVDPNGGYNVTEMVAPDNMLYCGLLKDKQKAQKPHGSRSSASAAKLNYHVLAALVSLVVALVLGH

SEQ ID NO: 53490 - protein, 263 aa, Zea Mays
MVGLDYLHSELGIIHTDLKPENVLLESTINPAKDPVRSGFTPILDRPVGNQYGGTVISFSEKMLKMRARRAVAKISQRRVSLGGVGAELEKERCLDGISLKCKIVDFGNACWADQQHAGEIQTRQYRAPEVIIGSGYSYSADIWSFACIAFELATGDLLFAPMNRQGCSEDEDHLALMMETLGKMPRKIASSGTRSKDYFDRYGDLKRVRRLKFWPLDRVLVERYSFSEPDAKGFADFLRPMLDFAPEDRPSAAQCLKHSWLN

SEQ ID NO: 53491 - protein, 214 aa, Zea Mays
MLGGKKVTVVFVLGGPGSGKGTQCANIVEHFGFTHLSAGDLLRAEIKSGSENGTMIENMIKEGKIVPSEVTIKLLQEAMIKSENDKFLIDGFPRNEENRAAFENVTKISPAFVLFFDCSEEDMEKRLLGRNQGRVDDNIETIKKRFKTFVDSTLPVIEHYNSKDKVKKIDAAKPIPEVFEDVKAIFAPYSLKAPHKHICDYDGPFNIEQKFWLI

SEQ ID NO: 53492 - protein, 151 aa, Zea Mays
MLAIHYYLLFNGPDGIWHHMKTFYMEQSTFSFSENVYVGQNEIFDILSNIRKKLKGDRPREKIVHVVEKLHCRANGETGVAIRVSGSFIVGNQFLVCGEGIKAEGMPSLDELSIDIPSKRVGQFREQFIMQPGNLMSCYYISKQDLYIIQS

SEQ ID NO: 53493 - protein, 503 aa, Zea Mays
MDSIQLLAKCKTSLPKMFASKMLVQSDNSMSVPYRSSAADSQKLSVAMKFKGQLFQLMQRLESTTPHFIRCIKPNNLQLPAIYEQGLVLQQLKCCGVLEVVRISRSGYPTRMTHQKFARRYGFLLEDVASQDPLSVSVAILHQFNILPEMYQVGYTKLFFRTGQIGNLEDTRNRTLHGILRVQSCFRGHQARHHARERTRGVLTLQSFIRGENARQIYSSLLRKHRAAVVLQRNVRCWLARRYFINVRKASVIIQSGIRGSLVRRCNGNIDLINVLREFESKQEAHGDQILIKASVLAELQRRILKAEATVREKDEENEMLHQRLQQYENRWLEYEQKMKAMEEMWQKQMRSLQSSLSVAKKSLVLDETPRMSDSSVDQSWESNGNHHVSSGSQLVPHTGGREMNAGLSVISRLAEEFEQRSQVFADDAKFLVEVKSGQADASLNPDMELRRLKQNFDSWKKDFSGRMRETKVILNKLGNGNESSPNSVKRKWWGRLNTSKFS

SEQ ID NO: 53494 - protein, 995 aa, Zea Mays
MQLSYLSEPSVLYNLQYRYSKDMIYTKAGPVLVAVNPFKKVSLYGNEYIDAYRNKSMDSPHVYAIADAALCEMKRDEVNQSIIISGESGAGKTETAKIAMQYLASLGGGSGIEYEILQTNPILEAFGNAKTLRNDNSSRFGKLIEIHFSTTGRICGAMIQTFLLEKSRVVQCAVGERSYHIFYQLCAGAPASLKEKLNLKKVDGYKYLKQSCCYSIAGVDDAQMFRTVTQAMNIVHISKEDQESVFAMVSAVLWLGDVSFTVIDNENHVEIIVDEASKTVSELLGCSIEDLNLALSKRHMKVNNENIVQKLTLAQATDTRDALAKSVYASLFEWLVEQINKSLSVGKRRTGRSISILDIYGFESFDKNSFEQFCINYANERLQQHFNRHLFKLEQEEYVEDGIDWAKVDFEDNQDCLSLFEKKPLGLLSLLDEESTFPNATDLTFANKLKQHLDSNSCFRGERGKAFAVRHYAGEVAYDTSGFLEKNRDLLHMDSIQLLAKCKTSLPKMFASKMLVQSDNSMSVPYRSSAADSQKLSVAMKFKGQLFQLMQRLESTTPHFIRCIKPNNLQLPAIYEQGLVLQQLKCCGVLEVVRISRSGYPTRMTHQKFARRYGFLLEDVASQDPLSVSVAILHQFNILPEMYQVGYTKLFFRTGQIGNLEDTRNRTLHGILRVQSCFRGHQARHHARERTRGVLTLQSFIRGENARQIYSSLLRKHRAAVVLQRNVRCWLARRYFINVRKASVIIQSGIRGSLVRRCNGNIDLINVLREFESKQEAHGDQILIKASVLAELQRRILKAEATVREKDEENEMLHQRLQQYENRWLEYEQKMKAMEEMWQKQMRSLQSSLSVAKKSLVLDETPRMSDSSVDQSWESNGNHHVSSGSQLVPHTGGREMNAGLSVISRLAEEFEQRSQVFADDAKFLVEVKSGQADASLNPDMELRRLKQNFDSWKKDFSGRMRETKVILNKLGNGNESSPNSVKRKWWGRLNTSKFS

SEQ ID NO: 53495 - protein, 720 aa, Zea Mays
MYHAMRLRCLLLHPPMWSNSSSLGISASGVSRGSFVRRFSALGAPRPPGPARRLCRFYGSKGGVGSAEARGAAASPAAAGSSGRCFEQEHARLGERDQQEWLSGERFLTGCKRRESTFLTRRERFRREFLRRVVPWEKGSLSWQNFPYYVNDNARQLLSECVASHLRHKSVTSEYGSRLESSGGRILLQSSPGTELYRERFVRALAHELQVPLLVLDSSVLAPYDYGEDYSESEEEDEHAESEDEGSESEMEDDGDEDWTSNNGKSGESDDEDALKSVEDLKKSVDDLKKLVPCTIEEFAKRIAGAEESTASESSETPESPEEEKRPFQRGDRVKYVGTSAVVEADQRIILGKIPTQDGSRSAYTFISGRGLSNGQRGEVYEVNGDQVAVIFDPSIEKSHNAHEDVTNKEENGSATVYWVDSQDIAHDHDTESDDWHIALEALCEVLPSLQPIIVYFPDSSQWLSRAVSKSDRREFVQRVEKMFDRLTGPVVLICGQNLLAAAPKDKEQPSPLKRLVGGLKGERYSRSSDISKLFTNSLTVPLPEEDEQLQLFNNQIEEDRKIMISRHNLVKLHKVLEEHDLSCVELLDVKLDGIVLTKQKAEKAVGWARNHYLSSTTLPSIKGDRLIIPRESLDISIERLKEQGITAKKSSQNLKVLAKDEYERNFISAVVPPNEIGVKFDDIGALEDVKRTLDELVTLPMRRPELFSRGNLLRVWLFC

SEQ ID NO: 53496 - protein, 1086 aa, Zea Mays
MPPHAAAAAKKRGHPWPAAGAAEAGAGNWNPRLWDWDSRALTARPSSDALRLAGGQPQPAAEAQRQGAGALNLQLGLQEDSTTPMDASPTAPAAAAAASPPASAAAGQEPVVRPSKRVRSGSPGGAGGGPGGGGTANGGASYPMCQVDDCRADLTSAKDYHRRHKVCETHSKTTKAVVGNQAQRFCQQCSRFHPLAEFDEGKRSCRRRLAGHNRRRRKSQPTDVASQLLLPVNQENAANRTQDIVNLITVIARLQGSNVGKVPSIPPIPDKQNLVEIISKINSLNNATSPAKSPSPEVVVLNTSQEQREQGHDSVDKTTNGIDKQTVPSTMDLLGVFSTGFATSTPVTNTSQSQGSSDSSGNNKSKSHSTEPATVVNSHDISTQDFPAAGFMRSNSTQESRPHIYKQTEHETRPYLSLQLFGSSEEDIPPKMDSLNKYLSSESSNPLDERSPSSSPPITRKFFPIHSVDEEVRHPHITDFGEDATMGEVSTSQAWCAPPLDLFKDLERPLENGSPPNPGYQSCYVSTSCSDHSPSTSNSDGQDRTGRIIFKLFGKEPSTIPGNLRDDIVNWLKHSPTEMEGYIRPGCLVLSMYLSMPAIAWDELEENLLQRVNSLVQSSDLDFWRKGRFLVRTGSKLVSYKAGMTRLSKSWRTWNTPELTFVSPIAVVGGQKISLILKGRNLSIPGTQIHCTSTGKYISKEVLCSAYPGTIYDDSGVETFDLPGQPDFILGRCFIEVENRFRGNSFPVIVASSSVCQELRSLEVELEDSQVLDVSSDGQIHDCRQSKTRVQVLHFLNELGWLFQRASACTLSTRPDVSDLDLTQFSITRFKYLLLFSSERDWCSLTKTLLDILAKRSLVSEELSKETMEMLAEIHLLNRAVKRKSRRMVHLLVQFVVLCLDNSKVYPFLPNFPGPGGLTPLHLAASIENAEDIVDALTDDPQQVGLTCWQSALDEDGQSPETYAKLRNHNSYNELVAQKLVDMKNSQVTITVNGDEIHMDQLGNVDDRKKSGVQALQIRSCSQCAILESGVLRQPMRSRGLLARPYIHSMLAIAAVCVCVCVFMRALLRINSGKSFKWERLDYGTI

SEQ ID NO: 53497 - protein, 311 aa, Zea Mays
MLWKLLTLMDLECDVVAIVERLATVKHKLLVLSGKGGVGKSTFSAQLSFALAEMDHQVGLLDIDICGPSIPKMLGLEGQDIHQSNLGWSPVYVESNLGVMSIGFMLPNPDDAVIWRGPRKNGLIKQFLKDVDWGEIDYLVVDAPPGTSDEHISIVQYLQATGIDGAIIVTTPQQVSLIDVRKEINFCKKVGVPVLGVVENMSGLRQPLSDLSFVKPGEAGETDATEWALNYIKEKAPELLSVMACSEVFDSSKGGAEKMCREMGVPFLGKVPMDPQLCKAAEEGRSCFSDQKCGASAPALQSIVKKLIKTG

SEQ ID NO: 53498 - protein, 60 aa, Zea Mays
MFLDQGRQNFEQQRREHPDVVTSDLPSIAFLEKAASGNKYEITEFVDEPSFYLAVLQFQG

SEQ ID NO: 53499 - protein, 592 aa, Zea Mays
MVGMRGAYGGACNDDSKSRLHGGKAAEPEIASMAVHKVAPPPARSTASKMKVRVKETFFPDDPFRAFKGQPPGTQWLMAVRYLFPILDWVPSYSLSLFKSDLVAGLTIASLAIPQGISYAKLASLPPIIGLYSSFVPPMVYAVLGSSRDLAVGPVSISSLIMGSMLRQAVSPTAEPTLFLQLAFTSTLFAGLVQASLGILRLGFVIDFLSKATLVGFMAGAAIIVALQQLKALLGIVHFTTEMGIVPVMASVFHHTSEWSWQTILMGVCFLVFLLSARHVSIRWPKLFWVSACAPLASVTISTLLVFLFKAQNHGISIIGQLKCGLNRPSWDKLLFDTAYLGLTMKTGLVTGIISLTEGIAVGRTFASLKDYQIDGNKEMMAIGLMNVVGSCTSCYVTTGAFSRSAVNHNAGCKTAMSNVIMALTVMVTLLFLMPLFVYTPNVVLGAIIIAAVIGLIDFPAVYHIWKMDKMDFLVCVCAFAGVIFISVQEGLAIAVGISIFRVLMQITRPKMMVQGNIKGTDIYRDLHHYKEAQRVSGFLILAIEAPINFANSNYLNERIKRWIEEESFEQDKHTELHFIILDLSDNINCIF

SEQ ID NO: 53500 - protein, 416 aa, Zea Mays
MTSDSRCLNLLNHHGKCNNSKKKSPLLNHHGKCQDCSSTKFNGASLKLNVRKDRSKANSTRGSSGWISIKARTSDWNSREMAKKRRLSENAQTALSNGGDDPFAFDDTDQEPSNWDPFGPKRKSPQKRAKRSNGELVLDDCDTAVTGSPELCQPEGINQSGATSDSKAADESNLLEDCLLASVKVLMNLANDNPSGCEQIASCGGINTMASLIIKHFPSFDFSMDSNNQMKERVSSGDLSSSQNSKSLQIKTKQLRAYELDFLVAILGLLVNLVEKDNLNRVRLANARVSVNLSQSPDTEEVQRDVIPLLCSIFLASQSTGETAEAISPDDEESLLQGEREAEMMIVEAYAALVLAFLSTESMKVRGAISSCLPDNNLKVLVPVLEKFVSFHLQLNMMTRETHSAVTEVIERCRQS

SEQ ID NO: 53501 - protein, 349 aa, Zea Mays
MSVQLFNYRHMANTLSLYRTVKRLGIPDERIILMLADDMACNPRNSYPAQVFNNENHQLNLYGDNVEVDYRGYEVTVENFLRVLTGRHESAVPRSKRLLSDEGSHILLYMTGHGGDEFLKFQDSEELQSHDLADAVKQMKEKHRFKELLIMVDTCQAATLFSQLQSPGVLAIGSSMKGENSYSHHLDSDVGVSVVDRFTYYTLAFFEKLNMYSNASLNSLFTSYNPSMLLSTAYYRMDLYERPLNEVPVTNFFGSVMKTLHTDSAYTGFLAAHDNETPMSTGDNLDDHFMLKGRAIARRSTIEKEAQLTPHGWTEVLAEQLEGKNTDTVVMYGLGAMGILLALSTWLSM

SEQ ID NO: 53502 - protein, 443 aa, Zea Mays
MITAEEKSPEREEEEEEANPRAEAFLEIICRVPAGEVEAALSACGIGPTAEVEELVLKSRECYKRPKSAVRFFRWAGQSVSHTAYAWNLLVDILGKAAMFEPMWDAIRSMKQEGGGGLVSVATFASVFASYCAAGNIKDAIAALDVMDRYGLKHDAVALNSLLSAICRVEGRAQDAQDVFERTKATIPPDGDTFAILLEAWEKEGNAVRAKSVFGEMVVRIGWDAANVMRSKGCLPGINFFSTAVDLVVRKGDYLNAVAIWHMMVSEAGLVPNFSMYSAMIGLHCNAGSIDDALGLLDEMPLNGVFANSVTYNTILEGFIKHRKAREAESFLTEMSKNEQLPTASNCAAAISLFFKEFNPSAAIDVWRCIVEHNITPAEDSAKELIAGLLEFGRFTEVTKRADEMIDMRVELSRSTMENMKRGFAKAGRHQSYDNIARRLKRY

SEQ ID NO: 53503 - protein, 256 aa, Zea Mays
MWDVMYARHKAQLKIITELKASDISVATRETSEQHHERTLQLWNVVQEWHVQFDRFMTYQKEYIGSLYNWIKLNVIPIDTNIKPNSSQPHEATPPIKRLLHAWHDILEKLPDNETKKAIHTFAEVVNTILVHQDDELKLRLKIDDIRRDLEKKRKQFDSWAQKNWDRGASIPDGDNPGRVDPAAERKAVVDRVENALKDLEDNYRTQCKVVRDKSLNLLRSNLPELFRAVSEFSLQSAGYFKGLWSIAQTNDQLDD

SEQ ID NO: 53504 - protein, 474 aa, Zea Mays
MTILLLMFIFQFLPKVYHSIHIMRKMQKVTGYIFGSIWWGFGLNLFAYFIASHIAGGCWYVLAIQRIASCLQEECKKNNSCDLISLACSKEICFHPPWSSNVNGFACDTNMTSFSQRNVSTCLSGKGSFAYGIYLGALPVISSNSLAVKILYPIFWGLMTLSTFGNDLAPTSNGIEVIFSIINVLSGLMLFTLLIGNIQVFLHAVLARKRKMQLRFRDMEWWMRRRQLPSRLRQRVRKYERERWAAVTGDEEMEMIKDLPEGLRRDIKRYLCLELVKQVPLFHGMDDLILDNICDRLRPLVFSSGEKVIREGDPVQRMVFILQGKLRSTQPLTKGVVATCMLGAGNFLGDELLSWCLRRPFVDRLPASSATFECVEAAQAFCLDAPDLRFITEHFRYKFANEKLRRTARYYSSNWRTWAAVNIQLAWRRYRARASTDLAAMAAPPLAGGPDDGDRRLRHYAAMFMSLRPHDHLE

SEQ ID NO: 53505 - protein, 324 aa, Zea Mays
MELQLLEAMTKEYENFKFRQPYQQVLYYCSLILEDQTWPWDEEFSALSHLEASDLGIFLPHLLSKTFIECYFAGNIEPNEANNIVQHVEDVLFNAPISACKPLSPSQHLAKRIVKLEKGLRYYYPAMCSNHQDENSALLHYIQTHQDNVKQNVLLQLLALVGKQPAFHQLRSVEQLGYIALLRQRNDSGVRGLQFIIQSTVKDPANLDARVENFLNMFESNVYNMSDAEFKSNVSALIDMKLEKYKNIREESAFFYGEISEGTLKFDRKEAEVAALRELKKEELVGFFNDHVKVNAPQKKILSIQVRSRPLYGSFRGGVGQMKL

SEQ ID NO: 53506 - protein, 126 aa, Zea Mays
MGKISRRVSLVRYPKPEEFTKPSFGSLTPSIKKSAGSKKTMSRFTGVSKNPSSQGSALSLGQRSAEPTPKHKGKRKDESSLGHSNVSGKATEGSEARGAGSNTASEMPQSPPEKSKKRRKKDKIVE

SEQ ID NO: 53507 - protein, 903 aa, Zea Mays
MASRQHNAQFHKSKTLDNKYMLGDEIGKGAYGRVYKGLDLENGDFVAIKQVSLENIPQEDLNIIMQEIDLLKNLNHKNIVKYLGSLKTKSHLHIILEYVENGSLANIIKPNKFGPFPESLVAVYIAQVLEGLVYLHEQGVIHRDIKGANILTTKEVIEMSGVCAASDIWSVGCTVIELLTCVPPYYDLQPMPALFRIVQDVHPPIPEGLSPEITDFLRQCFQKDAMQRPDAKTLLMHPWLQNSRRALPASLRQPTPLRNIDGDDESSRGDNNSGFCDTPGDTRATIASNVDQVNGRNGPNMDSAAQSKSEELHDGNLELTEGISSNNVALVKDNVVLNKDPTLVLHEKLPVESSFGDADLNGKVMAHELLQGGLPSKIELENKESSTVEDGDVFSFQAGRQNIDFQMVVEPSVVEGPKQLSRFSDKPEDASLEDLFPPIDKRGDNGAEPSTSTTVQELQYNGVHNGFVKGLNARVEKQKENDSESMNGGKLIEFAMQLENIDASGFGEHIPGESLFPLQSVEYSKIVAQLKPGESEDVILLACQKLLSIFSHRPEQKQIYMAQNGFLPLMELLEIPKNRILCSVLQLINNIVKDSTGFLENACLVGLIPVVMNFAEPNRPKDVRVQASLFLQQLCQASTLTLQMFIACQGIPVLVSFMEPDYAKYRDMVHLAIDGIWQVFKLQHSTPRNDFCRIAAKNGMLPRLVNTLYSLNEATRFASVSGSGASVTQNGSTPRRRSGQLDPSVLESCKARLDHHHSSGSLQSLQADADKHHILMDSSSSPRFSDKTSSNLERNENDLVIRPQRLSVSAGRTSTDRSPKHIELVSNGHNNSQNDQVRPLLSLLEKEPPSRHVSGQLDYVRHISGLERHETILPLLHTSTERKTNGELDLMMDFAGGQGADDH

SEQ ID NO: 53508 - protein, 69 aa, Zea Mays
MFPMRPTSLATCKPSSLLSDRRERWIHPWTSPTGWACCSRWRSCSCTPSTTRTPRRSWRHASARRARSP

SEQ ID NO: 53509 - protein, 111 aa, Zea Mays
MQVVKLHSVLFKGPEEEGPKTVKLFSNKEHMGFSNVNDYPPMDTLELSSDHLIENKPLPLKYVKFQNVRSLTVFIEDNQSGSDVSKIQKVALYGTTVDTTNMKDLRKTEEH

SEQ ID NO: 53510 - protein, 229 aa, Zea Mays
MMDHQLFDDPFGSSISSLEAEIFSAAAQLPPSPPWPDIDLDDDYDIHDLSAPAANAATSSGGGYGSGGSGGHRKLSHNAYERGRRKQLNELYSSLRSLLPDADQTKKLSIPTTVSRVLKYIPELQKQVDNLERRKKELTNANCKPGVLKTTKAVTPIVSATCLNDTEIMVQVSLHSDVAATALPLSKCIKVLENEGLHLVSSSTYSSAFENKTFYSLHLQVHHCFFFFF

SEQ ID NO: 53511 - protein, 492 aa, Zea Mays
MHGPYPTAAAAAASSSDDMAANGMKVALHRQVSGGSMKQNAELRRQASLESPRTGRATSRFLFGRQSSMDPNRRRGRSQSPVRAPEDLGVPDNLDATMQLLFFACQGDALGIEGLLRSGVDVNSINLDGRTALHIAACEGHRDVVRVLISWKANIDARDRWGSTAVADAKFYGHSRVYDLLKFHGAKVPRTKRTPMMVSAPAEIPEYELNPGEVQFRRGCDVTPGVYHIAKWNGTKVSVKILDRDGCSDQEAANSFRHELTVLEKVRHPNVVQFVGAVTQSIPMMIVSELHEEKDLSVCIQKKGKLKPQKVLRYGLDIARGMTYLHQCKPDPIIHCDLKPKHIFLDSGGQLKIAGFGVTRMSKVGTDKVRLIYHGALVDSFSYHTAPELYRNDAFDSSVDSYSFGFILYEMVEGSVRAPEDSGHSIRFEGLRPSLKGRLKGYPPDFKALVEECWHPQAMARPTFSEIIIRLDKIYAHFDKHGSWKDSLKLWK

SEQ ID NO: 53512 - protein, 217 aa, Zea Mays
MEDFYDIKASKIDDKQINLFGIFDGHGGSRAAEYLKEHLFENLMKHPEFMTNTKLALSETYRKTDSEFLDAERNTHRDDGSTASTAVMVADHLYVANVGDSRAVISKAGKAIALSEDHKPNRSDERNRIESAGGIVMWAGTWRVGGVLAMSRAFGNRLLKQFVIADPEIQEQEINEELEFLIIASDGLWDVVSNEKQNCRYLGVFSEQWDLSLFSTA

SEQ ID NO: 53513 - protein, 234 aa, Zea Mays
MFKVAALGAICNIAINLTPRKSVLLHSGVVSQLVHLSKSMDPMLRLKSVCALRNIMFLLSPKDKDFIVKELTLSTLSSLICDSEHFVQEQTLALVHNLVDGYVVSANYVIGEDGMVMDAIARQLNNASAPGVCIQGMYVLANIAAGNEWNKEAVMNVLLPHRADRIKPSFAVNFLKSKDRQLRVATLWCVLNLIYPKCEASSGRAVRLQSAGVILQVKRMINDPCLDCKSSYGA

SEQ ID NO: 53514 - protein, 748 aa, Zea Mays
MADPDDLGRRLAAVAVSESPTAAAAALESSNNNLFQVMRAVEDAEATIRQQLEENSRLKDELMLKTRELHRIRSEATDQASSHGIRIHQDRALGAHTDTSSTAPIRTTATAAEAFEWGAGDAGINHKYLEANQANGIPRKSPSAPDSAFPSQLSTPSSRSLSPTRHHKETDYDSRLNLSGQGALPVSDLNSNVVIWKQDLLVKVKEQGEEIAQLRRHLSDYSVKEAQILNEKHVLEKRIAYMRMAFDQQQQDLVDAASKALSYRQDIIEENIRLTYALQAAHQERSTFVSSLLPLLSEYNLQPPVLDAQSIVSNLKVLFKHLQEKLIITEEKLKESQYQITPWHAESSNNTSAAAQSPSHPPGNALIKANLDIVPQQAYSHVHSPVSSPVQTRRDWDLLGNENRQVIRSEVATTSAEHDNVGRTSPSTSSHNMKDAPQRTDHDSRAVRFNIESKDQNPSFKDLIKSDASESLEGAEAQIPQELSAQQDSGGSPNLTSGLDDANPPYPYLPTVLEEPSSSFSEVAEDDPLPAIEGLRITGEAFPGRELQASGYSIHGTTSCNFEWVRHLDDGSINFIEGARQPTYLVSADDVDFVLAIEVQPLDDKKRKGEIVKVYANDQRKITCDPETKEHIKKILSLGHVSYEVLLPVRFLDMWEPAILAIKREGYSVKCNGQRGVVVMEKFQQAMTINIPFGRPTEFSILSADGAEYNLKPAENAPSRDAIVLILRLFRMKAVEKSKGKRKGIFFK

SEQ ID NO: 53515 - protein, 891 aa, Zea Mays
MAVYYKFKSARDFDSIPIEGQFISVANLKERIFESKHLGRGTDFDLMISNAQTDEEYADEATMIPKNTSVLIRRIPGRPRKPIVTEPEETKAAEDGVQDVMPTSGAFLGDSSMKYPEESEWDDEFGNELYISDSVPYQPVCQAVDAIENKVDEDSKIKALIDTSALDYSQIPDGYGSGRGYGRGMGGRMMAGRGFGRGLERRTPPPGYVCHRCKVPGHFIQHCPTNGDARYDVKRMKPPTGIPKSMLMQTPDGSYALPSGAGAVLKPNEAAFEKEIEGLPTTRPVGDLPPELRCPLCKEVMKDAVLTSKCCFRSFCDKCIRDYIINKSMCVCGATSILADDLLPNKTLRETISRILEAPPTSSTENVGSMVQVQDMESALPVQPKHRSPAVSAASKEEAKASTLVEESPDAESLNGTKATNIDASSSDKKALTVPDIAEGTLDSKKAKEDKPVEATPVAKDSQEKFPAGEQAVKKKKKKKPRVPGNAEEQWKNFQDFGTENFSGMPLGPTGAFNPYWGGGVPLPMDYMNAPFPGPMPYMGYPPGPFDPFGGGVLPQDPFMPPGYMMPGVPRDLSELAVNAMGINMGPPVMSREEFDPRKPEHRRRREMDRFNDRERERDRSRERERERERERSLERERERERERGRSLERERERVRELERSREGDRERQRGRDRDRDSRREARASPGAINDSSSMRRNDRSRSQPDRSERGPPQPSSPDRQSRRSSSGKKRSSSDRYDDMPLPPPPPLPATRHEAEPAKAPGSSSKSKASVFSRISFPGDGANPSDAKRSRRASDKPPARSSSSSKKSAAAEGGDGRGHRHHREPAAAEEEKPRPAASGGDYYGGTDGEESEDEEQHFKRRPSSSSRREREQDAPEEQPRHSRRSRDHRRR

SEQ ID NO: 53516 - protein, 87 aa, Zea Mays
MLSADIPPNQTIYLNNLNEKVKKEELKRSLYALCSQYGRILDVVALKTQKLRGQAWVVFSEITAATNAFRGLQDFDFYGKKMGGPGA

SEQ ID NO: 53517 - protein, 55 aa, Zea Mays
MSARSSLITILHFLGSAIRGSVTRSSSRRNLIRSEKPYGCAWRKWPPQNLAKTVP

SEQ ID NO: 53518 - protein, 514 aa, Zea Mays
MNDMQVRDKILLLLDSWQEAFGGPGSKYPQYHWAYLEVKTTGVVFPKRPMDAPPIFTPPATHNSETYGSPRYSAGSLSDRMSSDVETLSLGDLNKIRNVTDLLNDMVYALNPSDRMAINDEIITDLVTQCRSNQQKLLQFVSSSGNEQLLKQGLETNDLLQSVLSKYDAVASGAPLAVEASVREAIEAPAVKSYAPPEHNDNVNEEEDEFAQLAQRKNKSVVSSSDDASSSTLGDLALVPIDQAVSESPSSVASNALVLLDPAPSTSTESKELDMIDLLSLTLCSPTPETSTDSSAQDQNGPQQPAVTHNQKGLQEPTVTNGQQYPSSVPQYPSNYQPHTANQAYAPQTSNYVAPWAQTGAYPPQPPAYASGYAYPAPPWVAPTHPVDSNPFLSVNYQDPRPAATSVAQTATYAPPPASYPPSISYAQFATPQSIQHSNSVASPSNGQIANQAQMNVNQQPKDSSAASSRPYYIPDNLFSDLIDAKSFGGGNKMGGPTTMGSSNGGQPMIGGKK

SEQ ID NO: 53519 - protein, 397 aa, Zea Mays
MLNRQVVKSDSATIKIPELDFEIPPEAQRGTLSTVEGIIMRAVDELQALQDERKKVDPQKAEAIDQFLLKLRSLGSGEAAFTFILDDPAGNSFIENPHAPLLDPLLSVRFYERTREQQAALGFLAEPPKEQPGEAVLPASAVESNSDGLQSVPHGSVGAVAGRRAIAQGNPDEVAAALCRYSAPEEVDTLPSTCGACGTECVTRFFATKIPYFREVIVMATTCDMCGYRNSELKPGGEIPAKGKKITLRVQNAQDLTRDVIKSDSASVKVPELELELSCGTLGGMVTTVEGLIVKICEALERIHGFQLGDSTLEWKKKKWDDFKERLSKLLSLQEAWTLIIDDGLAASFVAPATDSLEDDSQLTIEEYQRSWEQNEELGLNDMDTSSADAAYNTTNT

SEQ ID NO: 53520 - protein, 122 aa, Zea Mays
MHCVPASPYCRTCGCFSSGRLLASLARCICRGSYRSYSCFVLLPTVFPISFRWRCFVASRIRGPVSRGGEQQKCELIQRETNRNRNSRYSWARWDHHPKRYSKRCGVWQCQEIVRWVCRCGD

SEQ ID NO: 53521 - protein, 678 aa, Zea Mays
MSQDRKEIVVMDSIEKLEKLSGVKVTDLHRHYVDDITIPSKRGPKFGTLKRVDDVFDCWFESGSMPYAYIHYPFENRELFEKNFPGNFVAEGLDQTRGWFYTLMVLSTALFGKPAFKNLICNGLVLAEDGKKMSKSKKNYPSPKDLIDEFGADSLRLYLVNSPVVRAESLRFKRTGVFAVVKDVFLPWYNAYRFFVQNAKRLEVEGLASFSPMEQAVLLKSSNVLDHWINSATESLVSFVHQEMDAYRLYTVVPYLVKYIDYLTNIYVRLNRKRFKGRTGEEDCRISLSTLYHVLVTTCVVMAPFTPFFTEVLYQNLRKVSSKSEESIHFCKFPSTTGERDERVEQSVNRMVTIIDLARNIRERHNKALKTPLKEMVVVHPDNDFLEDITGKLKEYVMEEINVKTVTPCNDPLMYASLRAEPNFSVLGKRLGKDMGKVSNVVKKMTQEQILDFEKSGEISFFGHCLKLDDIKVVRQFKRPENVSEKEIDAAGDGDVLVILDLRADQSLFEAGVAREVVNRIQKLRKTAQLEPADPVDVYYESVGSDKNTLEEILKSQDQYIRDALGSPIMPKEMAPTDDVILGEESHNVHDMSFVICIARSTPILAPDLLSHASGKSNHVEALRVYLLSRSLSRLKNQFQAGKGMITVDCIEGYPPVSLLLGKHVFLSAGDFYLASRS

SEQ ID NO: 53522 - protein, 586 aa, Zea Mays
MDNLITLVNKLQRACTALGDHGEESALPTLWDSLPAIAVVGGQSSGKSSVLESVVGKDFLPRGSGIVTRRPLVLQLHRIDGDREYAEFMHLPRKRFTDFAAVRKEIADETDRETGRSKQISTVPIHLSIFSPHVVNLTLIDLPGLTKVAVDGQPESIVHDIENMVRSYIEKKCTVVDSGERTFGVLTKIDLMDKGTDAVDILEGRSYRLQTPWVGVVNRSQQDINKNVDMIAARRREREYFASTPEYKHMASRMGSEYLGKMLSKHLEQVIKSRIPGIQSLITKTIAELETELNRLGKPIANDAGGKLYTIMEICRMFDGIYKEHLDGVRPGGEKVYHVFDNQFPVAIKRLQFDKQLSMENVRKLITEADGYQPHLIAPEQGYRRLIESCLISIRGPAEAAVDAVHAILKDLVRKAINETHELKQFPTLRVEVGNAAFESLDRMRDESKKNTLKLVDMECSYLTVDFFRKLPQDVEKGGNPSHSIFDRYNDSYLRRIGQTVLSYVNMVCSTLRNSIPKSIVYCQVREAKRSLLDHFFTELGAREMKQLSKLLDEDPAVMERRTNLAKRLELYRSAQSEIDAVAWSK

SEQ ID NO: 53523 - protein, 884 aa, Zea Mays
MEGSTKDFQILAGTQDGQIFGDSQFKYMDIELHLDDEILELIGPSESMDGPEFSIKAAKIGITSLYVSTKQSSGHRVLSQVVKVEVYGPLQIHPEYIYLTPGASFVLSVKGGPKTGVSIEYSSLNMGIVEVQNTTGKLSAKSVGNSTVRAAVLANGGILVCEAFGRVEVDIPVAMTLNTQSERLCIGCSMPVYPSLPKGDLFSFYETCQSYSWMIADEKVVTFQSAKSWRYRLDQGLYSDGKKSPWFSNGSSKFFISHMLGRSAGKTKISISVVCDFLLPGTSGSVVSYNASKIILVVPDPPLALALPMTWLFPPFYTTMSLLPRSANSLGEPNSLDLESSVGYSLLRGNGRIIDGSKIQTGESNTVDCIQAKDHSAGRTEIAACLRVAQVAQVRVAAAESSIQIVYLSVNDKVELDIKYADELGYIFNEAHGVVPVKIETNYPDVVSVLMPRDFNGTYDTRERFVLQARSHGTALVRLHTNNVPNKVDFIMVSVGAQIYPRDVILHSGQHLNFTVIGDSMDMCGHGHWLSSNGKIVHINRVTGEAQARSEGVAEVIFKGSNFKLQTTITVLKVNQIVVDAPAETLTNAAGLPDGYMFSVRFSDSIEHSIGSSASPINVPFECKVDPSFVGFVEPWTEHATKKSYCLFHPYSPAQLLPVKLDPNEGTLHILVRANLKEDPKVTGSAHALFVKGFYIKEPGKLNLTPSCNHSVITIDGNTDIELFWNAKDLLRVSRVDTNENNGVLSRVVYRVEALKRLSFSDKVTIVLPATGQTEEVEVSYDTGEEAESPSSWGLTTTAVMLTCIIVTIVTVALFIKLLQRPIRQAPSGSMTASTPARAPAADPAAMADPASPANGGDSTRRTPTEHAWQRVVWTGWSVVTFLI

SEQ ID NO: 53524 - protein, 126 aa, Zea Mays
MQCVQNINKKLEELRKMVVHRCRKMTTDEKRKLGAGICHLSPDDLSKALEIVAQDNPSFQTKAEEVDLDMDAQSETTLWRLKFFVREALERQANVASGKMDENAKRKREICNALAKTTSRRIKKQP

SEQ ID NO: 53525 - protein, 1801 aa, Zea Mays
MSDAEPPPAMEEATLTTPDVVLGEGYKDIEGQKDGRTCYGEGGDVIVADEFAGIVEDPNQPDVFKAKEPEEGVDVGGQTNVISAAVHVLTEVDAAVSSSTLVDDPMEVGMQTKEVSAAADDLIEVGAALVPSAQDHTAVAACLVNDDCNIVITGGVHRSDDQTVQEFGGDSLDADEVAPLVNDVQDDSARIDMDVAANDHVHAQDQESSQLDVATALLNEVETEIAEAGDHVVQDCTNMDMQIQTGDDKHVGTIADTATDEEGKHMGEDTMGRDGSEKHDGAVGVDVSDERVEMGRGGLSGDDNEQKEVATADEDRVEEEDMQVDAVSITGDMVEEGRIAVEYIAGEAVNGKDGIDVPEEKTPQIDKAGNDIPEEEGLQMGGAGLIGNKNGPKEAVIADYHGVEENTILMEAATTTNNDDDDDNKIVGEDVAEAVNDITGDGVPEQEAAHMDDDDDDEPPPLVAKKGGGRRKRGRPSSKVQAVVKPSVKGKDEEEVCFICFDGGDLVICDRRGCPKAYHPSCVNRDDDFFKSKGRWNCGWHICSNCQKPARHMCYTCTFSLCKACMKDAKFSCVRENKGFCATCMNTVMLIENREEAADPMEVDFDDKSSWWYLFKDYWLNLKTNLSLTVEEISAAKSQKSGELPDTNDEINSESSSGRHLENNTSKKRGRNRSKQAAIEQGSEGKETTGKSAKLGLSGIRDAQTSSGKKVRKLSRRSLSSQHSPKDSESVGTSTSSADEVSWASKELINFVAHARNGDKSVINQYDVQPLLLDYIKRNNLRDPRRKSQIICDSLLQSLFGKDRVGHFEMLKLLESHFPTSEVSPIDADENHGGVVDPDPSQDADGNSEASVVMSSEKRRKSRKYDLKHQPNIDDYAAIDNHNIGLMYLRRNLMEELIDDVDTFDEKVVGSFVRIRIPGTGQRQDIYRLVQIVGTGRSAEKYKSGKRTTDITLVILNLDKREAVTIDIISNQEFTEEECKRLRQSIKYGFIPRLTVGEVQEKAKVLQTLKVNDWIESEKMRLGHLRDRASDMGLFTLRECVEKLKLLSTPEERARRLNEEPEIHADPAMDPYYESPEEQEQEIERSSFNKSRSSFLRKDGSLVSPGKGDGRNAAQRDPKTNWESNRNTRAESSSHMESPLSRRSTYSSQGESVGYTNKPEGLNIDAQTVRLEGTTRSAPQGSPGASSGSLATNIGSGAKTASQSAINESEKIWLYMDPSNKIQGPFSIIQLRKWNSNGYFPPSLKIWKASEKQDDSILLTDALAGKFEKDLPPWEPPHVSLSQINKTPLEQSTIADEQTPKSVIAKSFSSSDQRHDYSSTNLGTTMIHSGSQGYYGMQNSHAAYTSQQSLTGSWNATSSQFGVAISPLTPTQPAMQSLSGQNIVAAENMGHLTTGMAPATANAEMVNSDLTSQNQMLSSLPQTDDRLADGIESKSGEDVSHGRVRSSAEAIGPQDAQLGPVQLNAQQLENTRNHMSSIDLSKSMMPSQMMSAPSAASVQPSLTTTARSDNQSSGWAVPAQMANTPGQSQITGNLTWGNTPQGDASLGWGMVGQSNMNMPWVASAQGASGYNMGVAMPTQPNAVPNMGWLPNPGNTSMNMIWAATQGQGTPNAAPMMGGQMQGVPMAPWGGVAAGSANSYPAWGNQQAGNMNQNVGWSAPVQGNPGQANNNMNWNAPNGNPNWNNQQRENGGRHSGHRGAFSGGDSGGRSWKSRSGGDGGSRGHSRFSHSTNTEGYPSRTDRHYDRQNSGNERRYENHNERNGRQFDRQPSDNERNHDRPDGRHGGRDDDRQADRSESRELR

SEQ ID NO: 53526 - protein, 221 aa, Zea Mays
MGSAGALLWHTPQQLHGRGILFRQSRPLLRQRNLPLISLAAPALEPERRRRQCLRCAAVDGDGALRESGPLPQKESPSSGIGAALEDPPPGPPVENGSFGGPSQEEQSALYTFLYPSKDLLPDDKEMSIFDHLEELRDRIFISVLAVGAAILGCFAFSKDLVIFLEAPVTAQGVRFLQLSPGEFFFTTLKVIVAFYLEVLSFCMRSLHLLSQMGQWNRCGQ

SEQ ID NO: 53527 - protein, 302 aa, Zea Mays
MAAAARVFRGSLFLMSPAAGAKASAAKKAGAAAAAAAVAKKTEAATTKPRLPTGITKPMPVSDEFRRFAGGAPEVARSEAIKLIWAHIKAHGLQEMEVTEHNLKTQLENALKELEAAQHKASTATSGTAENALLEAKSVTDLKSKDLEEKKRELELLDNKVQTLEKEWSVVEEESLKKPTPAQREKVLERQLHSLIEQLTAKQAQAEILATDVHSKEKELERLNHLHRNLYGGANETGAPRSRLSRGLLSGPEDYYYDPKAGRKPYQAGARTEGQNRLMILRSAIVLYVLLLHVIVFIKISV

SEQ ID NO: 53528 - protein, 68 aa, Zea Mays
MTFVSACTDWCRATGIRFFFGPVLEILYCGGWCYVGRGQVCSTQMIFSCVAAVDSEAVLLLIVIQGRE

SEQ ID NO: 53529 - protein, 163 aa, Zea Mays
MDFLQQQGIKVEVIPGITSASGIAAELGIPLTHRGVATSVRFLTGHSRNGGTDPLYVAGNAADPDTTLVVYMGLSTLPSLAPKLMKHGLPPDTPAVAVERGTTPQQRTVFASLKDLVDEVKSADLVSPTLIIIGKVVSLSPFWVESSEHDALKVQSSYANEAR

SEQ ID NO: 53530 - protein, 159 aa, Zea Mays
MRPSLCCAPLFLLLLLHLAFARPLFPLPSKTKNEEKKPIQTFRPYNIAHRGSNGEIPEETAAAYMRAIEEGADFIESDILASKDGALICFHDVTLDDTTDVAKRKEFANRRRTYEVEWFNVTGWFVVDFTLEELKTLRVKQRYSFRDQQYNEHICMNSH

SEQ ID NO: 53531 - protein, 317 aa, Zea Mays
MQGGRGGRQGLFGFGDPSGGSGGFGQPGSLMPGFFGGANPFDDPFFTNPFGSMMQTSFSAPFSGMMQPSFMNPFGSMVQPSLLGPSMFAPHGNLNGGMFGSQTHLGQGISNGSGFIQQAPEPSRPKGPIIKELSSDDEDDVDDDEEGEKKNGNFRKHQRESKEPYVEDPDDEEDNKRPKHGQFGREFSRVNTSRPQPQTFMFQSSTVTYGGPNGACYTSSTTRRTGADGFTLEENKEADTTTGKATHRISRGIGIKGHSLTRNLNSDGRVNTLQTLHNLNEDELGGFEESWQRNTRENMPGWDPRMNMLGNEKRRMV

SEQ ID NO: 53532 - protein, 502 aa, Zea Mays
MSGFLLLSTIMEHDASKNIPVIMMSSHDSVSMVFKCMLKGAADFLVKPIRKNELRNLWQHVWRKQLANGGPNVQHIQREENLAERIQQKTGVTKSDNLDRDVPCKNRECSEQESDAQSSCTRSELEAESKQTDNILEYKQSTQRHLSIPSHKNVELNGQTKIQRAEGNNLIPAREDDLSPKKRTCLNENNSERASRDMELVHIMENQQKYNTQWEVDTMRTTSRGNDEKGSIPAHQLELSLRRTDYGKLENHEKNDRRTLNHSTSSAFSLYNCRAVPTLGNAGDGQLCSTSETLVDVENKNGDSADPSQDMTETNRPPIRVVPVPVQGLTFDGQPFWNGTPVASLFYSQSTPPIWNSKTSMWQESTPQATSLPQKSPQNEPNEMGAKPVINAGEQFAMGPPSASGKQLHVEILNDDPRHISPMTGESGISTVLDSTRNTLSSSGCDSISNQITAPTESSNVYKDVPETPSAEGSRHLSQREAALNKFRLKRKDRCFEKKVSN

SEQ ID NO: 53533 - protein, 307 aa, Zea Mays
MQKLGKKRASLVDIAESFKSRGNEFMRSNQHLKAVELYTCAIALNQQNAIYYCNRAAAYTLLNMNNKAIEDCLKSIEIDPHYSKAYSRLGSAYFAMGNYHDALYKGYLKAAELDPSNENVRQNIEVTKKKLAEQRVPPEEQNTHAGQAQGPHPIFTSGGVPFNLFPPGSSPVQEFFAGWSSDVGAPPPGHSISINLNDIFGQANVNASGQGSSQTGNSNNHTPSASFSTGAAVPPPFAFSGSGNEGTQARQASNGLEGEHGEPGIHRDDDVHINLAGPEQAAEALRAVMQMLGPQMGQHEGAPRGPG

SEQ ID NO: 53534 - protein, 239 aa, Zea Mays
MEDYLVAEYRQVGEHDLGLFAIFDGHLGHTVPDFLSSHLFNNILSEPEFLSDPETAIRNAYQLTDQKILENAAELGRGGSTAVTAILIGSDKFVKLVVANVGDSRAVISKNGVAKQLSVDHEPNMERQTIEQKGGFVSNLPGDVPRVDGQLAVARAFGDRSLKKHLSSDPYVVEQTIDENTEFLILASDGLWKVMSNQEAVDEIKDCKDAQAAAKHLTEQAVNRKSKDDISVIVVKFMC

SEQ ID NO: 53535 - protein, 205 aa, Zea Mays
MAFPTPASVFVDENQQINRGKRAAGSRTKGLKPSENPGNLERRALQDLSNFAKGTGLKGTSTLKERSQRKAFSNVTNTIKGTALKDRPITKEKSTQKQRSQNPVKILSDEDIKLCHEWAKDGVEGFHSTQNDSQKVDKDLLAKRVKKKVASVNSALRGWSDTVFDSLMFPAREVLYEPKVLELEPEILRDISWDLPSSVVRIFHF

SEQ ID NO: 53536 - protein, 316 aa, Zea Mays
MQRDTSSSDVSASHVGRVRRRKHPSEATTDGNRANGQPLLVNDQNKYKSMLIRTYSTVWMIGGFAFIIYVGHLYIWAMVVVIQIYMARELFNLLRKSSEEKQLPGFRLLNWHFFFTAMLYTYGRFLSRQLVNTVTSDHLLYKVVSGLIKYQMFICYFLYIAGFVWFILTLKKKTYKYQFKQYAWTHMILLTVFAQSAFTVANIFEGIFWFLLPASLIVINDIFAYLFGFFLGRTPLIKLSPKKTWEGFIGASVTTIISAFLLANVMGRFQWLTCPRKDLSTGWLYCDPGPMFKPEHYSLGESVPHWVDTLTNITDI

SEQ ID NO: 53537 - protein, 577 aa, Zea Mays
MAATMGSISANGSYQTNRPSALKQAPHMQFQQCCNGGLRFLSKHSQSTRSKIQVAKRRATDNGIHPKTTGHRAPIVCSAGMTIVFVATEVHPWCKTGGLGDVVGGLPPALAAMGHRVMTIAPRYDQYKDAWDTSVLVEVNIGDTVETVRFFHCYKRGVDRVFVDHPMFLEKVWGKTGAKLYGPTTGTDYRDNQLRFCLLCLAALEAPRVLNFNNSEYFSGPYGEDVVFVANDWHTAILPCYLKSMYKPNGIYKNAKVAFCIHNIAYQGRKLNWMKAGIIESDLVLTVSPHYVKELTSGPDKGVELDGVLRTKPLEIGIVNGMDVYEWDPSTDKYISVKYDATTVTEARALNKESLQAEVGLPVDSSIPVIVFVGRLEEQKGSDILIAAIPEFVGENVQIIVLGTGKKKMEEELTQLEVKYPNNARGIAKFNVPLAHMMFAGADFIIVPSRFEPCGLIQLQGMRYGVIPICSSTGGLVDTVEEGVTGFHMGSFNVECETVDPADVTAVASTVTRALKQYDTPAFHEMVQNCMAKDLSWKGPAKKWEEVLLGLGVEGSRAGIDDAEEIAPLAKENVATP

SEQ ID NO: 53538 - protein, 337 aa, Zea Mays
MSASSLRSHTCWVFLDLGDFAISWVPVSYCSIDIFGPQDVPYVYCLFYVIFVPLRWIYYRYKKWHYYLLDFCYYANTFLLVMILFYPEDEKLFMVCFSFAEGPLAWALIVWRCSLVFSSFDKLVSVLIHLLPGIVLFTIRWWNPQTFAAMHPEGRDARVTWPYVEDKSYLWTWLFFVPLAAYTLWQLMYFLIVNVLRRQRLLRDPEVMTSYRELSKKAQKANNIWWRLSGLLGDRNRQVMYILLQALFTVATMALTVPIFLSYRMHVVFLILKVCASTWNGGSFILEVMPRQVVQKQLKKLDMKPMEQGSSTQGAPGGDGGTLGNHHQHTSEEHIQE

SEQ ID NO: 53539 - protein, 366 aa, Zea Mays
MVCQGVRANDCKASSPLQVKYADGELERLEHKLFIGMLPKNVTDTELTDLFSKYGNVTDLQILRGSQQTNKAGCAFIKYQTKDQALAAIEALNGKHKIEGSSVPLVVKWADTEKERQARKAQKAQSQLSHIPNASPMQQHSSVFGALQMGYMPQYNGFGYQPPGTYGLMQYPLSPMQNQGPFQNMVQPLNQGNSIRGVNPEVSPSSVQRSFNAMQLGSPYPAMPGMQYPGSYPGGPMGNRHLGNSHNPIKAPNSNANSTVSSSPSSNAGGQVEGPPGANLFIYHIPQEYGDQELSSAFQSFGRVVSAKVFVDKATGVSKCFGFVSYDSPASAQAAINRMNGYQLGGKKLKVQLKRENNTKHSSKPF

SEQ ID NO: 53540 - protein, 458 aa, Zea Mays
MTLLTLSASVPMLMPPSCEGSFCPAASPFQYTVFFLGLYLIALGTGGIKPCVSSFGADQFDDTDPAERIQKGSFFNWFYFSINIGALISSSFLVWVQDNVGWGLGFGIPTVFMGLAIISFFSGTSLYRFQKPGGSPITRVCQVIVASLRKWNVPVPEDSSLLYELPNGVSTIEGSRQIEHTDELRCLDKAATVTEVDVKTADFNNPWRICTVTQVEELKILVRMFPVWATTIVFSAVYAQMSTMFVEQGMVLDPSLGSFKIPPASLSTFDTLSVIICVPMYDYIVVPIARRFTGNERGFTELQRMGIGLVISIMAMSVAAVLEIKRLAVAREAHLVDQNVPVPLSIFWQIPQYFLIGLAEIFTFIGALEFFYDQSPDAMRSLCSALNLLTTAFGNYLSTFILTMVAYFTTRGGNPGWIPDNLNEGHLDYFFLLIAGISFLNLIVYVLCAGKYKSKKAA

SEQ ID NO: 53541 - protein, 189 aa, Zea Mays
MDASRTLAMIYRDKSEFSEERKISKFYRALVTGILDDDEVVVTQPIGLVHYPGVAEGLYAACSSGKPAMSKVCVLERLAHQNHTLVQVEIHSGRPHQIRIHLAYIGHPLVDDPLYGIGGHPNFVEPESTGTDSSFASDGGYERPLQPVPGDCGYHLHAHWLVLCHPTTNKDERLLTPLSLSFRWSGFQA

SEQ ID NO: 53542 - protein, 92 aa, Zea Mays
MLQSPKFHVSRTRLIIYNLPKTMTINDVKKLCREAVISRATKQNPVIRKVNILKNEKKGIQKHSRGVAFVDFQEHEHALVALRVLNNNPVPS

SEQ ID NO: 53543 - protein, 116 aa, Zea Mays
MDSCPEFAKNPTLIKSYLYQILRGVAYCHSHRVLHRDLKPQNLLIDRRNNALKLADFGLARAFGIPVRTFTHEVVTLWYRAPEILLGARQYSTPVDVWSVWLYLCGNGEPKATIPW

SEQ ID NO: 53544 - protein, 322 aa, Zea Mays
MAMPAALLLFLLVLSAFEAGELPRCSAAAAGKPAVLVHDDLSPVQDTSPIATVPSTNPSPAIITVPSTNPTITIPSLNPLPTPITAPSTNIPSPSTMLPPVPVIYPLPTPSTSSPPAVPVTNPAVTTPSTSPPSTPTPFNNPPLLNPTPTPAPTVTAPAASGREVWCVAKAAGSSEAALQNALDYACGIGGVDCSAIQPSGSCYYPNTIQAHASYAFNTYYQRNPVSSSCDFGGTAMLVTANPSSGSCVFASSLPSSSSSTVGYDPASTATPSSPSSGSDSGAPVLNASGAGSSESSDFGFDIPGAVNLGSGWSSLTGELRK

SEQ ID NO: 53545 - protein, 58 aa, Zea Mays
MVSIPRTRVRWIPARNPSMHDTTLGLLSPSSMVTENVASKGHPTASSIGLTSSTCCAT

SEQ ID NO: 53546 - protein, 756 aa, Zea Mays
MDEAFARAVEDGLKLTKRLVLPSGGGMPPPPRPHLAMDRDDPAAALQQLMPAAPMAYAVVVDPAAVDSPDVPSYQPHVYGRLDPPALIPLQMREVELRVDCAAGCATAEVALRARWWLHCITRSRACHCRIVVPMAHQGSILGAEVTVGKRSYNTHVIDTEDNCSVKIAMPESGGLLKQEFFSLTIPQVGGGEDIFATIRWSQKLLYDNGQFSVEVPFRFPQFVNPLPKVFMKKEKIQLIVNSGVTKEILLQGTSHPLKEKSRQGEKLSFLHEAVVENWSTKDFTFAYTVYSGDLSGGVLVQPSTLRDYDDRDMFCLFLLPGNNENRKVFRKAVVYIIDTSGSMQGKPLESVKNALSTTLSDLIPGDYFNIITFNDELHSFSSHLEQVNEKTIGNAIEWMNLNFVAQGGTNIMHPLSEAMTLLSTSHDALPQIYFVTDGSVDDERNICHTLKTQLIKSGSKSPRISTFGLGSYCNHYFLRMLASIGKGHYAAAFDTGSIEGRMLQWFQKASSTIVSNVSIDAIKHIQDFEVDSVYIPDISAKYPLCVSGRYNGKLPETLIAKGHLADMSEISIELKVQHIKDIPLDKVLAKQQMDLLTAKAWLMENKELERKVVKLSIQNSLPSEYTRMVLLQTSLDKIDPAQQAKNKPTKQSSSPDELPAMPLGGLAVGFGDVAATTENLTTGFGDMKAAEKFVMLEKAAGCCSRMADCCCCMCFIKACSKMNDQCAIVMAQACAAIACLGCFECCSELCCGGSN

SEQ ID NO: 53547 - protein, 308 aa, Zea Mays
MPYHMHINLELLEATHLICAMLIEVPNMAASTYDKRRPMSKTFRRLLEVSERQTFVGPPENVRDHVMAATRALNKGDHQKAFSVINSLEIWKLLRNREHVLEMLKLKIKEEALRTYLFSYSSSYESLSLNQLTTMFDLSEQHAHSIVSKMMMHEELHASWDQPTKCIVFHSVDQTRLQGLLFQMADKLSVLVEINERAYEARTGGALEGVPPRRRGEGQDNMGKWQDNFVSSQGRQGGGNRFGYSSRGAVSGQSGGGHQRDRGNQGYRGGYGGVSRFQDARGRNQSNPSGRGGDGGARMVNLNRVGRV

SEQ ID NO: 53548 - protein, 372 aa, Zea Mays
MVCEKNETDLDINIPAVLLPKDAGSALHTLLTNGNTVLGASYWSAWSAREAVIEQEKLLKDGHEDLLNVEARGSSGMVDINVASAIMFVVVASCFLIMLYKLMSYWFVELLVVIFCIGGVEGLQTCLVALLSRWFKPAAESFVKVPFLGAVSHLTLAVCPFCVAFAVVWAVFRQLPFAWIGQDILGIALIVTVIQIVRVPNLKVGSVLLGCAFLYDIFWVFISKRWFHESVMIVVARGDKTDEDGVPMLLKIPRMFDPWGGYSIIGFGDILLPGLLVAFSLRYDFSAKKGLRSGYFLWAMVAYGSGLLITYVALNLMDGHGQPALLYIVPFTLGTLIALGWKRGELQNLWARGEPERVCTHMHMPLLPTTPN

SEQ ID NO: 53549 - protein, 448 aa, Zea Mays
MLLFLPLIAVPVMCYISEPWINLAAAAAAASGKPQKASAADDDDMDPTQYYENRLKTLDSLKAAGVNPYPHKFPVGISVVEYIEKYKTLNNGEKLTDATECLAGRIMNKRTSSSKLFFYDLYGGGMKVQVMADARTSELDEAEFSKYHSSVKRGDIVGICGYPGKSNRGELSLFPKKFVVLSPCLHMMPRQKGEGSSVPVSWTPGMGRNIENYVLRDQETRYRQRYLDIMVNHEVRHIFKTRSKVVSFIRKFLDDREFLEVETPMMNMIAGGAAARPFITHHNELNMRLFMRIAPELYLKELVVGGLDRVYEIGKQFRNEGIDLTHNPEFTTCEFYMAYADYNDLMELTETMLSGMVKELTGGYKIKYHANGVTNSPIEIDFTPPFRRIDMIKDLEAMANLNIPKDLASDEANRYLIEACAKYDVKCPPPQTTSRLLDKLGISWRRHV

SEQ ID NO: 53550 - protein, 179 aa, Zea Mays
MKERTPLIPYPEPRELPAPARSKDKSKHGTPIPDCSLPGKQTSPAAMASTVTAANSSHGSALRTRTASPRPVAGWSCRRTLSTPAHHHHARPSPRARVVAVRAAGTQRATWLPGLDPPPYLDGTLPGDFGFDPLGLGEEPEALKWEQRPPRVVRSRRGEIRLREHHGALLRPALLDGVR

SEQ ID NO: 53551 - protein, 330 aa, Zea Mays
MGITLGLKSMLWNLIQDIEPLDLSVIQKDVAPETVDAMKRTISGMLGLLPSDQFRVIVEALWNPFFKLLVSSIMTGYTLRNAEYRLSFERNLELPEEGVECLKSDVTEDNHHNINLGRPVTIFRLSEEDMPQDPGKTDEASSYENMGEELGDLTPQAEEYIIQMQSHLNAMKKELHDLRRKNSALQMQQFVGEEKNDLLDYLRSLTPEKVAELSESTSPGVQETIHSVVHGLLATLSPKVHSKAPPPLDNISGGVLNLGGEDDDRAELVENASLPFQPLISVPRDYLARLLFWCMLLGHYIRGLEYRLELARLLRISSVGSFSGGDDHVV

SEQ ID NO: 53552 - protein, 97 aa, Zea Mays
MGFVGDTMESIRSMQIRQLLTQIISLGMIVTSALIIWKGLIVFTGSESPVVVVLSGSMEPGFKRGDILFLHMSKDPIRTGEIVVFNIDLSIFSNAHL

SEQ ID NO: 53553 - protein, 87 aa, Zea Mays
MASFSEAPPGNPKAGEKIFKTKCAQCHTVDKGAGHKQGPNLNGLFGRQSGTTAGYSYSAGNKNKAVVWEEDTLYEYLLNPKKRHRKG

SEQ ID NO: 53554 - protein, 996 aa, Zea Mays
MPFQVMDPRHHLSQFTNTTVAASSFSEEQLRLPTERLVGFWKQESLHHIGSKSVASSPIEKPQPIGTKTMGRVDPQPYKPRGQKSAFSLEHKTFGQERHVNMPPSLWRADQDPYVQSDSSLFPDGRSTNPYEAYNENGLFSSSLSEIFDRKLGLRSNDVLLHQPLEKVEPTHVDDEPFELTEEIEAQIIGNILPDDDDLLSGVDVGYTAHASNGDDVDDDIFYTGGGMELETVENKKSTEPNSGANDGLGSLNGTMNGQHPYGEHPSRTLFVQNINSNVEDSELKVLFEHYGEISNLYTACKHRGFVMISYYDIRSSWNAMRALQNKPLRHRKLDIHYSIPKDNPSGKDINQGMLVVFNVDPSVTNNDIHKIFSDYGEIKEIRDAPQKGHHKVIEFYDVRAAEGAVRALNRSDLAGKKINLGTVGLSGVRRLTQHMSKESGQEEFGVCKLGSLSTNSPPLPSLGSSYMVAMTSSGRENGSIHGLHSGLLTSMSPFREASFPGLSSTIPQSLSSPIGIASATTHSNQAPLGELSHSLSRMNGHMNYGFQGLGALHPHSLPEVHDGANNGTPYNLNTMVPIGVNSNSRTAEAVDCRHLHKVGSSNLNGHSFDRVGEGAMGFSRSGSGPVHGHQLMWNNSNNLQRHPNSPVLWQNPGSFVNNVPSRSPAQMHGVPRAPSHMIENVLPMHHHHVGSAPAINPSLWDRRHGYAGELTEASSFHLGSVGSLGFPGSPQLHGLELNNIFSHTGGNRMDPTVSSAQISAPSPQQRGPMFHGRNPMVPLPSFDSPGERIRSMRNDSGANQSDNKRQYELDVDRIMRGVDSRTTLMIKNIPNKYTSKMLLAAIDESHKGTYDFIYLPIDFKNKCNVGYAFINMTNAQHIIPFYQTFNGKKWEKFNSEKVASLAYARIQGKTALIAHFQNSSLMNEDKRCRPILFHSDGPNAGDQEPFPMGTNIRARSGRSRTSSGEENHHDIQTVLTNGDTSSNGADTSGPTKDTE

SEQ ID NO: 53555 - protein, 351 aa, Zea Mays
MISLSMFLVRSFKKVELIMRKRLVRKTFDMIQEIAEKDGKEDYNKFWESFGKFMKLGCIEDTGNHKRLAPLLRFYSSKNETDLISLDQYVENMPENQKAIYYIATDSLQSAKTAPFLEKLVQKDIEVLYLIEPIDEVAIQNLQTYKEKKFVDISKEDLELGDEDEDKEKESKQEYTLLCDWIKQQLGDKVAKVQISKRLSSSPCVLVSGKFGWSANMERLMKAQTLGDTSSLEFMRGRRIFEINPDHPIIKDLNAACKNEPESTEAKRAAELLYEAALISSGYTPDSPAELGGKIYEMMTMALGGRWGRLETEEAEVIASIDDADSSEGATTTTEVVEPSEVRTESDPWKD

SEQ ID NO: 53556 - protein, 622 aa, Zea Mays
MMGPLLGLDPWRSGPGCQRPSIYRIGWQLLQGASWINYPCLSASTDSIQRAGFASPTPIQAQSWPIAMQNQDVVAIAKTGSGKTLGYLLPGFMHIKRLQNSTRNGPTVLVLAPTRELATQILDEAVKFGRSSRISCTCLYGGAPKGPQLRDLDRGVDVVVATPGRLNDILEMRKVTIGSVDSLVANSSITQHVEIITPSEKQRRLEQILRSQDSGSKILIFCTTKRMCDQLARTLTRQFGASAIHGDKSQSEREKVLNQFRSGRSPILVATDVAARGLDIKDIRVVINYDFPTGVEDYVHRIGRTGRAGATGVAYTFFCDQDSKYAADLIKILEGANQRVPRDLEDMASRGGGRGRKRNHWASRPDRGGSRSELDSRYSSRDGLASSGKSESGRGSRGRDDNGSRGRYDPGETDGRSRRSTRGRSRSRSKSDSRSRSPSPKKSRRHEGRRSRTKSRSRSRSRRNHGASHSKSRSPVASRRYEKTASGSARPNSGHAEHKSPPRSHSRDDHVNHSDHKDDHKDDHMEDGKMERVDLDRSPSPHDDKSAPYSPVYNGKASGSMSPNGQPEAGAKFVEPSGKPEPASPVRCSKGRDDDEEGIIDEDGEIGEDDPRANAAVQNGNN

SEQ ID NO: 53557 - protein, 338 aa, Zea Mays
MRMTRTWDSTMSMIPKGGDTIWGNLDWSPEDGIECKAKKHKANDTGVSKDSNGGNIEVQPEPINYGRLVSFGKDVAEAPSSEIEQIEFRDAVKGNNIAHSNTSCREIWTEYHELGWGGIKAVADYKVYTASSVVDLLHFVAPRMMQRGNVHFSYGIADNLDDPKYQHYKYWSNPLETKLPNAPDMEIFSMYGVGIPTERAYVYKLAPQAECYIPFRIDTSAEGGEENSCLKGGVYLADGDETVPVLSAGYMCAKGWRGKTRFNPAGSKTYVREYSHSPPSTLLEGRGTQSGAHVDIMGNFALIEDVIRIAAGATGEEIGGDQVYSDIFKWSEKIKLKL

SEQ ID NO: 53558 - protein, 56 aa, Zea Mays
MCWLLGRLPTHSVRLQLPLGTELNSTELISFGSTRRYSMLDLTRNLKNERNRTRKQ

SEQ ID NO: 53559 - protein, 154 aa, Zea Mays
MAATAHLTGVLGVSSPPLAPSHCSCSGAKKQSCSLRQGRQQRRRLRVARAVEVDAPSAGAPEPEEAEEPSVDFAFVSDKVLLNCSGGGVCGTCIVEVVEGKEMLSPKTDVEKELLKRKPKTWRLACQATVGNADSTGQMIIQQLPEWKIHEWDK

SEQ ID NO: 53560 - protein, 149 aa, Zea Mays
MFSFLRDAGDAPLEKHPKLKAHAVTVFVMACESATQLRSTGDVKVREATLKRLGATHARAGVADAHFEVVKTALLDTIRDAVPDMWTPEMKAAWEEAYDQLAAVIKEEMKNAAAAEEQTKNAATAAEETTNAAAAEEETTNAAAAVDAS

SEQ ID NO: 53561 - protein, 143 aa, Zea Mays
MQELDVSNVRELEDFLINECMYSGIVRGKLDQLRRCFEVQFAAGRDLTPDQLKNMIETLSDWLGTSDRLLHQIQEKIKWADTMSEVNKKHQKEFEDRVEEAKKSIKQADIDLRGHDEFLSESGGIMDFEEDRVRPKRRRQPPA

SEQ ID NO: 53562 - protein, 490 aa, Zea Mays
MSLQPQEMCILIFIGNNGETYFNTAALVSCVQNFPKSRGPIVGILKGFAGLSGAILTQIYAIVHSPDDAALIFMVAVGPTMVVIALMFIVRPVGGHRQVRPSDGTSFTFVYSVCLLLASYLMGVMLLEDLVDLSQSVTVVLTVILIMFLLVPIVIPVLLSFFSDDDETLYALLLPSPRKEEASASTSSEEQHEVILSEVEDEKPKDVDLLPASERQRRIAELQTRLFQAAAVGAVRVKRRKGPRRGEDFTLMQALIKADFWLLFFSLLLGSGSGLTVIDNLGQMSQSLGYEETHIFVSMISIWNFLGRIGGGYFSEIIVKDYAYPRAIALAIAQVLMAIGHFNFAMAWPGTMYIGTLLVGVGYGAHWAIVPAAASELFGVKNFGALYNFLTVANPAGSLVFSGVIASGIYDSEAAKQAQQRHNSTSLAMSGRVAGMVSGAAPSLKCEGAVCFFLSSLIMSGFCIIAFGLSLILVYRTKIVYTSLYGKPRT

SEQ ID NO: 53563 - protein, 517 aa, Zea Mays
MRCGVRFVQSAMIKQILGRLPKKPTKAGEKELAGAGPSLPSPTSDARTTTDLTASSRLVSPSNYASAATNPGQSYAPRAAGLGAGASNGFAGSAAGYEALPSFRDVPASEKPGLLLGKLAMCCVVFDFADPTKDVREKEVKRQTLLELVDYITSATSKFPEPVVQEVVRMVSVNLFRVPTPAPRENKALESFDMEEEEPVMDPAWSHLQIVYELFLRFIQSPETDAKLAKRYIDHGFIIRLLDLFDSEDPREREYLKTILHRIYGKFMVHRPFIRKAINNIFYRFIFETEKHNGIAELLEILGSIINGFALPLKEEHKLFLVRALIPLHKPKCVAMYHQQLSYCVTQFVEKDCKLADTVIRGLLKYWPITNSSKEVMFLGELEEVLEATQPAEFQRCMVPLFRQIARCLSSSHFQVAERALFLWNNDHIEGLIKQNNKVILPIIFPALERNTKGHWNQAVQSLSLNVRKIFMDHDPALFEECHKKFEEEEAQEAGVRSRREARWRRLEEIASSKSPQ

SEQ ID NO: 53564 - protein, 292 aa, Zea Mays
MPQNSFVIATKTVSAEVYVFDYSKHPSKPPLDGACNPDLRLKGHNSEGYGLSWSIFKEGHLLSGSDDAQICLWDIKANSRNKSLDALQIFKHHDGVVEDVAWHLRHEYLFGSVGDDYHLLIWDLRSPAPTKPVQSVVAHQGEVNCLAFHPFNEWVVATGSTDKTVKLFDLRKIDTSLHTFDCHKEEVFQVGWSPKNETILASCCLGRRLMVWDLSRIGQEQTPEDAEDGPPELMFIHGGHTSKISDFSWNPCEDWVVASVAEDNILQIWQMAENIYHDEDDLPISDEPAKTS

SEQ ID NO: 53565 - protein, 260 aa, Zea Mays
MEEMTRVRSRIDRSGEGVYVQASTLGSLEALTEFLKSPAVNIPFCDFSIGPVHKKDVMKASVMLERKKEYATILAFDVKVMPDARDLAEESGVRIFVADIIYHLFDQFTAYIKNLKEEKKKESAEEAVFPCVLKIMPNCVFNKKDPIVLGVDVLEGIAKVGTPLCIPSKEFIDIGKIASVEINHKQVDMATKGQKVAIKIIANNSDEQQRSFGRHFDMEDELVSRISRRSIDILKQNYREDLTTEDWKLVVKLKSILKIQ

SEQ ID NO: 53566 - protein, 372 aa, Zea Mays
MVVPVPPPPLLASHVAVRAAASAISHGRRVLLNGDHPPQVAALGRGDWVKLICGASFEDAADVRNLSLVYTLAGVDCIDCAADASVVGAVNEGIEVAASIVPTVQRPWLMISVNDDCRDLHFRKAEFDPDDCPLDCSKPCEKVCPADAISLKHSMVDGERTLSDPLRGKYEGGVITERCYGCGRCLPVCPYDRIRAVSYVRDPTMTAELLKRDDVDAIEIHTTGKGTDMFNTLWDNLSGSINNVKLVAVSLPDIGESTVDLMNTIYTIMEPHFKGYNLWQLDGRPMSGDIGRGATRETVSFAAHVASMSERPPGFYQLAGGTNSYTVDYLKKAGLFQSSNWNSGTATSEMASSHQALIGGIAYGGYARKAGH

SEQ ID NO: 53567 - protein, 492 aa, Zea Mays
MQVGKGRDVGLNQISLFEAKIANGNGEQTLSRDIYRLGHRFDFFRMLSCYYTTIGFYFSTMITVWTVYVFLYGRLYLVLSGLDEALATGKRFVHNTPLQVALASESFVQLGFLMALPMMMEIGLERGFRTALSDFILMQLQLASVFFTFSLGTKTHYYGRTLLHGGAEYRATGRGFVVFHAKFAENYRLYSRSHFVKGLELMILLVVYEIFGQSYRGAITYIFITVSMWFMVGTWLFAPFLFNPSGFEWQKIVDDWTDWHKWISNRGGIGVAPEKSWESWWEKEQEPLRYSGKRGTIVEILLALRFFIYQYGLVYHLNITKKITKDNQSVLVYCFSWVVIFVVLLVMKTVSVGRRRFSAEFQLVFRLIKGLIFITFTAIVVILIAIPGMTVLDIFVCILAFMPTGWGLLLIAQAIRPVIQKIGLWGSIKALARGYEILMGLLLFTPIAFLAWFPFVSEFQTRMLFNQAFSRGLQISRILGGHKKDRGTRSKE

SEQ ID NO: 53568 - protein, 195 aa, Zea Mays
MKRAGSLWEELHIHHSIRSIVCLNLPSFSGGLNPWGTPGTRRAEDREFTAPFVDDGLLEVVGFRDAWHGLVLLAPNGHGTRIAQAHRIRFEFHKGAAEHTFMRVDGEPWKQPLPKDDDTVVVEISHLGQVTMLANEPCRSKSVNDQSSLSPAHDSHGDYNDIAEEDEDEWEDGRRKFGAADTFKIPDEIDIAHFS

SEQ ID NO: 53569 - protein, 253 aa, Zea Mays
MAEEPAVVVASSSYEVDLGNLMAYDPSHHVATASREELRQECLRKGTELAQAVADVLFALPPNEDRDGPIIHLPPPTFRLPREKHLPKPKPPTKWELFAKAKGITKRKKNKREWDEQTQSWKRTHGYDRVNDDKDIPIIEAKLTDEPGVDPFAQRRDEKKKRVEKQEKNRLDNLKKAAKVGALPSHIQLAAKALPITGTKADLPKKSRKEDLESVVGMASSATASGGKFDEKLPGEKPPKHPGKHRKLPKGRE

SEQ ID NO: 53570 - protein, 327 aa, Zea Mays
MSSIDLSKSMMPSQMMSAPSAASVQPSLTTTARSDNQSSGWAVPAQMANTPGQSQITGNLTWGNTPQGDASLGWGMVGQSNMNMPWVASAQGASGYNMGVAMPTQPNAVPNMGWLPNPGNTSMNMIWAATQGQGTPNAAPMMGGQMQGVPMAPWGGVAAGSANSYPAWGNQQAGNMNQNVGWSAPVQGNPGQANNNMNWNAPNGNPNWNNQQRENGGRHSGHRGAFSGGDSGGRSWKSRSGGDGGSRGHSRFSHSTNTEGYPSRTDRHYDRQNSGNERRYENHNERNGRQFDRQPSDNERNHDRPDGRHGGRDDDRQADRSESRELR

SEQ ID NO: 53571 - protein, 59 aa, Zea Mays
MLKDNVILKIVVVTITLAWSSWAAYPFMSAAVNPRRKALALYPVFLMYISVGFLIIAID

SEQ ID NO: 53572 - protein, 233 aa, Zea Mays
MAPPEPEMFDVVIFGASGFTGKYVIREALKFLNASSSASPLRSLAVAGRSRDRIAAALRWAAAPAPPPEDVPILVADTSDPASLAALASRARVVLSCAGPFRLHGHAVAAACAAAGADCLDISGEPEFMERVESELHEPAARSGSLIISACGFDSVPAELGFLFHSRQWEPPSAPATVEAYVSLQSTKRIVGNIGTYESAVLGVANAGQLQALRRSRPRRPRPNSCGAIRTAS

SEQ ID NO: 53573 - protein, 218 aa, Zea Mays
MKQAAAAAAAAQQALLLQQQSQPPLFPVHHPHPGLLAAPQIEPIVSGNLPPGFDSSTCRSVYVCNIHLQVTDAVLQEVFQSIGPVEGCKLIRKEKSSFGFIDYHDRRYAALAILSLNGRQLYGQPIKVNWAYTSTPREGTSGHFNIFVGDLCPEVTDATLFAFFSGYSTCSDASVMWDQKTGRSRGFGFVSFRNQQSSFGFIDYHDRRYAALAILSLN

SEQ ID NO: 53574 - protein, 74 aa, Zea Mays
MVHAAKAQLRRASVVKVRVARTEHQAPVPSRVAQAEVWMIVTYGRAISAHMQTPNLPEPARLVITSIDSAVSPC

SEQ ID NO: 53575 - protein, 284 aa, Zea Mays
MGFATGGKTFFLWGGCMMMHADDFRQDRYGIVSGLRDGGYSDDMTLAAIAGQHKRLIFSPPVAVFPHPLASDLSFSRYWNYLRKQTFVLESYVSNVNWMMNRALFTSHCYLSWGFVWPYIMALVHVLAALRAPYSKVVKEASDSSWGLFLVGLLFTCTLIELVSMWNLTKVEIQLCNMLSPEGPKVSLDSYNWGLVFIAVLVDNFLYPVSAIRSHFSQSINWSGIRYYLRDGKISKIERENSSKYTDLGGKHLYGKRTYPPNKSLLGYLSRTLVQWHQPKKYDV

SEQ ID NO: 53576 - protein, 294 aa, Zea Mays
MAAAPAAGGQGGGGMDAALLDDIIRRLLEVRTARPGKQVQLSESEIRQLCTVSREIFLNQPNLLELEAPIKICGDYVDRGKQSLETICLLLAYKIKYPENFFLLRGNHECASINRIYGFYDECKRRFNVRLWKVFTECFNTLPVAALIDDKILCMHGGLSPDLAHLDEIKNLQRPTDVPDQGLLCDLLWSDPGKDAQGWGMNDRGVSYTFGADKVSEFLQKHDLDLICRAHQVVEDGYEFFADRQLVTIFSAPNYCGEFDNAGAMMSVDETLMCSFQILKPAERKNKFMGSNKM

SEQ ID NO: 53577 - protein, 232 aa, Zea Mays
MLKALMPVAVYSIGVLFKKETFKSSAMLNMLSISFGVAIAAYGEARFDARGVALQLAAVAFEATRLVLIQILLTSKGISLNPITSLYYVAPCCLAFLVVPWVFVELPRLRAVGIFQPDLFVFGTNSLCAFALNLAVFLLVGKTSALTMNVAGVVKDWLLIAFSWSVIRDTVTPINLFGYGIAFLGVGYYNHVKLQALKAKEAQKKAAQADEEAGSLLQERDSHGDRKTDNQA

SEQ ID NO: 53578 - protein, 1884 aa, Zea Mays
MSIVKMGKNRVNVEDEETLSSVAQCIEQLRQSSSSSQEKESSLKQLLDLVQTRDTAFGAVGSHSQAVPILVSLLRSGPSGVKMLAATVLGSLCKEEELRVKVLLGGCIPPLLALLRSKSAESQTAAAKTIYAVSQGGIRDHVGSKIFSTENVVPVLWEQLKISLKNESLVDGLLTGALKNLSKNTEGFWSATVQCGGVDILIKLVSSGQTNTLANTCYLLGSLMMEDSSVCSKVLSGETTKQLLKLLGPGNETSIRAEAAGALKFLSAQSKEARRQIANSNGIPSLINATIAPSKEFMQGESAQALQENAMCALANISGGLSYVISSLGESLESCSSPAQIADTLGALASALMIYDTNAESISASNPVDIEKTLLKQFKPKVPFLVQERIIEALASLYGNPVLCKTLADSDAKRLLVGLITMAATEVQDDLTKSLFALCKKDCDLWQALQGREGVQLLISLLGLSSEQQQECAVALLALLSKENDESKWAITAAGGIPPLVQILETGSSKAKEDSATILGNLCNHSEDIRACVQSADAVPALLWLLKNGSDNGKEIASKTLNHLIHKSDTGTISQLSALLTSDQPESKVYVLDALKSLLSVAPLNDILHEGSAANDAVETMIKILSSPKEETQATSATALAGLFHCRKDLRETHIAVKTLWSVMKLLDMQSNKILTGASCCLAAVFLSIKENKEVAAIGRDALNPLVSLANSSVIEVAEQATRALANLFLDQELSLQVPFEEILFRVTRVLREGTIDGRTHAAAAIARLLQCRTINQPLSDTVNRSGSVLALAGLLEAANGEAAATSEVLDALVLLSRSKASSGHTKAPWAILAENPHTILPLVSCIADAAASLQDKAIEVVSRLCSDLHDVVGGLVSETPGCMSSITRRIIGSNILKVKVGGCALLVCAAKEYCQKQIEVLNDASLYIQLIHSLIGMIHMANTQAENVSSESISDIRISRHSKENNSDGETLCCTAVISGNMIPLWLLAIFSRHDSKTRAELLEMGAVEMLIEKISQNAFQYVGEEDNTSWVCSLLLTLLFQERETIRSNSALHSIPVLSNLLRSDEPAYRYFAAQALSSLVCNGSRGTLLAVANSGAAIGLISLLGCADVDIADLLELSEEFMLVPNPDQIALERLFRVDDIRVGATSRKSIPLLVDLLKPIPERPGAPFLALGLLTQLAVDCPPNMLLMAEAGILEALTKYLSLSPQDATEEATTELLGILFSSPEIRHHESALGVVNQLVAVLRLGGRNSRYSAAKALESLFCADHVRNSESTRQAIQPLVEILSTGMEREQHAAISALVRLLSDNPSRALAVADVEMNAVDVMCRILSSDCSVELKGNAAELCCVLFTNTRIRSTMAAARCVEPLVGLLVSEANPAQLSVVRALDRLLDDEQLAELVAANGAVIPLVGLLYGKNYMLHEAVARALVKLGKDRPACKLEMVKAGVIESILDILHDAPDFLCIALAEMLRILTNNATIAKGPSSAKVVQPLFSLLSKADMGPEGQYSTLQVLVNILEHPECRADYNLTPRQTIEPVITLLNSSPPAVQQLAAELLSHLLLEDHLQKDTVTEQAITPLIQVLSSGLPNLQQRAIKALANLAIAWPNTIAKEGGVFELSKVLLQSDPPLPHVVWESAASVLSSILQYSTEFFLEVPVAVLVQLLRSGTESTVVGALNALLVLESDDSTSAEAMAESGAVEALLDLLRSHQCEETAARLIEALLNNVRIREAKAAKNAIAPLSMYLLDPQTQSQQGRLLAALALGDLFQNEGLARSTDAVAACRALVNLLEDQPTEEMKVVAICALQNLVMYSRANKRAVAESGGVQVLLDLISSSNPDTSVQAAMFVKLLFNNHTIQEYATSETVRVITGKQYPFLVLSYSFA

SEQ ID NO: 53579 - protein, 150 aa, Zea Mays
MQRYGSSIDEEGQHPLADDADEDDFLFEDRFSIAYNLDREFGPRLKDHMQYCVNHPEEINKLSKVKAHLSDVKGIMMDNIEKILDRGEKIELLVGKTETLQSQADSFHRHGRELRRKMWLQNLRFKLMVGGGIAALILIIWLMVCRGFKC

SEQ ID NO: 53580 - protein, 559 aa, Zea Mays
MDPEMLRLAQEQMRRMSPDDIARMQQQLMSNPNLMRMASESMKNMKPEDLRRAAEQLNQTRPEDMRDMTEKIANTTPEEFAAMKAQADAQMSYAMSGAKMLKKQGNGLHNQGKYSDAASKYKLAKDNLKSIPSSTAHTLQLQCTLNLMACYLKTGQFDECISEGTEVLSYDSNNVKAYYRRGQAYKGLGKLEAAVADLSKAHEICPEDETIAEVLRDAEEKLAREGGGVSTRKGVVIEEVVEDGASQPSSSERNSSGYTVSQPPEGAGNIGLSGSLERPRDDPTSIRSSQNYVSKSDPEGLSNFGIEGMSPELVKTATDMIGSMKPEELQKMFEVASSLNSTSSAGPNLGPNMPEMSPDMLKMASDMIASMPPDDVQKMMSFASQMGGPGGAPRSSENINFGPSVRATTSNSARGSSSQPVLENPDELSDDQRMSQSSSSLPPSTADMQETMRNSMKDPAMRQMLTSMMKNMSPEMMANMSEQFGMKLSKEDAAKAQQAMSSLSPEDLDRMMRWMERAQKAVEVAKKTKNWLLGRQGLILAIVMLILAFILHQFGFIGR

SEQ ID NO: 53581 - protein, 98 aa, Zea Mays
MIFNGVETESDIAPPVLEENKDAVVSATKTAKSLDGFALKTGQEEEGPEEVDATEKAMEVVDNVVKSLDEEVESKEMQKQQPHDYNSMSLGVVTGHLI

SEQ ID NO: 53582 - protein, 84 aa, Zea Mays
MLDRYEQHTLKCSSCKGAYNAFQNLQKVFMGATVVCCAAAGIPPDVQLRLLIGAAALVSAAIAYAFHELQKNFVFVDYVHADID

SEQ ID NO: 53583 - protein, 169 aa, Zea Mays
MVSLGLRNTQEIWSLADNSRVFLEALKLFFDKREKEIGSLIFDKDDQLAVEFVTAAANIRASSFGIPLHSLFEAKGVAGNIVHAVATTNAIIAGLIVIEAIKVLKGDYQDYRMTYCLEHPARKMLLMPVEPFEPSKSCYVCSETPLVLEVNTKTTKLREVIEKVIKGLG

SEQ ID NO: 53584 - protein, 128 aa, Zea Mays
MVVNLKLREDVIVEKCLGRRICGQCGKNFNLACIDVKGENGLPPIYMAPLLPPNNCMSKLITRADDTEEVVRNRLQIYNDMSQPVEGFYREQGKLLEFDLPGGIPESWPKLLQVLNLEDQEELRLAAA

SEQ ID NO: 53585 - protein, 380 aa, Zea Mays
MTMSASTAAIRTANTNGNHAVSSDSHSSQDARQRTAGITKRKALPSILQKIPSNDLSHTIRGESVLQKSNYSSEGRKDVVASATAERQNKNTTNVVASAAAVRQKKSPTKQENANWVTALSVLVKLCLLISATAWMGQVFWRWQSGELSFTTLDMENRLSRVEGFKKTAKMLQLQLDVLDKKLENEIDKAKGVIAKQFEDKGNKIEKKMKILEDKTDKLDKSLAELSDMGFLSKNEFEEILSQLKKKKGFGGTDDEISLDDIRLYAKDVVEMEIARHSADGLGMVDYALGSGGAKVVSHSEPFMNGKNYLPGRSNVHTTAQKMLEPSFGQPGECFAVKGSSGFVKVKLRTAIIPEAVTLEHVDKALINWKGTHVNPEFVI

SEQ ID NO: 53586 - protein, 648 aa, Zea Mays
MAGNLSQHSVGRVFLVGWKEFVCPPSPLSQSSRLSHASSFGRHDRRLRRHIRYAVSWILWPLRFFVSLIFILFNAIKFRMVRSTAKGAETPHLSRTGLAKKSFHIRDQFLQRTTDRRRGVFEDLHLAIEIFIESVFDIVHKAAHYILSPSEVWQNLFCWIQGSGHDTSSVVDVLTANVGSDNPVPTERKTVYRHSLNTDSRTCEDVITELGYPFEAIKVVTSDGYVVLLERIPRRDSQKVVLLQHGILDSSMGWVSNGVVGSPAFAAYDQGYDVFLGNLRGLVSREHIDKSISSYKYWKYSVNEHGTKDMPAIIEEIHKIKISELGKSQPQSAEGTGDQNDKLKSLEVQASQEDSIEDQPYKLCAVCHSLGGAVMLMYVVTSRITQKPHRLSRLVLLSPAGFHEDSNVVFSMVEKLILFVGPVLAPLIPGLYIPTRFFRMLLNKLARDFHNYPALGGLVQTLMGYVVGGDSSNWVGVLGLPHYNMDDMPGVSFHVALHLAQIKRAKKFQMYDYGSSAANIEAYGTPEPLDLGAHYGLIDIPVDLVAGQRDRVISPSMVKKHYKLMRKSGVEVSYNEFEYAHLDFTFSHREELLSYVMSRLLLVTDPGKGRIKQTTVRLRRQKKVQSEIEESIECRAKEESDELAGHLE

SEQ ID NO: 53587 - protein, 91 aa, Zea Mays
MVMLCYKNGSLTREDVRNRCADKSWDVFNSYLEKTPPLNGGKIGFYYKDHEILPPLPVGFHRYTVENLNDVSSDALLEREVEELDPPSEVC

SEQ ID NO: 53588 - protein, 139 aa, Zea Mays
MLLFCMSACGCITMEELAAVTRSLGLDPSDQELNDMMSEVDTDGNGIIDFQEFLSLIARKMKDGDGDEELKEAFEVLDKDQNGFISPVELRTVMTSLGEKMTDEEVEQMIREADTDGDGQVNYDEFVLMMKNAERKISG

SEQ ID NO: 53589 - protein, 369 aa, Zea Mays
MGTVYTSFTLFSVASSPVVTRIGPKRALVVGTSGYVLFILANLVPSWYTMVPASLYLGFTASIIWVGQGTYLTSAALSHARENNLPEGPTLGSFNGEFWGMFASTQVIGNLISLALLRNGKDGGSITGKNLLFAVFLGCMIVGIVLMCLLSKRDEKKDNTPTHSSFGAMLKYIIAPLKDKRMLLTIPLIAYSGLQQAFVWAVFTKSIVTPVLGISGVGGAMAIYGAADVVCSLVAGRLTSGLRSAAFIVSVGAILQAIVLFWLLLFYSPMDGLLGAAIPLFIGALWGVGDGVLNTQLSALLGLLFEDVKEAAFAQLKVWQSGAIAVIFFLSPSITLQAMLLLMAAALVISFGSFLFLTLVVEKSSPVRA

SEQ ID NO: 53590 - protein, 142 aa, Zea Mays
MATLQLNHIARETSDVARLAAFYEAVLGFERIPSPTYSGFQVAWLRLPSSPDVALHLIERDPAAAPVAVGPGAEGAPPSQLPRRHHLAFSVADYDGFVTGLKARGTDVFEKSQPDGRTRQVFFFDPDGNGLEVTSAGAGNEK

SEQ ID NO: 53591 - protein, 533 aa, Zea Mays
MNPGISEKQPLHVVMVDPKSTGRSTRFAQEIFSTILFTIAVGVMWVMGAAALQKYIGSLGGIGASGAGSSSSYSPKEMNKDMMPEKNVKTFKDVKGCDDAKKELEEVVEYLKNPSKFTRLGGKLPKGILLTGAPGTGKTLLAKAIAGEAGVPFFYRAGSEFEEMFVGVGARRVRSLFQAAKKKAPCIVFIDEIDAVGSTRKQWEGHTKKTLHQLLVEMDGFEQNEGIIVMAATNLPDILDPALTRPGRFDRHIVVPSPDVRGRQEILELYLQDKPVANDVDINAIARSTPGFNGADLANLVNIAAIKAAVEGADKLNAVQLEFAKDRIIMGTERRSMFISDESRKLTAYHESGHAIVALNTQGAHPIHKATILPRGSALGMVTQLPSQDETSISKKQLLARLDVCMGGRVAEELIFGEDNVTTGARNDLHTATELAQYMVSNCGMSDAIGPVHVKERPSIEMQSRIDAEVVKLLREAYGRVKRLLRKHEKQLHALANALLERETLTADEINKVVHPYQEEPHLSFQDEEFALA

SEQ ID NO: 53592 - protein, 52 aa, Zea Mays
MLPKKDEDGEDASSQIPLDDASPPDYNSIEVIQCLIEHHNAIFTDANETVWR

SEQ ID NO: 53593 - protein, 181 aa, Zea Mays
MVTEYLVATFADYFGDVKMYIEERSFRRFVEACIEETIVVYVDHLLSQKNYIKEETIERMRLDEEVLMDFFREHINVTKVESRVRILADMRELASAESLDSFTLIYTNILEHQPDCPPEVVEKLVAMREGIPKKEAKEVVQECKEIYENSLVDGNPQKSGFVFGKLKCLTAKKGIWRKLGQ

SEQ ID NO: 53594 - protein, 174 aa, Zea Mays
MELSSAGRWTDLPEDIALAVASRLQEADVCALGGCSRTWRRACDADCIWERLFRCRWPAAVAEASASSSRMQGWKALYISQHRRMAAAISNVVEFVGGSLNNGSLESEYYLKAIADLAMILDIGFLDVQFFLFSRNHSAIINLIGLHYSIASLHVLLKSVKHSKLTVYQKGWFV

SEQ ID NO: 53595 - protein, 341 aa, Zea Mays
MHSNEMEDIQEAYAGQIVAVFGVDCASGDTFTDGTVKYTMTSMNVPEPVMSLAVSPISKDSGGQFSKALNRFQKEDPTFRVGLDAESGQTIISGMGELHLDIYVERIKREYKVDAKVGKPRVNFRETITQRAEFDYLHKKQSGGQGQYGRVCGYIEPLPSGSDGKFEFDNMIIGQAIPSNFIPAIEKGFKEACNSGSLIGHPVENLRIVLTDGASHQVDSSELAFKLAAIYAFRQCYTSAKPVILEPVMKVELKFPTEFQGTVTGDMNKRKGIIVGNEQEGDDTIVVCHVPLNNMFGYATAIRSATQGKGEFTMEYLEHNVVSQDVQMQLVTSYQAAKGTE

SEQ ID NO: 53596 - protein, 736 aa, Zea Mays
MLLRAFAAAGKLTLDINILMLIAVAGSVALGSFTEAGAIVFLFTVAEWLETLACSKASAGMLSLMSTVPKTVVLAETGQVVGMGDVAVGTVVAVRAGDVVPVDGVVVGGHSEVDESSLTGESFPVPKQPQSEVWAGTINLDGYISVRTTALAENSTVAKMERLVEEAQNSRSRTQRLIDSCAKHYTPAVVVLAAGVVLVPALLGARDLELEHWFRLSLVLLVSACPCALVLSTPVATFCALLRAARMGLLVKGGNVLESLGEVRVAAFDKTGTITRGEFSIKDFHVVGDKVEMNQLLYWVSSIESKSSHPMAAALVEYAQSKSVQPKPENVTETCIYHGEGIYGVMDGKQIYIGNERIIARSSCRHHQHAGHQETDGLKGVSIGHVICDGDLVGKFSLSDTCRTGAAEAILQLRSMGIKSVMLTGDSAAAAKHAQEQLGGVLEELHAGLLPEDKVRLVRGLQARHGATLMVGDGMNDAPALAAADVGVSMGLSGSAAAIETSHAALMSGDILRVPKAVRLGRRARRTIAVNVASSVGAKAAVLALAVAWRPVLWVAVLADVGTCLLVVLHSMLLLRDGAARRPRCCASATACKSKQASKPCCATVKPVATTRHRHGHGHGHGHAGAGKPGTLGGDKQGKDCHGCCQKESKPPEDAVVIAIPGRAVEHRKEAFPHENAGAGGCCAAAHGAEDEVCIVISARSPCCSTARSRSGSPKDALCCHGSGGKDGGAISALVC

SEQ ID NO: 53597 - protein, 314 aa, Zea Mays
MPPLRLRPTKVEQDDYEVVRKVGRGKYSEVFEGINVNNNEKCIIKILKPVKKKKIKREIKILQNLCGGPNIVKLLDIVRDQHSKTPSLIFEYVNNTDFKVLYPTLTDYDIRYYIYELLKALDYCHSQGIMHRDVKPHNVMIDHELRKLRLIDWGLAEFYHPGKEYNVRVASRYFKGPELLVDLQDYDYSLDMWSLGCMFAGMIFRKEPFFYGHDNHDQLVKIAKVLGTDGLNVYLNKYRIELDPQLEALVGRHSRKPWLKFMNADNQHLVSPEAIDFLDKLLRYDHQERLTALEAMTHPYFQQVRAAENSRTRA

SEQ ID NO: 53598 - protein, 146 aa, Zea Mays
MVVIRDDAMYKSSVTWDVCFLACCYKSRAQIRTFVCCKLPKPKPPTKWELFAKAKGITKRKKNKREWDEQTQSWKRTYGYDRVNDDKDVPILEAKLTDEPGVDPFAQRRDEKKKRVEKQEKSRLENLKKAAKSYTACCEGLAHHRN

SEQ ID NO: 53599 - protein, 110 aa, Zea Mays
MESTALMTARLPLLTSGSRSKPLPFASFTRAACRLASAPFSGSGSVVLLSRRSRDYAGVGSLVSAAADPGDTADAGSESILLSVQGMMCDGCAASVKRILESQNGLYTKR

SEQ ID NO: 53600 - protein, 78 aa, Zea Mays
MLGARGGVWCARRREREGAGGYRGRAAMRLRRGCEKGRAGRRARRDAGRLLSPAGKAAFPGSGRGCDGRRCVGPLCKT

SEQ ID NO: 53601 - protein, 499 aa, Zea Mays
MNNFSGNIPDSLGNLVKLRFLRLNNNSLVGPIPVSLTNISTLQVLDLSNNNLSGQVPSTGSFSLFTPISFANNPNLCGPGTSKPCPGAPPFSPPPPFNPPSPPTQSTGASSTGAIAGGVAAGAALVFAVPAIAFAMWRRRKPEEHFFDVPAEEDPEVHLGQLKKFSLRELQVATDNFSNKNILGRGGFGKVYKGRLADGSLVAVKRLKEERTPGGELQFQTEVEMISMAVHKNLLRLRGFCMTPTERLLVYPYMANGSVASRLRERQPSEPPLSWEPRRRIALGSARGLSYLHDHCDPKIIHRDVKAANILLDEDFEAVVGDFGLAKLMDYKDTHVTTAVRGTIGHIAPEYLSTGKSSEKTDVFGYGIMLLELITGQRAFDLARLANDDDVMLLDWVKGLLKEKKVEMLVDPDLQKAYEEVEVESLIQVALLCTQGSPLDRPKMSEVVRMLEGDGLAERWDEWQKVEVVRQEAESAPLRNDWIVDSTYNLRAVELSGPR

SEQ ID NO: 53602 - protein, 695 aa, Zea Mays
MAAHRAFQFCKQYKRTTEFRRLCEIIRNHLANLNKYRDQRDRPDLTAPESLQLYLDTRVEQLKVATELCLWQEAFRSVEDIHGLMSMVKKMPKPSILVVYYAKLTEIFWVSDSHLYHAYAWLKLFNLQKNYNKNLSQKDLQLIASSVLLAALSVAPYDKKYGASHLETENEKERNMRMANLVNFSLDSKRENREMPSRASLLSELASKGVLSCASQEVRDLYNLLEHEFLPLDLASKVQPLLSKISKMGGKLSSASSVPEVKLSQYISALEKLTALRVLQQASCIFQSMKIDMLSRMIPFFDFFVVEKISVVAVRRNFVAIKVNHLSGAVHFGTVDIESDGLSDHLSVVADSLNKAKIHICPPVKKPSKLGESFISLAGIVENEHKRLLARKSIIEKRKEELERQILEKEKEEEKKRMSSQKKTADEERVRLLNEQRQREQDRIRREIEEKNKAEAKKLLEDLKKAGKKHVVVEGELTKEAIMELTRNEQLKERHEMEKKLQKFAKTMDYLERAKRQEEAPLIEQAFQKRLQEEKILHEQEQLREIELSKQHHAGDLQEKNRLSRMLEHKNALQERIVQLREAEFGRLKKERDERFSQLISSRKRERERVRKLMYYLNREEQRIEMLREEEEARKHEEEERRKREEAERKANLDAIAEKQRLREIELEEKAKANREKLLKGSEAADGSQMLCGIV

SEQ ID NO: 53603 - protein, 115 aa, Zea Mays
MATSGKKHLNSVTLLFKLPYYTQWGQSLLIAGSEPALGSWNVKQGVSLSPVHQDSELIWCGSVSVVAGFTSEYKYYVVDDKKNVLRWEAGEKRKLVLPEGVKEGDVIEIRDWWQA

SEQ ID NO: 53604 - protein, 361 aa, Zea Mays
MRAVEFIEVYAVMSFLSLILPNNAIYFNSIREIYDAWVIYNFLSLCLAWVGGPGAVVVSLSGRTLKPSWILMTCCYPAIPLDGRFIRRCKQGCLQFVILKPILVVITFILYAKGKYKDGNFSVNQSYLYITIIYTISYSMALYALALFYAACRDLLRPYNPVPKFIMIKSVVFLTYWQGVLVFLAAKSRFIKNADKAADLQNFVLCVEMLIAAVGHLFAFPYKEYTGPNARPSRGFRESLLHALKFNDFYHDTVHQFAPTYNEYVLYNHNEGDSAQTKYPSGSTATSGQGVELAGITVAASNSPVSSSVSSNQADQEETMTTPIKDKVDPPGGLYDLTELLDIDLSSYPAKLPGTTDVRKQ

SEQ ID NO: 53605 - protein, 87 aa, Zea Mays
MLRQSAEDEASDLKNQISHWKKLEATATAEIIKLQKMLDAEASQKEKLEEEIGVLRSQLLQMSMEADETRSLDKGDGPGKIFPGFRF

SEQ ID NO: 53606 - protein, 187 aa, Zea Mays
MTACDEAVSEAITNLKSRLKSESKARSLTKKEQLVLSLEKQYPGDVGVLAAFFLNFVKLNPGLTPKYRDVQTLCSMLTYNQAFPEILQGMPVQPYVTRYTPSTDEFEVDRYLLPPGKSVTMSPVPGPSIFIVLTGEGEIQAGFMTGSAKAKEGDVFFVPANTKVKLYTSCPRSMQLYRAGVNSSFLS

SEQ ID NO: 53607 - protein, 102 aa, Zea Mays
MCSNLSMITQGQHGRKLLLIDLVMLLDCILLLLRRLIRIVHDISFSYATHGHICTCSSSNIQRRNAHRSLFDLALPGHTPLCFSPYQSLARHYFIKGCSTIT

SEQ ID NO: 53608 - protein, 122 aa, Zea Mays
MGCSVFSSRSQRNRSISGDDSNAEVAVISRGRLRTVHTLRSARWSLGAAAAKEIPPLGKKKKRRRRGTSSRRVDADRPIGTRHVTSPNGRTTATRGSSCLDAGGSQWLYPDSGPHGSYTLRV

SEQ ID NO: 53609 - protein, 295 aa, Zea Mays
MHGGSTNAFTSSEHTNFYFDVNSDSLHDALDRFAQFFIKPLMSPDATLREIKAVDSENQKNLLSDPWRMSQLQKHLCAENHPYHKFSTGNWNTLEVKAKEKGLDTRLELIKFYDSHYSANLMQLVVYGKDSLDNLQNLVENKFCDIRDVGRKPFSFPGHPCTPEHLQVLVKAVPIKQGHTLRILFPITPNIRCYKEGPCKYISHLIGHEGEGSLFYVLKKLGWAMSLEAGEGDWSHDFSFFCVVIQLTDVGQEHMEDTLGLLFRYIKLLQNSGTPKWIFDEDSTTETRAPLSIML

SEQ ID NO: 53610 - protein, 94 aa, Zea Mays
MIMFAGIAAEALVYGEAEGGENDENLFRSLCILLNPPPAVAQMANRARWSVMQSYNLLKWHKKAHRAAVKALEDGHSLSVVIRRIEEAIASDSK

SEQ ID NO: 53611 - protein, 184 aa, Zea Mays
MALFAAARRAAASSVPVLLRASASSGSHRSAVLLRPLAAAVAPPKPRAMPFSSAPATRPSSDAELLSVIDSEIKYAEDCDDHDRVEEIPENFPFKISDEKGTNAVTLKRTYQGEQIEVVVHMPSLVTGDEPDHDRDGEDEDTAGDDNDEDEGQKPEQSSIPLTVTISKGDGPVLEFTCTAYPDE

SEQ ID NO: 53612 - protein, 80 aa, Zea Mays
MAPSSSRFDDPAAVRRPPQHERKPPYMLLLPLVYAPVLPLIRIGLRHNPVVRDRLFYGVLAGAFAHGAYLISELYDVESK

SEQ ID NO: 53613 - protein, 224 aa, Zea Mays
MKKCDLKHPPGDEIYRSGTLSMFEVDGKKNKVYGQNLCYLAKLFLDHKTLYYDVDLFLFYVLCECDDRGCHMVGYFSKEKHSEESYNLACILTLPPYQRKGYGKFLIAFSYELSKKEGKVGTPERPLSDLGLLSYRGYWTRVLLEILKKHKGNISIKELSDMTAIKADDILSTLQSLDLIQYRKGQHVICADPKVLDRHLKAAGRGGLDVDVSKLIWTPYKEQG

SEQ ID NO: 53614 - protein, 63 aa, Zea Mays
MSSTRCGKPSLDLVSSRLVRSGHGHPIQEEGNDEDEQREAKSGHNWTGESRAADQNHMSRVAR

SEQ ID NO: 53615 - protein, 383 aa, Zea Mays
MKDESSDDSDTDEDEEPPQKKQKEALSAAKKESSSEDEDDSSEESSDDEPTKVEEKKAPKVSENSGSEDESSEDESDKDSEEPANTPKKAAVHASEKKTATKEPKTPTGSQSESTEVNTLFMGNVPWKAEFDDVKEFFEDVGEVVDVRFPTHDDGNRKGFCYVEFVSAEAAAKAYKEKQSKELHGREVRLDFAKGRSTQTPRSGNDGSFQKAARGNSSSIFIRGFDKNLSEDEIRSSLEQHFSDCGEMTRVSIPTDHESGAIKGMAYIDFKDQDSVSKALELSGSDIGGGYELYVDEAKPRGDGQRGGGRSGGRSGGRFGDRSGGRRGGGRFGERSGGRDGGGRFGGRRGGRDGGRGRGGRGFGNKHSAGTPSAGKKTTFGDD

SEQ ID NO: 53616 - protein, 397 aa, Zea Mays
MVSFVKCMLGLDAVVWDIIGSSLLEKVVYLLTELDVNITWEDILQDEHNKGIFDMELEDLAEDEDNLGQEGTKVHFGGNMCAEKLDGLMVVVCEHLKSRVEEPERLIKEFVTLKAIFKSHVLRVHKSKFAQFIMFYACSLHPEIGDGFANFLTDIFIDKDKNEDAITRLVDWCDYYCGHQLDNGVTANPIKHQLFYASCQAVMYVLCFRLRSIMDYPNLKQQLFRMRIRDILVHPLQPLKVCLPSIVNEFLRQATAASLFHAPAISMHEDAVESDLSKAFGGLNRLDMFFPFDPYLLKESDRYIRPNFEFWSLVKTTYSNDNSDEDDEELGDIDAPGMNVGSLDDHFEIDFNSDDDIEYKMNKMSITPQRTFYHPLATNSESNRMPARIRPSVSPPS

SEQ ID NO: 53617 - protein, 542 aa, Zea Mays
MQEILDQQVAEEAAEAEGAGAMATITNQRRTANRKGAGATVTPRKGTQEKSKVQGKGYKDKCYESIRMAVEARFNKLLTELVFVEDLMEALEEAKAIGDELGDIYDYVAPCFPPRYEIFQLMVNLYTERFIQMLRLLSDRANDIQNINILKVTGWVVQYQENLIGLGVDESLAQVCSESGALDPLMNMYVERMQATTKKWYSNILEADKTQPPKSTEDGKLYTPAAVDLFRILTEQVQIVRDNSTDVMLYRIALAVIQVMLDFQAAERQRLEEPASDVGLESLCALINNNLRCYELSSELSSSTLEALPQNYAEQVNFEDTCKGFLEVAKEAVLQTVSVIFEDPGVQDLLVKLYQKDWLEGMVTEYLVATFADYFGDVKMYIEERSFRRFVEACIEETIVVYVDHLLSQKNYIKEETIERMRLDEEVLMDFFREHINVTKVESRVRILADMRELASAESLDSFTLIYTNILEHQPDCPPEVVEKLVAMREGIPKKEAKEVVQECKEIYENSLVDGNPQKSGFVFGKLKCLTAKKGIWRKLGQ

SEQ ID NO: 53618 - protein, 159 aa, Zea Mays
MLTIRIFFMQIFEGSNHVNVSHVIHELSFGPKYPGIHNPLDETSRILHDTSGTFKYYIKVVPTEYKYLSKKVLPTNQFSVTEYFLPIRPTDRAWPAVYFLYDLSPITVTIKEERRNFLHFVTRLCAVLGGTFAMTGMLDRWMYQLIKTVTNSKTRSVLR

SEQ ID NO: 53619 - protein, 514 aa, Zea Mays
MIAGANPVCIKRVTKFPLASELDRGVFGDQDSKITKDHVEKNMGGMTVQQAVEEGRLYVVDHHDWVMPYLKRINELPASEEKAEVSQRKVYAARTLLFLDGEDSSMLRPLAIELSSPHPEKEQLGAVSTVYTPPDSGDDGITAGRFSTWELAKVYASANDAAENNFVTHWLNTHASMEPIVIAANRQLSVLHPIHRLLKPHFRKTLHINAVARQIIVGSGDQRKDGSVFRGIDEVTYFPSKYNMEMSSKAYKAWNFTDLALPNDLIKRGLAKGDPKKPETVELAIKDYPYAVDGLDMWAAIKKWVADYCAIYYADDGAVARDSELQGWWSEVRNVGHGDLADAPWWPAMDCVADLVETCATVVWLSSAYHASISFGQYDYLGFVPNGPSITTRPVPGPDAGAEVTESDFLASVTPVTEALGFMSIASGPMGLKGTEVYLGQRPDTEQWTRERRAAEALAEFRARLEEVAGNIDRRNADPALKNRTGQVEVPYTLLKPTAQPGLVLRGIPNSITV

SEQ ID NO: 53620 - protein, 155 aa, Zea Mays
MELLEHFLAMNPDNDGRVKAEDFWAHFGLDCSPLCKKIFHYFDLDIKGLITFRQFLVGCAHLRKQPLFQGSCETAFEKCRGPETSEISRAQLADLLRLSMVPPSDDKMLELFKTFDVDGDEKISRDDFMACLGRFPFLIAFFAALINGEVYIEIV

SEQ ID NO: 53621 - protein, 306 aa, Zea Mays
MDPRKDTITYIPGVASIEPSELMSYLQDTDTTSVVHRIIFRAFDEARRADYVLCNTVEELEPSTIAALRADRPFYAVGPIFPAGFARSAVATSMWPESDDCSRWLGAQPPGSVLYISFGSYAHVTKQELREIAGGVLASGARFLWVMRPDIVSSDDPRPLPEGFAEAAAAAGRGLVVQWCCQVEVLSHPAVAAFLTHCGWNSVLESVWAGVPMLCFPLLTDQLTNRRLVVREWGAGVSIGDRGAVHADEVRARIQGIMAGEHGLKLRDQVRKLRATLEAAVAPGGSSRRNFDDFVDELKRKLKDAS

SEQ ID NO: 53622 - protein, 92 aa, Zea Mays
MVMRTVYCTNIDKMVTQLDVKKFFEELCGEVSRLRLLGDNVHSTRIAFVEFVHAEGAIMALNCSGMILGTLPVRVSPSKTPVKPRVNRMGSN

SEQ ID NO: 53623 - protein, 136 aa, Zea Mays
MDRYQRVEKPRNDTPISQNEIRITTQGRMRNYISYGMSLLEENGHDEISIKAMGRAINKTVMVVELIKRRVGGLHQNTATESVDITDTWEPLEEGLLPLETTRHVSMITVTLSKNPLDTSSPGLPAHYWLCLILYL

SEQ ID NO: 53624 - protein, 2469 aa, Zea Mays
MRTGGGGAVWGGGESSALGGPCSCAWECRGGELGWLQIPTTLGHDEGAEEGAGWDLKFSRLRWLQLALHYSMIGDLEQSLNLLAEVNLAEEGVLQLLLASIHRLSSRTGSDNEATVSSKPFKALYFWVMELYRLMVLAVRFATRMIKCYGLQKQTTDNNSVKLHEMALLLMAIRSIQSRVSAKNQNSVWMLSSNDHFLNAVPTLQQGDDKSSLKIGPSGGLDTHDRQELVPVCVPDSNSMLALTPVGSSLSASTFHDIDTNKRTTQVGSQNFQGNIKEMINRWEMNNFDLKIVVREALQSGRLPLAVLQLQLLRQRELVSNDYSEDAFSEVHEIGRSIVYDLLMKGETGLAVATLERLGNDVESDLRQLMQGTVRRSLRLQIADEMKKRGYITPDDWKMLETITLIERLYPSSSFWNTYFYRENVIRDAAKIVTLPGDDKPVLALNIRNHPIIECGDVDGAVLGSWVNINDCTKEFSGSNISDGYWACAAVWSDAWGPRTVDRILLDQPYHVHAHVPWESQFEYFVAHNDVGKVCELLDMIPNSILSEGIIRVNVNSLQAPANTLSDLTVPDYNMYICDSEELEPFCVEIPHVKVFRSLWNHESTLYIRMVMQQELAKRHIFMKEYWQSTTEIIPLLARAGILIKVGLKEECSTIFSASEIPDDAHHQGREGALHKLIIRFCVQYNLPYLLDLYLDTCNLTPDKDCIRLLKENTGDCKWAQWLLFSRIKGYEYEASFSNARWNLSKKMVNNSNPTAVEIDEMLYTVDDMAERIGEMSALATLMYASAPIQKSICTGSVNRSGSSSQCTLENLAPCLQQFPTLWKTLFSACFGQDEYGCLNYSAGNAYGKRSISEYLRWRYSVFSSAGGDTSLLQMLPCWVPKSVRRLIQLFEQGPFGMQLLSTAPSSEELFTHGVSNYIYNSTGYTEANALSLEASIQKSVEEELYSSLEEKDVRVEHHLHRGRALAAFRHLIAKRASQLKSASARQVISAQSNVQADVQLILAPLSQVERSILISVAPLAITNFEDSTLVASCIFLLELCGLCANMLRLDIAALRRISSYYKSVQENKHVDLSPPRGPELHVQSHGAGIAPALARALAEDYVQSDHLHVLEQTQTSMAPKREQTQYPLISILQHLEKASLPSLEEGKTCGFWLLTGVGDASLYRSQQNEASQHWNLVTEFCQAHYLPLSTKYLALLANDNDWVGFLTEAQIAGFSIEAVIEVAAKEIRDSRLRAHILTVLKNMISLRRKSSGNVPSGSSDPSFSSVDGNNPMELFCILGVCEKQKNPGEALLIKAKQMQWSLLAMIASCFPDVTPLTCLSVWLEITAAREMSSIKVDDVSLKIAKNVGSAVEATNKLPSTSRNVEFRYNRKNPKRRRFLEASHEKLCFSIDSTCGPDSAATSNPISIVDHQGIGKPISGETIMSVDIDERLASLSNMVAVLCEQQLFLPLLRAFEMFLPSCSLLSFIRSLQAFSQMRLPEASARLASFSARIKDEASHTQLNSSKEVSVIAEWVATTAVKAADAVLSNCSSIYEKRCLLQLLSAVDFADGGTSSSYFSRRYWKINLSEPSLCKDTDVYNWNDLMDDASLLTSLEKDGQWEQARTWARHLESSGIAWESTLDHVTESQAEAMVAEWKEFLWDIPQERAALWGHCQSLFMRYSFPPLKAGLFFLKHAEAVGKEIPAQELHEILLLSLQWLSGTMTKSSPVYPLHLLREIETRVWLLAVESESQSKVDGEFATSAVAHNKAVGNSSSIIEHTADIITKIDSNMSLPHMKITERNSTRDSLSYQHVQLFESNSEASSTTINNTRAKRRMKTNSPLKRGVNDNIESRANELDNNSNTLHSSKIGEQARNLLSEEEFVKMEASLSGWEQNVRPVDMEKAVLSLLEFGQITAAKQLQQKLSPSYIPEELVLVDVALRIAKNSSNGEINLSCFDTQALRILQSLRVANSCDMISPSQVMEILAAKCGEGRGRALIRRIIGVVRTARLLGLPFSEAFEKQPIELLQLLSLKAQDSFDEAKFLVETHIMPASSIARILADSFLKGLLAAHRGGYLDSQKEEGPAPLLWRSSDFLKWAKLCPSESEIGHALMRLVMTGHEVPHACEVELLILSHHFYMSSSCLDGVDVLVTFAANRVDSYVLEEDFSCLARLITGVSNFHSLSFILSILVENGQLELLLQKYSATDTATGTLASVRGFRMAVITSLKQFIPNDDDALSMVYKHFDMKHEAASLLESRAEQYMNSWLSRYDKERRNDELLDAMHHLVETAEVLSTIDAGQRTHRACARASLLSLQIRIPDLLWIGLSETNARRIFVEQSRFQEALIVAEAYNINQPIEWAPVFWNQMLKPDLIEQFVAEFVSVLPLQPPMLLELARFYRAEVAARGEQSHFSVWLSPGGLPAEWVKHLGRSFRSLLRRTRDMRLRLQLATLATGFIDVLVICNRVLDKVPDNAGPLILRKGHGGAYLPLM

SEQ ID NO: 53625 - protein, 1104 aa, Zea Mays
MKHFEDLVQGGEWDEVEKYLSGFTKVEDNRYSMKIFFEIRKQKYLEALDRHDRAKAVEILVKDLKVFASFNEELFKEITQLLTLENFRQNEQLSKYGDTKSARNIMLLELKKLIEANPLFRDKLNFPPFKASRLRTLINQSLNWQHQLCKNPRPNPDIKTLFTDHSCAAPTNGARAPPPANGPLGSIPKSAGFPPMGAHAPFQPVVSPSPNAIAGWMTNANPSLPHAAVAQGPPGLVQAPNTAAFLKHPRTPTSAPGIDYQSADSEHLMKRMRVGQPDEVSFSGASHPANMYTQEDLPKQVSRTLNQGSNVMSLDFHPVQQTILLVGTNVGDIAVWEVGSRERIAHKTFKVWDIGSCTLPLQASLMKDAAVSVNRCLWSPDGTILGVAFSKHIVQTYTFVPNGDLRQQAEIDAHIGGVNDIAFSHPNKTLSIITCGDDKLIKVWDAQTGQKQYTFEGHEAPVYSVCPHYKESIQFIFSTAIDGKIKAWLYDCLGSRVDYDAPGHWCTTMAYSADGTRLFSCGTSKEGDSHLVEWNETEGAIKRTYNGFRKRSLGVVQFDTTRNRFLAAGDEFLVKFWDMDNNNILTTTDCDGGLPASPRLRFNREGSLLAVTTSDNGIKILANTDGQRLLRMLESRAFEGSRGPPQQINTKPPIVALGPVSNVSSPIAVNAERPDRILPAVSTSGLAPMDASRTPDVKPRITDESEKVKTWKLADIVDNGHLRALHLTDTDTNPSKIVRLLYTNNGVALLALGSNAVHKLWKWQRSDRNPSGKSTASVAPHLWQPANGILMTNDTNDGNPEEATACIALSKNDSYVMSASGGKVSLFNMMTFKVMTTFMAPPPAATFLAFHPQDNNIIAIGMEDSTIQIYNVRIDDVKSKLKGHQKKITGLAFSQSMNVLVSSGADAQLCVWSIDGWEKKKSRYIQPPANRPGTLVGDTRVQFHNDQTHLLVVHESQLGIYDGNLDCLRLWSPRDALPAPISSAIYSCDGLLVYAGFCDGAIGVFEAESLRLRCRIAPSAYIPPSILACAGRVYPLVVAAHPMEPNQIAIGMSDGKVHVVEPLDGDPKWGSAPPQDNGAHPHPHPAISAAPSTATNQASDQPTR

SEQ ID NO: 53626 - protein, 95 aa, Zea Mays
MQTWEEMLLLLLPLLNSSSVKKFLLPFSKDKSGGSSGDEADCPICRSSPSIPFIALPCQHRYCYYCLRTRCSATTSYRCTRCDGAVVAIQRLGSG

SEQ ID NO: 53627 - protein, 378 aa, Zea Mays
MPRGSSSRGARGGVGRNQGRGARGKDSGGHTTKDTHGNRAEGKHGNKHGNSLSPDLVCKSKRIPKKRTLDEDSDDGDGEIRYLQKLKGAKVAPDPVNTGHKAYDFVDDALKKKELTKLSKNKSIPYEVDEDFRMSRSGRNGRKKLGDDNEFIEDEESEMEEKSGLKKADSPQDVKIETPGLTTRQRALQSRGGNGESFIEFPDGLPAASSRKQKEKLSDVELQAKKAEAAQRRKMQVEKAEKEQQAEAMRKILGLDSEKKKEEKKLKERENREKQAKLEECKKNCVRTVMGPTGTVITFPESMGLPSIFNSKPVSYPPPREKCAGPSCTNPYKYRDSKTLLPLCSLACYKAVQGRPPDQGTDAAQGSGGGQESAGKQA

SEQ ID NO: 53628 - protein, 439 aa, Zea Mays
MITVTVFSGTGDVLPMPYTVTVQKNGNCRDLTKALADVCCLKNSETLLLAEVYERRIYRYLTNPIEGLHIIKDEDILVAYRLPVGHEKLLRLEILHSRADRFLVEPQFNINRKLIGCPIVTCIPNDSTAKSDIYAAVSSVLVPFVRAKAHSPDVSAVKLNGNGPSLDGIVLTDNGTTSEEGLSTSRSREDDNAADNELLPFQLSLTDEKGSTRNAIDMDSNRVLGLVIRVLMDWGEKEHGMYNIDHMDVLPEVFKPGFMSKKTRQEAVNLFSCLDAFLKEEPLGPDDMWYCPGCKEHRQASKKLDLWRLPEILVVHLKRFSYSRYMKNKLDTFVNFPIHDLNMSKYVKPTSRGDQHPVYELYAVINHYGGLGGGHYSAYAKLVEEDNWYHFDDSHVSSVNEDEIRRSAAYVLFYRRVGGSSTAANGGPVDIEMVDSLET

SEQ ID NO: 53629 - protein, 205 aa, Zea Mays
MLNYVDEIRAQGFKLEYLNIGGGLGIDYHHTDAVLPTPMDLINTVRELVLSQDLTLIIEPGRSLIANTCCFVNRVTGVKSNGTKNFIVVDGSMAELIRPSLYGAYQHIELVSPPTPGAEAATFDIVGPVCESADFLGKDRELPTPDEGAGLVVHDAGAYCMSMASTYNLKLRPPEYWVEADGSIVKIRHGEKLDDYMKFFDGLPA

SEQ ID NO: 53630 - protein, 152 aa, Zea Mays
MAFFSHHHLQQPHAQQPVLPSFRNALPVPVDGQIPAPLTFFNPPPAFPEQPAQAPLVDAVGLTAAAGLGWRQPREQELLGENSQMSSIDFLQTGSAVSTGLALSLEDRRHVGGGAGNSSGDSPLLLLPMLDDDISREVQRLDADMDRFIKAQ

SEQ ID NO: 53631 - protein, 284 aa, Zea Mays
MKKYCPSHEDDGTPRCCSCERMEPREIKYITLDDGRKLCLECLNSAVMDSPECQHLYMDIQEFFEGLNMKVEQQIPLLLVERQALNEALEAEKNGHHLPETRGLCLSEEQVVRTILKRPQIGPGNRILDMIIGPYKLSRRCEVTAILILYGLPRLQTGSILAHEMMHAYLRLKGFRNLSIEVEEGICQVLSHLWLESEIIAGSSSNVASSSEASSSSSSSAPTSSKKGAKTEFEKKLGAFIKHQIETDSSEAYGGGFRAGYPAVERYGLKRTLDHMKLTGSFPY

SEQ ID NO: 53632 - protein, 134 aa, Zea Mays
MDPWVISEVLKPNLECTGFIDVSQIHMLRVEKFLANAEKSHGKYPSFDYISVTPPYLEVNYSTLLAQLARSPLVGKDCFILVEYPLKTDMAESCGNLVQSSLTYYQMLQIADRRFGRTNLLIYGPTWSEKKKKR

SEQ ID NO: 53633 - protein, 223 aa, Zea Mays
MLTSSYSFPSSPRIQQAIAAGILPLSPLFLQQSSALLQQLPLVHLLAQNIRAQQLQQLVLANLAAYSQQQQLPLVHLLAQNIRAQQLQQLVLANLAAYSQQQQFLPFNQLAALNSAAYLQQQQLLPFSQLAAAYPRQFLPFNQLAALNSHAYVQQQQLLPFSQLAAVSPAAFLTQQHLLPFYLHTAPNVGTLLQLQQLLPFDQLALTNPAVFYQQPIIGGALF

SEQ ID NO: 53634 - protein, 316 aa, Zea Mays
MGSTGGIAGASSLVASPSISTGLNPASLLPFLQASKWLPCSDIVAAATTSRSSGRPAGATAAPTPRTAAPSPRPAPRAAAPSPRPAPCAAVPSPRHVPVPSPAVAAPSKVGIQALVDSASIASGSAGIGRGVIASGAAGMVKKSGASLPVGAGVGRKTGWLSRSMFPTFDVGDRILAEKISYIFREPEILDIVIFRAPPVLQALGYSAGDVFIKRVVAKGGDIVEVRDGNLIVNGVVQEEEFVLEPADYEMDPLTVPEGYVFVLGDNRNNSFDSHNWGPLPVKNILGRSVLRYWPPSRITDTIYQHDMVQHTAVAS

SEQ ID NO: 53635 - protein, 152 aa, Zea Mays
MKTGPSITDTAMGRIAQISKVISEGGYDKIFQQTFECSPDEKLNKAYVCYLSTSHGPIMGVLYLSTVKIAFGSDSPVKYVTEDNKTESSFYKVVLPLHHLRSVTPTASQQNPAERYIQVVSVDNHEFWFMGFVNYDSAVKNLQESVRVVHGA

SEQ ID NO: 53636 - protein, 56 aa, Zea Mays
MLSTNMRTAQKCIQELKTCTEIITAVQGTGPCEGTFTQKRLDPANHTRWSRCCASK

SEQ ID NO: 53637 - protein, 406 aa, Zea Mays
MLMSFAGSAPDPTILMFSESWPGLPRGVEFNPSDSDLLWHLAAEVGNALAERHPFINEFIKFVDDVREFICTHPQHIPGVRQDGRASYFFHRSFEPYINENDVNNCWKKIGSPRSIILDGTLTGCKEVFALYADMPSDKRSQETDWRLHQYHLQNTVKAESEIVASKIFLASRNSLCELAEETHIESEWDVSTHKDSSVECAKGFNPEICTETDELDHISLKERYRILLADKSLGLTTVSAGKSIMHVETSRASPKRNHEGKISKEDIFSMLQEISSAPSIIESNPMDDDSNRRILGEDLPVEGSENQIGGTATCMGENSELVARKQGAHLADVKLEPALGGYEIGPSELPQENSTHAEGSVLSLGIKDELTDCELPGLCENVSFSSRQRRKRKTSYSTEKTLKED

SEQ ID NO: 53638 - protein, 105 aa, Zea Mays
MLLLAGLGMLCWIDQDDGRHSFGHSGGFICPFVPLLPVMCILINTYLLINLGGGTWMRVGVWLVMGVFVYIFYGRTHSSLTDVVYVPVAEANEIYGSSSSLGFVA

SEQ ID NO: 53639 - protein, 418 aa, Zea Mays
MVFSKGEGSHIVDPEGNKYIDFLSAYSAVNQGHCHPKVLRALIEQAERLTLSSRAFYNDKFPIFAEYLTSMFGYDMMLPMNTGAEGVETAIKLARKWGYEKKHIPKNEALLVSCCGCFHGRTLGVISMSCDNDATRGFGPLVPGHLKVDFGDIDGLKKIFEELGDRICGFLFEPIQGEAGVVIPPDGYLKGARDLCSKHNVLMIADEIQTGIARTGKMLACDWENIRPDMVILGKALGAGVVPVSAVLADKDVMLCIRPGEHGSTFGGNPLASAVAVASLKVVRDEGLVERAAKLGQEFRDQLQKVQQKFPQILREVRGRGLLNAVDLNNDALSPASAYDICIKLKERGILAKPTHDTIIRLAPPLTISPEELAEASKALSDVLEHDLPQLQLQKQIKKPESEAEKPVCDRCGRDLYG

SEQ ID NO: 53640 - protein, 188 aa, Zea Mays
MNETNQDLIMAQGGVTLLSMTASDAEDPQTLRMVAGAIANLCGNDKLQTRLRVEGGIKALLGMVRCGHPDVLAQVARGIANFAKCESRAATQGNKMGKSLLIDDGALPWIVKNANNEAAPIRRHIELALCHLAQHEVNSKDIINEGALWELVRISRDCSREDIRNLAYRTLTSSPTLEAEMRRLGIKM

SEQ ID NO: 53641 - protein, 347 aa, Zea Mays
MTLFLARGAVLKATQDTRGWPLVEPLPSYGRGRELPGPRYASFIHGDGLRDVVITGDRGVIDGQGEVWWNMWRRRTLEHTRPNLVEFMHSTGIHISNIVLKNSPFWNIHPVYCDNVVVTNMMILAPRDSPNTDGVDPDSSSNVCIEDSYISTGDDLVAIKSGWDEYGIAYGRPSAGVTVRRVRGSSPFSGIAIGSEASGGVRDVLVEDCAIFDSGYGIHIKTNVGRGGYIRNVTVDGVRLTGVRSGVRIAGDVGDHPDAHFSQLAVPTVDAVRISNVWGVNVQQPGSLEGIRASPFTRICLSNVKLFGWRSDAAWKCRDVRGAALGVQPSPCAELATSFASARSSCS

SEQ ID NO: 53642 - protein, 109 aa, Zea Mays
MVDTYLSDASRQWAATNEGSSLLDSMTKAIDEVIKIKECDIYSYNPDSDADPVLEKGAIWSFNYYFYNRKLKRVVSFRCYCTSKLSGDDFLTGVASDGEEEDALIDMDI

SEQ ID NO: 53643 - protein, 86 aa, Zea Mays
MTLHDEALFCATTGLVQTSGLYSINQFQKNCKDCTMMVTSWSYSPMSQTLSAGRTSDNKLLTPKLAALITLLNVLKPLFRFSLLVV

SEQ ID NO: 53644 - protein, 61 aa, Zea Mays
MYHHCPGQKISHQILSDSSASTPARTRRPRACSPRTARWSTSAASNSPPRSPPRPVRHSSS

SEQ ID NO: 53645 - protein, 235 aa, Zea Mays
MPLATTAPTPAPPCPPPSPAAAPVRTQLLSSVAKLALTAALVCGSGGPAAVVVVPAAAQAVPFVRPPPPPLQGRPFASSTPYAQSQKLQLGLDKLGKIRPCPSTNPGCVSTNPLGSSGSFASPLLIPESSAGEKTVASLRQAIEKTQRNVEFKVDEDTPYGHYIEAEMDGGVGRDVMEFLVKKDAGVVAYRCMATKVTFVYPFTTAVGDSKGQKQRIAAISQELGCLKRGASFLP

SEQ ID NO: 53646 - protein, 514 aa, Zea Mays
MVFNAAVRKEIADETDRETGRSKQISPVPIHLSIFSPYVVNLTLIDLPGLTKVAVEGQPENIVQDIENMVRSYIEKPNCIILAVSPANQDLATSDAIKISREVDPKGERTFGVLTKIDLMDKGTDAVDILEGRSYRLQTPWVGVVNRSQQDINKNVDMIAARRREREYFATTPEYKHMASRMGSEYLGKMLSKHLEQVIKSRIPGIQSLITKTIAELETELNRLGKPIANDAGGKLYTIMEICRMFDSIYKEHLDGVRPGGEKVYHVFDNQFPVAIKRLQFDKQLSMENVKKLITEADGYQPHLIAPEQGYRRLIESCLISIRGPAEAAVDAVHAILKDLVRKAINETHELKQFPTLRVEVGNAAFESLDRMRDESKKNTLKLVDMECSYLTVDFFRKLPQDVERGGNPSHSIFDRYNDSYLRRIGQTVLSYVNMVCSTLRNSIPKSIVYCQVREAKRSLLDHFFTELGAREMKQLSKLLDEDPAVMERRTNLAKRLELYRSAQSEIDAVAWSK

SEQ ID NO: 53647 - protein, 130 aa, Zea Mays
MWDHRYTHLTHARDTQCTQEVPSNYLTVSFKLYDMDSTGFIERKEVKQMLIALLGESEMRLSDDIIETILDKTFSDADANQDGKIDRTEWENFVTRNPSLMKIMTLPYLKDITTTFPSFVFNSEVDDLVT

SEQ ID NO: 53648 - protein, 299 aa, Zea Mays
MTSGAAAVGGLGRTPTWKERENNKRRERRRRAIAAKIFTGLRALGNYKLPKHCDNNEVLKALCREAGWVVEDDGTTYRKGCKPPPGMMSPCSSSQLLSAPSSSFPSPVPSYHASPASSSFPSPTRLDHGSGSNSHTPGPAAAAAAAAAAASSLLPFLRGLPPLRVSSSAPVTPPLSSPTAGVAAARQARPARAGAKSTRTPSPSATSPTSAAPRWRTPAAGSASRSGRPPRRPRRPRTTSSTRPVAAAARPLPTPWSWTGWRARSSSSTRAASRRGKASASTRSPPRSSSSRSASAPSE

SEQ ID NO: 53649 - protein, 410 aa, Zea Mays
MAAATEKTAEDIRRELQELQRQHREITERLRDPRGLRRGAPGPGPGPGPPRPLRGFVRPHVGAEVADQAPQKRRLLSAVVKVDGAENNEEGTKDANGEGQEAGSGATEGSDRRTFNTGGFRRDGSLWMQRRVDYNSLPEPAPRELPRNEDPSLVRRNKRMLGQLLVGTLEKFQQEDKKLSNSEAFLRRSETQRKAEQKVREESERLRQQEREQIAEKRKRDMTLRARVAAKAEEKRLELLYIQWTEHHKRLSNFLRTKAEPPIYYMPTKPIIDDPAIVEQNKEKVFEEWKSMRRAELTRFQKQVEEQYLSNVERQLERIQNARNARKANGPGNMQEMDKELDTHRAEHGPKPRRVPEEGGNDDDEDAEDMAAEDELMDEVLGINDAINEDPSKPSEEATTEGQPATEEAQ

SEQ ID NO: 53650 - protein, 1214 aa, Zea Mays
MEGHAQSGPIPRLPLVTISDSSNLLRDVPVCQPFHLELNFFNKETRVVQYPVRAFYLDGFNLMAHNLSSGADNLYKKLYSTIPSNVECHPTNMSYSPKQHLFLVVFELSGTNGVVHEVVLYWEQTDLQTVNSKGSSIRGRDAAFLGPDDNQYAILEEDRTGLNLFSLKAVATKEALENNAAVLEENTFADNAASATSTERQGPLQFTFESEVDRIFSSPLESTLLYVISGKHIGLAKLLQGYRLSADNGLSITTKTDGKKFIKLKPNETVLQAHWQTTLRGPVVGILTNQRVLIASADLDILSSSSTKFDRGLPSYRSMLWVGPALIFSSATAISMLGWDNKVRSILSTSFPRSVLLGALNDRLLLVNPTDINPRQKKGVEIRACLVGLLEPLLIGFATMQQHFEQKLDLSEVLYQITSRFDSLRITPRSLDILTKGPPVCGDLAVSLSQAGPQFTQIMRCNYAIKALRFSTALSILKDEFLRSRDYPQCPPTSHLFQRFRELGYACIKYGQFDSAKETFEVITDHESMLDLFICHLNPSALRRLAQKLEESATDSELRRYLERILRVRSTGWTQGVFANFAAESMVPKGPEWAGGNWEIKTPTNIKNIPQWELAGEVMPYMKTTDAGIPSVVADHIGVYLGVMKGRGNVVEVSEKSLVKAIAAASSENTQPVSSASAEKSKAIPRGDSVGDTLARQLGVQIASSDEQAKAAEDFKKTLYGVVDDGSSDEDESTSKTKKIHIRIRDKPAAPTVDVNKLKEATKQLGLGPPLSRTRSLSGTPQDFNQAPTQPGGPAAAVSPAMPNSAIDLFGTNTLVQPQAPSSSTGPVIAGMGVTAGPIPEDFFQNTIPSHQLAAQLPPPGIVLSRMAQPAPGIEQGRPVPNQMMANVGLPDDGVPPQAPPQQSQFPPQQSQFPQQPGIPMDSIGLPDGGVPPQSQPLPSQGQFLPSQAQGFQLGIPAPSQPIDLSALEGPGAAKQAARPPAPTAVRPGQVPRGAPAAECYKMALAHLEQNQLTDALSCLDEAFLALAKDQSREADIKAQATICAQYKIAVALLQEIARLQRVQGAGALSAKEEMARLSRHLASLPIQAKHRINCIRTAIKRNMEVQNYAYAKQMLDLLYSKAPPTKQDELKSLIDMCVQRGLTNKSIDPFEDPSQFCSVTLSRLSTIGHDVCDLCGAKFSALSAPGCVICGMGSIKRSDALAGGPGPVPSPFG

SEQ ID NO: 53651 - protein, 285 aa, Zea Mays
MVAHAKSSKSNPVARWHICQGSINAISFSPDGAYLATVGRDGYLRVFDFSKEQLIFGGRSYYGALLCCTWSSDGKYLLTGGEDDLVQVSGVAFDSYWSPPSSDGNGENVYRFGSVGQIRDKNYFFSVLMGLFSHDVLKVIYVFDTQLLLWDLALDEIVVPLRHPSSASPTFSSGSPSTHWDNACPPTGVLQPSPRMRDVPKLSPLVAHRVHADPLSGMVFTSESILTICREGLIKIWVRPEQSENNQQSNSSEFALGPASKDRAITSSNKASSSSFKKLPPVLVT

SEQ ID NO: 53652 - protein, 213 aa, Zea Mays
MGSVLTEIDTKTSIKDLTISSDEKFLAVNRSSGPCRVWDLQSSEVVASLPRETGEIFGFCRFSNKADNSHVLFITVMEGDYGKIVSWNTTSWTRTGSKKITREAISAFAVSPNGALLAIGTIEGSIIVVGSKDMRTLVTVKKAHLGIVTTLTFSQDSRTLLSTSFDSSARVTSVGSPKSNGTSIWPMLLVVILAILVYYCTQHKEDILAMLQR

SEQ ID NO: 53653 - protein, 393 aa, Zea Mays
MVRSGSIRRSAVPAPMPAPAFTVSPADYRLLEEVGYGANAVVYRAEFIPTGRTVAVKCLDLDRVNSNLDDVRKETQTMSLIDHPNVIRSYCSFVVGHNLWVVMPFMSEGSCLHLMKVAYPDGFEEPIIASILKETLKALDYLHRQGHIHRDVKAGNILIDNPGVVKLGDFGVSACMFDRGDRQRARNTFVGTPCWMAPEVLQPGTGYNFKADIWSFGITALELAHGHAPFSKYPPMKVLLMTLQNAPPGLDYDRDKRFSKSFKEMVAMCLVKDQTKRPTAEKLLKHSFFKNAKPPELTVKNILTDLPPLWDRVKALQLKDAAQLALKRMPSSEQEALSMSEYQRGVSAWNFDIEDLKAQASLICDDDPPEIKEDDDTGRITDIDKICGCISGF

SEQ ID NO: 53654 - protein, 65 aa, Zea Mays
MVQRWGQSWRRHRPGSLCWCRHRRRAPPALLPSNNQKLEEAVLLTVAAGVATNDDQSRVLPHILV

SEQ ID NO: 53655 - protein, 148 aa, Zea Mays
MSSYSAQIVCLYNLFLYYTVYVCSCFLRFGPVEGCKLIRKEKSYKKIKLGCGCSCVASSCWTEEREGRSSWRADFYSGGLLFSMGLLGYIFSRSTISLVLGITPGLATLLLGTLSLKFWRSDRSSFLLILAQAEVMLMCKHLHLEFCL

SEQ ID NO: 53656 - protein, 258 aa, Zea Mays
MRLIHGQGHQRANNDTEEARKKIRKFKESAWKCVYFLSGELLSLSVTYNEPWFTNTRYFWVGPGEQVWPDQKIKLKLKAVYMYAAGFYTYSIFALMFWETRRSDFGVSMSHHVATVVLIVLSYVFRFARVGSIVLAIHDASDVFLEVGKMSKYSHCDWLANVSFLFFVISWVLLRLTYFPFWILRSTSYEVLLTLDKKKHNFDGPIYYYVFNSLLFSLLVLHIYWWVLIYRMLVRQIKTRNVGDDVRSDSEGEDDHED

SEQ ID NO: 53657 - protein, 109 aa, Zea Mays
MVESVDDEKIANRLDRVVADLGRKPLKVLVQVNTSGEESKFGVDPSGCMELAKHVKLNCPNLVFSGLMTIGMLDYSSTPENFKVKYSIFWDAEIVYEWQYGMHMCAYVC

SEQ ID NO: 53658 - protein, 209 aa, Zea Mays
MFLPCMLQSKQFYHSMLVGVLLVLFFDSGDGVSHTVPIYEGYALPHAILRLDLAGRDLTDSLMKILTERGYSFTTSAEREIVRDIKEKLAYIALDYEQELETAKNSSSVEKSYELPDGQVITIGAERFRCPEVLFQPSMIGMEAAGIHETTYNSIMKCDVDIRKDLYGNIVLSGGSTMFPGIADRMSKEITSLAPSSMKIKVVAPPERK

SEQ ID NO: 53659 - protein, 67 aa, Zea Mays
MSPRFAPSIDDGGGLPFGSLIVFSSFTRHSRCQQQHRRLVLDSLLVSLQGDQLAKAFMALSSGSMAA

SEQ ID NO: 53660 - protein, 330 aa, Zea Mays
MLGNCILCQGWSRKRAKSNYLERRECEYDQKISIDFYKEGDPLKPAVTGVLVFISTPDPIGNKYYLGPAPLQDMARQIATANGPTGYNRDYLFSMEKALAIISHEDDSILELANEVRKVLNRTKETKITERLCSPEYKSLRVYCSWRCRVRELFYYLKGEQVDYGEEHSKACGHNRFGRIYHTGHYPVCYEHNPVHFVGHSVGTQVVRVLHQMLADKLIALDMGALIAGAKYHGEFEDRPKAVLKEVTYSDGQTILFIDEIHKLQMPWLQKAKLLLRELKTVKADLSFAKERYAQLEEENKMLRESYDMGDNPEANDQLKMIHMMGRESV

SEQ ID NO: 53661 - protein, 248 aa, Zea Mays
MESENEKLRKELATLLRVVQKRSCDIVDVVKSAFQPFNSPLVDELNRALVEIDDLAKDLEDVAVQTQWEVYERPCGLYMLIYIMFDLPLLHRMGSDWNQYQLAHISAGDLLRAEIAAGSENGKRAKEFMEKGQLVPDEIVVNVPDELLVERVVGRRLDPVTGKIYHLKYSPPENEEIASRLTQRFDDTEEKVKLRLETYYQNIESLLSTYENIIVKVQGDATVDAVFAKIDELLGSILEKKNEMVSST

SEQ ID NO: 53662 - protein, 95 aa, Zea Mays
MNEKDWLALVAVHSDSWLLSVAFYFGARFGFDREARRRLFSLINNMPTIFEVVTGAVKKQQAKEKTPNSSSKSNKPSSKVVNASHFPLPSDLNYC

SEQ ID NO: 53663 - protein, 240 aa, Zea Mays
MPWYNNFKPPRPLKRRVKDFFKHFDRHALDLLEKMLTLDPSQRISAKDALDAEYFWTDPLPCDPKSLPKYEASHEFQTKKKRQQQRQAEEAAKRQKLNHPPPHSRLPPLQQPGQAHPQMRPGQGMHNVPPVAAGPGHHYAKPRGPGGPNRYPQGGNQGGGYNPNRGGQGGGYGSGPYPQQGRGPPYPGAAGPRGSGGSGYGAGGPNYQQGGPYGTSGPGRGPNYSQGSGSRNQQQYGNWQ

SEQ ID NO: 53664 - protein, 403 aa, Zea Mays
MGKILPEGIGEVQEIIDMCDYAVGLSRQLNGSIIPSERPNHMMMEVWNPLGVVGVITAFNFPCAVLGWNACIALVCGNCVVWKGAPTTPLITIAMTKIVASVLEKNNLPGAIFTSFCGGTEIGQAIALDIRIPLVSFTGSTRAGLMVQQQVSARFGKCLLELSGNNAIIVMDDADIQLAVRSVLFAAVGTAGQRCTTCRRLILHENIYQTFLDQLVEVYKQVRIGDPLEKGTLLGPLHTPASKENFLKGIQTIKSQGGKILFGGSAIESEGNFVQPTIVEITPSAPVVKEELFGPVLYVMKFQSLKEAIEINNSVPQGLSSSIFTKRPDIIFKWLGPHGSDCGIVNVNIPTNGAEIGGAFGGEKATGGGREAGSDSWKQYMRRATCTINYGSELPLAQGINFG

SEQ ID NO: 53665 - protein, 293 aa, Zea Mays
MDFHSKATNYLVTASDDESIRLYDTQNAVCLKTINSKKYGVELVCFTDNPNIVLYSSKNGWDESLRLLSLNDNRFLRYFKGHLDRVVCISFCSEKENFLSGSLDRTVLLWDQRAEKSQGLLRVQGRPAVSYDDQGMVFAVAYGGHIRMFDARKFEKGPFEIFSVGNNDSEAHVIKFSSDGRRILLTTKAGRVHVLDSFHGNSIASCNVKPVVTNSTLEASFSPDGNHIISGSGDGSVYAWNVRSGKVARWGSTDDEPPLVRWAPGSLMFVTGSSELSCWVPDLSKLGSFTISK

SEQ ID NO: 53666 - protein, 218 aa, Zea Mays
MGVYDVDTRAITRRLREDGSLIGVLSTDQSLTDNELLEMAQKWKIVGVDLISGVTCDAPYEWSDKTDSEWEFKRDPSSETFHVVAYDFGIKHNILRRLTSYGCKITVVPANWPASEALGGKTFKMKFGHHGGNHPVCDLRSGRVDISAQNHNYAVDPESLPEGAKVTHVNLNDNSCAGLQYSKMKLMSLQYHPESSPGPHDSDTAFGEFIELMKSNRL

SEQ ID NO: 53667 - protein, 117 aa, Zea Mays
MVKSTTTMGAASCGGGVLPLASLNHISIVCRSVEASLRFYTDVLGFVPIRRPGSFDFGGAWLFNYGIGIHLLQSEDPGSLPPEKGEINPKDNHISFQQIKAHTTTSSELYVFPCISS

SEQ ID NO: 53668 - protein, 65 aa, Zea Mays
MQPIPGCRMPCQRCGSLRQPLVLPWRTEWKKASAIPRMSRRSTSLKNYGWKWTDSRFNLLSTHRE

SEQ ID NO: 53669 - protein, 143 aa, Zea Mays
MGMTYEELSIYGRLRKIFRCGPVSMFQNLCHSWCGRLSPSEVADKVKHFFKYYAINRHKMTVLTPSYHAESYSPEDNRFDLRQFLYNSRWPYQFRKINELVQEMDKDGKWGTSAEGKLGAQTGAQGTGMGVVAAGSANPSAGF

SEQ ID NO: 53670 - protein, 534 aa, Zea Mays
MAGGGGGGAAPKHDDFTPHPVKDQLPGVSYCITSPPPWPEAVLLGFQHYLVMLGTTVIIPTALVPQMGGNNEDKAVVIQTLLFVAGINTLLQSFFGTMLPAVIGGSYTFVLPTISIILAGRYANEPNPHIKFLRIMRGTQGALIVASALQIIVGFSGLWRNVARYLSPLSAAPLVALVGFGLYELGFPSVAKCVEIGLPQLILLVIFTMYLPHAVHMLKSIFDRFAVLFTIPIVWLYAYLLTVGGAYRNAPPKTQFHCRTDRSGLIGGAPWIRVPYPFQWGAPTFDAGEAFAMMAASFVALVESTGAFIAVSRYASATPIPPSVLSRGIGWQGIGILLDGLFGTGNGSSVSVENAGLLALTRVGSRRVVQISAGFMIFFSILGKFGAVFASIPAPIFAAMYCIFFAYAGSAGIGFLQFCNLNTFRTKFILGFSVFMGLSVPQYFNEYTSIAGYGPVHTHSRWFNDIVNVIFSSKAFVAGFVAYLLDNTIDRHEASVRRDRGYHWWDKFRSYRTDTRSEEFYSLPFNLNKFFPSV

SEQ ID NO: 53671 - protein, 249 aa, Zea Mays
MKNFVMMIDAEKQERAQSALRAHSSSRKNSKKEINVPEDCAALTGKLQPFVKEEVLVPVFNGTFPCTAEQFFSILLSDDSNYITEYRTDRKDKDINLGQWHVADEYDGQVRELNCKSICHSPMCPPYSAMTEWQHIVLSADKMDLVFETVQQVHDVPFGSFFEVHCRWCVKTISSNSCSLNISAGAHFKKWCIMQSKIKSGAVDELKKEVKVMLDFAQGYMLKVSSPDQENSNLAQQDNTAPDAPSDTG

SEQ ID NO: 53672 - protein, 737 aa, Zea Mays
MASAPCSNSSPAARAPRSAAAGNKKPTTCLCSPTSHPGSFRCSRHRNGAAAPGGEAAHGASRGGTAGRAAKGRRKVRPKTRLHADAVYPAWRVNPGYIFDALLVQAAAERARVVGRRAHAADDPASASPQLILHVVFVYAPLLDLPNGLMMMTCVDPILANASTTDIRRHGTATDPFRASQAAQFLRWKLEKAYMRLRRRERFVYRAAMDQSGIVVVELAEAHAVPVSGGPSARGPFKKPRTDETNGQEKTELSQPNRAHPRVRCTLYYSRDNELQHALRPKLSSDCEQAFLPPLRSRTRAMAALCSASPAISAAASLGSPARVVASFLRLRLRLRAAKRSCSHAPAPSWRARRRFAAAAAEAEECSGVETLIPPDNRIPATIITGFLGSGKTTLLNHILTAHHGKRIAVIENEFGEVDIDGSLVAAQTAGAEDIMMLNNGCLCCTVRGDLVRMIGELVNKKKGRFDHIVIETTGLANPAPIIQTFYAEDVVFNDVKLDGVVTLVDAKHARQHLDEVKPKGIVNEAVQQIAYADRIIVNKIDLVKEPEVLSLVERIRGINHMANLKRAEYGKVDLDYVLGIGGFDLERIESAVAEKSHEDHAEHDHEHHEHENEHDHDHHHHHDHDHDHHAHDHTHDPGVSSVSIVCEGEMDLEKADMWLGNLLLEHSEDIYRMKGLLSVSGMPQRFVFQGVHDIFQGSPERMWEPNEPRINKIVFIGRNLNKEELDKGFKDCLLKK

SEQ ID NO: 53673 - protein, 450 aa, Zea Mays
MRRRSLFNEKAGLSNKGVDKASDHHPVNSTTPKCKTISGDNSKTLRTPPCALPGIGLHLNALAATATPKEKIVPQDIQSTINESSNLIGPAGSSPAPSEQNIINDDFTQTTDVATAEASSQGSPKKKRHKFDSGDGTSCKRCSCKKSKCLKLYCECFAAGVYCSEPCSCIGCMNNQSHTETVLSTRQQIESRNPLAFAPKVIHTSEPGLELRDFSNKTPASARHKRGCNCKKSSCLKKYCECFQGGVGCSISCRCEGCKNAFGKREGAAVLSIEEPKQGLEEKDVCVKEEKSEIEKQLVVYQTPDDAPAENVLTTPSMVQCRPLACRPPPSSKKSSKKPRSSTKLTGHPSRLCNLQAPPKTDTMLSPFENYAEMVLGDSTSDILKGNSSPQTSVKVVSPNKKRISPLRMGTGLSPICRSGRKLILKSIPSFPSLGGDVNNEDPETKLPAP

SEQ ID NO: 53674 - protein, 117 aa, Zea Mays
MGPWPYCPCFESVQKVAERALFLWNSNHIEGLIKHNSKVILPVVLPALERNTKGHWNQAVQSLSLNVRKIFMDYDPALFEECREKFEEEEAQEAGMRSRCEARWKRLEEIASSKEVK

SEQ ID NO: 53675 - protein, 107 aa, Zea Mays
MLVKKNNSTAMAAGVLPLASLNHISIVCRSVEASLRFYADVLGFVPIRRPGSFDFDGAWLFNYGIGVHLLQSEDPGSLPENKGEINPKDNHISFQCNAAVTQCIAKA

SEQ ID NO: 53676 - protein, 770 aa, Zea Mays
MVDLLKNVDLEYLLERYPLDKEVNWGDELSLGEQQRLGMARLFYHKPKFAILDECTSAVTTDMEERFCKKVRAMGTSCITISHRPALVAFHDIVLSLDGEGGWNVQHRRDDSSFSTEESDFSSSETDRKSDALTVQRAFMSRAKSNASLGSKDHPYCTEVIATSPEVEIEHPARTPRIPHLRCHPRPLPLRVAAMLKILVPRLFDKQGGQLLAVAVLVFSRTWISDRIASLNGTTVKFVLEQDKDAFIRLIGVSILQSGANSFVAPSLRTLTAKLALGWRIRMTNHMLRYYLKRNAFYKVFNMSGKSIDADQRLTLDVDKLTTDLAGLVTGMVKPLVDILWFTWRMKLLSGRRGVAILYAYMLLGLGFLRAISPDFGHLSGQEQELEGTFRFMHSRLRTHAESIAFFGGGSREKAMVEAKFVKLINHSKILLRKQWLYGIVDDFVTKQLPHNVTWGLSLLYALEHKGDRALTSTQGELAHALRFLASVVSQSFIAFGDILELHKKFLELSGGINRIFELEEFTRFAQRNTVVSPNAISAASKETISFHEVDIVTPSQKLLARKLSCDVVQGKSLLLTGPNGSGKSSIFRVLRDLWPTFSGRVTKPSEGMFHVPQRPYTSLGTLRDQIIYPLSREEAKIKVLSLHRSGNNSSASMLLDDHLKTILENVRLVYLLEREGWDSTPNWEDVLSLGEQQRLGMARLFFHHPKFGILDECTNATSVDVEEHLYRLATSMGITVITSSQRPALIPFHALELKLIDGEGNWELCAIQQ

SEQ ID NO: 53677 - protein, 127 aa, Zea Mays
MENPASVLVLPAQFTKLTFGNLYIRRAGPGSREITEEGRCDLDKRYVSDFPVYDGRGPDASLVARRSVCTASPFVLASPSTPSSSPILTALGRGAPLGDGVDSGAMFEHRPWRRRGCQGSLGNIRRI

SEQ ID NO: 53678 - protein, 62 aa, Zea Mays
MGTGDAHRPYAERLLLVRRSARGVDRCRPRRRPKPGGPRRPRQPSSARTVSACLWRAPRGAA

SEQ ID NO: 53679 - protein, 208 aa, Zea Mays
MEGDAETTGNGNPVQQRLQRRKQSNRESARRSRSRKAAHLNELEAQVAQLRVENSSLLRRLADVNQKFNEAAVDNRVLKADVETLRAKVKMAEDSVKRVTGMNTLFPAVSDMSSLSMPFNGSPSDSASDAAVPIQDDLNSYFANPSEIGGSNGYMPDIASSAQEDDDFVNGAQVAGKMGSTDSLQRVASLEHLQKRMCGGPASSGSTS

SEQ ID NO: 53680 - protein, 52 aa, Zea Mays
MIIWNCVHRQTSGNVNVTVYTHQSEVSLGPRITIVVYTTELLNNYNHRYIYN

SEQ ID NO: 53681 - protein, 286 aa, Zea Mays
MFRRALLSSVSPLHGTVRIPSPSYSPIQALLAQWSRYASVVSSSAPPPPPPPPSPPQGPSRSSGGGPTSSSLNPAEVAKFASIAETWWDSSGPFKPLHVMNPTRLSFIRSTLCRHFRRDPNSSKPLEGLKVIDVGCGGGILSEPLARMGATGTAIDAVDKNIKIASIHAASDPTTASIEYCCATAEGLVKEKRLFDAVISLEVIEHVANPLEFCESLSALTIPNGATVISTINRSMRAYATAIVAAEYILRWLPRGTHEWSKLVTPEELVLMLQKASVEEMAGFVY

SEQ ID NO: 53682 - protein, 391 aa, Zea Mays
MLGASRRSLSAAAAARSRVAAGAASAVSADAAASIPPRPASNGAPGVHQQQKRLLSVLVAPKVAGTSNVVSLKLMGGALTGRRYESSAAAVDSTDPPAEKHEYQAEVNRLMDLIVHSLYSNKEVFLRELVSNASDALDKLRYLSVTDPELLKDGPQLDIRIQTDKDNGIITITDSGIGMTKQELIDSLGTIASSGTAKFLKALKESQEAGMDNNLIGQFGVGFYSAFLVSEKVVVSTKSPKSDKQYVWEGQADSGSYTIREEKDPEQLIPRGTRLTLYLKCDDKGFAHPERIQKLLKTYSQFVSFPIYTWEEKGFTKEVEVDEDPAEAQKKGDDSAETKTEPKKKTKTVIEKYWDWELSNETQPIWVRFIFFLFIDIIMIVYACIFGNVNV

SEQ ID NO: 53683 - protein, 331 aa, Zea Mays
MSFAKLNVLHWHIIDEQSFPLEVPTYPNLWKGSYSKWERYTVEDAHDIVNYAKKRGINVMAEIDVPGHAESWGNGYPKLWPSPICTEPLDVSSDFTFEVIFGILSDMRKIFPFGLFHLGGDEVYTGCWNTTPHVRQWMDERKMTTKDAYKYFVLKAQELAIKLNWTPVNWEETFNSFEENLNPLTVVHNWLGPGVCPKVVAKGFRCIMSNQGVWYLDHLDVPWEDVYSGEPLAGISDREQQKLVLGGEVCMWGETADTSDVLQTIWPRAAAAAERLWSQLEAISAQDVETTVLSRLHRFRCLLNHRGVAAAPVTNYYARRPPVGPGSCFVQ

SEQ ID NO: 53684 - protein, 171 aa, Zea Mays
MEQYEKVEKIGEGTYGVVYKALDKATNETIALKKIRLEQEDEGVPSTAIREISLLKEMNHGNIVRLHDVVHSEKRIYLVFEYLDLDLKKFMDSCPEFAKNPTLIKSYLYQILHGVAYCHSHRVLHRDLKPQNLLIDRRTNALKLADFGLARAFGIPVRTFTHEYISMEVFF

SEQ ID NO: 53685 - protein, 79 aa, Zea Mays
MSQNVIGRTTHKTESLILYYHYHNSINVMGEPCREFVPRPNNGSKVMFEGIPYVYDDNMERVAGEIKRFEEETLGTVRT

SEQ ID NO: 53686 - protein, 989 aa, Zea Mays
MDHDDTDFQSQNFQLAGVGSSKFPSGLRPFALPKLDIEDQLQGHLRFDNLIDSEAFFSVQGHENSWIEVLSTGSSVVDFSSSAAESCSISKTNNVWSEATSTESVEMLLKSVGGNETTGNMDSNAHLQLIGMDSQTDQSSVHPKSSTSPTDSTVVPTEKDQSWSTHSRMTADLSNTESQLEHFVPFLLDKKAAQAADSVAEKCLTGEKLSSSNNTPGSCPTVGNYFGAGHDDNSLDKFNVPSAEVDSKKLNNESFPELAPLQNIYTDSYHFKKDIKESEAVVTPQDSKFCHINENKVEGGLQELQNLSCAGQSLGAVNLSSPPSNETLLSKSSDGLLEAITNPVKMLHRSDDTCHKVNITLQPSFLAVQHGTEGLKSSVHRSNELVVKEFSIGSNSLISHQSEADPRNSNPHPVSSVSPKSKITDATCVPEETNNTETNSTNTCYTYDESKHVVLEYNQGSVDKLKSGDMGEKATGEEIPAVSGSIEQMIENYHEENATGTSNNKVGLSDSIAPENCAADTLNASEEPNSPSLNHERSFEEHELPALGEEPKSTNLLLSTSGFQEKISASVISSSSGVMPTIVTDNVATSEDNNGCSIGVSSVDSSVLLDEKDLRTSTVNNEEPFKEGTKSALGDQENDGISPGSEQGGEMPAVPMDSNIAVYSDTVSATEKEKYKDHPNSLGSLTTGGTQDKSGNHPDALSLKCQTGRSSIHTDLIDPTTAPMLGIPTGKVAEKIVKTPLNASDDLNAHMQDIVLNHGTDCSPGTVTSQGKEGSSLLEPGNGICTGVTCGSPSVISCAESFPQGGGNGSNDLLDHTLCGQSEDPKDRGASADATQRSKQCCTRNMKSAPGSEETSAAGGDRSFSFEVGAPPNVAEKAHSSVWSPFHLKSTETVTENLQAGSSLKDTSDDSKKTSTIDACKEQLSERKVAESSGGSPPDNSNIGGSIKSRSSPPQQHPIPECSDLVNFPFTEAQHLQLRAQIFVYGALM

SEQ ID NO: 53687 - protein, 300 aa, Zea Mays
MEQAFKSMMTQAPPNSFGSNSPFPFGMPPQASPTAPSSFSYLEPRKGTSPQVSTVDVSATEVDAAGTSKEVDVTETPKPSKNFAFVDVSPEDLQQKDLQSSLEMVDVKHDSTESESKEDTEEKAPRNGATFKLNEDAARGPTESSQSGPMLSVETIEKMMEDPAVQKMVYPYLPEEMRNPDSFKWMLQNPMYRQQLQDMLKNMGGSPDQWDNRMLDHLKNFDLSSPEVRQQFAQVGMTPEEVVSKIMANPDVAVAFQNPKIQTAIMDCSQNPLNIVKYQNDKEVMDVFMKISQIFPQING

SEQ ID NO: 53688 - protein, 313 aa, Zea Mays
MNGTHPWASMSGGPCSNLGYARDMNGNVPISTTNSSGPSIGVSSLVTDANSSLSGGAQLQPSTSMNGDSLMRVPASPISFSSNNISGSSVIDGCIMQQSPPQEQVQKQRSSSVTSQPVIDAGGALHAQKKSRIDVCQGGITEQQLIQQLLHGQNSLHYQGQQNPQLQALMQHHKLAQLQQRQQQHPFSQMQQPQVGIPRQPQLRPPLAQTGMQLGGPVRSPIESGICSRRILQYLYHKRHRPENNPITYWRKLVEEYFAPRARERWCVSSYENRGNSSAAAPQKALDTWRCGICNTHGGKGYDNVLGVLFTTP

SEQ ID NO: 53689 - protein, 214 aa, Zea Mays
MPTEWIHSPWAAPNSILQVAGVELGFNYPKPIVELHMARECLDDAISTMWQLDTAAKLAELDGEVVDDNLNNIRNFDIPKVVLNKKLSPSTSSMEHRVLSTNGKDEKSQPTEVKALYKQIIRDDMMNDSNMDDTCSTANLKVTRKRSSSDSAFNVPSCSSSLVMESRIHHNEPSSVLYSGYFQKTADRDGTSKVEDNDSEDSGTSISRPSKKAA

SEQ ID NO: 53690 - protein, 218 aa, Zea Mays
MVDFVRRLASALLKCCDLDIPNRPKGLEDPERLARETVFNVNEIEALYELFKKISSAVVDDGLINKEEFQLALFKTNRKDSMFADRVFDLFDTKHNGILEFEEFARALSVFHPSAPIDFKIDFAFKLYDLKQQGFIEKQEVKQMVVATLAESGMNLSDDIIEGIIDKTFEEADTKHDGKIDKEEWRSLVLRHPSLLKNMTLPYLRFDGVTSFIETLFL

SEQ ID NO: 53691 - protein, 527 aa, Zea Mays
MAGTPQFQSPHFPPPSPPLGPTFVPPAMNSGGRGGKRRGPPPLAPSGAAAKRVNPSPGTPHVPPPASAAAAVEEDMMDEDVFLDESILAEDEAALLMLQRDEALASRLARWKRPAIPTDLAAGCSRTVAFQQLEIDYVIGESHKELLPSSSGSAAILRIFGVTREGHSLCCQVHGFEPYFYIGCPSGMGPDDISRFHQTLEGRMKESNRSSNVPRFVKRVELVQKQTIMHYQTQQSQPFLKIVVALPTMVASCRGILERGITIEGLGSKSFLTYESNILFALRFMIDCNIVGGNWIELPAGKYRKAACIMSYCQLELDCLYSDLVSHAAEGEYSKMAPFRILSFDIECAGRKGHFPEPTHDPVIQIANLVTHQGEDQPFVRNVMTLKSCSPIVGVEVMSFDAERDILLAWRDFIREVDPDIIIGYNICKFDMPYLIERAEVLKIAEFPILGRIRNSRVRVRDTTFSSRQYGVRESKDVTIEGRVQFDLLQAMQRDYKLSSYSLNSVSAHFLGEQGAAKESPLAPTIS

SEQ ID NO: 53692 - protein, 384 aa, Zea Mays
MYNVSSIFGIQNGYKGFYSSNYLPLTPKSVNDIHKRGGTVLGTSRGGHDTKKIVDNIQDRGINQVYIIGGDGTQKGAYEIFKEIRKRGLKVSVAGVPKTIDNDIAIIDKSFGFDTAVEEAQRAIDSAHVEACSAENGIGLVKLMGRYSGFIAMYATLASRDVDCCLIPESPFYLDGEGGLLQYVEKRLKENKHMVIVVAEGAGQDLIAKSLATSDQQDASGNKLLLDIGLWLTHKIKDYFKSKKMEMTIKYIDPTYMVRAIPSNASDNVYCTLLAHSAIHGAMAGYSFTVGMVNGRHTYIPFYRVTSTRNKVKVTDRMWARLLSSTNQPSFLSQKDIDEASEADRLANRPPLPTGASSRVLLCNRLVFYLSSPICTTVHFPLAP

SEQ ID NO: 53693 - protein, 62 aa, Zea Mays
MAALAFRAEKTTSSARSLCSPGTESLGARWWSRRILSADMFWCTTGGLLPFLLWRVGMIPFA

SEQ ID NO: 53694 - protein, 114 aa, Zea Mays
MLKRNTSVKLAPQRWQDNAGDGVFDMIMTFEERVFDLVVEDMNNREPRLMKCVLIINMDVKDNHEEAGVGAKLAVELCQKLEAIDGDWEDIIDDLITAFEKQHKRRLAYSISFY

SEQ ID NO: 53695 - protein, 245 aa, Zea Mays
MRFSCSTGDAMGMNMVSKGVQNVLDYLQADFPDMDVISISGNFCSDKKSAAVNWIDGRGKSVVCEAVIKEEVVKKVLKTNVQALVELNVIKNLAGSAVAGALGGFNAHASNIVAAIFIATGQDPAQNVESSQCITMLEAINDGKDLHISVTMPSIEVGTVGGGTQLASQSACLDLLGVKGANRESPGSNARLLATVVAGAVLAGELSLISAQAAGHLVKSHMKYNRSSKDMSKTLAEETDKPKKC

SEQ ID NO: 53696 - protein, 301 aa, Zea Mays
MVNAYPVYGDKGKAKDPFFGLTMGSGSQSSYDIFRWFCVEAGSSSSPKVLLIHGLPSQAYSYRNVMPVLADKYHAIAFDWLGFGFSDKPQPKYGFDYTLDEYTSSLEFLVNAVAPDKLSIVVQGYFAPVAVKYASEHQDKLNHLVLVNPPITDKHLNLPSTLASFSNFLLGEIFSQDPLRASDKVLTSCGPYMMKEEDAMVYRRPYLVSGSSGFALNAISKAMKKDLKAYIESMRSILRSSSWKTKTTVCWGMRDRWLSYDGVEEFFGGLNQKIVELPMAGHHVQEDRGEELGNIIKSILR

SEQ ID NO: 53697 - protein, 89 aa, Zea Mays
MKPATVALLILLNMMCIVAYFDHGTMAEETTLLANSYGRNEGTKGIHHGRKLMDNSIGSNQLFLTEIRLLDKKTRPGGNYTPPPVIPAP

SEQ ID NO: 53698 - protein, 346 aa, Zea Mays
MDLVNSTGDESLLFQALGLNDELQRVVQRHDDIAKGIPPGTGAPLPASGNVNQGTAPPRPTAVSFSPLLNVHEDDEPEDEFSVLSRRSARDGAVAQNNVPSAPRNERSYPSPLLPPPPASKRPVYTEASSVDYLSGDSYKSEKVSDDFINPTAPANISTSSHSKAEAHPPPSYGGRPDRVSDDFINPTAPSFSAPSRPTNEEPARPSVKRQESLPDDDFINPTALPGFSSSSATKESGEDLPKAPWEAQAAAGSLPPPPARYGQRQQYFEQNVYSGGSNEGGYNGLTTQTEGLSLNPRSSENERSAARPAASRPAKPEDSLFKDLVDFAKTKPSSPSKPANSRRTR

SEQ ID NO: 53699 - protein, 350 aa, Zea Mays
MSICKFFLQQRCRFGSNCRMSHGIVMPSKALKRFTPTRWEQSLVGSSILATSGYNSGLWRRAELESWDDNLKIGQVVFQDDGSSASLPSDSLSVSEYADMSDEDEGSLSDEESEFSDDADQEDGSVHQGLGLLEFTNFSGIQTDTMIFAKWEHHTRGVASKMMAKMGYREGMGLGVSGQGMLDPIPVKVLPPKQSLDHALASSEADGGSGKKRSRGGKRKREKKFAEQARAAKAEEAERSVFNFINSHLVSQEGSTTKVRKGSSVETNGLAKKEDRRSLVAYGEEVKELRIRVEKLEEMKNRNCKDKAFFEAASRKLEETRKALADAEATHASATSAVTRKEKEKKWLKF

SEQ ID NO: 53700 - protein, 516 aa, Zea Mays
MGPIQVRYADGERERHGAIEHKLFVASLNKQATPKEIEEIFAPYGHVEDVYIMRDSVKQSRGCGFVKFSSKEAAVEAMNALSGTYTMRGCEQPLIIRFADPKRPRPGESRGRPAFGGPGFSPRSDAALVIRPTANLDESRGQHMLPESWRPSSPRPMAPNQYNNFGSDNPLALSGGTVTSADTATFRPPMFPGNGSLSNQTAVPTSSHMGMNTPMVQEHHLRGQQIPSLQKPPGPPQNFAVQLQNAQPGQPLQGHIPQIGQLQAPQSTGPVSFGQNISSMQLPGQPPASQPLMQRNASLGALHAPPSGQSNPMQAVPGQQQLPTSVAPQMLQQSMQQMPSQAPQLLLQQQAALQSSYQSSQQAIYQLQQQLQLMQQQSNLNQQPSAQVGSSAVSSTCNWTEHTSPEGFKYYYNSITRESKWEKPEEYVLYEQQQQKLLLLQQHQQNIAVQQLQSPPQGQSLPSMQPIQQLPQAQGQTQMHMKQQELNYSQFQAAGSIDPNRIQQGIPAAQERAWKN

SEQ ID NO: 53701 - protein, 802 aa, Zea Mays
MNYIECINVDFKSTRKESFYDLQLDVKGCQDVYASFDKYVEVEQLEGDNKYHADKHGLQDAKKGVLFIDFPPVLQLQLKRFEYDFMRDTMVKINDRYEFPLQLDLDRDDGKYLSPDADRNVRNLYTLHSVLVHSGGVHGGHYYAFIRPTLSDQWFKFDDERVTKEDAKRALEEQYGGEEELPQTNPGLNNTPFKFTKYSNAYMLVYIRESDKDKIICNVDEKDIAEHLRIRLEKDREEKERRKKEKAEAHLYTIIKVARDDDLKTQIGKDIYFDLVDHDKVPSFRIQKQMAFAQFKEEVAKEFGIPTQFQRFWLWAKRQNHTYRPNRPLCPQDEAHTVGQLKELVNKAHNAELKLFLEVELGLDLKPLPLPDKTREDIFLLFKLYEPEKEQLRYVGRLFVKASGRPQDILPKLKMLAGFSQDDDIELYEEIKFEPNVMCEYIDNRLLFRSCQLEDGDIICFQKSSKADSADRYRFPDVPSFLTYIRNRQVVHFRSLEKPKEDDFFLEMSKIFTYDQVVEKVAEKLGVDDPSKIRLTSHNCYSQQPKPQPIKYRGVERLLDMLIHYNQTSDILYYEVLDIPLPELQALKTLKVTYHHATKDEVSVHSIRLPKNSTVGDVLNDIKTKVELSHPNAELRLLEVFYHKIYKVFAPNEKIENINDQYWTLRAEEVPDEEKNLGPFDRLIHVYHFTKDTQNQTQVQNFGEPFFMVIREDETLSSIKERIQRKLKVPDEDFSKWKFAYISLGRPDYFEDSDTVALKFQRNMYGAWEQYLGLEHPDTAPRKAHTINQNRHSFERPVKIYN

SEQ ID NO: 53702 - protein, 238 aa, Zea Mays
MMCSVFVASWTGVIKYHGPRPSTRPHQVFVANHTSMIDFIILEQMTAFAVIMQKHPGWVGFIQKTILESVGCIWFNRNDLRDREVTARKLRDHVQHPDKNPLLIFPEGTCVNNQYTVMFKKGAFELGCAVCPIAIKYNKIFVDAFWNSKKQSFTMHLVRLMTSWAVVCDVWYLEPQYLREGETAIAFAERVRDMIAARAGLKKVPWDGYLKHNRPSPKHTEEKQRIFAESVLRRLEEK

SEQ ID NO: 53703 - protein, 139 aa, Zea Mays
MLLYWAAYGSFSIAEVFADKLLSSVPLYYHVKFAILVWLQFPSNSGSKHVYKRYLRPFFLKHQAKIDRFLNILSKELTKFVSSHEDEIRFIENMAIRGATTANHIVNGLDQPEETQAVNTIEGPNTTVTEEAGVSGTET

SEQ ID NO: 53704 - protein, 92 aa, Zea Mays
MKVCTVIIIAQCLLWALWAVMTRHPSRLKIIFVAIGGAAAVLLEASDIPPRWGYVDGRAICLAVAIPLSYLWWSFAKEDAEMRTSAILKKAR

SEQ ID NO: 53705 - protein, 193 aa, Zea Mays
MEARNRRTQKKPSEEANQVLQMQAWQEEVERARQSQREAEAKISSLEAELQKMRVEMAGMRRDAEHYSRQEHVELEKRYRELTDLLYHKQTQLESMASEKAGLEFQLEKSLKQFREVQVEAERSKATRRSASSWEEDTDIKALEPLPLHHRHMATANHQLQKAAKLLDTGAVRATRFLWRHPVARVSVLFYLA

SEQ ID NO: 53706 - protein, 409 aa, Zea Mays
MKSELCVDLELNQVIDRNVGDLSGGELQRFAIAVVAVQNAEIYMFDEPSSYLDVKQRLKAAQVVRSLLRPNSYVIVVEHDLSVLDYLSDFICCLYGKPGAYGVVTLPFSVREGINIFLAGFVPTENLRFRDESLTFKIAETQENAEEIETYQRYKYPTMSKTQGNFKLTVVEGEFTDSQIVVMLGENGTGKTTFIRMLAGLLKPDTVEGTDIEIPEFNVSYKPQKISPKFQNTVRHLLHQKIRDSYMHPQFVSDVMKPLQIEQLMDQEVVNLSGGELQRVAICLCLGKPADIYLIDEPSAYLDSEQRIVASKVIKRFILHAKKTAFIVEHDFIMATYLADKVIVYEGRPSIDCTANAPQSLVSGMNKFLSHLDITFRRDPTNYRPRINKLESTKDREQKSAGSYYYLDD

SEQ ID NO: 53707 - protein, 70 aa, Zea Mays
MEVPVQAHQWRHTAAFQEDTSHKVSKSTGWHWPQFSTECNWMEVEAFYLPGGRWCVSDKKQVKTQLVPRV

SEQ ID NO: 53708 - protein, 52 aa, Zea Mays
METKILEAAVIARLGIDVYITKAGTEHSLRALKGDVSTDSEDWLGTIIRSSK

SEQ ID NO: 53709 - protein, 924 aa, Zea Mays
MGSVVGPPSSLSVVSYASIHTPQPRHSRCPPPRARGGLSPCAPPPSPHEAPEKDIKRTPMAMTPHASAATVAVTPALRFPHTLSATRKKYADTVARINSMELEVSALSDADLRARTAALQDRARSGESLDSLLPEAFAVVREASKRVLGLRPFDVQLIGGMVLHKGEIAEMKTGEGKTLVAILPAYLNALSGKGVHVVTVNDYLARRDCEWVGQVPRFLGLQVGLIQQNMTPEQRRENYSYDITYVTNSELGFDYLRDNLAMTVDELVLRNFNYCVIDEVDSILIDEARTPLIISGLAEKPSDRYYKAAKIAEAFERDIHYTVDEKQRNVLLTEEGYADAEEILDIDDLYDPREQWASYILNAIKAKELFLKDVNYIVRSKEVLIVDEFTGRVMAGRRWSDGLHQAIEAKEGVPIQNETITLASISYQNFFLQFPKLCGMTGTAATETQEFESIYKLKVTVVPTNKPMIRKDDSDVVFRATNGKWRAVLVEISRMNKVGRPVLVGTTSVEQSESLSKQLREAGIPHEVLNAKPENVEREAEIVAQSGRLGAVTIATNMAGRGTDIILGGNAEFMARLKLREILMPRVVNPIDGVIVSKKQMPPRKTWKTNESLFPCELSKETLSSVKDTVEMAVKEWGDKSLTELEAEERLSYSCEKGPTRDEVIANLRNAFVKIADEYKVYTEEEKQKVITVGGLHVVGTERHESRRIDNQLRGRSGRQGDPGSSRFFLSLEDNIFRIFGGDRIQGLMQAFRVEDLPIESKMLTRALDEAQRKVENYFFDIRKQLFEYDEVLNSQRDRVYAERRRALASDSLQSLIVEYAELTMDDILGANIGPDTPKENWDLNKLIAKLQQYCHLLDDLTPELLEGKSSSYDDLREYLRKRGREAYFQKTVSYFSFSFHGYCFFAWFKGFKKFNNNNINIAF

SEQ ID NO: 53710 - protein, 71 aa, Zea Mays
MLTIGTTHGSSCMCTGYAPLLGPCLLDGYLGWCSYHRHLSPRPRKHDYSFMDAGLEEIRNRGRSHKLMCCT

SEQ ID NO: 53711 - protein, 60 aa, Zea Mays
MRCHRKIRFNTKFYCLDVTVLEFGIEWSNFMQYSSELSGLIPCNIELICNGRGVFSYSSI

SEQ ID NO: 53712 - protein, 459 aa, Zea Mays
MHAVDTFSGIRGSMSNYYDDYDDIDGMEDDYDMDDPIDDMVDEQQGIRDSDVEDNDYGQPNDKIPDTSSADARKGRDIQGIPWEQINITRKKYRQSRLEQYKNYENVPNSGEEAMKDCKPTEKGGIYYEFRRNTRSVKSTILHFQLRNLVWATSKHDIYLVSHYSIRHWSALSGVDTELINVQGHVAPREKHAGSLLEGFYQTQVSTLTVKDNLLVAGGFQGELICKHLDQEGISFCCRTTYDDNAITNAVEIFNTSSGAVHFMASNNDSGVRYYDMERFQLFKHFQFEWPVNHASLSPDRKVVVIVGDDPDGLLIDANSGKTVHSIKGHRDYSFASAWSPDGRTFATGNQDKTCRIWDVRNLSKSVHVLRGNLGAIRSIRFTSDGQFMSMAEPADFVHIYDVKSDYNKRQELDFFGEISGTSFSPDTDTLFVGVWDRMYGSLLQFGRLYNYSYLDSLF

SEQ ID NO: 53713 - protein, 601 aa, Zea Mays
MSQMQKQYYRALLQKDLEVINAGGERKRLLNIAMQLRKCCNHPYLFQGAEPGPPYTTGEHLIENAGKMVLLDKLLPKLKERDSRVLIFSQMTRLLDILEDYLMYRGYQYCRIDGNTGGEDRDASIEAFNSPGSEKFVFLLSTRAGGLGINLATADVVVLYDSDWNPQADLQAQDRAHRIGQKKEVQVFRFCTEYTIEEKVIERAYKKLALDALVIQQGRLAEQKTVNKDDLLQMVRFGAEMVFSSKDSTITDEDIDRIIAKGEETTAELDAKMKKFTEDAIKFKMDDNAELYDFDDEKDENKVDFKKLVSDNWIEPPRRERKRNYSESDYFKQALRQGAPAKPREPRIPRMPHLHDFQFFNNQRLNELYEKEVRYLMQANQKKDTIDGEDEDQLEPLTAEEQEEKEQLLEEGFASWTRRDFNTFIRACEKYGRNDIKSISSEMEGKTEEEVQRYARVFKERYKELSDYDRIIKNIERGEARISRKDEIMKAIGKKLDRYKNPWLELKIQYGQNKGKFYNEECDRFMLCMVHKLGYGNWDELKAAFRMSPLFRFDWFVKSRTTQELARRCDTLIRLVEKENQEYDEQERQARKEKRLAKGLQ

SEQ ID NO: 53714 - protein, 1114 aa, Zea Mays
MEGAEALFPGDGCGGDPMDFSWTADGEKHPDPAACASPGRDDEATSASTPVPSPQEMAESMILVPGPRVVMSGLRLADCRSDDCVLFINAGGGAIESCDPCVKVSGDSFFEGGDVIETNESIAEGGDCPFIYHSARYGSFSYKFDGLAPGAYFLDLHFAEILYTCGPKGISMFDVLVQDEKILSQLDVYAVVGGNRALQVRDIRVTVEMNGAVMINFKGVRGSPMVCGICIRKAPLLSANSVTNGNVLCKRCSSDIDVSTTQTRTSKLISKYEKQIEELTSQCTMKSNECYMAWSSVDTTNVELGRLKIELHQKGAEMENLVQTLGRESDQLRNVSRKYKNDKKLWVAAISNLERKIKAMKQEQQLLSLEAHDCANAIPDLSKMIGAVKGLVAQCEDLKLKYYEEMDKRKKLHNIVQETKGNIRVFCRCRPLSKDEVSSGQKCVVDFDGSSDGDIVITNGGTKKTFKFDRVFTPKDDQDIVYADASPLVTSVLDGYNVCIFAYGQTGTGKTFTMEGTESNRGVNYRTLEELFNIAEERKESVTYDLSVSVLEVYNEQIRDLLATSPSKKLEIKPNSEGQNHVPGLVEAKIENINEVWKVLQTGSNARAVGSNNVNEHSSRSHCMLCITVRAKNQLNGECTSSKLWLVDLAGSERLAKTDVQGERLKEAQNINRSLSALGDVISALATKNSHIPYRNSKLTHLLQDSLGGDSKALMFVQISPSDNDVSETLSSLNFASRVRRIELGPAKKHVDTAELQKTKQTLERAKQELRLKDDSLRKLEENLQNLESKAKGKEQLCKNLQEKVKELEGQLDSKAQCQITSEKQQRQLSGKLKEKEEMCNVLQQKIADLECKLRQPQQSESEVALLKQTIQELEVKLKEQQHDRSAMELSIKEMELRFKEEEHQRSVAELKIKELELKLKEQEHQRSVAELKAREIGHELLETQRTESMLQIKLRELESKAKEQDTNMTAVVESRVVVATPVNAKVMSEKENHVLRISNSLNKQLAHVENTPEAPEAACNERKRKGEARNASIGGGEQENTNNGGRKRSLPAEREARLKRKSTEPPPQVKNLVRSTASSRAAAKAAAAAAPSSRAGGAKQQPGGGNKTRGWVR

SEQ ID NO: 53715 - protein, 217 aa, Zea Mays
MRSKGLQPGEELLPEGGSGDDSAEPANPVASEDIVTQLASMGFNYLHCQKAAINTSNTGVEEAMNWLLSHMDDPDINDPISKDSRAYEPSVDEASVQTLISFGFQEDIAIKALKASGGNIEKATDWIFSHPEASTSASADSSTSNVNADDTYIPDGSGRYKLMAFVSHMGTSTHCGHYVAHVLKDGRWTIFNDSKVAVSVDLPKEMGYLYFFQRISN

SEQ ID NO: 53716 - protein, 118 aa, Zea Mays
MIADVFEDKSTYAEPPSRFEAGTPAIGEAIGLGAAIDYLSCIGMEQIHEYEKELGTYLYESLLSVPNVQIYGPAPSQTVHRAPLCSFNIENVHPTDIAEILDLQRSDSVGASLRADLA

SEQ ID NO: 53717 - protein, 405 aa, Zea Mays
MSRGSAASVFLGVDVGTGSARAGLFDENGKLLGSASSPIQIWKEKDCIEQSSTDIWHAVCAAVKSACSLANVAPEDVAGLGFAATCSLVAVDADGSPVSVSLSGDTRRNIIVWMDHRAVNQAERINATNSPVLQYCGGGVSPEMQAPKLLWMKENLLDSWSMVCRWMDLSDWLAYRATGDDTRSLCTTVCKWTYLGHAHMKQWKESDSRDMEACGWDNVFWEEIGLGDLLEGNCAKIGRSVAFPGHALGSGLTPTAAKELGLLPGTPVGTSLIDAHAGGVGVMESIPDAGSKAVSDEHAICHRMVLVCGTSTCHMAVSKDRLFIPGVWGPFWSAMIPEFWLTEGGQSATGALLDYIIENHVASPLLSNHAASQSISIFELLNKMLLSMSQEQNSPFLSALTQDTQ

SEQ ID NO: 53718 - protein, 54 aa, Zea Mays
MMLIPIHLKALANQLPTLRVLHPHQPILNMELHIQPPRPHLRPLMTTRSVLSVL

SEQ ID NO: 53719 - protein, 1742 aa, Zea Mays
MAPKSRRGKAKGEKKKKDEKVLPVAIDITVNLPDQSHVILKGISTDRIIDVRRLLCVNTATCAITNYSLTHEMRDGALKDAADIATLKPCTLTLVEEEYSEESAVEHVRRLLDIVACTTCFGPAPPPPPPPSPKDADAAKETSSSSSTSKAVASASSGGRRTASPPPASPSSAAAKESSAAKEAAAKESAAAVELEAEMSGACPRLGAFYEFFSLANLTPPLQFVRRVLQPRQEEQPSDDHLFFLEAKLCSGKFLVVEARRKGFFSLGKQRVLCHNLVDLLRHLSRAFDNAYEDLMKAFLERNKFGNFPYGFRANTWLVPPIAAQSPSTFPPLPAEDETWGGSGGGWGRDGKSDMVPWADEFLYLTSMPCKTAEERELRDRRAFLLHSLFVDVAIFRAIAAVRHVMEGTELSASTNIDEVLYSETVGHFSITVTRDSSDASCKMDTKIDGNRATGMDSKDLAERNLLKGITADENTAAHDVDSLGIINLRYCGYVAVAKVDNIDKTKVNASIKPMNIADQPEGGAHALNINSLRMLLNEATSTGEKKISNLSQNHRQEELIAAQTFVEKLLKESLQKLEEEENVKHSFMRWELGACWVQHLQDQKNSDKDKKQGGEKDKKKTLDKSKEPKIEGLGKPLKALKNAKNVDSADLGSSAGPKSSAESQKDKPSDVKLPQGESSASENENLLKDLLPESAFTRLKESETGLHQKSPPELIEMALKYYDEVALPKLVADFGSLELSPVDGRTLTDFMHTRGLQMRSLGRVVKLSEKLSHVQSLCVHEMIVRAFKHIVRSVIAAISDIRQLALTIAAALNLLLGVPESDVSGSSPNVHPLVWRWLVIFLKKRYEFELTEKHYHDVRKYAVLRGLCHKVGIDFAPRDFIMDCSFPFHKQDIISLVPVHKQVACSSADGRQLLESSKTALDKGKLEDAVNYGTKALSKLITVCGPYHRMTAGAYSLLAVVLYHTGDFNQATIYQQKALDINERELGLDHPDTMKSYGDLAVFYYRLQHTELALKYVKRALYLLHLTCGPSHPNTAATYINVAMMEEGLGNVHVALRYLHKALKCNQKLLGPDHIQTAASYHAIAIALSLMEAYSLSVQHEQTTLQILRAKLGPDDLRTQDAAAWLEYFESKVIEQQEAARNGTRKPDASIASKGHLSVSDLLDYINPDQESKGRDSEFGKRRYSSIKVLSHSNESSNGASPEISPRDSNPIIDEEQQVKEPSKDDSTKSISEAEVKQTPESFEHPAPSEPQLEIVEANINAPKEVIEVENSEPEDGWQPVQRPKSAGGSGKQMKHYRPTTRKVYDPDSHDPTYTSQYKARNSYSNNRYYFLRKRTVVPTTYTDPQQHVKVQTFGARFGRKIYKAVTYRVKPATATTEVLDTFKSTEQMSGKAESQVANSQAHNPTSTDHKGSESHGTLVASSGNAPSYKDVALARPGTIAKTQIQKPRDDVPQNQPSLGQIIAQEMKDSLVDSLQVEQGPVSANTNNSKEETNVLGKLQKLEETKFSEGELEIENLCKDRVQDLPIPKAEESGIGSEPVNSKKDANVLSNTSQELSSSSNDGAAIEFSESTGSVKTEQTEKSDTDFFEALPRSIENISVSASTTNTGSLGGDGSEKSKPNLVLSNIDLREMPNKKLSASAPPFNPSPPSVLSPLSGNVGLPPPGAIPGVAPWPVNVSLHPGHSTMVPSGPPLCTSPHHLYPPAPRSPNLMHPVPFIYPPYSQPQVVPNTTFPMNTNIFRP

SEQ ID NO: 53720 - protein, 330 aa, Zea Mays
MLPSTPFNLKLCFCATWLTLIVPTSMTAYLYLYSHGEVSLAASQPVLLYAILLMILLSPFDMFYLSSRFYFLRTVWRIILPLQAITFPDFFLADIFTSMSKVFSDLERSVCRMVNRQVATIAWFEADSICGSHSVAIPLVLVFPYLWRFFQCLRQYKDTKEKTCLFNALKYSTAIPVIFLSALKYHVYPDQWVGFYRPLWLISSVVNSLYSFYWDIKRDWDLSILTRIFMFKNPSIWTNLLYGQNWVFYWVLGSNLVLRCTWTYKLSAHLRHNYLTVFTIAALEILRRWQWVFFRVENEWNKMTAKQNLEMSSDMPSEGDRLLDSSNHTV

SEQ ID NO: 53721 - protein, 107 aa, Zea Mays
MYLVVSFISETRFLAMNMEDELEETEIEGFDAQTQTLFCQNAINDLLIQVTANSVRLVSCTSRELVDQWNAPAGFSVNVASANASQPPFGSAPAPENLVELMEHFIR

SEQ ID NO: 53722 - protein, 211 aa, Zea Mays
MTTASSEAIDLISSLCSWDPSKRPKATEVLQHTFFQGCTCVPLPVRRKASSLPKTPPCVGSKRISENSVARRFSTGTLSTMKSHSNAPAKSNGLSRTGVQRKLHLDRQPPQKSTKPTENSNKLATNRVPARNSPGNPVLRHSRSLPETGRRAVQKVSSITEKLSQMSVTSRTRSAVKPAAPTMKAGHGKSDFLGKSDDIPPAKRLTRKLVS

SEQ ID NO: 53723 - protein, 89 aa, Zea Mays
MLKTELRNMERSQKREGIDMTYLKNVILKLLETGEVGALLPVVGTLLQFSPDELKKCQQGVLSSVVSSQATAVSDGTTTQNSFFARFSF

SEQ ID NO: 53724 - protein, 213 aa, Zea Mays
MSYTFPTQPIVAPAKKKDARKDAADAAERHCSPLPSREHGRAAVAVDGDRGSQYALKWAADNILSRARPFFLVHVRRKPTFLQGPGGKQFAISHVQDDIPADLHAQMDLQAKDLMIPFQCFCSRRGGNYPGRNRRVEGDRRFRRHQQGRQVSAGLSIQERLYKDDMEAGRADIRDEVRAELLFGLRDSEREDLVLQARHLRERDKRQQGRSGT

SEQ ID NO: 53725 - protein, 456 aa, Zea Mays
MVNGGRVSSWACINFSRNVQDGAARSFCHDLALMCQVSGMDFALEPVLPPVYARPEHVERALKRLYQDAMSILRPQGRELDLLMVILPDNNGSLYGDLKRICETDLGLVSQCCLTKHVFKANKHQYLANVALKINVKVGGRNTVLVDALARRIPLVSDVATIIFGADVTHPHPGEDSSPSIAAVVASQDWPEVTKYAGLVSAQTHRQELIQDLFNVRQDPQRGAVSGGMIRELLISFWRATGQKPKRIIFYRDGVSEGQFYQVLLYELDAIRKACASLESDYQPPVTFVVVQKRHHTRLFVNNHNDQRAADRSGNILPGTVVDSKICHPTEFDFYLCSHAGIQGTSRPAHYHVLWDENKFTADGLQTLTNNLCYTYARCTRSVSIVPPAYYAHLAAFRARFYMEPDTSDSGSVASGATTSRGPPPGARNTRAGAANVAVRPLPALKENVKRVMFYC

SEQ ID NO: 53726 - protein, 83 aa, Zea Mays
MLWLVQHCQLLSRKLQNMACWSSFFSGHESAVSFHGSPESSVRAHSSLISIRFYKKNHSNVRPPSETTAAPDNVETVSRLLEP

SEQ ID NO: 53727 - protein, 586 aa, Zea Mays
MKTFQDVTARLEQALAGISFDELNISDEVREQVELVHTQFKRAKERSDSSDDDLFNELMSLCNSSSSDSVDPDTLRRLSEKLQLVTIYDLNHESLTLHEMASGGDPGAVVEKMSMLLKRIKDFVQTEDPEMGAQASTATISTKDNSACPVIPDDFRCPISLDLMKDPVIVATGQTYERGYIEMWLEAGHDTCPKTQQKLANKSLTPNYVLRSLITQWCEANGIEPPKRPAQLRDAPLSCSAAEHSNVLELLQKLSSQNLEDQRGSAGMLRQLAKRSAENRACIGDAGAIPILVSLLSTTDVSTQEHVVTALLNLSIYEENKARIISSGAVPGIVHVLKRGSMEARENSAATLFSLSIVDENKVTIGCSGAIPALVQLLSNGSQRGKKDAATALFNLCIYQGNKGKAVRAGLVPILLELLMETESGMVDEALAILAILSGHPEGKTAIGAASAIPVLVGVIRNGSPRNKENAAAVMVHLCSGEQQQQHLAEAQEQGIVSLLEELAESGTDRGKRKAVQLLERMNRFLKQQSQAEAEAEAMAQAHAQAQAQAQAQAQAQPQILVQAQAHADMQAERSLLPTSSDISDR

SEQ ID NO: 53728 - protein, 90 aa, Zea Mays
MKKRSVRRLLEHGWITRPGDRHGTPMQRGGCTTLTAAKGRGSKGESCWMRRWWWVVRRSGDAAGLSGTGCKWRGRVTGPCFLGRKNITIS

SEQ ID NO: 53729 - protein, 377 aa, Zea Mays
MIQSNMFKYLGILLEGRERFEEEALAVPNHPSSVGDDPQQDESKSSSSNSCIYSINAKLKKFSDWLLDIIATGDLDTFFPAATREYAPVVDELWKDPAIQATYKRKDELHFLPDAAEYFLSRAVEVSSNEYEPSEKDVIYAEGVTQGNGLAFIDFTLDDRSPMSESFGDNHDAYPQQPVNKYQLIRVSAKGMNEGCKWVEMFEDVSMVIFSVALSDYDQLGAPASGSSRTLVNKMIQSRDLFEATIRQPCFRDTPFLLLLNKYDAFEEKIGRSPLSSCEWFGDFCPLRTHHNSQSLAQQAFYYVAIKFKDLYAASTGRKLFVWQTRARDRPTVDEAFRYVREVLRWEDERGVAGYCPDESFYSTTELSSSRLIAAAQ

SEQ ID NO: 53730 - protein, 129 aa, Zea Mays
MTTDGQLREWVSDKLMSLLGYSKSVVVQYVIRLAKECSSPGDLVGKLVEFGFSSSAETRTFASDVYAKVPRRASGISNYQKQEREAAKLVQKQSTYKLLVNEDDNTDNQTLASQKTSTNPSSKSRKHFR

SEQ ID NO: 53731 - protein, 145 aa, Zea Mays
MLVLGEKAFEKFGKWFISLRFSDQLAGSYKKVLAFKFVLPDASNMSEMTRLVALVPYYIDLVGRYKLSSHARSKTDGARTKAAQEAFRELQSARQEALQRKKAEKKKLIEEADAKLSAESLRKKEEKERARQMKKSGPKVKMLRS

SEQ ID NO: 53732 - protein, 407 aa, Zea Mays
MKVHKSLKLWSFYVDLEESLGTLDSTRAVYERILDLRIATPQIILNYAYLLEEHKYFEDAFKVYERGVKIFKYPHVKAIWVTYLTKFVHRYKRSKLERARELFHEAVQQAPAEEKKPLYLQWAKLEEDYGLAKRAMNVYDEAVRAVPNSEKMAMYEIYIARAAELFGVPRTRQIYEQAIESGLPDRDVLTMCMKFAELERSLGEIDRSRAIYVHASNYADPNNPDFWKKWNDFEIQHGNEDTFREMLRIKRTVAASRSQTHFILPEYLMQRDQKLNLDEAVDTLKRAGVPEDEMAALERQLATGPSTAPPAAPSTAPASANRMMNFVSAGVEAQVESSRQQAANNEDIELPDESDDEEPDVQIAEKSVPAAVFGELGKRAAENNEESSGAQGNEQLGALERIKRRRQ

SEQ ID NO: 53733 - protein, 437 aa, Zea Mays
MALQGKKLINNPDDVVTEFIEGLVETYPGLQYLDGFPQIKVVLRADVERGSYDKVAVISGGGSGHEPSHAGFVGPGMLTAAVSGDVFASPPVDSILAAIRAVTGPMGCLLIVKNYTGDRLNFGLAAEQAKSEGYKMEMVIVGDDCALPPPRGIAGRRGLAGTILVHKVAGAAADAGLSLAEVAAEAKHASEVVGTMGVALSVCTLPGQITSDRLGPRQMELGLGIHGEPGVAVVELQPVDVVVEHVLKQILSQETQYLPVTRGCNAVLLVNGLGATPIMELMIAARKAVPELQLVYGIAVDRVYTGTLMTSLDMAGLSITIMKSGESILKRLDAPTKAPAWPVGSEGNRPPAKFPVPLPPSPSMKDDEILAPSQELSKQGCILEAVIEASATEIINLMDSLNEWDSKVGDGDCGSTMYRGATAILEDMKKRAFFLYS

SEQ ID NO: 53734 - protein, 237 aa, Zea Mays
MGSMEEVYDTLAEHLLSVLKNIEHLDSKYIVGLAGPPGAGKSTVASEVVRRVNTFWSQKHTKGSGAPLPTKEIAAMLPMDGFHLYRAQLDAMEDPKEAHARRGAPWTFNPSLFLKCLHTLRTEGSVYAPSFDHGVGDPVENDIFVKPQHKIVIVEGNYLLLEEDVWTEIRDLFDEKWFIDIDIDISMQRVLKRHIATGKEPDVAAWRISYNDRPNAELILESRKNADLVIRSVDFSS

SEQ ID NO: 53735 - protein, 361 aa, Zea Mays
MATAAAASRGNNNVSFGSKSWVGGTLAWESSCSVRPRRASKVLCMSVQQASRSKVSVAPLHLESAKEPPLNTYKPKEPFTATIVSVESLVGPKAPGETCHIVIDHGGNVPYWEGQSYGVIPPGENPKKPGAPQNVRLYSIASTRYGDNFDGRTGSLCVRRAVYYDPETGKEDPSKNGVCSNFLCNSKPGDKIQLTGPSGKIMLLPEEDPNATHIMIATGTGVAPFRGYLRRMFMEDVPNYRFGGLAWLFLGVANSDSLLYDEEFTSYLKQYPDNFRYDKALSREQKNRSGGKMYVQDKIEEYSDEIFKLLDGGAHIYFCGLKGMMPGIQDTLKKVAERRGESWDQKLAQLKKNKQWHVEVY

SEQ ID NO: 53736 - protein, 759 aa, Zea Mays
MSLLSRHARHPTTPPPASFSGGVETPPRRRVPKENVDPSSPARNHHSALDHGASPFRSPSSAAKPLSARNRLPPRPPSSNPLKRKLEVSPAAAAVGSAHDAAPGLDSGVQVVVRIRPSCWVDEEEAGEDGRGPEACVRKTAANSVAIQGQDFTFDAVADSVSTQEDIFTLVGLPLVENCLSGFNSSIFAYGQTGSGKTYTMWGPLSALSEDSLSSERGLTPRVFEQLFSRINEEQVKHADKELTYNCICSFLEIYNEQITDLLDPSQKNLQVREDVRTACVYVESLTKELVFTLKDVTQLLVKGLANRRTGATSANADSSRSHCVFTCVIKMDSKNPEDGSSITRSSRINLVDLAGSERQKLTHAAGDRLKEAGNINRSLSQLGNLINILAEISQSGKQRHHVPYRDSKLTFLLQESLGGNAKLAMICAVSPSQSCKSETLSTLRFAQRAKAIKNNAVVNEEKIEDVNALREQIRQLKDELHRMKSNGGIEGNSGSFATGWNPRRSLHLLKMSLGHPTTFQCIKEDSDEEMEIDENDVEKPYNHENMAMSSINVKESKRFQASMNVSAGTSQVEDLDRDKILISIKRSCCSANKFNTGTDVGDGKCKLNIAASIQRGLQVIESHQNNSAWKRASVGLNARIMDIQPCKVDVAIQTDPEEYETRDNPLALVPSCLLEASANESRDPSTCRDLQLVPVDVTVPSDDQKQRHFLKAVEKVLAGAIRREMARDEQCAKQAAEIQQLNRLVQQYKHERECNAVM

SEQ ID NO: 53737 - protein, 262 aa, Zea Mays
MWSPIPGTLMRTSSLPAVIEASGNDDWKKRKEAQSLKRLEVKKKRIERRNSLACNTSKEAAGQSPKEMNANTDKLVSSDETIVSANESHSSGKHLVKGLPPKYQATITSEDSSSAMRKKPNSAFKGTAITEEQNSSSSVPSSGEAISSVTAPSLPLLSLVPITATLGSREDQSILGRAGARANGMGDVERRMMQEMPGVFTKGLSNGSRVEGFLYKYSKGEVRIVCICHGSFLTPSEFVEHAGAGKVDNPLRHIVVSATPNL

SEQ ID NO: 53738 - protein, 55 aa, Zea Mays
MQRRLTPSRQRLISLLRILKQNKRISFFFVFQSVFCTFASRTLCDTGLVLSSLPQ

SEQ ID NO: 53739 - protein, 794 aa, Zea Mays
MSGMSKGAFANITSLRSTEERVVHLNNILKFAVFKKDRSLFAIGGPWNADIDGGDPSADCSCLIRTAIRCVKETVHVDLSSCTHWNRFVEVHYNRIGKDGLFSHKEITVLFVPNLLECLPSVDIWKNNWILYKKSKAEREQLTVKKSPGDPKEQMQGELNDGKNLDADQLKEADVGCSDMKNEKDDVDIKQQGNDGEGTGKVEEPVQKMGGDVEGKSTGDSSIDHATTGDKKPTKKKIIKKVVKVVRKKITGPSVDKSSEDKIVVAESANKTAEGGQSQQKNDDAGKQQEGAGISQQPEAKKTVKKKIIRRIVKRKVSGSGSQLNTPTTPAETSRQEAEVQPEKNVESSADVGNSQTKLQEGSKIPSEDISNQKKEEKPAEKEHPLTDLSLNADKGNHKEAFEQKDMKNDGKKDKTKDDKEKNRDLKMDLKQKLPLDTQEKKRSDEPPKYPGFILQAKRNTESKLRLTSLSLHGLLDYTAKDIEESVFELSLFAESFSEMLQHRMGCVILSFLEKLHRRYVVKRNQRKRQREEDLKKEEKSSEKRSKTTHETTKTESVDNPGGSFKMTKEGEEKMSTDQSANVHAELSKEGQIKLGTDHPIANHGEPAKGGDENMEEDPEYEEDPEEVEVYEDDEDMDDAHAEEQIAEQNENTNDREIKPKEVATTDGGNNKSTRQPEVENVTNIHERAASMEEKQSVPEIGDLVGGGEKVVSKEIKPAKDEVIDKDLLQAFRYFDINGAGYLKVDDLKCILHNMGKFLSSRDVKDLVQIALVESNSARDNRIIYPKLVKIVDL

SEQ ID NO: 53740 - protein, 472 aa, Zea Mays
MELVELNPLSGALVGLPGVNGLSTEQRKRLTIAVELVANPSIVFMDEPTSGLDARSAAIVMRTVRNIVNTGRTIVCTIHQPSIDIFESFDELLFMKRGGQLIYAGPLGAKSRNLVDFFEAIPGVPKIRDGYNPAAWMLEVTSTQMEQILGVDFAEYYRQSKLFQQTREIVEALSRPSSESKELTFATKYAQPFCAQYMACLWKHNLSYWRNPQYTAVRFFYTVIISLMFGTICWKFGSRRGTQHDIFNAMGAMYAAVLFIGITNATSVQPVISIERFVSYRERAAGMYSALPFAFSLVTVEFPYILVQSLIYGSIFYSLGSFEWTAAKFLWYLFFMYFTLLYFTFYGMMTTAITPNHTIAPIIAAPFYTLWNLFCGFMIPRKRIPVWWRWYYWANPVSWTLYGLLTSQFGDLDQPLLMADGVTSTTVVAFLEEHFGFRHDFLGAVAAMVAGFCVLFAVVFALAIKYLNFQRR

SEQ ID NO: 53741 - protein, 1007 aa, Zea Mays
MAAPAARRIVGAEVPIPGSDKLRWIDLTIPSSSAAAPASPSDPFVCVPPRAASGCHIIPSGDSQYYLSWRIHEEHPNVLEVIELSPSKEFPSFGLRLAFQEALSPFAFLCEREGRRQGELVYMLYVLTVSGVALLCHLRSPFSYVSGSVLHQDDIAEFNLQTQAQSAKVTAVTAKPGCIVIGRQDGSICSYSLGKLAPNSPGFSNELRDDAGIGRLWTLMSRTKTVGPVQDIVATVVNERDLLFVLHLDGHLRIWDNHMKLLNYNVHSNDIEGHPSRLWVGKADDDQELISLAILHQNTVVQGCDYVAVYGFGFSAAERFMFSSEPSISTIPLLEGKLADLKIATYKLWILKEFGSMLYEILQYDIDTETAKCCSEKVCCYVLQEDAISEQLFQSSDNALDDLVWTADSMFSSLKEQAFTLISSMFLRRLLQPGVNHCSALRETLLEHKRFLSDSEFQSLTANGLRKEILSIIEQEGSSQTASATAYHWKQFSARYLHNWCWHNKPYGLFLDTTNEVFGLVRKGSFSLFRCLEGLEMLIYGYDHGVNLLDDVSDFELLNEVLRCMGNIHHLLGRSSTAAYYESLISSIISSDEIVSHIVKILETGFSHQSSSSLSTLLGMDTYVERRQAAHKSQRKFSVEMLRSFHTLQSRSASWSAVFDVIEKFMKCLNTNMNVQSYGSKRVCNVNSVLLVQATSQVARTMFECAFDLFLFLSYLVGVGGQVSLLQNDVARIKLKLFPMIQDILGQWIVLHFVGTSPTSPPTIDDFSYQLSSLQLGKSDELSLHRKLGCSDFTLASLLDFPKSPEGDVMSPCFLGPAEIINLVRRFSSLIMHGGNFECVHTFLGCTINLSAVLIRHSQYEAAQNLLGILETYLNNGKVSHTGQDADTACSAYLHLNGFCLLMIAHDEANIILRESKVHDAIRCFFRAASGYEAPKALENFSLETGFQVSGESRSISLWRLNYYEWAMQIFEQHSMSEGAYQFALAALELVLLDGIDNGIEAEGLQR

SEQ ID NO: 53742 - protein, 336 aa, Zea Mays
MAADAVNRMTGEDLSRFVSEKSSLSALKIGGCSNLDILNLCSSSLSILWLSDLCSLSKSVMNCPNMSELSLCFTEHSSDCTNLITLMDGLGRTCPNLEKMHISSKQLSNEAVCALENANLRGLFMLSLILGSKITDAAVASIVRSCASLELLDLSGSSISDNGVGMICKAYPRTLSRLLLALCPNVTTRGIQLATAQLPCLQLMDCGMSLCANVKNEKEGPYFGEINGGIRIIRKLSILKRQPIHQKLIIKHGNLKKLSLWGCSALDALYLNCPELNDLNLNSCTNLHPVEPSLPCKRLADGSKRVQLPQFLKQQPSKDNKLIELSQTQCTVHLGS

SEQ ID NO: 53743 - protein, 959 aa, Zea Mays
MASTEQEAAVEAAAVVEEVTRQQGKGCGVAGGGDTVGSWRNIDIAWRKADEAAIRRYEAANWLRRIVGVVCAKDLAEEPSEEEFRIGLRNGIILCNALNKIQPGAVPKVVEVPSDSTAPVDGTALCAYQYFENVRNFLTGMQDLGLTTFEASDLEKGGQGVRVVDCVLAMKSFCDAKHVGKRSPFKYGGIVKPLSGKYVIRKNNEPYMKVMMRSHSAELLRDGISLEQIGLDFSLEPTETTATPDSIRMLVQTVLADKKPEEIPSVVESLLSKVINEYDCRIASQSEVVKDTMEQVKDTMEQVKDTMDTNDCNSVLRMDSPFDTNDTKSLSRVDSPQVESTTPSDLDKATENIKMDEDEQNASSLTEDVSTLVPLPVPVPLSNDIVINIPKIVRNFDQEEKQIQDLKSNMSTVKSFMEQLKLLYSEDLKKLGDHLRIISHAASGYRKVVEENRKLYNQIQDLRGNIRVYCRVRPFHPGKSGPKILTEEGLGVNYRALNDLFGIQEQRKDTICYEIAVQMMEIYNEQVRDLLQTGGNKKLEIRNNSQNGIAVPDANVVPVRSTADVIDLMNLGQKNRTVCSTAMNDRSSRSHSCLTVHVQGRDLTSGTVLRGCMHLVDLAGSERVDKSEVVGIGLKEAQHINKSLAALGDVIAALAQKSTHVPYRNSKLTQLLQDSLGNPQSSKSLVCNLPAPKICAVSILFPLFSGGQAKTLMFIHIAPEPDAISESISTLKFAERVSTIELGAAKSSKEGGGGGGGEARELKEQIACLRAALARKDGDHESIRSTQSSPDIYRMGTGNASPASRHPIEDGIIENDSALGDLAEHSQFGSSNSLPELGPDATQDLAFYQRSNSEQQWSWSGSVATEDSDDFEVATNCSLELDCVRPSSAPKASGLSNGGGTAVKKIQVKGSKGSDVRGVNPGKRSSPLQKKPSGPSPTLIKKGGGEGRKTPNGKTGTKK

SEQ ID NO: 53744 - protein, 707 aa, Zea Mays
MFLYMFLPLPMISGYYVARFFTKKSLSSYFTFVALASLMVLWFVVHNYWDLNIWIAGMPLKSFTKYVVAAVIMAMAVPGLALLPTKLRFLLELGLIGHTLLLCYIENRLFNYASMYYYGFEEDIIYPNYMVFITTFLGLALVRRLYVDQRLGPKAAWILTCLYSSKLAMLFMTSRSVIWFSAVLLLAVTPPLLLYRDKSKGASKMKVWQAYFHASVIAFSAWLCRETIFEALQWWNGRPPSDGLLLGSYILLTGVACIPIVALHFPHAQSAKRFLVLIVATGLLFVVMQPPIKLSWVYRSDFITAAHLSDDDISIYGFVASKPSWPSWLLIATVVLTLAAVTSIIPVKYVVELRTSYAVAVGITLGIYISVQYFFQAVVLYPLLVATIVSAAVFVVFTHLPSESSTRVLPWVFSFLVALFPVTYLLEGHLRAKSFADEDEAEKFTNMLAIEGARMSLLGLYAAIFMIIALEIKFELTLLLREKAADRGMHGPSSRSAAFPPKARLLQQRRAHAAPTFTIKRLAAEAAWMPAIGNVSTVLCFGICLVLNLTLTGGSNRAIFFLAPILLLLNQDSDIFAGFGDRQRYFPVTVSISGYLLLTALYRIWEETWPGNGGWALDIGGPGWLFAVKNFALLVLTLPNHILFNRFMWDYVRQTDAKLLLTLPLNLPSIIMTDILTIRVLGLLGAMYSLAQYMISRRIRIAGMRYI

SEQ ID NO: 53745 - protein, 354 aa, Zea Mays
MNLDTSQSSDNGSTSSPGTSSCRALLPNGGCTGKMYSPNNNMSFPPGGCTSLRLPVVVTGQEFTHVARSRRVYAHAHDYHINSISNNSDGETFISADDLRINLWNLEISNQSFNIVDVKPANMEDLTEVITCAEFHPTHCNTLAYSSSKGTIRLIDLRQSALCDNHAKLFEEHEAPGSRSFFTEIIASVSDIKFARDGRHILSRDYMTLKLWDLNMDSGPVATFQVHEYLRPKLCDLYENDSIFDKFECCLSGDGLHVATGSYSNLFRVFGCSPESVEASTLEASRNPMRRQVADPARPARTLTGAVRRGGENTSVDASGNSCDLSTKLLHLAWHPTENSIACAAANSLYMYYA

SEQ ID NO: 53746 - protein, 296 aa, Zea Mays
MEIAVKTLSKTSAQGLDEFKNEVLLIAKLQHRNLVRLLGCSISGQERMLVYEYMANKSLDFFLFEKDTVVLDWQVRYRIIEGITRGLLYLHQDSRYRIIHRDLKAANVLLDKEMTPKISDFGMARIFGNEETEINTLKVVGTYGYMSPEYAMDGIFSVKSDVFSYGVLLLEIVSGRRNRGVYSSSNNQSLLGHAWSLWNEEKSIELADERMNGQFNSDEVQKCVRVGLLCVQENPDDRPLMSQVLLMLASPDAASLPTPKQPGFAARRVLMETDTSSTKPDCSVFDSATTIMLEGR

SEQ ID NO: 53747 - protein, 87 aa, Zea Mays
MDSSSSSLSQQPEFDYLFKLLLIGDSGVGKSSLLLRFTADSFDDLSPTIGVDFKVKMVSIGGKKLKLAIWDTARLKQHIQDGDFSAN

SEQ ID NO: 53748 - protein, 112 aa, Zea Mays
MRRLLEHAGVPGHIYPLSLLCYEVMPPPQQVEKEIGEQRVISFHGAGLSVTEEINYGDITAHTKNADEGRELFTNTLYNSVVNQYNVLKSAIFRDRGAAVSNNVISLSQPWR

SEQ ID NO: 53749 - protein, 80 aa, Zea Mays
MQPHAIFGELNRSLVENYMEESCKLTHLHDNLDACYTSLRTNVKLDQILARLGASVPAQAIDRSTPCCILASSVAWLTGS

SEQ ID NO: 53750 - protein, 1188 aa, Zea Mays
MEKGKSIVDTSDVKAMSEVEHLLMRKTFTKVEFDRLTDLLRARTIESDPPKPIVSREEKNEESIKVDGIRGSALRHMDLDDSPAVKVHNHGASSPAELAKQYMSSRYLREPQSSSLRSRLFLENKGEASNTVNDRRSVPPIVQTPLELRNENPGLPVNGYVTSGLRGRSAIYRMSRSPYFKGQNYSSDLNTSSLSQRSQSLHVGGRQVLKRSGAELENELGSIGPIRRIRQKSNMMSSFRDSRANPKGNLLTSHISSTDFTEDGASIQSPSSKKLLVGSSQSLRPLESQKNEGDGKSSDSIPPIPAQSNKMAEKIFEQLNIIAPSPKQQQSVTLNASNSMSKKPVFQDAGSSSMYNQSSSLKFQDLDGANGPHDTNLNGSLLKKDKLNIIKDGSPKAAFSDRPALLGNSVSASKSWTPAFKMAVIEDLPELDDDLEVLIQSSKIEVETTEQKIDSNRKEQKVEQNILEQRVEPNLKNIAGSTISEQPVASLSKTVTSSGGLFLSNDPGKAVPKASVDNNTEFAFSNGPPGTRPATGVSAMPLASVNNDKQTGASNFIFGIKQPITSDFETSTAKNKSTLGQSVTKPTTLASTSSERGDKTEKAEDVANPSEKVLPSAASTTLNAPLHFTSVASTSSLSNGLSYSPPKLTTPPPTDKPAISSAVSTSIFAVSSSSPAISSSPAFTGFSFSSSAPVGLSLVTSAKSDGTTAENKAASTLSFGIGGTKAEVKSVAPDASSKASSELFISPVSSSIASFSSSPATSTPTFTAVAPSSDAAGISVAAPSSTSTAPGLQSASTPSFTFPSSGNNLFGFSSPAQSTGLSTSSLAGSTSQPPAASTLFGSKPTQSDGTIQQTSQSSKPQSGSPFPVMTPGVGASSSGPGTLSFGLGASSTGSGTASFGVGASSSAPGTLSTFGAAAHSSGPGVFSFGAGTSSSGPSTASFGAATSTSGTGFGNSPFGTGATFANPFSSSSSTGFTFSSPSSSAGASTAASTSVFASTSTASSASAFSNPFGSSSSPPSTFTFGQSGSSGNTFAFGAQPAPTFPSQPSLFSFSSANTSMNSSPQPAFGMINTNTAFSMASPGNDQMNEDSMADDTSQAAPAPAPVFGSSFGQQNNSSAAPVFGAPAVQPGGVFQFGGQQGSAQQNPSFPAVGSLEFQGGNFSLGSGGGGGDKSNRRVIKVKRTPKKR

SEQ ID NO: 53751 - protein, 648 aa, Zea Mays
MEAALSFSKDSPPISIICAAKIVGLPLTINHSLAAGSAPTLQFASGESLHGVNPIILYIARGASIASLSGKNDIEFGHVVEWLEYAPTFLSGSEFENACLFVDGFLASRTFLVGHGLTIADIAVWSNLAGIGQRWESLRKSKKYQNLVRWFNSIDSEYKEALNEVVAAFVGKRGIGKSPAPSLKEKVHDSKDPSAPEVDLPGAKVGKVCVRFAPEPSGYLHIGHAKAALLNKYFAERYQGRLIVRFDDTNPSKESNEFVENLLKDIETLGIKYDAVTYTSDYFPKLMEMAESLIKQGKAYIDDTPKEQMRKERMDGIESRCRNNTVEENLSLWKEMVNGTERGMQCCVRGKLDMQDPNKSLRDPVYYRCNTDPHHRVGSKYKVYPTYDFACPFVDALEGVTHALRSSEYHDRNAQYYRILQDMGLRRVEIYEFSRLNMVYTLLSKRKLLWFVQNKKVEDWTDPRFPTVQGIVRRGLKVDALIQFILQQGASKNLNLMEWDKLWTINKKIIDPVCARHTAVLKDQRVIFTLTNGPEEPFVRILPRHKKFEGAGKKATTFANRIWLDYADAAAISKGEEVTLMDWGNAIVKEIKVESGVITELVGELHLEGSVKTTKLKITWLADIEELVPLSLVEFDYLISKKKKTMLH

SEQ ID NO: 53752 - protein, 133 aa, Zea Mays
MCIVLNAKDISVTGRKMTDKIYYWHTGYVGHLKERRLKDQMEKDPTEVIRKAVLRMLPRNKLRDDRDRKLRIFSGNEHPFHDRPLEPFVMPPRQVREMRPRARRAMIRAQKKQQANRAKEEEDAKNAAAEVTA

SEQ ID NO: 53753 - protein, 348 aa, Zea Mays
MPPGRSDEGSGSLRWVFSLRELRSATNSFNYDNKIGEGPLGSVYWGQVWDGSQIAVKRLKSAKNGTEAEFASEVEILGRIRHKNLLSFRGYCADGPERILVYDFMANSSLYAHLHGPHSAECLLDWRRRISIAINTARALLYLHHYATPKIIHGSIKTTNVLLDSDFQAHVGDFGLIRFIPDGMDHEKITSESQRGYLAPEYIMFGKPTAGCDVYSFGIILLELASGKRPIEKSCSVKTYGIRNWVLPLARQGRYDEIADSKLSDKFSESELRRMVLVGLACTHSESEKRPTMLEVVPLLKGESKETLIKLERDELFSSDSMVSSQGTPTPDGGTDSVPKEDQELVGA

SEQ ID NO: 53754 - protein, 137 aa, Zea Mays
MGRLDQDPSCETNLVIVSHGLTSRVFLMKWFKWTVAQFERLNNFDNCEFRVMQLGPGGEYSLLVHHTQEELQQWGMSPEMIADQQWRASANRRCWAEECSSFIDTFFEEPYGSSETSSSDEDEAEDKEEETKLLEQL

SEQ ID NO: 53755 - protein, 118 aa, Zea Mays
MLYAARGAHLLCYPGAFNMTTGPLHWELLQRARAADNQLFVATCAPARDTSAGYVAWGHSTLVGPFGEVIATTEHEEATIIADIDYSLIEQRRQFLPVQHQRRGDLYQLVDVQRLGSQ

SEQ ID NO: 53756 - protein, 70 aa, Zea Mays
MAGAFAFRLVPRLAAEPAARGKGGGGGANRDAGSRALVSKKPNKQQHLWIRKETAGSGKKALRLIDAVSV

SEQ ID NO: 53757 - protein, 175 aa, Zea Mays
MDTCGIIPASPEEYPILGLNLLRLLVQNRIAEFHTELELLPAKALEHPCIKHAVELEQSFMEGAYNRVLSARQAVPHETYVYFIDLLAKTVRDEIAGCSEKGYDSLSVSDAKQMLMFSSDQDLHEYITEEHPEWEIKNGAVFFQKAKESQPCKEIPSLQLINQTLSYARELERIV

SEQ ID NO: 53758 - protein, 381 aa, Zea Mays
MLKERGVAPFSKWEKELPKIVFDPRFKAIPSHSTRRAIFDHYVRTRAEEERKEKRAALKAAVEAYKELLEEASEDINQKTDYQEFKRKWGADTRFEALDRKEREILFSEKVKAVQEKVQSMRKAVIANFKSMLRESKDITSTSRWAKVKENFRSDPRYKAMKHEERETIFNEYIVELKSAEQEAEQAAKAKVDEQAKLKERERETRKRKEREEQEMERVKMKIRRKEAVSSYQALLVEMIKDPKASWTESKPKLEKDPQGRARNPDLGQGDAEKLFRDHVKDLYERCVRDFRALLSEVITPEVAARTTAEGKTAINSWSEAKGHLRSDLRYNKLPSKDKESIWRRYADDLTRKLRQSDTKEKDKSDTDGKQPRSSDPPRRR

SEQ ID NO: 53759 - protein, 399 aa, Zea Mays
MRGTQGALIIASTIQIVLGFSGLWRNVVKLLSPLSAVPLVSLAGFGLYELGFPGVAKCVEIGLPEIILMLIFSQYLPHAVHAAKPVFDRFSVIFTIAIVWLYAYILTVSGAYKSARTKTQLHCRVDRSGLVGGAPWISVPYPFQWGAPTFDAGESFAMMVAAFVALVESSGAFIAVSRYASATMIPPSVLGRGIGWQGIGTLLGAFFGTANGTAVSVENAGLLALTHVGSRRVVQISAGFMIFFSVLGKFGAIFASIPLPIFAALYCILFAYIGACGLSFLQFCNLNSFRTKFIMGFSLFMGLSVPQYFNEYTSVAGYGPVHTGARWFNDMINVPFSSKPFVAVLVAFLLDNTIQVRDSGVRRDRGYHWWDKFRSFKTDSRSEEFYSLPFNLNKFFPSV

SEQ ID NO: 53760 - protein, 204 aa, Zea Mays
MPHLAATPPTSSAAAVPAAGRIAFRRPWNTPQPEALRLRLRLRARGVRREDGGGVRTEEQEQTAPRTFYDLLGISADGSPDDVRASYRRLALKYHPDVSPPGAAAENTRRFIEVQEAYETLSDPSRRASYDRALARGVCRLAFSGRRSQSHHAYYHYQEEGSGWRRSWEDQIAELKRRSVAKDSEENLSWGARMRRRAEASAAE

SEQ ID NO: 53761 - protein, 129 aa, Zea Mays
MYYLNREEQRIEMLREEEEARKHEEEERRKREEAERKANLDAIAEKQRLREIELEEKAKANREKLLKGSEAGAAPSSNKYIPKFKRQDGLPARQDAPPPRQDGPPPSTDRWRPSRYSSTSSSTWGRAHN

SEQ ID NO: 53762 - protein, 154 aa, Zea Mays
MWLSNEQEFWDIFDDRSVQLQPSGLQQLILDMHFIVEIAVCGRFPYRPVQQLVSTIITRAVAAFSARGVDPQSVLPEDGWFVDTAKAAIHKLMLGVSGSESEPEPDAEEHIALHGEVSDSEESSGASTVGSEDSFASAKNDDLESPVYFTDPES

SEQ ID NO: 53763 - protein, 186 aa, Zea Mays
MFEGVTHVICCTGTTAFPSKRWDGDNTPERVDWDGIRNLVSALPQTVKRLVLVSSIGVTKYNEIPWSIMNLFGVLKYKKMGEDFVCNSGIPFTIIRAGRLTDGPYTSYDLNTLLKATAGERRAVVIGKGDKLVGEVSRLVVAEACIQALDIESTEGQIYEINSVKGEGPGTDPEKWEELFRSARSD

SEQ ID NO: 53764 - protein, 282 aa, Zea Mays
MKDKHTRMPRGFGFVTFSDPSVLDRVLEDEHVIDGRTVEVKRTVPKEEMSSKDGPKTKKIFVGGIPPSLTEDKLKEHFSSYGKVVEHQIMLDHSTGRSRGFGFVTFESEDAVERVMSEGRMHDLGGKQVEIKKAEPKKPGVGDSSSNGRHSRGGGHRDSYRGSGGNGFSGNSSGGGYGYSGGYRSTAAAHYGSTAYGAYGRGYGYGGTAGYGLGYGSAYGGSMYGGPYGAYAAYGGAYGGGAYGAPGGYGAGGYGSYGGAGGMGGGGSAGGRGSSRYHPYGK

SEQ ID NO: 53765 - protein, 129 aa, Zea Mays
MSKAILAPLETIRTRMVVGVGSRHIFGSLVEIIEQNGWQGLWAGNTINMLRIIPTQAVELGTFECAKRSMIEAQEKWKEDGYPKIQLGNMKIELPLHFLSPVAIAGAAAGIAGTLACHPLEVIKDRLTI

SEQ ID NO: 53766 - protein, 604 aa, Zea Mays
MGMFLKQFEGKKVITLDMGLLVAGTKYRGEFEERLKKLMEEIKQNEDIILFIDEVHTLIGAGAAEGAIDAANILKPALARGELQCIGATTLDEYRKHIEKDPALERRFQPVKVPEPTVDETIQILRGLRERYELHHKLRYTDDALIAAAQLSYQYISDRFLPDKAIDLIDEAGSRVRLRHAQLPDEAKELDKELRQITKQKNEAVRGQDFEKAGELRDREMELKAQITAIIDKSKEMIKAETESGEVGPLVTEADIQHIVSSWTGIPVEKVSSDESDRLLKMEETLHTRIIGQDEAVKAISRAIRRARVGLKNPNRPIASFIFSGPTGVGKSELAKALAAYYFGSEEAMIRLDMSEFMERHTVSKLIGSPPGYVGYTEGGQLTEAVRRRPYTVVLFDEIEKAHPDVFNMMLQILEDGRLTDSKGRTVDFKNTLLIMTSNVGSSVIEKGGRKIGFDLDYDEKDTSYNRIKSLVTEELKQYFRPEFLNRLDEMIVFRQLTKLEVKEIADIMLKEVFDRLKAKDINLQVTEKFRDRVVDEGYNPSYGARPLRRAIMRLLEDSLAEKMLAGEVKEGDSAIVDVDSDGKVIVLNGGSGVAEPLEPALST

SEQ ID NO: 53767 - protein, 77 aa, Zea Mays
MYLKEEVNNLINSNLNERERDIIRLYHGIGKQCHTWEDISRQFGLSRERVRQVGLVAMEKLKHAARRKHLDALLEDY

SEQ ID NO: 53768 - protein, 868 aa, Zea Mays
MLEKCIFDGKYQQAMGMAVECRRLDKLEEAIVGCDNIQGALSYCINLSHQYVNHREYRFEVLRCLVKIYQTLPNPDYLSICQCLMFLGEPETVACILDKLLSGNKDDALLAYQIAFDLVENENQAFLLNVRNRLSSPTPVPSNPDSGPAVQDDQTASTVGTDTEAAGDVQMRDDTSTPNGTAHSVDPNEVAHADRLEKIKGILSGETSIQLALQFLYSHNRSDLLILKTIKQAVEMRNSVCHSATICANAIMHAGTTVDTFLRENLEWLSRATNWAKFSATAGLGVIHRGHLQQGRALMAPYLPQSGAVGGGSPYSEGGALYALGLIHANHGEGIKQFLRESLRNSSAEVIQHGACLGLGLAALGTADEEIYEDIKNVLYTDSAVAGEAAGIGMGLLMVGTASEKASEMLAYAHDTQHEKIIRGLSLGIALTVYGREEEADTLIEQMTRDQDPILRYGGMYALALAYRGTANNKAIHQLLHFAVSDVSDDVRRTAVMALGFVLYNEPEQTPRIVSLLSESYNPHVRYGAALAVGISCAGSGLSDAISLLEPLTSDVVDFVRQGALIAMAMVMIQTNESFDSRVGAFRRQLEKIILDKHEDTMSKMGAILASGILDAGGRNVTIKLLSRNKHDKLTAVIGLAVFSQFWYWYPLLYFISLAFSPTAFIGLNSDLKVPKFEFLSHAKPSLFEYPKPTTQQTTTSTVKLPAAILSTYAKAKSRAKKDAESKANQEKATEEASGSTSSKTAKAQEKDADAMQVDNASEKKAPEPEATYQLLTNPARVIPAQEKFIKLLENSRYVPVKPAPSGFILLRDLQPTEAEDLALTDAPTTVAGSTGNTAPAAGQQGSGSSAMAVDDEPQPPQPFEYTS

SEQ ID NO: 53769 - protein, 791 aa, Zea Mays
MWATLHKPVAHANLRLLLTVSAFSGPLHLGTASAVAAAVTTRRSSSSRGVAATAMPSSSPPPLPPAEETTASAAALAPEGGFSLTEPSFLESLMPKKEIGVDRFLAAHPEYDGRSALIAIFDSGVDPAAAGLQTTSDGKPKILDVLDCTGSGDVDTSKVVKADADGAIVGASGARLVINPSWKNPSQEWHVGCKLIYELFTDTLTSRLKKERKKKWDEENQESISDALKQLNEFEKKHPKPDDTMLKKAHEDMQSRLDYLRKQAEGYDDKGPVIDIVTWNDGDVWRVAVDTQTLEGNNDGGKLADFVPLTNYRLERKYAIFSKLDACSFVANVYNDGNLVSIVTDCSPHATHVAGIAAAFHPDEPLLNGVAPGAQLISCKIGDTRLGSMETGTGLVRALIAAVEHKCDLINMSYGEPTLLPDYGRFIDLSNEVVDKHRIIFISSAGNNGPALNTVGAPGGTSTSIIGVGAYVSPAMAAGAHCVVQPPAKGMEYTWSSRGPTADGDLGVSISAPGGAVAPVPTWTLQSRMLMNGTSMSSPSACGGVALLVSGMKAEGIPLSPYSVRKAIENTAASISNAPEEKLTTGNGLLQVDRAFEYAQQAKKLPLVSYRISINQVGKSVPKLRGIYLRGGNACCQTSEWTVQLDPKFHEGASNLEQLVPFEECLQLHSTDTSVVQIPEYILVTNNGRSFNIVVNPANISSGLHYFEVYGIDYKAPWRGPIFRVPITVIKPIALLGEPPLLSISNLRFQSGHIERRFINVPFGASWAEVTMRTSAFDTPRRFFLDTVQVA

SEQ ID NO: 53770 - protein, 140 aa, Zea Mays
MEPYFRGTVSPMMDGPYDAIELETRISKLKESMCNLHSLQMKLKVPEDEPLQTNIRASLLWSEKESFEEYNESFIPGRPERLSFAAYQTVSGMSDELLTVQNYKIQAMDSTDTLERLNTGIKFVEHNIGMIAARLAIQNI

SEQ ID NO: 53771 - protein, 221 aa, Zea Mays
MVDGFPFEIPEEYSNMPLLKGRATVDMKVKIKDNPNMEDCVFRIVLDGYNAPVTAGNFVDLVKRKFYDGMEIQRADGFVVQTGDPEGPAEGFIDPSTGKIRTVPLEIMVDGDKAPVYGETLEELGRYKAQTKLPFNAFGTMAMAREEFDDNSASSQVFWLLKESELTPSNANILDGRYAVFGYVTENEDYLADVKVGDVIESIQVVSGLDNLVNPSYKIVG

SEQ ID NO: 53772 - protein, 71 aa, Zea Mays
MGCYILHSFLVVCGKRAGAFTCLLDETGRYGPHDSLPEEVKPDFKVSSLTEVFAVLEEHFDLAPVPAESRI

SEQ ID NO: 53773 - protein, 1375 aa, Zea Mays
MDSKIKLMIKIIEEDAESFAKRAEMYYRRRPELMTLLEELYRAYRALAERYDHAAGELRQAHRKIAEAFPDQVLMDLDDDLPAETASIETDMDNPDMAPYFLSFINASDLKRNAKDDQDFERLQKELASLSQENQDLKDRISSMLEQGNKAECEILRLKESLAQQEAEKESAVSLCQQSTARLQNLKSEIMHTQEKFNRLKEEMQTELQPLRKGDEHLFLLERANQDLHLELDNLKLLLKQKHGEVNEKQDELEKLHISTEEEHLKRMQAEMAQLSLEKQLSLAQDKLRHLTLEKQVEAHKIKEVETSKVVIQKELEKILEENQRLNDQSHSSSAVIIRLQDEIISMKNVQRRLEEEIFQHVEEKKTLQHELSYLKEDRSDLERKHSTIKEQIGSMNLNLESLQALAQELRDGNVELKEIVKNHESIELVHIDNLRKLERMSETNAHLEKSLSAATTELEGLRESKVALEESCMHFRSTINTHQSERAVLVAQIEVISQTMEELLEKNVFLENSLSDANAELESLRMKFKELKESSEALQNQNSVLQSDKRTLVHQVEGITVTLLNLERQYKELGRRHSDLQKEKDLVLDEVIKIQEQIRLERKEHEDCTQSSNIRFDALQKKISLLLEEGRSREVQLGEEELKIVKAEIEIFVLQQCLNDMTEVNSEIAEQLRKNKEICKVQEGKIYSLSQHNQKLTEGIDSVVRVLHLDHKYESLGQMKLEIIVQLILNEISCLLNNISDAQDVKQKELVEKSLVVTLLEHFGQEVADLRSERNVLRQDQQIKIEELLQLQREKEELMKISDEFLEEVEARNHKVDELKAEAKFLVVRFSELQESRRSLQSEITKLLQSNSFLSNELNDSIEKQKRFEHDFSNLVSEAVSKDILSVIFRSLHEERTLQLKSLHNNFGCLQTAGGELYQEIKMMNKRLGDIEMENKYLGKELSRTMSVYGGSIVQTATGKGNPGRRDANLLNSNRKIQQDCHVNLEVEQEEVCNADFQESNETLQDEVRKLRSEVEMLRSKEKAVFNIKSCDEEIMKLLANMQMAIMNAALFKEKVLELIITCESFEISAMVQKEVLKEEIIQRNSYVDELKDKLNAVEIENRRLKVDLNGDFTMLGSLQTEVSALEEQTLSLANDHLHTNKLRMEENALSPHLVKTTTRSSGEENALRMVKGMELQKLHGTIKALQKVVTDTGVLLEQERLDFNANLKEAKKQIEVLKLKEILDDDIIEMNYEQMLKDIQLDLIQTSSGQKTSPFGQEKKNVAQVDDKMVNSRGSIGPSHGHVADDLRPPQSESFGRENNLMVVKELSIDKQELPRSLAMEPHEEWRNKVVERLASDAQRLSALQSSIQELKTNAETSEEVELGSVRYQITEA

SEQ ID NO: 53774 - protein, 266 aa, Zea Mays
MIRPSFPKWYFVHEVPEQFPNSDVTAIVDETWQIGDRVDWLKEGCYWSGTITKIINEDLVEIELPAPPIGEGKCYKAKCSDLRPTLEWSLARGWMVPLSQANGKGWHAARLLQHYKSESDDDNDDNDSWDARQTVCRASNTPEEAPGPMVPAPPSATNNAPSHMYQKDAAVTSTEDLLKPSSTSKSPDPRHDAQASTQPAGTGVSMKPEPVIGVSTIKKEDSSLTEGEVDGGTEECLEKLGAIKARLKYLMQGTRLEHERSATFRG

SEQ ID NO: 53775 - protein, 92 aa, Zea Mays
MKDCPKPRDNVAISNARKQHNLKRNQSNVNRVQNRYYQKTPGKFDDLKAGVLGPETRQCLGIGENDPPPWLHRMRELGYPPGYLEAPAIQLA

SEQ ID NO: 53776 - protein, 105 aa, Zea Mays
MVSKEQNKRGALHEKLKILRSVTHSHAGDKVSIIADASSYIKELKQKIAKLSQEMASSSPQHATTGVCQQQPSSSSEVVVDGGLIIDAHAVEQAVVQAIKNCPAN

SEQ ID NO: 53777 - protein, 226 aa, Zea Mays
MDGQLFLIKHLLILREQIAPFDIEFSVTHKELDFSHLLDHLRRILRGQVSLFDWSRSTSLARTFSPRVLENQIDARKELEKSLKATCEEFIMSITKLVVDPMLSFVTKVTAVKVALSSGSQGQKLDSVLAKPLKTQAFASPDKVAELVQKVAAAIQQDLPKVMTKMRLYLQNPSTRMILFKPIKTNIVEAHIQLHSLLKSEYSSEEMQSIGMLPIPDLQSQLDSLL

SEQ ID NO: 53778 - protein, 388 aa, Zea Mays
MLGANMENVDAPSVSQANELRQDVLDPSELQYDVPSVPSHAYSNTDTLQPSTIEEPQGNNQAHTLSHLSNLMQANPLSTSSLLGSNQNHATLHGLEFDLPPYLGAKYNAGSTTNPRPPISMQQEALKAGVFSNAQSTQSLPSTSIQTGLPLPQQLAHHPYSQPTLPITHFPNMVGYPYLPQNYATYLSSGTFQQAYPSSGPFHQSAAAALLASGMKYSTPEYKNNLSATGLQQQHQPQPQPLSSVISGYGGFGSSSNIQGNFTLSQSTGSASALGFDEALSRQYKNTSQYMALQQGDNSGMWVHGSGSRAASTLPPNHFYGYQGQSQLGGFARAQQPQPSQFGGHGYPTVYQSQGQEHPQNLAEGSLNGFQVTPSQPSHPSWQHQHTY

SEQ ID NO: 53779 - protein, 739 aa, Zea Mays
MAMTRRSASHLLSAFRPFSLLLQPHLVDSSPAAASARRAMSSASALRARDEKDVARWRESMGRMRNIGISAHIDSGKTTLTERVLYYTGRIHEIHEVRGRDGVGAKMDSMDLEREKGITIQSAATYCTWKDYQINIIDTPGHVDFTIEVERALRVLDGAILVLCSVGGVQSQSITVDRQMRRYEIPRVAFINKLDRMGADPWKVLNQARSKLRHHNAAVQVPIGLEEEFEGLVDLVEMKAYKFEGSSGQNVTASDVPLNMEDLVTEKRRELIEVVSEVDDQLAEAFLNDEPITANQLKAAIRRATVARKFIPVYMGSAFKNKGVQPLLDGVLDYLPCPLEVYNYALDQNKSEEKVLLAGTPAEPLVALAFKLEEGRFGQLTYLRIYDGVIRKGDFIYNVNTGKKIKVPRLVRMHSNEMEDIQEAYAGQIVAVFGVDCASGDTFTDGTVKYTMTSMNVPEPVMSLAVSPISKDSGGQFSKALNRFQKEDPTFRVGLDAESGQTIISGMGELHLDIYVERIKREYKVDAKVGKPRVNFRETITQRAEFDYLHKKQSGGQGQYGRVCGYIEPLPSGSDGKFEFDNMIIGQAIPSNFIPAIEKGFKEACNSGSLIGHPVENLRIVLTDGASHQVDSSELAFKLAAIYAFRQCYTSAKPVILEPVMKVELKFPTEFQGTVTGDMNKRKGIIVGNEQEGDDTIVVCHVPLNNMFGYATAIRSATQVNLRWSTWSIMLYRRMCRCN

SEQ ID NO: 53780 - protein, 161 aa, Zea Mays
MFSGVEKYLEEKPWKFSKANATEKAMVAGLGGLNLFGVIILGNLLKQMTVTPGGLISFAAQLYPLLQIYAGSFFAIPLFRWFLLRKTNNGIKKRNKAREQRAQELVSPDSSLRRKLLSARDMAERKVITPEEIVYTTEKDLLEQDYEVKEWERRFKELESE

SEQ ID NO: 53781 - protein, 78 aa, Zea Mays
MHMHREVGLLNVDGYYNSLLTFIDKAVEEGFINPSARRIIVLAPTAQELMDKLEEYEPYHDRVASTLNWETTMDHLAY

SEQ ID NO: 53782 - protein, 1496 aa, Zea Mays
MGRTVLSDEEEDEFEADEEDPRPSRRNRDDMDERDDDDDDDEDGQDEFEKDDFIVDDEEEEVEGEEEEQKSDDERRRKKKKKKRESDDFMLDEDDYMLLQDNNITGISRPKPGNKFKRLKKAGRESEMDEHSGFSDGDGTGKKRSGKERVEYSLFGDHQDAAPFEEDFEDDQQAGEGEEEVGDDEDEMADFIVEEDEIDGNGQVVRRKKFKKKVPRQAAGVSSSALQEAQDIFGDVDELLALRKQELEREALNSGELRGARLEDEFEPFILAEKYMTSKDEQIKENDVPERMQLSEELTGYPPTDKTTIEEESSWIHSHLTGDGFLSFFGNEHINKDIDQKDIVNVVTMLHANKFEIPFIAMYRKESCPTLLSFDSDEDNEDIESDARKLRWHKLLWAVQALDRKWLLLQKRKVALQLYYEKRFDDEKRRIDDVTRQELNSQLYNSIIEALKDAKSEKEVEDVDAKFNLHFPPGEVEEEGQFKRPKRKSLYSICHKAGLWEVANQFGRSAEQLGHHLTLTKIPEAGELESGRHSPEEVAANFTCAMFETSQDVLRGARHMAAVEIGCEPIVRKHVRGIFMNKAVVSTSPTSEGNTIIDPYHQLSGVKWLREKPLSKFVDAQWLLIQKAEEEKLLKVTVKLPEDAKKKLMSEARENYLSDCVSKSAQLWDEQRKMILDDAFFNFLLPSMEKEARSLLMTKAKHWLHMEYGKQLWNKVTVAPWKKKDADKKDADIDLDDESELRVMACCWGPGKPATTFVMLDSSGELVDVLYAGSISNRSQGVAEQQRKKNDQQRVLKFMTDHQPHVVCVGASNYNCRQLKDDLYEVIFKIVEDHPRDVNAQMENFSIVYGDESVPRLYENSRISSDQLPGQSGIVKRAVALGRYLQNPLAMIATLCGPGKEILSWKLHALEQFLTPDEKYEIVEQVMVDATNQIGFDVNLAASHEWHFSTLQFIAGLGPRKASALQKDLVREGSIFSRKELVKPLGRKVFMNASGFLRVRRSGAAAASAQLIDLLEDTRIHPESYVLAKNLAKDVYVEDAQHEINEMDDEEQEMAIEHVRERPSMLRSLKIVEYIKSITEEYRKLETLRDIKFELLCGFSDWRIPYTEPSPDEEFWLLSGETDDTISEGRIVQVTVRNIQDNKIICTFDSGLKAIVMADNYSDEGFDPESSQLREGDVLTGKIRNVNKNRFMVYLTCKASEMRRRPFSRGEQDPYYHEQDMTSQTVEDKARKQKELAKKHFKPRMIVHPHFQNLTAEEAMQFLSDKEHGEKLIRPSSRGPSFLTLTLKIFDGVYAHKEIAESGKDHKDITSLLRLGKTLTIDNETFEDLDEVIDRYVDPLVGHLKSMLSYRKFRKGLKNEVDEMLRAEKAENPMRIVYSFGISHEHPGTFILSYIRSTNPHHEYIGLYPKGFRFRKRDFDNIDRLVSYFQKNIDKPPPDAGPSMRNVAAMVPMKNSAWGSGGGGDANGGWRGDGSNDRDRPFSGRSEICEHYLCIL

SEQ ID NO: 53783 - protein, 60 aa, Zea Mays
MVLRRAATECPKKVAGLKDLVNLPTQLREFAGGRSQMSHISFFLSVWSYIKDNKLQKQKN

SEQ ID NO: 53784 - protein, 197 aa, Zea Mays
MPRGEIVIGGPNITKGYFKNEAKTNEVYKDDEKGMRWFYSGDIGRFHPDGCLEIIDRKKDIVKLQHGEYVSLGKVEAALIVSPYVENIMIHADPFHNYCVALVVAAHIELESWASQQGIKYNDFSDLCQKQEAVKEVLGSLAKAAKQARLEKFEIPVKIKLIPEPWTPESGLVTAALKLKREVIRKTYENDLAELYA

SEQ ID NO: 53785 - protein, 178 aa, Zea Mays
MATGQLFSKTTQALFYNYKQLPIQRMLDFDFLCGRETPSVAGIINPGSDGFQKLFFGQEEIAIPVHPTVEAACSAHPTADVFINFASFRSAAASSMSALKQPTIRVVAIIAEGVPESDAKQLISYARANNKVIIGPATVGGIQAGAFKIGDTAGTIDNIIQCKLYRPGSVGFVSKSVV

SEQ ID NO: 53786 - protein, 129 aa, Zea Mays
MRDPSRMINRMYLTNSAVSVFGKDVGEPGTAEEGHNMEGDPELIDDSEFYQQLLKEFLESCDKGASESAIYALKKQQVKKRKLVDRRASKSRKIRYHVHEKVTNFMAPEPMVLPPMAPKLFENLFGNAS

SEQ ID NO: 53787 - protein, 622 aa, Zea Mays
MVRKKRTGPGGSGETSGESSGASGQGSSQRPERTQQPGAGRGWVPQQGGRGGGQHQGRGGHYQGRGGPGPHHPGGLPEYHQREYQGRGGEYQGQYQGRGGARSRGGISQPYYGGHRGGSVGRNVPPGPSRTVPELHQAPYVQYQAPVISPSPSGPGSSSQPMAEVSSGQVQQQFEQLAIHGQSSMSQEVQVAPASSKSVRFPLRPGKGTYGDRCIVKANHFFAELPDKDLHQYDVTITPEVTSRGVNRAVMGELVTLYRQSHLGGRLPAYDGRKSLYTAGPLPFTSMTFEITLQDEEDSVGGGQGGQRRERVFRVVIKFAARADLHHLAMFLAGRQADAPQEALQVLDIVLRELPTARYSPVGRSFYSPNLGRRQQLGEGLESWRGFYQSIRPTQMGLSLNIDMSSTAFIEPLPVIDFVAQLLNRDISVRPLSDSDRVKIKKALRGVKVEVTHRGNMRRKYRISGLTSQATRELSFPVDDRGTVKTVVQYFMETYGFSIQHTTLPCLQVGNQQRPNYLPMEVCKIVEGQRYSKRLNEKQITALLKVTCQRPQERELDILQTVHHNAYYEDPYAQEFGIRIDERLAAVEARVLPPPRLKYHDSGREKDVLPRVGQWNMMNKIK

SEQ ID NO: 53788 - protein, 1028 aa, Zea Mays
MEAHGDQRWLVDCLTATLDTARDVRAFAEESLRQASLLPGYGAALTKVTINKEISFGLRQLAAVLLKQFIKQHWQEDEENFVPPVVSASEKVVIRQLLLTSLDDSNGKIRTAISMAVAAIGQQDWPEDWPELLPVLLKLIGDQSNGNEVRGALRCLALLSDDLDDMCVPKLVPELFPSLYRIISSPHLYENSLRAKAFAIVHSCISMLGSMSGVYKRDTASLMTSVLDPLIEQFSIVLNYPVQSQNPDDWSMQMEVLKCLLQLVQNFPRLPEAKISAILPALWQTFVSSFKTYHLSYIQGAETLDSISYDSDGSEKSLESFEIQLFELWTTIVGNSRLAKVIGGNIKELAYYTIALQQITEEQVQNWSRDANQYVADEDDLTYSCRVSGSLLLEELVTAYEDYGIDSIVEASQMRFHESRELKEAGSADWWRLHEASLFALGSLSEQLCEAQDSGLTKYNVRDLLEQMLIDIMGTGVHQYPFLHARAFSSVAKFSSLISKGVSEQYLCNAAHAIASDVPPPVKVGACRALAQLLPESNQNLIQPNIMGILSSLVDLLRQASDETLHLVLETLQSAIKSGGEQSTLIEPVISPIILDVWAQHIADPFISIDAVEVLEAIKNAPGCLQPLVSRILPTIGSILVKPKVQPDGLVAGSLDLLTMVLKNAPVAVVKAVFDTCFVSTVQIVLESDDHGEMQNATECLAAFISGGRQELLVWGGEQGQTLKMLLDAASRLLDPALESSVSLFVGSFVLQLILQIPLHLSPHIPDLIAAIMRRMQTSSIAGLKSSLIVIIARLVHMSAPNVDGFINLLLSIPAQGYDNSLVYIMSEWSQLQGEIQGAYQIKVTTTALALLISTRHPELSKVEVQGHLIKTSAGITTRSKARVTPDQWTKIPLPVKIFSLLADTLTEIQEQIGAGDDDDSEEDNDWEEVQNGDASISDDIIHSASVPSMTNPSVEHLNAMAKVFDEDDDDSYDDDLTKNDPLNEVKLADFLTNIFANLWENNRPIFEYLCQGLSDSQRSAVEKVLRR

SEQ ID NO: 53789 - protein, 246 aa, Zea Mays
MFKRNYDHLPKDTYFGMYKEATRGNPNYFLTYGNGKSAARIQDHLRPNGAHRWHNYAKSPNEIKLEEAAVLHYTYTKFSDLTSRRDRCGCKPTKEDVKRCFMLDFDRAAFIIASTASEEEMLRWYNERVVWTDKQLNLKLLRKGVLTRIYTPMTIVQSLRESGVFTSAITAGQPAVNAKLSPKETNAQSQNVTAPGNMTRVVRSTDSKASGRKILQAVDLAFSDTNVTAVPPLSPPSLDEHRHHSE

SEQ ID NO: 53790 - protein, 115 aa, Zea Mays
MAVHRLQPSPSGLQCSTARSPVLLHGPRLTGARTGRRGGFGGPRFDVQRATWRWLTSSSTASCSYNYCWPYREMLGLLYQLFKGHILLNIKEKMISSHIRQGFYSFRRKSFLGES

SEQ ID NO: 53791 - protein, 77 aa, Zea Mays
MLAPWCKMRTLVAPGLFYSVLEGGADFALTWLVSHRDNQETCVHCLLRYGYQSNAELLAYFFLSCDYLCCKVISQHC

SEQ ID NO: 53792 - protein, 250 aa, Zea Mays
MYLSGKDTSLITYLTGLYSSTLKSVPTTSLFNNQVQEWLELDHQLTEQTKPPVPLLWDKRPGTDSRVLLRHSPEEIQALVAMEIIPGTKALQIPLAHPTKQLPTQRKRTSCPGEGARRKCPRLRPAGRPPRGTAVTRTTGGFLAVVAAAGGRPQCRGTTTRQAPRTAGRPRAPPWPGTRPREEAPARGTARRSGASSASPSPPAGGSELPRTTPTISVSERRLLGRHLLRDRCSLQLKQIGKWMDGIAAQ

SEQ ID NO: 53793 - protein, 137 aa, Zea Mays
MQEQWKTSSNTPGKRKDRSKTEDEEVGNKKRRRKGIRRKDQKTKMQYGEEEDEYKDEPEADDDYADLARYNGADNSERAPDHLLAAAGLDDSDAEDDMGHPQSAIERKRRAWSESEDDEPVKKPAAQPSPGADGLSE

SEQ ID NO: 53794 - protein, 336 aa, Zea Mays
MLLHIRHWRVTTLAYSSTSSCSAPEVCGYDLHTTPARHNPVEMDRCRAHWDDTTTRIFLDLCIAEKEKQNYNSKGLTKIGWHNLYRNFKEETRRSYDTKQLQNKFNGLKRMYSLWRLQNDKAGPGGGGGWDKSSSTVTQDADGWDNQITETSAAEDFRGKALAHEDALAVLFGPKDGTNSPSVGGGAGDRTPGGGGGGEEENHARASGDNAACPEESLGCYRSGRASPWSSQDHHIHMVGSRPAKKPKNTGYYAEGVSESMLGSRNESSSAIRREQEEVVELLQLVEKDGVSQGSELFFIATELFRSPIRRAAFRCITTPKNRVAWLRWTWDNVKM

SEQ ID NO: 53795 - protein, 843 aa, Zea Mays
MRGETAEIKVSYEAKLAESLQMMETAQKKFDEAEEKLLTAKSLEADCIRTRNTSLRRLQDIEDREDQLRRYQTSFELENASKEKEINLLRKSLDDTKKILHEKEQCLLKEQVLLNQRDDSILERLAYITSSEKRLEEEKLNLEDERKVLLEEKNKLDLNMQAIISREEESILDKRESELLILQETIASKERAEIERLRQEEEIALVRRRQEFDTDMEIKLTSFEEEIDARKALLDQRETTINEKEDAVAQREQNLNLRFAELANKEESLVKKSDELREEEKRLSSERETLHIDLQKEKEEIHNMKLDLEKEKSFFEEEKREAIQAQENLAITQNEREDLQSLQVKLKDEIDSLRAQKVDLMADAERLLSEKERFEIEWELIDEKKEELQKEAARIAEERRVIDEHLKSEFDIIKQEKEDLRVQLKISTESLAHEHAEFMNKMQQEHASWLSRIQLEREDLKKDIDIQRTELLNSAKARQMEIDSYLREKEEEFEQKKSKELEYINSEKETISSKLEHVRLELQKLEEERKRSMLERERREEELSETKKTIDALNEQREKLQEQRKLLHSDRKSITQQMQLLNELEELKIESENRQLSLRQCGKSKHAGVENLEDNGVHLSPDEDQNASPKQTTVKKLEVSPSVSTPISWVKKCAQVIFKRSPEKSADPNNDIPPKLGNVNDCTSLATAYSDGLFACHLENGAEKVPQAIDGLKVGKKRLNNALSHGDSEISQPKRKQQKSATQILRVIGGEIDSNCSPSVLEEKCSKNEHDAVPVGLCGKGPQNPQAEHSEDISVSASEPSNGPGVVDSEDKDGADEESDDEGEDEEEEKTSSAKKLWRFLIT

SEQ ID NO: 53796 - protein, 301 aa, Zea Mays
MFLSALVGIGTQLAALILLVIVLAIVGMLYIGRGAIITTFIVCYALTSFISGYVSGGLYSRSGGKNWIKAMVLTASLFPFLCFSIGFALNTIAIFYRSLAAIPFGTMVVMFVLWAFISFPLVLLGTVVGRNWSGAPNNPCRVKTIPRPIPEKKWYLTPSVISLMGGLLPFGSIFIEMYFVFTSFWNYKVYYVYGFMLLVFVILLIVTICVTIVGTYFLLNAENYHWQWTSFSSAASTALYVYLYSIYYYHVKTKMSGFFQTSFYFGYTLMFCLGLGILCGAIGYLGSTLFVRRIYRNIKCD

SEQ ID NO: 53797 - protein, 81 aa, Zea Mays
MKFVSTNRLLLMSNSVKRRNRTQHKLRYPILFRQEIIQVAHNYWLLERMPRCSQTHGDFFTCIIVLIVNLAPGPQWQVFQD

SEQ ID NO: 53798 - protein, 95 aa, Zea Mays
MRWFRLVRRLDTGEPRDHRESQMPRLWRNWEHHVLQVWRPWAYLNDKKLGHCSVSAARQYNPASILPELRWWVFGLMVTSSIKKSYDSSGEFSLC

SEQ ID NO: 53799 - protein, 811 aa, Zea Mays
MVKFTAEELRAIMDKKNNIRNMSVIAHVDHGKSTLTDSLVAAAGIIAQEVAGDVRMTDTRADEAERGITIKSTGISLYYEMTDESLKNYKGERDGNQYLINLIDSPGHVDFSSEVTAALRITDGALVVVDCIEGVCVQTETVLRQALGERIRPVLTVNKMDRCFLELQVEGEEAYQTFSRVIENANVIMATYEDKLLGDVQVYPEKGTVAFSAGLHGWAFTLTNFAKMYASKFGVDESKMMERLWGENFFDPATKKWTTKNTGSPTCKRGFVQFCYEPIKQIIKTCMNDQKEKLWPMLQKLNVTMKADEKELIGKALMKRVMQTWLPASTALLEMMIFHLPSPAKAQKYRVENLYEGPLDDVYATAIRNCDPEGPLMLYVSKMIPASDKGRFFAFGRVFSGKVATGMKVRIMGPNYVPGQKKDLYVKSVQRTVIWMGKKQESVEDVPCGNTVAMVGLDQFITKNATLTNEKEVDACPIRAMKFSVSPVVRVAVQCKVASDLPKLVEGLKRLAKSDPMVLCTMEESGEHIIAGAGELHLEICLKDLQEDFMGGAEIIVSPPVVSFRETVLEKSCRTVMSKSPNKHNRLYMEARPLEEGLAEKIWCFGPETTGPNMVVDMCKGVQYLNEIKDSVVAGFQWASKEGALAEENMRGICFEVCDVVLHADAIHRGGGQVIPTARRVIYASQLTAKPRLLEPVYLVEIQAPENALGGIYGVLNQKRGHVFEEMQRPGTPLYNIKAFLPVIESFGFSSQLRAATSGQAFPQCVFDHWDMMGSDPLEAGSQAAQLVLDIRKRKGLKEQMTPLSEFEDKL

SEQ ID NO: 53800 - protein, 243 aa, Zea Mays
MDVVIEIRDARIPLSTSHPKMDSWLGNRKRIIVLNRKDMISTEDMNAWATYFGNQGIKVVFSNGQLGMGTMKLGRMAKSVASVANTKRKEKGLLPRPVRAGIVGYPNVGKSSLINRLLKRRMCPAAPRPGVTRELKWVRFGTDLELLDSPGILPMRISDQTSAIKLAICDDIGERSYDFADVAAILVQMLIRHPAVGSEAFRRRYKIDVDSLSQSSLFTCSMETQARQLSAYCLTTGKANLDG

SEQ ID NO: 53801 - protein, 147 aa, Zea Mays
MQSLQDKASEWSGVAAADAFAIDDVNIFEYLGGTPQPFVDLSTNFYTRVYEDEEEWFREIFGGSKKEDAIQNQYEFLIQRMGGPPLFSQRRGHPALIGRHRPFLVTHRAAERWLHHMQQALDATESIDVDSKTKMMNFFSFADTFIC

SEQ ID NO: 53802 - protein, 570 aa, Zea Mays
MPRTVTPTPVPCASPYLWPPPQNWPRASQGSLAHFFPAECAVVMANASRGRVGGGGRSSVLALLLLLSAGGARASYDGEGEAARAGAEEKEKAAAWTGGLSRRSFPKGFVFGTAASAYQVEGMAHKDGRGPSIWDAFIKIPGEIANNATADVTVDEYHRYKEDVNIMKNMGFDAYRFSISWSRIFPNGTGEVNWKGVAYYNRLINYMVKKGITPYANLYHYDLPEALEVRYGGLLSREVVRSFADYADFCFGAFGDRVKNWLTFNEPRVVAALGYDDGRFAPGRCTGCEAGGDSGTEPYVVAHHLILSHAAAVQRYRRRHQPTQRGRVGILLDFVWYEPLTADSAADRAAAQRSRDFHVGWFLHPIVYGEYPKSVRRSVKGRLPKFTAEEAGLVRGSIDYVGVNQYTAYYVRDRRPNATAAPPSYSSDWHAEFVYERDGVPIGPRANSDWLYIVPWGLYKAVTYVKEKYGNPTMLLSENGMDDPGNVTVGQGVRDAARVAYYRSYVAELKAAIDGGANCVGYFAWSLLDNFEWKLGYTSRFGLVYVDFRTLRRYPKSSAYWFRDVIAGTN

SEQ ID NO: 53803 - protein, 309 aa, Zea Mays
MMKGISEKDDLESTYAVFTVEEPKKKSGAWIKAGGKNKKHHLLSSIVGEIKVARRKSRCHHTADVHVYREFVLLGSGFLPSSEESGDSHVSGEFAAFISALPQQEAETSNQSSSQNTRQKNLALTGCGCPPLGNFQPSSASANVIAVLPDGFHGKSTSGQPLPLIERWKSGGACDCGGWDEGCMLSVLTDAAEENDAVQANQAKDGSQRFELLAQGGSREDRHAFSMTSFKEGLYTVEFRSSIALLQAFAMCIVMLHGRYPDRLQVGSQAAQEHDLLAGHEVKAMVASQGRAPTSYVPHRPPLSPVGRA

SEQ ID NO: 53804 - protein, 302 aa, Zea Mays
MARAGGGGPVRGAALVVVLLGIVVGAARAQLRQNYYGSSCPSAESTGCDASVMLMAPNGDDESHSGADATLSPDAVDAINKAKAAVEALPGCAGKVSCADILAMAARDVVSLLGGPSYGVELGRLDGKTFNRAIVKHVLPGPGFNLDQLNALFAQNGLTQTDMIALSGAHTIGVTHCDKFVRRIYTFKQRLAWNPPMNLDFLRSLRRVCPLSYSPTAFAMLDVTTPRVFDNAYFNNLRYNKGLLASDQVLFTDRRSRPTVNLFAANATAFYEAFVAAMAKLGRIGLKTGADGEIRRVCTAVN

SEQ ID NO: 53805 - protein, 493 aa, Zea Mays
MPAVDTLELVTGSPTDIAAPSVICPPPTLPPRRGGIITRLPPQFRHSSAQASSGAEQSLEIPPTICPPADAEPIASPAARTMGSVAEDSTAAAAAAASVVFRSKLPDIEIPRNLSLQAYCFERLPEVSSRPCLIDGQTGAVHTYAEVDRLSRSAAAALRGLGVGRGDVVMALLRNCPEFALVFLGAARLGAATTTANPFYTPHEIHRQAAAAGARVVVTEACAVDKVRGFAAERGVPVVAVDGAFDGCLELRALVDAAEPLAADEEVGPDDVVALPYSSGTTGMPKGVMLTHRSLVTSVAQQVDGENPNLYFSKDDVVLCVLPLFHIYSLNSVLLAGLRAGCAIVIMRKFEIGALVELVRAHGVTVAPFVPPIVVEIAKSPRVGAADLASIRMVMSGAAPMGKDLQDAFMAKIPNAVLGQGYGMTEAGPVLAMCLAFAKEPFEVKSGSCGTVVRNAELKIVDPDTSASLGRNQPGEICIRGEQIMKVLQVIII

SEQ ID NO: 53806 - protein, 399 aa, Zea Mays
MFSKSSGKDGSRLSGCSSRASSASMPPSAKTECEILRSANVKIFTFNNLKAATRNFRPDSVLGEGGFGSVYKGWIDENTLSPCRPGTGIAVAVKRLNHEGLQGHREWLAEVNYLGQFCHPNLVKLIGYCLEDEHRLLVYEFMPRGNMENHLFRRGSYFQPLSWNLRMKVALGAAKGLAYLHSAEAKVIYRDFKTSNILLDTDYSAKLSDFGLAKDGPVGEKSHVSTRVMGTYGYAAPEYLSTGHLTAKSDIYSFGVVLLEMLSGRRAIDKNRPQGEHNLVEWARPYLTHKRKIFRILDTRLEGQYNLNGAQTIAALALECLSYEAKMRPTMDAVVAILEELQGSGEAEKKLQEPKAGTKQAPAAVSASMSSSRKPRRKSLGDTKETVGVPDPKPLAHSR

SEQ ID NO: 53807 - protein, 392 aa, Zea Mays
MDGNFLQNALSKTRQVDDFTSRLLEIHRKMMEINKEENIRLGLHRSDYMLDSETSSLLQIELNTISASFPGLGSLVSDLHRSLIKQYGTSLSLEHKRVPANAASTQFSEALAQAWSEFNIDSAVIMMIVQPEERNMYDQYWLSKHLQDSHGITTIRKTLSQVEAEGQVLPDGTLLVGGQKVAVVYFRAGYAPNDYPSEAEWSARLMMEQSSAVKCPSISYHLVGTKKIQQELAKPNVLERFLKSEEIDKVRKCFAGLWSLDDEYIIKTAVEKPELFVLKPQREGGGNNIYGLDLRETLVRLQKEGGDALAAYILMQRIFPKASPAYLVRGGVCHEGLAISELGIYGAYLRNKDKVVINEQCGYLMRTKVSSSDEGGVAAGFAVLDSLYLTGK

SEQ ID NO: 53808 - protein, 87 aa, Zea Mays
MALPAPAKRPSSRSPGGCTPQRLSTQIRTIPANRRTPYLPCNFSSSPASRLGTAFSLHFTSVSRPPHHNSSSASRRRLRLMQGVMRS

SEQ ID NO: 53809 - protein, 204 aa, Zea Mays
MKRDGAGRGNWGTATDELIAQDAEDSPKMEEAAPVAEKQGEQIDAPAADENKDNKDATANEEEEKEEDKEMTLEEFEKIREEKRKALLALKAEERKVEVDKDLRSLQPLSNKKENDEVFIKLGSDKDKKKENAERDERAKKSVSINEFLKPAEGERYYGGRGRGRGRGDRGGFRGGYGGGYSRGPAAAAPSIEDQAQFPSLGGK

SEQ ID NO: 53810 - protein, 470 aa, Zea Mays
MNLVSYEYVACQGSKKGVLILSEFAGAAQSLGAGAILVNPWNITEVADSIHHALTMPSDEREKRHRHNYAHVTTHTAQDWAETFVFELNDTVAEALLRTRQVPPGLPGQTAIQQYLRSKNRLLILGFNSTLTEPVESSGRRGGDQIKEMELKLHPDLKGPLGALCEDERTTVIVLSGSDRSVLDENFGEFKMWLAAEHGMFLRPTYGEWMTTMPEHLNMDWVDSVKHVFEYFTERTPRSHFEHRETSFVWNYKYADVEFGRLQARDMLQHLWTGPISNAAVDVVQGSRSVEVRSVGVTKGAAIDRILGEIVHSENMITPIDYVLCIGHFLGKDEDIYVFFDPEYPSESKVKPEGGSASLDRRPNGRPASNGRSNSRNPQSRPQKAQQAASERSSSSSHSSTSSNHDWREGSSVLDLKAENYFSCAVGRKRSNARYLLSSSEEVVSFLKELATETAGFQSSCADYMFLDRQ

SEQ ID NO: 53811 - protein, 363 aa, Zea Mays
MTQASFWLIFCKTSDLARRALRALRGLVRLKSLVDGNAVKRQTAHTLQCTQAMTRVQTQIYSRRVKLEEEKQALQRQLQLKHQRELEKMKIDEDWDHSHQSKEQIEANLMMKQEAALRRERALAYAFSHQWRNSGRTITPTFTEPGNPNWGWSWMERWMTARPWESRLAAASDKDPKERAVTKNASTSAVRVPVSRAISIQRPATPNKSSRPPSRQSLSTPPSKTPSASGKARPASPRNSWLYKEDDLRSITSIRSERPRRQSTGGGSVRDDTSLTSTPPLPSYMQSTESARAKSRYRSLLLTEKLEVPERAPLAHSVVKKRLSFPVVEKPSVVPTEKPRERVRRHSDPPKVDPATLKDAPAA

SEQ ID NO: 53812 - protein, 112 aa, Zea Mays
MPCGVHPWTSADGICTKICDKKLMVLCPNYLGSTISIELFAFHAISFSLSRVALPWDSNMTSAWLVSNICYPKHQSTSMNDLYPSNYSLSTPSSFPCLVWHCHGILISHQHG

SEQ ID NO: 53813 - protein, 207 aa, Zea Mays
MELDIQNFMQNPQLQEFEFQNFPTSYLRCAAHRVAQHYGLETIVADSLVEGSVSRIVARKTAESRYPAIFLSEVPSNQARNDHETAEKLKFVIYQRPKAFQNGSADSRNKSGVPKTVDERIEEYNKARARIFNGSISADSDAASIMGTLSTGKDEPVNVDPSVDETKVSTMNSRSRVAVFKDTEKDRSDPDYDRNYKSILCTLASLI

SEQ ID NO: 53814 - protein, 98 aa, Zea Mays
MLPLSLLKTAQGHPMLVELKNGETYNGHLVNCDTWMNIHLREVICTSKDGDKFWRMPECYIRGNTIKYLRVPDEVIDKVQEETSKSRSVCSMLVWTAV

SEQ ID NO: 53815 - protein, 86 aa, Zea Mays
MLQQRLLRQGRGHQPGGDELPGGGLPVRRRLRPQRGAGDVRRLLRRAAVGATVRGGCPPRHSGCSTAACPRMTPGPGCSAQQQLAA

SEQ ID NO: 53816 - protein, 194 aa, Zea Mays
MGRERASQRSITCQAASSIPADRVPDMEKRKLMNLLLLGAISLPTVGMVVPYGAFFVPAGSGNGGGGTYAKDKLGNDITVEEWLNTHGPNDRTLAQGLKGDPTYLVVEQDKTLATYGINAVCTHLGCVVPWNGAENKFICPCHGSQYNNQGKVVRGPAPLSLALVHADVDDGKVLFVPWVETDFRTGQDPWWSA

SEQ ID NO: 53817 - protein, 390 aa, Zea Mays
MGTYVPYNTYIRTQSESLSTVKWILRDIEALGDKPAFISHIGDISYARGYSWVWDHFFSQIEPIAANTPYHVCIGNHEYDWPSQPWKPWWATYGTDGGGECGIPYSVKFRMPGNSILPTGNGGPDTRNLYYSFDSGVVHFVYMSTETNFVQGSDQHNFLKTDLEKVNRSRTPFVVFQGHRPMYTSSDETRDAALKQQMLQNLEPLLVTYNVTLALWGHVHRYERFCPMKNSQCVNTSSSFQYSGAPVHLVIGMGGQDWQPVWQPRPDHPDVPIFPQPERSMYRGGEFGYARLVATREKLTLTYVGNHDGQVHDMVEIFSGLVSPSNSSVAEAVDGTKLGTGVSTVRKISPLYLEIGGSVMFALLLGFSFGILVRRKKEAAQWTQVKNEES

SEQ ID NO: 53818 - protein, 126 aa, Zea Mays
MIAMSYKKLPVDVKPGNVILCADGTISLAVLSCDPDAGTVRCRCENTAMLGERKNCNLPGIVVDLPTLTEKDKEDILGWGVPNDIDMIALSFVRKGSDLVTVRQVLGQHAKRIKLMSKAATSQEFF

SEQ ID NO: 53819 - protein, 95 aa, Zea Mays
MIVNQEHRKLPEDLDYHSMTNLSLEAREKLSKVRPQTIGQASRIGGVSPADMTVLLIWMESNRRMATHRRQREQLGSVAVESDGSSEEAVQASTA

SEQ ID NO: 53820 - protein, 236 aa, Zea Mays
MGDSGGSVVSVDVERISFGGKEHHIQTNHGPVSVAVYGDHDKPALVTYPDIALNHMSCFQGLLFCPEAASLLLHNFCIYHISPPGHELGAAPISPNAPIPSVDDLADQVVDVLDFFGLGSVMCFGVTAGAYILTLFASKYRERVLGLILVSPLCKGPTWTEWLYSKVISNLLYYYGMCGLVKECLLQRYFSKEVQGFSELPESDIVQACRSLLDQRQSMNVWRFVQTMNQRYDLTE

SEQ ID NO: 53821 - protein, 353 aa, Zea Mays
MAAPPRATAVLAWCAHSRAFSLVREGRGGQLRFSRRGGPLIALVLVLYRGSGEDGQLGMGGNEEKDWAHCVEALGSYAVTAVVAGSRNSLAICEDGRLFTWGWNQRGTLGHPPKTKTESSPGPVHALAGLKIVQAAIGGWHCLAVDDNGHAYAWGGNEYGQCGEEPERKEDGTRALRRDIPTPQRCAPKLKVRQVAAGGTHSVVLTQEGHVWTWGQPWPPGDIKQISTPVRVQGLEKVRVIAVGAFHNLALTEDGILWAWGNNEYGQLGTGDTQPRSHPIRVEGLSDLSLVDIAAGGWHSTALTIQGEVYAWGRGEHGRLGFGDDKSSRMVPLKVELLAGEDIVQLSSRAHFP

SEQ ID NO: 53822 - protein, 1417 aa, Zea Mays
MEWRKKQVRPQFSNYSSVEGVLYCKPHYDQILKSTGSLEKSFEGVARSAKSEKSNGHKGQQSSRFSNMFVGTQEKCVVCNKTVYPLEKVALNGNSYHKSCFRCTHGGCTLSPSNHITHEGKLYCKTHHSQLFMVKGNFSQFEDNSGNAKVTIEKLPETEEATKNPDQGDEATRKPVENEPTDEKTSKNNVAAEKQLQSGVDVTKPSESTTAENERGTEGESKSNVVNKKPSESIVEKPLQNSVVDVKPSGNSAAMRKPWQRSMQTDKPFLSSTSTVNPSSSSDTTEKLSSSNGVDMKQSESSTLVKTTCKQNSPTENPPQSVLPSDKPSATSVDDAKPSESSKVIKKPWQRNMAAEKQLQNSAPSQKSVATDKPSPTTGMKSLDNTTEVKSPWGRRMFNNKSLKRSVDTEKSSETSVVDVRPGETSTVAPVPQQQTENVEKPSATSADDAKSADDTKSADDVKPSVASPDAKSTDDVKSSENNAAVVRKPWQRNIGTGKQPLTTVVGPKTTETSGTVKRLWQRSAATASKSGTAVVTPLQSSVVVSKPFQSNVAVKKTWQRSVTPENQLESNMSSNKPLPSKVVVESLLQSNTVEKVFQSTVPTEEPQKGIMATENQSQTIKVTKKSNETSMELSVTSETTKPPPLAATVLQSDVSTEQPSQTDMPTMAPSQIPEPTEKPSESDFNAEKLSESVVKAEKSSTTDTAAEKPLPSMITEKVESVAGTLKPSQSDTALQEILERNMATEEILQTAMAVEDAPPTNLITEKSLMKDASEEPVQTNEPSEQPLKTEEIEKPQQSEKIATDTRGSEVSTEEMLELESNATKLNKDQSELEGLSSGRNPPNFQSNPNAGQRSESKGIVAEKAADHIMEAEDDVDAEHSSESQSVAPAEVRKEQPSEHQKDVDMEQLLEPQNQDHPWNPLDPVSDTAAKDSSEPKSDIATEKPAESQNNAEQSVEQQSEPQSDKSTERPEVHQSNTSNDELSRLQNDAGTDKLSVQSSDPESNASVSKPSESQTDVATMEALEPQIDAPPDKATDQPVKPQDDASAKNPMGTESDAVCDKPSESSSDTETLLVCHQNSSITTDEPVQGGISYDTPHQRSAPIETTPGSETVVDDCIHHEDTSSKPSEENKAIEEPEEVSAKLPDDHVTSEKSSEEDKENAEASVDSAPLGNPLEVNEESSNPSGDTVTPEKPLEEDKTSAEPSESDASFGKILEADEVSANPSEDIATPEKPLEEGVGSVEPSEDNSVLDKPLEEEEVDAKPVKDVVTPEKPLEEGSTTAEPLEDNAAHEEAKEEDEVIAKPLSSVALEKSLEGSEASVEPSEDNAALEKPSEDDEANAKSSEDSVYVEKPQQEEDDNGVKALEEGVSPEKSAAGKPLEEDPVHEKPADAVAEPSSQDDTATEKPSATTDTAETA

SEQ ID NO: 53823 - protein, 74 aa, Zea Mays
MDSVLVFYPIEEVLMADFFMADQLTSQIPLLRHLEFTGCYFMAKTFRTHAYGSCTSGSQFKNLAYVLSFLPYYW

SEQ ID NO: 53824 - protein, 50 aa, Zea Mays
MAFLTLHEMLPLAFDYCGQKQAVKAVFVGMACMSASLYFLEVSLPKEISL

SEQ ID NO: 53825 - protein, 328 aa, Zea Mays
MDCVGLRPGFSLVEKAVALYWDRGEKELAVEFVRDVLRRGGLGAGAGGEHSSASGDGERGGPVGYLAWKMMMDGDYRNAVKLVIEFKETGLKPEVYSYLIGLTALVKEQKEFSKALRRLNASVKDGSISKLDAESMHSINKYQSDLLSDGVLLSNWVVQEGSSEVLGLVRERLLSLYTCAGCGLEAEHQLWEMKLLGREPDTQLYDVVLAICASQGEAAAVRRLLAGVESTSAGRRKKSMSWLLRGYVKGGFILDASETLIQMLDMGLLPDYLDRAAVLTALRRNIQESGSLESYLKLCKRLSETDLIGPCIVYLYVRKFKLWMAHML

SEQ ID NO: 53826 - protein, 210 aa, Zea Mays
MLIWPPSKGHTLQDIPNLKNMYRKAAALWVELRVELLSAIEYYAEDKVNSAQIWRLYWASHQRFFRHMCMSAKVPAVVRLAKEALAEEKCVVIGLQSTGEARTEEAVAKYGIELEDFVSGPRELLLKLVEDNYPLPPKPDCFEQDEGEEKVQEFQHKRHYGSDMSLKGRVSKLGKKEDPSSSMVINWVKDESHLWCRAGASDLSSILMLQ

SEQ ID NO: 53827 - protein, 463 aa, Zea Mays
MGRKGRKKGLLYPLTSLSPRPSAPSSLYLALASLPVARRMYAEWMAAHGRTYNAVGEEERRYQVFRDNLRYIDAHNAAADAGVHSFRLGLNRFADLTNDEYRATYLGARTRPQRERKLGARYHAADNEDLPESVDWRAKGAVAEVKDQGSCGSCWAFSTIAAVEGINQIVTGDLISLSEQELVDCDTSYNQGCNGGLMDYAFEFIINNGGIDTEKDYPYKGTDGRCDVNRKNAKVVTIDSYEDVPANDEKSLQKAVANQPVSVAIEAAGTAFQLYSSGIFTGSCGTALDHGVTAVGYGTENGKDYWIVKNSWGSSWGESGYVRMERNIKASSGKCGIAVEPSYPLKEGANPPNPGPSPPSPTPAPAVCDNYYSCPDSTTCCCIYEYGKYCFAWGCCPLEGATCCDDHYSCCPHDYPICNVRQGTCLMGKDSPLSLSVKATKRTLAKPHWAFSGNTADGMKSSA

SEQ ID NO: 53828 - protein, 315 aa, Zea Mays
MKRASETLIPVTLELGGKDSFIVCEDVDLPSVVQVATRAALQSSGQNCAGAERFYVHDDIYSAFVSQIVKTVKSISVGPPLSGRYDMGAICMIEHSEKLQNLVNDALDKGAEIAVRGSFGNLGEDAVDQFFPPTVLVNVDHTMKIMQEETFGPIIPIMKFSSDEEAIKLANDSKYGLGCAVFSGNQKRAIRIASQLHCGVAAINDFASSYMCQSLPFGGVKDSGFGRFAGVEGLRACCLVKSVVEDRLWPYIRTVIPKPIQYPVSEHGFEFQQLLVETLYGYSVWDRLRSLVNLIKMVTEQNFAPTSNATTKKRR

SEQ ID NO: 53829 - protein, 58 aa, Zea Mays
MKRPRGASPPLAAMTNPNDQGAQGEARGRGGSGELHVGQGGAGGLGRASPRRGGVVRE

SEQ ID NO: 53830 - protein, 129 aa, Zea Mays
MNKMIISAAALVEKERSRRLSTSILNQVIREAIAFKSPPRTRGGKRGRVYYTTQAAVGPPTFVLFVNDAKLFPDTYRRYMEKKLRSDAGFPGTPIRLLWRSRRRPDKRGKSADSRAQSPGTPSEVALAA

SEQ ID NO: 53831 - protein, 276 aa, Zea Mays
MVSAFLLHHFSEVSDYNFTANMETELDNVSAGSTEWKGLLKDYWERFSKYCADVSKLDGRKVERMLEEKFGPILFSDVYKDCRICPSCSEGTLRFKVSRYGEGYFVGCDRHPKCKYIARSLSQQEDETEPIEENAKSFEPRLLGVMPDSDQKVFLKQGPYGYYVQVGEDKKGLFPKRVSLSKVKDIDSVTLEDAIELLQYPKILGKHPEDDNLVLITHSKVGYNIKHRRFIAQVPKNMDPKKMTLERALKLLSSKSVRRIGRLKGKVEKKEPIEWH

SEQ ID NO: 53832 - protein, 257 aa, Zea Mays
MTGADFFASDLGWGLHGITSDQLGMAQKITITSESTTIIAHPSMRPEIEARIMQLKKDLEETTSSYLKERFSARIAKLSRGVGVIKVGAATEAELEDRKLRVEDAKNATFAAISEGITPGGGVTYVHLSKHIPSIMDLVDDTEEKMGVNIVGKALLVPAMTIARNAGADGPAVVEKLLASEWRVGYNAMTDEFEDLVAAGVVDPCRVARCVLQNSASIAGLILMTQAMMFDKIKKKKSPIPEIPGIPPLQISQKAKA

SEQ ID NO: 53833 - protein, 249 aa, Zea Mays
MADFNGKWYISSGLNPTFDTFDCQLHEFHVEGDKLIANITWRVRTPDSGFFTRSTVQRFVQDPSQPGILYNHDNEFLHYQDDWYIISSKVENKDDDYIFVYYRGRNDAWDGYGGSVLYTRSKTVPETIIPELERAAKSVGRDFSTFIMTDNTCGPEPPLVERIEKTVVEGEKTIVREVKEIEEEVEELEKEEASLFQKLAEGLMEVKQDFMNFLQGLSKEEMELLDQLNMEATEVEQVFSRALPLRKLR

SEQ ID NO: 53834 - protein, 114 aa, Zea Mays
MGPSMRVKILLLEGCSLLTTRGLESVITSWGDLQSLEVVTCNKIKDEEITPTLAELFSNLKELKWRPDNKSLLAASLVGTGMGKKGRVFFKRLILPAHQRIKGKVLNNSAGVAA

SEQ ID NO: 53835 - protein, 877 aa, Zea Mays
MSSSVSIAAEWDLLSDRFYRRLTLYSPLPWSTPAAAGATSSSSGVSGAVIGRLDLSTHIVAAAPFGGPIAAVRDDSKIVQLHSEPSRRRVLLFSSSGHPIASAPWPPLLPRLHSLGFSSSLSLLALLSDGSLLRFRLPDLQPSPCSSPVPLLPPASGGVADALFWGGGVAILTEDNRVVVATDIEVDDPHPRHLADPGIGDEEHVLCMAVVEAQFVMSGSPEVLLAVGDRVIAVDEDGVQVLGEELEIGPVQKMAVSPNGKLLAAFAHDGRLLVIPTDFSRIIFEYECESALPPEQIAWCGLDSVLVYWPEVLLMVGPNGDPVQYNYDEPIKLIPECDGVRILSNSSMEFLHRVSDSTTSIFGIGSMSPAALLYDARDHYDRQSAKAYDNYQLISSSLPEAIEACIDAAGHEFDVSRQRTLLRAATYGLAFCSRFPHERFQEMCKMLRVLNAVRDPEIGMPLTIHQYKLLTTSVLIGRLINANQHLLALRISEYLNLNPEVVIMHWACEKITASTTLPDTVLLDGLLDKLRLCKGISYAAVAAHADNSGRRRLAAMLVDHESQSSKQIPLLLSIDEQDKALSKAIESGDTDLVYLVLFHIWQKVAVEKKAPLDFFGVINARPVARDLFMAYARHSKHEELKDFFLSTGRLQDAAFLLLKESWELEKNPMASKGSPLHGPQVRLIEQAHRLFAETKEHVFESKASEEHAKLLRSQHELEVSTKQPIFVGSSVSDTIKTCIAMGNERAALRVKSEFKVPDKRWYWLKTCALATVGNWDGLEKFSREKRPPGGYKPFVEACIDAGQKNEAVKYIPKLTDPRERSEAYARMGMAKEAQDAASQAKDSDELFGRLKITLAQSSAAASIFDTLRDRLSFQGAY

SEQ ID NO: 53836 - protein, 415 aa, Zea Mays
MTTAIAIEDVRREVRILSSLTGHSNLVQFYDAFEDEDNVYIVMELCKGGELLDRILARGGKYSEEDAKVVMVQILGVVSFCHLQGVVHRDLKPENFLFSSKDENSPLKVIDFGLSDFVKPDERLNDIVGSAYYVAPEVLHRSYGTEADMWSIGVIAYILLCGSRPFWARTESGIFRAVLKAEPSFDEAPWPTLTAEAKDFVKRLLNKDYRKRMTAAQALSHPWIRNAQQVKVPLDMIIYKLMRAYISSSSLRKSALRALAKTLTTNQLFYVREQFELLGPNKNGYISLQNLKSALVKNSTDAMKDSRVVDFVNTVCTLQYRKLDFEEFAASAISVYQMEALETWEQHARRAYELFDKEGNRPIVIEELASELGLGPSVPLHVVLQDWIRHADGKLSFLGFIKLLHGVSSRSIPKA

SEQ ID NO: 53837 - protein, 717 aa, Zea Mays
MRLRRDVNLPKHIGVNNLGTSFSRESSAAADWAPEFESPLWSDQHVLVANQGPNGNGWWSPQHHSSLLADSRLHRTSSSPQQQEQHNHDAPILGPRPSPLHRTSSYPQKEPQYNPAEVIPNAPYMSNYLPGGPPNSVPRQPHQMNMPSFNEFQMHMSAQSETPFSQFPRGGTPPEPLFGGNRGHMISTGFSTNSSGQRDHLLNNGQFHGETASIMPNLLPNHLQRPNTFMPPQLLTVRQQHGMLPIQQSSKQSSRTQTHMFGPQHPPQMMNRFDNFGMPEFSDPRARSSMHHGRQGQHFPLHGSEFGIMKMGNGRSRFRSKYMSTEELENILRIQHAATHINDPYIDDYYHQACLASRYVDARSKHRFCPTLIRDPSSCTRSKDEPHAYLKVDALGRLPFSSVRRPRPLLDVEPASATDDDTVISKPLDQEPLLAARITIEDGLSLLLDIDDIDRLLQFSQQQDGGFELKNRRQSLLGQLAESLQLVDPLGANKNTHLSANDDLVFLRIVSLPKGRKLLSRYINLMVPGSDLARIVCMAVFRHLRFVFGNLPSDDGAAETVTKLASAVASCIRGMDLSGLSACLAAIVCSSEHPPLRPLGHAAGDGATVVIKAVLDRATELLTEQPAAPDYGAPNRALWQASFNAFFGLLTKYCMSKFDSMVHTMHKLGAAAATAIRKELPVELLRASLPHTDEQQRRLLLEFAQRTVPVSGHGSDG

SEQ ID NO: 53838 - protein, 282 aa, Zea Mays
MVFGRYISGEKGDHRGPLKLSLATGSLLLMQGRSIDCAKRAIPATRKQRVILNFGKSVARKHIPAESAWSTPLTPPMPWGQSSRPVNGSRHPQSPKHYGYAPISGVLPAPPVGAHHVPPSDGMQPLFVAPAPISAAAIPFTPTVPLQNTSAAWIQEVTPRPAPPRFPGPGTGVFLPPGSGHPLPHQMMPASHGHGEPNSPQGSSAYLHSKVNGKETSNGNLSPKNSPRKTSCTAEEKPECNGSLNGGGGSADEKSTVGMEQQNGVQKNVGSSKVQPHGHATE

SEQ ID NO: 53839 - protein, 263 aa, Zea Mays
MEVFGPVTPGQVSFLLGLFPVLISWIYSEILEYKKSLSHGKVHSDANLDNGTIKEDEKSVLLEGGQLKSPSTKFRNLSTKANLLRFITMDESFLLENRAVLRAMAEFGVVLVYFYICDRTDIFPESKKSYNRDLFLFLYILLIIASTLTSLKKHHEKSAFSGKSILYLNRHQTEEWKGWMQVLFLMYHYFAASEIYNAIRVFIACYVWMTGFGNFSYYYIKKDFSIARFAQAIKIHRHPRHTYPCYMSGISDLASIDTYGLLE

SEQ ID NO: 53840 - protein, 77 aa, Zea Mays
MAILARPDKTSKVRRFWNWYHHNIGRAAILLAIGNIFLGLSIAQETSAYIVSYGVFVAVWVLAVAAFEMKRCYADDD

SEQ ID NO: 53841 - protein, 728 aa, Zea Mays
MSTTQASEAAADKGLPLAVDATMIDEYASQSKLLQEFVKIPTIGKAWIFNSKDDDMSKAVVSIGKSDLLANKRRQFLLNTHISKSPSKSVDFQWSPFPTEISGVSAIVPSPSGEKLLLVRNSEDDSPTKLEIWGPCQLENEIHIAKSVHGSLYTDEWFEGISWNQEETFIAYVAEEPPQPKPVFNDYGFKKEGLSEKDCKSWKGQGDWEETWGETYSKKRIPALFVINISSGEVRPVKQIPRSLSVGQVIWAPSSSYSLVFVAWSSDNGFQGTPRKLGIKYCYNRPCALYAAPDPFGQEAEKSLTEGNKGETTTMIKLTANLSSAFFPRFSPDGKYLVFISAKSAVDSGAHNATNSLHRIEWCTDGKLDGSLGVADVVPIVLCPKDNCFPGLYCFGLLRDPWLTDGQTMIISSVWGSREVILSVNVVSCELSRVSPQDSDYSWNVLAVDKNNILAVSSSLITLPQMYYGIKVSQTESNWEWQGVSTPFPKPSDKISSVLAEHKFSILKIPISNPSDELANGAKLPFEAIFVSHKDSASNPTIVVLHGGPHSVYPSSYSKSLAFLFSQGYNLLVVNYRGSLGFGEEALQSLPGNIGSQDVNDVLTALDLVIKRGLIDPSRVAVVGGSHGGFLTTHLIGQAPDTFVAAAARNPVCNLSLMVGTSDIPDWCFVEIYGKEGKKYFSESPSVDDLCQFHQKSPISHIAKVKTPTLFLLGAQDLRVPVSNGLQA

SEQ ID NO: 53842 - protein, 157 aa, Zea Mays
MPPAFAAAPSSSICGVRIPTVRRFEAQSTVSTPRFMRNRVAAGDVDVYDLQALCNKVGWPRRPLSKIAASLRNSYLVATLYSIIRSSETEGEEKKQLIGMARATSDHAFNATIWDVLVDPSYQGQGLGKALMEKVIRTLLQRDINNITLFADNKDFY

SEQ ID NO: 53843 - protein, 148 aa, Zea Mays
MAAELVQPLAPANAKDQVGRRRGGGGELGQDGEDKVIGKRVQVVRLAGRPLPAPAAVALSGDGRRRPLPLLTHQGNHLAAVGIPGPAPRPHLSVPPQESSLPGGKRDGASGGRKKVKRPRARAGETTGRSAERCACVLEGRARQRAFI

SEQ ID NO: 53844 - protein, 315 aa, Zea Mays
MKWYSHIHEKIMRVPYGVEKEFFRYSLFLVFCNRITTSMVSAMVLLASKKSLDPVAPLHKYGVVSISNILTTTCQYEALKYVSFPVQTLAKCAKMIPVMIWGTIIMRKKYVAKDYFFSVVVTMGCALFILYPASMDVSPFNKGRESTIWGVSLMLGYLGFDGFTSTFQDKLFKGYDMEIHNQIFYTTVCSCLLSLSGLILQNHLIPAVDFMFRHPDCFSDVVILSSVATASQFFISYTIRTFGALTFATIMTTRQLVSILLSCIWFVHPLSWMQWVGAAIVFVALYTKSFLRSKPQKLAGSSPPRGSSPNPVSNS

SEQ ID NO: 53845 - protein, 74 aa, Zea Mays
MPPPPHDIAHPLFSLPSLSAVDVRSPGAIACARLPPSLAPRWTSRLVWGHGSPTDRGSRRLMRKIIFLARTENT

SEQ ID NO: 53846 - protein, 466 aa, Zea Mays
MFEKKNKDVTFCEAECFKIDANRKTVHCRSAVGTNLDGNGDFMLDYDYLVVALGATVSTFNTPGVLEHCCFLKEVEDAQKIRKGVIDCFEKASLPNISEEEKRKILHFVVIGGGPTGVEFAAEMHDFLVEDLVKLYPAIQDLVKITIIQSAEHILTMFDERIASFAEQKFKRDGIEVCTGFRVIKVSDDLITMKRKSDGEELSVPYGMAVWSAGIGTRPVVMDFMQQIGQTNRRALATNEWLRVRECEGVYAIGDCATVSQRKIMDDISTVFKMADKDNSGTLTLKEINGVLDDICIRYPQVELYMKSMHMLDIADLIKGAVGDSHKESMVVDIEEFKKALRHVDSQVKNAPATAQVAAQQGQYLAQCFNKMEKCREEPEGPLRMAGGSGRHFFRPFRYKHFGQFAPLGGEQAAAELPGDWVSMGHSTQWLWYSVYASKQVSWRTRVLVVSDWTRRFIFGRDSSRI

SEQ ID NO: 53847 - protein, 523 aa, Zea Mays
MQLPMAAYLGELVLSNDVKVLVAQKAGSTLVNIMKKGNREAREAALKALNQISSYDVSAKILIEAGILPPLITDLFTVGSNQLPMRLKEVSATILANVVASGARFESIPLDHNRQTLVSEDIVHNLLHLISNTGPAIECKLLQVFVGLTDSSTSVQNIVDAIKSSGAIVSLIQFVEAPQREVRMNSIKLLNNISPYMGQELADAFRGNFSQLSSLVKVIVDNNGISEEQAAAAGLVADLPMGDSVLTRRLLQDGAFAAIISKVLRIRQGEIRGGRFVNPFLEGLVRIVSRITFVLDDDPDIIAVARDYNLASLFTDLLQMNGLDVVQIVSAVSLEKLSQQSKHLTKILPAPSPGLCFSIFPCLSQKTVATGVCRVHCGICSARESFCLLEGKAVEKLVACLDNNNEKVVEAALAALSTLLEDGVDIEQGVMVLCDAEGINPILAVLCENRNEALRQRAVWAVERILRTDEIAYEISGNQNVGTALVEAFRHGDSRTRQVAERALKHVDKLPNFSGIFSKMGAQ

SEQ ID NO: 53848 - protein, 322 aa, Zea Mays
MVIGVIGPPGVGKSTIMNELYGYDASSPGMLPPFPTQTEETRLMGKHCTTGIDIRISNERVILLDAQPVYSPSVLIDMMRPDGSSTIPVLNGEPLSADLAHELMGIQIGVFLASVCNIVLVVSEGMNDLSMWELMLTVDLLKHGIPDPSVLTSSASQDKENKNEDQTGCEDYISDLCFVHTRLQGQDFSPSKFMLLRRTLEKHFNSSTFRVGSSNATGHASDSLVPSSTKVEDLTSSRQDIFLLPLRGHDDSTKFEYGTYSCMLGMIRDQILSWPARSFSKNLSERDWLRSSARIWDMVKKSPVISEYCKALQSSGWFRKQP

SEQ ID NO: 53849 - protein, 870 aa, Zea Mays
MPAIDRLLRQILLDGHDLRSLELRWLRRQIGLVSQEPALFATSIRENLLLGRDSQSATLAEMEEAARVANAHSFIIKLPDGYDTQVGERGLQLSGGQKQRIAIARAMLKNPAILLLDEATSALDSESEKLVQEALDRFMIGRTTLVIAHRLSTIRKADVVAVLQGGAVSEMGAHDELMAKGENGTYAKLIRMQEQAHEAALVNARRSSARPSSARNSVSSPIMTRNSSYGRSPYSRRLSDFSTSDFTLSIHDPHHHHRTMADKQLAFRAGASSFLRLARMNSPEWAYALAGSIGSMVCGSFSAIFAYILSAVLSVYYAPDPRYMKREIAKYCYLLIGMSSAALLFNTVQHVFWDTVGENLTKRVREKMFAAVLRNEIAWFDADENASARVAARLALDAQNVRSAIGDRISVIVQNSALMLVACTAGFVLQWRLALVLLAVFPLVVGATVLQKMFMKGFSGDLEAAHARATQIAGEAVANLRTVAAFNAERKITGLFEANLRGPLRRCFWKGQIAGSGYGVAQFLLYASYALGLWYAAWLVKHGVSDFSRTIRVFMVLMVSANGAAETLTLAPDFIKGGRAMRSVFETIDRKTEVEPDDVDAAPVPERPRGEVELKHVDFSYPSRPDIQVFRDLSLRARAGKTLALVGPSGCGKSSVLALVQRFYEPTSGRVLLDGKDVRKYNLRALRRVVAVVPQEPFLFAASIHENIAYGREGATEAEVVEAAAQANAHRFIAALPEGYRTQVGERGVQLSGGQRQRIAIARALVKQAAIVLLDEATSALDAESERCVQEALERAGSGRTTIVVAHRLATVRGAHTIAVIDDGKVAEQGSHSHLLKHHPDGCYARMLQLQRLTGAAAGPGPSTSCNGAA

SEQ ID NO: 53850 - protein, 427 aa, Zea Mays
MSALLDLLMGIFRQQTLGGAALELAALAAPLSLAALVGLLIGWAWRPRWAGVVTVDNAQQMAQLPAAAPPPDRATATAVVSRNEAAAVVPRICCAGVCRTVVAHAAAEDEQQQLAVNTGDLLHLWRLVDEKDGGPSWIHMMDRTLPTMRYQAWRRDPPSGPPQYRSSTIFEDASPEVVRDFFWDDEFRMKNSWDDMLLQHETLEECTETGTMVVRWVRKFPFFCSDREYIIGRRIWASGKTFYCVTKGVPRPSVPRQNKPRRVDLYYSSWCIRPVESRKGDGAMSACEVLLFHHEDMGIPWEIAKLGVRQGMWGCVKRIEPGLRAYQVGRTAGEAVSKCAAMAQVTTRFSADELVIAGPGNTEASSSSSGDGAEVGKVTKHWANSIPKVLMVGGAVALACCTFDGGLLTKAVIFGTARRFAGGPGRR

SEQ ID NO: 53851 - protein, 1011 aa, Zea Mays
MPSAISIPVGSHVLGLGATSIEETTATMITQAPAVSKSERRKLPGGSQQGIQFESSASKTKMVSAVEPAPANVECMQGTEVNSSEQTIVSATEPAPANDEHMQEQPTNIVSSVESEPSNDEEHTKHEVFLATTGDNMLASSAGTEILRDTVEHAACQPEAVCTDGTARQSELSQLDRKAFHDASYKYTHGSTKDDGILPSEGTSVDVTGSKQDDVNIVGTQTDDVSRGSSHFPVILQSTESDRPPGQVKNLESRMEQVKTEEALVNSSGGNQTHSLGDEPSHNTSLARNSPSEHSNERCSDQVIGENFKSKENIVEVHSGINTDGPDEALNALHTQSKEASMTDIGVPTDGDRCEGKGTSVEVCADMNTDGPVATQDASSTKSDKESCMMECGVSTDGCPTVCKTHNDLQGHVSCEETFVRTGGDDTTHITNANYGSNNESEATIASPVETTQKLMEGSTVIVSENSDLNKQCHTLHTRNDPPANTLLIVESNKVTCDAEIVCASRLESSGIEAETVGIQESALTDFEGTKGTGDLGDRTNSQLHDDVHGTSCSTIALVSEKEPSEDLTTGSHSEASNLLAAVEQTQETTVENQEIIDAVVFMDACKAEPVGDFTIAKGAEQTVEMVHYVDKQSAVLDYVETQTKRTSVCGSTLNESPQAAGLEEDCSVLKHGDPTSSELLTVAPNPIGETSVIQVEPEARNSDGYCTTEAGSALSETVMGLEPNKETAVPMQENIGEANDNFNNCEAHNNSEIHAFEVSMETQSSEVKEVSSIQSGAANLSTQTTALPDVTGQTSMASTGELVSTNEHIHMQGTEINSEQQTKMVSPAESAPANDEHVQDIVILSSEQQTKMVLAAEIDALCVQETAIIDLGGARGTVDLNDIRTQVPALPGRDVLGDEIKGSEQAKIESIAEIETVGVKENVIADHKETGNNSGVSIHAPLLVESGQKASPGVELRGIEVDAHVLEQAKMVSALEPDSTPDDLGRHTHEVHVTVDGAILSSRGEQDIAR

SEQ ID NO: 53852 - protein, 181 aa, Zea Mays
MVKGDIGDGQDILVRVHSECLTGDIFGSARCDCGDQLAMAMEMIEKAGRGVLVYLRGHEGRGIGLGHKLRAYNLQDDGRDTVEANEELGLPVDSREYGIGAQILRDLGVRSMKLMTNNPAKYSGLKGYGLSIAGRVPLITPITSENRRYLETKRTKMGHVYGLANAQANLANGSQSTEENH

SEQ ID NO: 53853 - protein, 1995 aa, Zea Mays
MSTEDEKLLKEAKKLPWDERLQHKNWKVRNDANIDLAALCDSITDPKDARLREFGPLFRKTVADSNAPVQEKALDALLAFQRAADADASRYAKEVCDSIVAKCLTGRPKTVEKAQAAFLLWVELEASEVFLEAMEKAVKNKVAKAVVPAIDVMFQALSEFGTKVVPPKKILKMLPELFDHPDQNVRASSKGLTLELCRWIGKDPVKSILFEKMRDTMKKELEAELANVSGLAKPTRKIRSEQEKELEEESVPETSGANTSEEAATDAPVEIDEYDLVDPVDILTPLEKSGFWDGVKATKWSERRDAVAELTKLGSAKKIAPGDFHEICRTLKKLITDVNLAVSVEATQAIGNLARGLRAQFSGNARMLLPVLLEKLKEKKPTMTEALSQTLQAMHKSGCFTLIDVIEDVRAAVKNKVPLVRSLTLTWVAFCIETSNKATVLKLHKEYVPICMECLNDGTPEVRDASFSVLTAIAKMVGMKPLERSLEKLDDVRKKKLSDMIGSSSDSVLSSGTAPITTSGAATSARGVADSMSMKRSAASMLSGKKPVQAAAATKKSGPSKSTAAKKTDGGSQSKASAALEIEDVEPAEMSFEEIEERLKSVVKAETISQLKSSVWKERLEAIGVLKQEVENLTELDKSAELLIRLLCAVPGWSEKNVQVQQQVIEVNTYIASTVNKFPKRCVVLCLLGVSERVADIKTRTSAMKCLTAFCEAVGPGFVFERLYKIMKEHKNPKVLSEGILWMVSAVEDFGISNLKLKDMIDFCKDTGLQSSAAVTRNATIKLIGMLHKFVGPDIKGFLSDVKPALLSALDTEYEKNPFEGAAAAAPKRTVRVLDTASSVSAGLFDGLPREDISAKITPTLLKNLGSPDWKVRLESIDAVTKIVEEANKRIQPTGTADLFSALRGRLYDSNKNLVMATLSTIGGLAYAMGPSVEKSSKGILADVLKCLGDNKKHMRECTLTALDSWIAAAQLDKMVPYIIVSLGDQKTGSEGRKDLFDWLSKHVSKMSDPSEALPLLKPSASSLMDKSSEVRKAAESFMNEILRICGQEVVGRNLKDLPSPTLAIVSERLKLSTVHEGFSESVKMVTTSMSLPSKAGLKNNKHGLNDRGSNVGKLVSQRGLPARASVTMVSTQDPAQSQALFNIKDSNKEERERRVLVRKFKFEEPRREQIDELKIDLFKHFREDVSLRLWNSDFKRQIDGIELLQKALPSSWKEVIELLDILLRWFVLRFCESNTTCLLKVLDFLPELFDILKDQSYMLTEAEAAIFLPCLIEKSGHNIEKVREKMGELIKQMINIYSLPKLIPYILEGLRSKNNRTRIECVDIVGYFIDHHGTEVGGLMKNLPSVAALTAERDGEIRKAALNTLATAYKNLGDDVWRYVGKLSDAQRSMLDDRFKWKAREMDKRREGRPGDARAALRRSVRENGSDIAEQSGEVVSRPVAGSMISRDFGYADAHMDRHMVPRQIPSTSGPVDWREALEIVALGLPEQSVEGMKVICHELTQAADPESTLLEDLIKEADRLVSCLAVMVPKTFNFSLSGASSRSCKYVLNTLMQTFQIKRLAHAVKEGTLDNLITELLLWLLDERVPLMDDGSQLLKALNVLMLKILDNAERTSSFVVLINLLRPLDPSRWPSPTPTESLAVKNQKFSDLVVKCLIKLTKVLQSTIYEVDLDRILQSIHIYLQELGMEEIRRRAGADDKPLRMVKTVLHELVKLRGTAIKGHLSMVPIDAEPQPIILAYIDLNLQTLAAARMLTPSGPMGQTHWGDAASNNPNPSTHSADAQLKQELAAIFKKIGDKQTCTIGLYELYRITQLYPKVDIFAQLQNASEAFRTYIRDGLAQVEKNAAAGRMPSSLPLSTPPPIAAIPNPKFAPSPVHTKSIGKTDYNEDNASGETQPFRGQGAITDQQTDRYHTSGTLDALRERMKSIQAAAIGHFDGAQARPLASMNGSNMVHGGTRLDGEPQQRSNIPPMDERALSGLQARMERLKSGSMELQ

SEQ ID NO: 53854 - protein, 1080 aa, Zea Mays
MAKPMKYDDEEEISSSAEEEDQSDAAGSVSGEEGDDDDEDAAAPPAEEAEGEGQQEEEVDEEEIEAVTTGAGAEDEEDAGAVTAAEGDDESQSTEDDEPVARDKDDDDETDAVVGKREKARLKELQKMKKHKIQEILDTQNAAIDADMNNKGKGRLKYLLQQTEIFAHFAKGSQSNEKKPRGRGRHASKMTEEEEDEEYLKEEEDALAGAGGTRLVSQPSCIKGKMRDYQLAGLNWLIRLYENGINGILADEMGLGKTLQTISLLGYLHEFRGITGPHMVVAPKSTLGNWMKEIQRFCPILRAVKFLGNPEERNHIRDDLLQPGKFDVCVTSFEMAIKEKSALRRFSWRYIIIDEAHRIKNENSLLSKTMRIYNTNYRLLITGTPLQNNLHELWALLNFLLPEIFSSAETFDEWFQISGENDQQEVVQQLHKVLRPFLLRRLKSDVEKGLPPKKETILKVGMSQMQKQYYRALLQKDLEVINAGGERKRLLNIAMQLRKCCNHPYLFQGAEPGPPYTTGEHLVENAGKMVLLDKLLPKLKERDSRVLIFSQMTRLLDILEDYLMYRGYQYCRIDGNTGGEDRDASIEAFNKPGSEKNPQADLQAQDRAHRIGQKKEVQVFRFCTEIMQTKLQYTIEEKVIERAYKKLALDALVIQQGRLAEQKTVNKDDLLQMVRFGAEMVFSSKDSTITDEDIDRIIAKGEETTAELDAKMKKFTEDAIKFKMDDNAELYDFDDEKDENKVDFKKLVSDNWIEPPRRERKRNYSESDYFKQALRQGAPAKPREPRIPRMPHLHDFQFFNNQRLNELYEKEVRYLMQANQKKDTIDGEDEDQLEPLTAEEQEEKEQLLEEGFASWTRRDFNTFIRACEKYGRNDIKSISSEMEGKTEEEVQRYAKVFKERYKELTDYDRIIKNIERGEARISRKDEIMKAIGKKLDRYKNPWLELKIQYGQNKGKFYNEECDRFMLCMVHKLGYGNWDELKAAFRMSPLFRFDWFVKSRTTQELARRCDTLIRLVEKENQEYDEQERQARKEKRLAKNTTPTKRAALRNSEGESAPLSSFKRRRQSLMDDYVGSGRRKRG

SEQ ID NO: 53855 - protein, 199 aa, Zea Mays
MKDLLLVNLRGNLQIVVQATKEYSEQLGVDACIKLFEQFKSYEDLYFFLGSYLSSSEDPDIHFKYIEAAARTGQIKEVERVTRESNFYDAEKIMNFLMEAKLPNARPLINVCDRFGFVPDLTHYLYTNNMLRYIEGYVQKVNPGNAPLVVGQLLDDECPKDFIKGLILFVRSLLPVEPLVDECEKRNRLRLLTQFLEHL

SEQ ID NO: 53856 - protein, 231 aa, Zea Mays
MEEWVAHPTEHTALDEVIPCVEPATANESLYRSRQVTFELVNVVNQVITNVSNRNFPPQLTPLYYNQSGPLMPLLCNPFTPDLRDRNCSRGEVTLDNATQVWKKYECQSTTVSGGAEICATVGRVTPSIYGQMTAGVTVSQGLYQYGPFLIQLQDCTFVRDTFTTINQGYCPGLERYSKWVYVGLVMVSLAVMLSLIFWVIYARERRHRVYSKQHQPYPVEDKPAATVPGA

SEQ ID NO: 53857 - protein, 423 aa, Zea Mays
MIISKKNRREICKYIFHEGVLYAKKDYNLAKHPKLDVPNLEVIKLMQSFKSKEYVRETFSWQYYYWYLTNDGIEHLRSFLNLPSEVVPNTLKKSSKPPSRPFGSGPPGDRPRGPPRFGEDRPRFGDRDGKDGRPGCVQNTCAHRACPLHLGSVNEGRIQCPYHGWEYSTDGKCEKMPSTKMLDVRIQSLPCFEQEGMVWIWPGDDPPKATIPSLLPPSGFTVHAEIVMELPVEHGLLLDNLLDLAHAPFTHTSTFAKGWSVPSLVKFLTPASGLQGYWDPYPIDMEFRPPCMVLSTIGISKPGKLQGKSTRQCSTHLHQLHVCLPSSRNKTRLLYRMSLDFAPWLKHVPLMHLLWSHFAEKVLNEDLRLVLGQQEGMIDGANVWNWPVSYDKLGIRYRLWRDAVERGADDRLPFSSTQAESLS

SEQ ID NO: 53858 - protein, 112 aa, Zea Mays
MLTRDDSFIRKGSHLEQRQKLGLADHPPPSNARQFRSEPSSALEKVEIEKAKQDDDLSDLSNILTELKGMAVDMGSEIERQTKAMGDAEKDYDELNFRVKGANTRARRLLGR

SEQ ID NO: 53859 - protein, 72 aa, Zea Mays
MRWDGTWEKKPKLFSFFLSFFLYVIITTHSCYRTTATGVLSACYCVRGWWVLSMPVLRSRLPPALIPGPGPL

SEQ ID NO: 53860 - protein, 56 aa, Zea Mays
MDESRTRRTIIFSPKICNNVDLLVGNIIHIFPPWKEVKIQEEHVIICTYFSHHHRT

SEQ ID NO: 53861 - protein, 285 aa, Zea Mays
MVAARLRLSLLLSVCLSSAWARPRLEPAIRLPSQRAAAADETDDGDVGTRWAVLIAGSSGYYNYRHQADICHAYQIMKKGGLKDENIIVFMYDDIAHSPENPRPGVIINHPQGGDVYAGVPKDYTGRDVNVDNFFAVLLGNKTALRGGSGKVVDSGPNDHIFVFYSDHGGPGVLGMPTYPYLYGDDLVDVLKKKHAAGTYKSLVFYLEACESGSIFEGLLPNDINVYATTASNADESSWGTYCPGEFPSPPPEYDTCLGDLYSVAWMEDSDFHNLRTESLKQQYK

SEQ ID NO: 53862 - protein, 67 aa, Zea Mays
MRYSDLKKIDRGVRRHFHDDITVIVVFLDSSLVSKASTHRGPTLSLRGGGASAGLRSNTLAPTSMWL

SEQ ID NO: 53863 - protein, 383 aa, Zea Mays
MCKKFMQVATRSLETGKNLMLGIEACSEVLESMEPDIDDDTRHEFLCTRAALYLKRKWKNDVYMAIRDCNRTWKIDVTSYQAHLHMAEALLQLGRLKEASEHAEVANGLLPPHCPLREQVDDFKQRIASAELEKNRADKNGSSKADTHGKLRSLSEILFRPDVGGSSQEGREDSDYDDDTEMDYETTVSGHESRENDQGVFRGSLSFQFHQREDQTNVHTDENGSVESPRKDDYAFQSDVAIDMKQRYVAHCNVGTDIKQASFLGEQGEFIASGSDDGRWFIWEKRTGRLIKMLAGDGAVVNCIQSHPFDCAVATSGIDNTIKLWTPDANATSMVSGPELDVLSAIENNQQKLCRNRHFVLPSEFLERFQMHEFSEGFECAQS

SEQ ID NO: 53864 - protein, 1457 aa, Zea Mays
MAAAAAAMAAHRASFPLRLQQILAGSRAVSPAIKIESEPMLQLEPKLPDVTELHVLKRDNSNIKTSLVIDDSKRKDSESLPNVGLLDMEDQFQLLKICCKCIGKQLPSASMHAILQLSATLTKVHAAAICFLESGGLNALLSLPTSSLFSGFNNMASTIIRHILEDPHTLQQAMELEIRHSLVTAANRHANPRVTPRNFIQNLAFVVYRDPVIFMKAAQSVCQIEMVGDRPYVVLLKDREKERIKEKDKDKSVDKDKATVAVTKVVSGDTAAGSPANSHGKQSDLNSRNVKSHRKPPQSFVTVIEHLLDLLMSFVPPPRPEDQVDVSGTALSSDMDIDCSSAKGKGKAVSVPPEESKHAIQESTASLAKTAFFLKLLTDVLLTYASSIHVVLRHDAELSNMHGPNRTSARLTSGGIFNHILQHFLPHATRQKKERKNDGDWMYKLATRANQFLVASSIRSAEARKRIFSEICSIFLDFTDSSAGYNAPVPRMNVYVDLLNDILSARSPTGSSLSAESAVIFVEAGLVHSLSTMLQVLDLDHPDSAKIVTAVVKALELVSKEHIHSADNAKGVNSSKIASDSNNVNSSSNRFQALDMTSQPTEMVTDHRETFNAVRTSQISDSVADEMDHDRDMDGGFARDGEDDFMHEMAEDGTGDGSTMEIRIEIPRNREDDMAPAADDTDEDISAEDGEDDEDEDEENNNLEEDDAHRMSHPDTDQEDREMDEEEFDEDLLEEDDEDEDEEGVILRLEEGINGINVLDHVEVFGGSNNLSGDTLRVMPLDIFGTRRQGRSTSIYNLLGRASDHGVLDHPLLEEPSSTTNFSDQGHPENLVEMAFSDRNHESSSSRLDAIFRSLRSGRNGHRFNMWLDDGPQRNGSAAPAVPEGIEELLISHLRRPTPQPDGQRTPVGGAQENDQPNHGSDAEAREVAPAQQNENSESTLNPLDLSECAGPAPPDSDALQRDVSNASELATEMQYERSDAITRDVEAVSQASSGSGATLGESLRSLEVEIGSVEGHDDGDRHGTSGTSERLPLGDIQAAARSRRPSGNAVPVSSRDMSLESVSEVPQNPDQEPDQNASEGNQEPTRAAGADSIDPTFLEALPEDLRAEVLSSRQNQVTQTSNDQPQDDGDIDPEFLAALPPDIREEVLAQQRTQRMQQQSQELEGQPVEMDAVSIIATFPSEIREEVLLTSPDTLLATLTPALVAEANMLRERFAHRYHSSSLFGMNSRNRRGESSRRDIMAAGLDRNTGDPSRSTSKPIETEGAPLVDEDGLKALIRLLRVVQPLYKGQLQKLLVNLCTHRGSRQALVQILVDMLMLDLQGFSKKSIDAPEPPFRLYGCHANIAYSRPQSSDGLPPLVSRRVLETLTNLARSHPNVAKLLLFLEFPCPSRCFPEAHDHRHGKAVLLDDGEEQKTFALVLLLNLLDQPLYMRSVAHLEQCKMVKITPTFLYHMDQS

SEQ ID NO: 53865 - protein, 121 aa, Zea Mays
MASTGRSMLLSLLLFAVTLSLLEMYRAKFASSELMTIAGGFVCSLLFLLLLTFIGNYQEASGDRTGWGAVVVAQLVALIVAGTVHRVCITTCFLFSAGLLYEVDKLSGMILARSESKDRPY

SEQ ID NO: 53866 - protein, 182 aa, Zea Mays
MESYVYDKKLAPLLGSKPFFAFIGEHFESAEELKHLKEVLLDLFRGEVVENLNLAGVDRIYVCTAISPTTVYMMHCALRLKRSGTSIPRMELVEVGPSMDLVVRRHRLPAESLKKEAMKTAEHAKKMKNVTKDPVQGKLGKVYMPDQQVGKLTLSNDIKGLKRERREAKKNQDSKKQKVNPE

SEQ ID NO: 53867 - protein, 442 aa, Zea Mays
MYTSGSTGMPKGVMMSHQNVLAVVSAVMTIVPGLGKKDVYLAYLPLAHILELAAEAIITGVGASIGYGSPLTLTDTSNKIKKGTQGDASVLKPTLMTAVPAILDRVRDGVRKNVDAKGGLAKRLFDIAYSRRLAAVNGSWLGAWGLEKLLWDMLVFRKVRAILGGRIRFILAGGAPLSGETQRFINICLGAPISQGYGLTETCAGGTFSEYDETSVGRVGPPLPCSYIKLIDWAEGGYLTTDSPMPRGEIVIGGPNVTKGYFKNEAKTNEVYKVDERGMRWFYSGDIGRLHPDGCLEIIDRKKDIVKLQHGEYVSLGKVEATLSVCSYVDQIMIHADPFHSYCVALVVTAQSELKSWASKQGMTYSDFSDLCHKQGTVKEVLQSLVKAGKQARLEKFEIPAKIKLIPEPWTPESGLVTAALKLKREVIKKAYEMDLAQLYSQ

SEQ ID NO: 53868 - protein, 295 aa, Zea Mays
MQPKLQTTSDHIGPHPPRATYNVQSQQPHSIADHPGNMNSSVAPLPPPPFNNSGYGGQPNQIPPPPPSAPLNPPGPQGSFPALPAPYHGNNYHRPPTTSMPNEGYNLQPAPPPPPPNQFPSVPPEHQHRPHHWGNNCPPCPERYRYNGHDRGHHRHDRRHHAHDRQHHYDDRGYRYDDRGYHYDDRGHYFDDRRHQFDDRGHHFDERAIRGSMHNEAADRSGYPFPPGPPPIPDHFEAPPGPMHYGRPSDPPPGHCAGWSRPPRISNNYSPSRHSVEPPVSHAAGAGGHGGWRPR

SEQ ID NO: 53869 - protein, 1758 aa, Zea Mays
MSQRGDRGEGHARRPGRSSSFGGHRGGGVGGAGKGGAGSSGQPPLSSNRSFRKPGNGHGGHQRVVNQPDTTGFQPAPAPGTHQTPARPPPAPQNAAVHVPVSASRPQHQDPHVSSSLSASEKPANPPLPLPKATHAAPRALPKNSNTALPQGGSQGEPSKGFNFQFGSINMNGLPQFPARTSSAPPNLDEQKRNQALVEELKVTPAPVQPALKQQQLQQQPQLPPQLPPQQVPQQPQQQSARKEAVGSSQHNSINPHITSQLKRDVHPSPSVPNVTSLRPTVQIPGVQMPIPFHHQPAQVSLQFGGHGAQLQPQVVPSSYQMSMGLTGSSTQVPQQLYAPTLQHHQLQQQAMMHPGQGMGYVPSVAHQFPQLGNIPMNIASQYAQQQPNTHAAARKTTVKITHPDTHEELKLDKRMDSSGQRAAPSLTQQSQPVGNYAPHIGFFHQPQSSYNQSGMYYPTTAGVNQVATGSSGPRYNYPVTQSGQAMTYISPSAVPPVSAQSQYTVKPHPIGLVTEKSSTHVTISAPPAKSEPPKLRAAEDSASSRQKDNEIVSGIAVSSKSILEKEESNDPLVTVKHSTVISPSLPIHGAKSQTSVTSSPVVNSVSPVAGVDGKSIESIQRTGSFNDNKKIVTKKDVRISSEPPNSASSVEDKVQTVKAGGSDHQETNNLNNELDLASSSSCSTVPLAVSRIFPGTVSVNANSTAVTAADVPGTDRSSRRPSPEGTGEPAVESFTVLAVECDKRKRTDEVATDPSKDNISSDATKHELPDACAVDPTEQASAVTSNTDDSYASPIVNNQEQLLKESAPSASEEQAMMNNFSKNSETSHFLDSNAVEVRTGTSEPTVQSSNDEGDSDISPETDLAVCNVPLVSSEGQLKSESRADDQQAAEPTVSVRSVSREKPSVEIARSKSAAGKRKKKKEMLAKADAAGSSDLYNAYKGPEEKSEMVGTADGADSSSIVDTTHVLLDEAERDVSTFADDCKKKVELDDWEDAADMSTPKLAPDSGNQAGTTQVLDSDTSEANSRKKYSRDFLLTLQHHCTGLPVGFQMNEAVNAIMNNLVGKSYVVDREPYPSPGRGLDRPTSRGDRRGAAMTDDRWTKTGVPLSPGRDVHMDLPNGTSVVNYRSSGGNHGVLRNPRGQPSNQYGGGLLAGPVHSVGPQVPRSGSDSDRWQQKGLMPSPVTPMQTMHKAERKYVVGKVSDEEEAKQRQLKGILNKLTPQNFEKLFEQVKEVNIDSVATLTGVISQIFDKALMEPTFCEMYANFCFHLAGALPDFSEDNEKITFKRLLLNKCQEEFERGEREEAEADKTEEEGEIKQTKEEREEKRIRARRRMLGNIRLIGELFKKKMLTERIMHECIKKLFGNCDDPDEENIEALCKLMSTIGEMIDRAKAKEHMDAYFGMMHKMSTSQKLSSRVRFMLRDSIDLRRNKWQQRRKVEGPKKIEEVHRDAAQERHAQSSRLGRGPAVSSVSRRGAPSMDYGSRGSSALASSSSQQGSIRGMPPHSRGSQDIRYEERNQFDNRTVLPQRVVKDEAITLGPQGGLARGMSIRGLSPASNTELPSVIDHRRILSGSNGYNSVTDWTSSSGREDSSSIIPDRTSGRTSASSQSAGPSQRPASQEGRPGSKSYSEDELREKSVLAIREYYSAKDEKEVALCIEELNAPSFYPSVVSLWVNDSFERKDMERELLAKLLVSLCSGRHNLLSKQQLSDGLSSVLTLLEDTLSDAPRATEYLGRLFARFVEESILLLEETKGIHS

SEQ ID NO: 53870 - protein, 65 aa, Zea Mays
MEETSRIPGYFKNKGILITGATGFLGKILVEKILRVQPDVKRIYLPVRAPDAASAKKRVETETLH

SEQ ID NO: 53871 - protein, 127 aa, Zea Mays
MTCAFTSGKVILESAILTTVVVLSLTAYTFWAVNRGKDFSFLGPFLFAAIIVLLVFALIQILFPLGKLSQMIYGGLASLIFSGYIVYDTNNIIKRYTYDQYVWAAVSLYLDVINLFLSLMTLFRAAD

SEQ ID NO: 53872 - protein, 995 aa, Zea Mays
MPSQVMDPRRHLSQFSNPTVAASSFSEEQFRLPTERQVGFWKQESLHHIGSKSVASSPIEKPQPIGTKTVGRVEPQPYKLRDQKTAFSLEHKTFGQERHVNLPPSLWRADQDPNLQSDPSLFPDGRRTSPNEAYNENGLFSSSLSEIFDRKLGLRSMDVRLRQPVQKVDLTHVDDEPFELTEEIEAQIIGNILPDDDDLLSDVLDVGYTAHANMGDDVDDDIFYTGGGMELETDENKKNTELNGANDGLGLLNGTMNGEHPYGEHPSRTLFVRNINSSVEDSELKLLFENYGEISNLYTACKHRGFVMISYYDIRSAWNAMRALQNKPLRRRKLDIHYSIPKDNPSEKDINQGMLVVFNVDPSITNNDIHQIFSEYGDIKEIRDAPQKGHHKIIEFYDVRAAEGAARALNRSDLAGKKIKLETGRLSGARRSTQHMSKELGQEEFGVCKLGSPSTNSPSLPSLGSSNIAAMTSCGRENGSMHGLHSGLLTSMSPFREASFLGLSSTLPQSLSSPIGIASAATHSNQAPLGELSHSLSRMNGHVNYGFQGLGAIHPHSLPDVHNGANNGTPYNLNTITPVGVNKNSRTAEAVDSRHLHKVGSGNLNGHSFDRAGEGAMGFSRSGSGHNCGHQLMWNNSNNFHGHPNSPVLWQNPGSFVNNVPSRPPAQMHGVPRAPSHMIENVLPMHHHHVGSAPAINPSLWDRRHGYAGDLTEASSFHPGSVGSMGFPGSPQLHGLELNSIFSHTGGSRMDPTVSSAQISAPSQQRGPMFHGRNPMVPLPSFDSPGERMRSRRNDSGVNQSDNKRQYELDVDRIMRGEDSRTTLMIKNIPNKYTSKMLLAAIDESHKGTYDFIYLPIDFKNKCNVGYAFINMTNPQHIIPFYQSFNGKKWEKFNSEKVASLAYARIQGKTALIAHFQNSSLMNEDKRCRPILFHSDGPNAGDQEPFPMGSNIRARSGRSRTSSGEENHHDIQTVLTNGDTSSNGADNSGPTKDTE

SEQ ID NO: 53873 - protein, 139 aa, Zea Mays
MMTDGFNSCRNVVCNFTEGKHQDFCWFAANRVWFIFVTGCVAAGAMYSFPQIQLPARAIEAAKRAGKAADVFYCLKLLEATGISTVPGSGFGQKEGVFHLRTTILPAEEDFPTIMSSFKKFNDSFHGAIRGLLQDVMST

SEQ ID NO: 53874 - protein, 492 aa, Zea Mays
MEHCTAFICTSAQWPHSITTTRRVAYHRSANSSFSAPQRRRRSTLYVMNAASTSAPISPQNITQLPRTNSTVIKSISSDKPSSAMEQLDIERGVCIPFRKYTPEMVRKKVLDSRGSILSLASRGVEIIWKLGFYWSSLVYDFLVGQDEEIVPYRARQLRNLLCDLGPSFIKAGQVLANRPDIIREDYMNELCILQDDVPPFPNQVAFSIIEEELGQPIERLFSKISSETIAAASLGQVYRATLRETGEDVAIKVQRPGIEPIIYRDLFLFRTLASFLNGISLQKLGCNAELIVDEFGEKLLEELDYTLEATNIEDFLENFKDDPTVKIPQVYKQLSGSRVLVMEWIDGIRCTDPQAIKEAGIDMEGFLTVGVSAALRQLLEFGLFHGDPHPGNIFAMRDGRIAYVDFGNVAVLSQQNKQILIDAVVHAVNEDYAEMANDFTRLGFLASGTDVAPIIPALESIWQNSAGKGLADFNFRSVTGGSCLYKYTTSS

SEQ ID NO: 53875 - protein, 92 aa, Zea Mays
MLEEHPKLRMSKASVTHEGNNLYMQSPEVLEQMTRPNLSIPMFELLKEVPYTTVHATGMAENNGKKVSSLRKLRVAFKGIEDASKMDTTVSS

SEQ ID NO: 53876 - protein, 500 aa, Zea Mays
MISTGQRHSFLGKYKVGFTNEGKILALDLEIYNNGGHSLDLSLAVLERAMFHSENVYDIENIRINGQVCFTNFPSNTAFRGFGGPQGLLIAENWIHHIATELQRSPEEIKELNFHNDGVVLHYGQLLQNCTISSVWDELKASCNFVEARKAINNFNSNNRWRKRGIAMIPTKFGISFTAKFMNQAGALVQVYTDGTVLVTHGGVEMGQGLHTKVAQVAASSFNIPLSSVFISETSTDKVPNASPTAASASSDLYGAAVLDACQQIKVRMEPIASKGTHNSFAELAQACYMERVDLSAHGFYATPNIGFDWTIGKGTPFNYFTYGAAFAEVEIDTLTGDFYTRTADIVMDLGFSINPAIDIGQIEGAFIQGLGWAAIEELKWGDDNHKWIRPGHLFTCGPGSYKIPSVNDIPLNFKVSLLKGVPNPKAIHSSKAVGEPPFFLGSAVLFAIKDAISAARAEEGHLDWFPLDNPATPERIRMACVDSITKKFAGIDYRSKLSV

SEQ ID NO: 53877 - protein, 239 aa, Zea Mays
MVSSALRRCLPCHASLCHAFPPHPLLAAAGVFRRSFQSGDGETMDEFEERLFGGKDTDKGSLYEKLDRAENTGRRYNMGSGMGGLTGLSDKSRSGLSKGGFTWLSDSSSSGFPGFPASGDRSNSGWMDGYDSFNDGLNDTIANAARNIQMEEDEDVDGDWEDDFEFRPDVRFRQGSTYSVRDLDLRKPAAAKNPPRRQFETTTAEVLKKADFRNVRFLSNFLTEAGIIIKRSQVTLFFL

SEQ ID NO: 53878 - protein, 304 aa, Zea Mays
MFSKGIKTCLTYIEAVPWNENEEEKLKNLFARFTFDEAISQDILARLRPHNWKSSDDLAVQLIQSVTNSTSTMARKDMQSLVNGLLSKSSVYQKDSSGLNKESLYQICYSCLESLVDLFEEAIEPTYYTGQAVVVRGSKPLIERISTQTENLNWLLDILVNIDIAEEFVELWAKQGRLIRMHEQASAIVRYELSRISAGVFIALGKGKVQCRGDVRSLLFHGWFSTMLLDFGWLQRCPKGLDLRSLEENLGRGLLTLPLRQQQCLFEEWFQFYATKGPECPNLIRAFQVWWRRSFIRSLVEPQN

SEQ ID NO: 53879 - protein, 244 aa, Zea Mays
MFGSSSSLLGCSDMMNQSLFLVGEIGGNDYNGPLLSGVPMEKIRAITPSVVAKISSTISELIRLGAKTLVVPGNLPIGCIPDYLMIFKSNKEEDYEPQTGCLRWMNEFSQYHNKVLVEQLKKLRKLHPGATIIYADYYGAAMEIFLSPEQYGIEYPLVACCGGEGPYGVSPSTGCGFGEYKLCDNPEKYGSWDGFHPSESAYRAIAMGLLLGSYTRPSITSTTTSCPQLMELGSSAEYKPLYDL

SEQ ID NO: 53880 - protein, 270 aa, Zea Mays
MESLTLRASTAASPLQRRRLLPGRQRATYVRATASAGEPDLSVRVNGLQMPNPFVIGSGPPGTNYTVMKRAFDEGWGAVIAKTPARISLKSGCEGVSAINTIMSVMGINLKTLRPEPCVEGYSTPGGYSARAVHPIALAKVMQIARMMKEEFADGQSLSAIGGVETGNDAAEFILLGADTVQVCTGVMIHGYPLVKKLCAELQDFMREHNFSSIEEFRGASLPYFTTHTDLVHRQQEAVRQRKAIKKGLQSDKEWTGDGFVKETESMVSN

SEQ ID NO: 53881 - protein, 632 aa, Zea Mays
MGKRPRTTLRRTPARGLPKSKRADELPSMPDSDNDEIDAFHKQRDMIPFDANDVRESEDDDVEQPVFDLKGVSDSESDDSKGELSGDMAEADYEGWDKGYISKLKRAQRAVKQIAGGDDSMDEQEDETQENVWGRGKNAYYAPGEQSGDDEVDYEEAQRIQKNKEKRLSMKDFGLEDGESDEEGNATKVSNHESKMKEDFAVLSGDEKMDVLYSSAPELVSLLSELKDAHEELRAIGQLTSEVTSCLGKDKMQPFEVKKACLLAHCQAITFYLLMKSEGLSVQDHPVISRLIETKNMVEKIKQITLNPVSQKGCADDHSMHCGTIQTDKIVSLDKQEGKFSNVLALDKVKQGAEVSESRKSEPCNNDYHEVNEQKNKDERMGLHSLEMLKVRANLEERLKKKGLYNLTRSKPEKSSKTRTTSDNGLQTLDDFDDEVLKNNQMMKPSKLVAAAAKSNKSMFVSGDDDLPKRDNIGERRRKHELRVLSRVGANSAEDHELPDGDASEEEDHHELPEGGDESEDDIHRDVKRKRTEKLSTKNALYSPTPGVEHLEEETEGDGKRTISYQILKNRGLTRSRNKKKKNPRKNYRDKHKNKLVKRKGQVRDIKKQSGPYGGETSGINPNVSRSVRFKS

SEQ ID NO: 53882 - protein, 138 aa, Zea Mays
MSLFFTREKYVATYEGMIMPVPDKRQWLSTDLPDVDPPLYHAQPGRPKKKRVRAKGEPHVEARASKRAAVKCSNCHTYGHNVKGCGVPLRADWEPRKGAKYTRTRRHLKEDQELGHKSCHRSGKGMLEVLCVVLLAEF

SEQ ID NO: 53883 - protein, 79 aa, Zea Mays
MLRQEVDLEKSRYKRGDPCHDKDFEVCIRTKNNAWVIAKISQGRELYMALEKGGETLLYASTAVEKFSNRYCEGAFSTD

SEQ ID NO: 53884 - protein, 192 aa, Zea Mays
MNKLKKKALRVIAEHLSAEEVADIKQMFDKMDVNKNGKLTFEEFKAGLRKLGNQMHDSDLQILMDAADVDRNGTLDYEEFVTVSVHVRKIGNDEHIQKAFAYFDRNKSGYIEIEELREALADELDGSDEDIIGGIIRDVDTDKDGKIGYDEFAAMMKAGTDWRKASRQYSRQRFSNLSLKLQKDGSLGADTR

SEQ ID NO: 53885 - protein, 140 aa, Zea Mays
MEQLKPLVAQLDRVKNIPAPEFGSLQTWERANIGAFAIGDPAAADSSRNSQGQYGTPMPYIGETKVEVDLLSDGVKEGAESGKTDSELKVLPPWMIKDGMNLTKEQRGEIIAPQKLEKSDAGDDKKHDLKDDDCFRSAQE

SEQ ID NO: 53886 - protein, 350 aa, Zea Mays
MLLGTLHIQTQFRGLHSRRGYQRLKKGAMNLQSFIRGERTRIHFDNLVKRWRAAVLIQKHTRRRLAANMFNDQLNHVILLQSVTRGFLARRKYKCLQNEKESKASHSIVQGNTRKNNSESRICHEMNGHYPHEPVITELQGRITKAEAALRGKEEENVMLKQQLEQYERKWSEYEAKMKCMEEAWKRQLSSLQLSLVVAKKSLAADDAATRAARTDCTPTHAQYDSEDTLSTGTRTPEVIESKHDNHNPEAKVSAGNSDRRVNAVNHLAKEFEDRRQVFEDDAGFLVAVRSGQIGSNMNPDEELRKLKDRFATWKKDYKSRLKETKVNLSKVGTHDEKSRKRWWGKKSSK

SEQ ID NO: 53887 - protein, 751 aa, Zea Mays
MARKLRFFKEQMSKADITASPTQLNGTHMDFDELEIKLGELEAELTEVNANNEKLQRTYNELLEYHTVLQKAGEFFYSAQRTAAAQQMEMEANQSGQTSLESPLLEQEMTTDPSKQVKLGSLSGLVPKEKAMAFERILFRATRGNIFLRQEPVDEPVTDPVSREKVTKNAFVIFYSGERAKTKILKICDAFNANRYPFPEDVGKQLHAVQEVSGKISELKTTIDMGLAHRDSILKNIASDFEQWNHLVKKEKAIYHTLNMLSVDVTKKCLVAEGWSPIFASIQIQDALQRATLDSKSQVGSIFQVLNTKESPPTYFQTNKFTSAFQEIVDAYGVAKYQEANPGVFTIVTFPFLFAVMFGDWGHGICLLLATLYLIIREKKLASQKLGDIMEMMFGGRYVIMMMAVFSIYTGLIYNEFFSVPFGLFGKSAYACRDSSCSDATTEGLLKVRDAYPFGVDPVWHGSRSELPFLNSLKMKMSILLGVAQMNLGIVISYFNAKFFRNSINVWYQFIPQLIFLNSLFGYLSLLIIIKWCTGSKADLYHVMIYMFLSPTDDLSENQLFSGQKTVQLVLLLLALVSVPWMLIPKPLLLKKQHQQRHQGHQYAMLQGIDESVGAELGEHHEDAHDHEEFEFGEVFVHQLIHTIEFVLGAVSNTASYLRLWALSLAHSELSTVFYEKVLMTAYGFNNVFILIIGVVIFIFATIGVLLVMETLSAFLHALRLHWVEFQNKFYEGDGYKFAPFSFALIREEED

SEQ ID NO: 53888 - protein, 513 aa, Zea Mays
MKKGENAVFTIPPELAYGEDGSPPVIPPNATLQFDVELLSWVCIKDISKDGGILKKVVAKGDKWENPRDPDEVVVKYEARLEDGTVVSKSDGVEFTVRDGVFCPAISKAVKTMKKNEKAHLTVMPQYGFGVKGRQASGEEASVPPNATLHIDLQVVSWRTVTELGSDKKILKKILKEGEGYDCPNDCAVVRVKLIGKLEDGTLFVKKGHDGEEPFEFKTDEDQVIEGLDKAVLSMKKGEVSLVTIPPHHAFGTNETTKDLATVPPNSYVYYEMELVSFDKEKDSWDLKNVAEKIEAAAKKKEEGNVWFKIGKYARASKRYEKALSFVEYDSSFTEEEKQLSKPLQISCKLNNAACKLRLNDYKEAKELCTEALYRRAQAHMHLVDLDLAEADIKKALEIDPDNRDVKMGYKRLKEKVKEYKRRDAKLYGNMISKLSKLEDTEDNGQMSQAVNKKRELLWPLAEMLRRFFTADGSKGSTLWLVLRLLIPVIVLVAVCVGYFMHSSVEEIDCINC

SEQ ID NO: 53889 - protein, 828 aa, Zea Mays
MGRRGRPLLAEAVGRGVLRLVGSRHGDPGRGARPDGDPAPGGGRPHRAHPPRGFRQQALRPAALAPGSLLASGFTSPQQQFRLHPLRLLQRPHRAHRRRYRLQPVRVVVAPHRPRRMRLPRQLLRRQRQRLWHAPRLLGFDNLWDLQLRDNELTGPVPESLFKLKALKNVTLTNNLLQGPMPQIPNQLHADIKADSERFCVQEAGKPCDPRVSLLLEVAAGFMYPKALATDWKGNDPCVFPGVSCIQGNITELIFTNKGLSGSISPSIGKISSLKVLNLANNNITGTVPEEVAALPSLTEVDLSNNNLYGKLPTFASKSAVVKTAGNPNIGKDAPAPTAGSGGSNDSLSGGGSSGSIGNNGGSSPSSVGVIVGSVAGTVVGLGLVAALGFYCYKRKQKPFGRVQSPHAMVIHPRHSGSDDMVKITVAGGNANDGARASETYSQASNGPRDIHVVESGNMVISIQVLRNVTNNFSEENILGRGGFGTVYKGELHDGTKIAVKRMEAGVMGNKGLNEFKSEIAVLTKVRHRNLVSLLGYCLDGNERILVYEYMPQGALSQHLFEWSEKNLRPLEWKKRLSIALDVARGVEYLHSLAQQTFIHRDLKPSNILLGDDMKAKVADFGLVRLAPADGKCVSVETRLAGTFGYLAPEYAVTGRVTTKADVFSFGVILMELITGRKALDETQPEDSMHLVTWFRRTQLNKETFRKAIDPVIDLDEETYASVSTVSELAGHCCAREAHQRPDMGHAVNVLSTLSEVWKPADPDSDDSYGIDLNMSLPQALKRWQAFEDSSHFDGATSSFVASLDNTQTSIPTRPPGFADSFTSADGR

SEQ ID NO: 53890 - protein, 358 aa, Zea Mays
MKWWVKRLIGRPKDVRIIWPYPFTEGKLFVMTLTAGLEGYHVNVDGRHVASFPYRTGYSLEDATALSLNGDIDIESIFASSLPNSHPSFAPERYLEMSEQWRAPPLPTEPVELFIGILSAASHFAERMAVRKSWMMYTRKSSNVVARFFVALNGKKEVNAELKKEAEFFQDIVIVPFIDTYDLVVLKTVAIAEYGVRVVPAKYVMKCDDDTFVRIDSVLDQVKNVGNDKSVYVGSINYFHRPLRSGKWAVTYEEWPEALYPNYANGPGYVISSDIARYIVSEFDNQTLRLFKMEDVSMGMWVEKFNRTRRAVEIRHDVRFYQSGCYNGYFTAHYQSPQHMICLWRKLQSGSARCCNVR

SEQ ID NO: 53891 - protein, 83 aa, Zea Mays
MSSANDASACPIRLWHRNLILDSIEGLQCRHRHSWKSSTDGHRAPRWAVLSTAARTACVGAILTPAPTSAPATQHADDTSSSL

SEQ ID NO: 53892 - protein, 744 aa, Zea Mays
MGKRLSNPTSSYTYELAAILIHKGTAANSGHYVAHIKDESNGQWWEFDDETVSKLGLHPFGENLGKTSNKDDRKPQGISIEGSVTNNNNGHQEAASSSSPGEMFSSTDAYMLMYKCTNKDGNATESNKIMEFNNSLLPHHFLDEINEQNASCMKSCEEYQSKKGSHLAYITERRQEVKSILIEAPANPEDNSYFWISTDWLRQWADNITPPLSIDNGPIQCEHGKVPVSKLTSMKRLSAAAWQKLFSKYGGGPTLSGDDFCMVCLKDGAKNAVSADVYRDRKESFKNLAEAALAGSCSDSPSYFISKAWLTHWLRRKNAGILSDADNGPTSALRCRHGYLLPEHAPGAKRVSVPESLWLFLYQTISEKVDDVVTFPSDCQPCKICSQELSDVASVEGNLRAVKLEQRYKHEKLISGKSFALRPGEKYYLVPSSWLSEWRAYITTTGKNISSLPEPQSLEAVVSSLICEKHSRLLQKPLDLVCKRGSITQKTSNNDGLTIIPEYDWKLFSEEWSATPGKGISAEIAFSKDAQDKVHGSSEAMPITDGNLDQSLYGANDDFGAREPYVRTDPEVCEECVGERESCALVQKLNYQNEDIHVYFVRGKAPPKSIKEASKDVPVSDRRISKRSRRTSSGNSISLKVSGSTSVYQLKLMIWESLGIVKENQKLHKGNVEIEGDLATLADKSIFPGDVLWVRDSEIFENRDIADEISEQKGDILQVEEGFRGTLLTSSVSAQLCQGITFSE

SEQ ID NO: 53893 - protein, 91 aa, Zea Mays
MANTYASNLHTSKQEEPFIRGCMARGNYICIWLIHFYLLHMSVCHLCVSSSYLLKNWTFLCYIFVLYCVGASVPGILHGGGRTGDALSPWS

SEQ ID NO: 53894 - protein, 71 aa, Zea Mays
MEKKQKVKKTEGELFETEKEASKSLPDFKKDDQKAVDSALIKAIEAVLELKTYLGARFSLRDGDKPHEMVF

SEQ ID NO: 53895 - protein, 409 aa, Zea Mays
MLRIYCVSLFFFNMSPVSSDSYHFLMRVNQCLRDACSISTIPYCDSFIDCGRGIGSGLYRQQWFNDSGAEACFNTGNDATFQYGIYEQAVLLTTEDSAVKRYIYSLFWGFQQISTLAGNLVPSYFIWEVLFTMAIIGLGLLLFALLIGNMQNFLQALGRRRLEMQLRRRDVEKWMSHRRLPEDLRRRVRRAERFTWAATQGVNEEELLSNLPEDIQRDIRRHFFRFLNKVRLFTLMDWPILDAICDKLRQNLYISGSDILYQGGTVEKMVFIVRGKLESISADGSKAPLHDGDVCGEELLTWYLEHSSANRDGGKIKFQGMRLVAIRTVRCLTNVEAFVLRASDLEEVTSQFARFLRNPRVQGAIRYESPYWRTIAATRIQVAWRYRKRRLKRAEKSRLSEETYASLGS

SEQ ID NO: 53896 - protein, 80 aa, Zea Mays
MLNPYLDRATMITGRGSSADELPEFSPTYVAFSTLGLVILTIFTNVMFNLYIKPSVDGVDPPPERIQRTALVNPADRPSE

SEQ ID NO: 53897 - protein, 183 aa, Zea Mays
MPKAGGGAADEEEFRAEVEERLINEEYKIWKKNTPFLYDLVITHALEWPSLTVQWLPDRTEPPGKDHSVQKMILGTHTSDNEPNYLMLAQVQLPLDDAEADARHYDDDHADIGGFGAASGKVQIVQQINHDGEVNRARYMPQNSFIIAIKTVSAEVYVFDYSKHPSKPPLDGACNRWFTAEGT

SEQ ID NO: 53898 - protein, 199 aa, Zea Mays
MNKMNLPAPFRMALPTPPLPSQVPVIPHPQPPPGSTTTGELHSADLSSDESELESSDEDIDKRKIKRAKHEAIVGPAVDKNVAHEAVGVKSVALVSNELQVIKKKNPVLQIKITPKPIQKEPPVPSMTENEPDSTHEQLQEKHFVTPQEMSREKLPPEEILSLPMFKNYTPGNPASVLYIKNLAKDVTHDDFYYVFGMP

SEQ ID NO: 53899 - protein, 217 aa, Zea Mays
MALHIGQLLTSGKRTDIAFEVDGEMFPAHKVILSARSPVFRAQLFGPMKDKDMKCIKIEDMEAPVFKALLHFMYWDELPDIEELTGVNTTWVSTLMAQHLLAAADRYALERLKLLCELKLCEDVAINTVANTLALAEQHHCYQLKTVCLKFVALPENLKAVMQTDGFDYLQQSCPSLLTELLEYVAKAGEHSVSPCLYSTEVLDGGDANGRRVKPRI

SEQ ID NO: 53900 - protein, 89 aa, Zea Mays
MQLLLGRPPRCCEKKGDVMAVTLLFMNWQQKGHVFLWNTCCQKEVLVCLFVGPVCNVHKRYRRRLYVVFDPKNKPDYGNTATEYRVSYA

SEQ ID NO: 53901 - protein, 197 aa, Zea Mays
MDIALHYGAMLRECIRHQSIARYVLESEHMKKFFDYIQLPNFDIASDASATFKELLTRHKATVAEFLSNNYDWFFEEFNSRLLSSTNYITKRQAIKLLGDMLLDRSNAAVMMRYVSSKDNLMILMNLLRDSSKNIQIEAFHVFKLFAANKNKPPEVVNILVTNRSKLLRFFAGFKIDKEDEQFEADKEQVIKEISAL

SEQ ID NO: 53902 - protein, 538 aa, Zea Mays
MAGAPGVGPGAGGGGGAAAGLKTYFKTPEGRYKLQYEKAHSAVLHYSHGGKTVSQLTVAYLKEKPASQGSQPSTPSASSGMRSAAARLLGTGNGSKALSFGGGNGASRAVAGSSRVGGGLGTPTGLGGSQGGTNYDGKGTYIVFNAADTLFISDLNSQEKDPLKSIHFSNSNPLCHAFDPEAKEGHDLIIGMGSGDVYSMSLRQQLQDPGRKPVAALHYNKGDKDVSPNGRHDQGSIGTCLNKDGNTDCTFPAVKDQSQFMVAHAKSSKSNPVARWHICQGSINAISFSPDGAYLATVGRDGYLRVFDFSKEQLIFGGRSYYGALLCCTWSSDGKYLLTGGEDDLVQVWGMDDRKIVAWGEGHNSWVSGVAFDSYWSPPSSDGNGENVYRFGSVGQDTQLLLWDLALDEIVVPLRHPSSASPTFSSGSPSTHWDNACPPTGVLQPSPRMRDVPKLSPLVAHRVHADPLSGMVFTSESILTICREGLIKIWVRPEQSENNQQSNSSEFALGPASKDRAITSSNKASSSSFKKLPPVLVT

SEQ ID NO: 53903 - protein, 219 aa, Zea Mays
MSVAAEMVEQLELADCDVTFIADFIDLLIVNLIPGWRPVNDAAANSYRRSESELAVNSHQNISKLVPDYALIDGVMRPKDVNASTSCLDSVSSATNLGGSQGSEGSVISVQLAESSKSVSDYGAEDYGTMDCGGYKDGISTLDCSHVLDNGSRSIFHIDQASPFLELASCGSSTSTDNQDVMNGELVFIEAQYKHLVDELTRMREEAREGARKNWLPDT

SEQ ID NO: 53904 - protein, 150 aa, Zea Mays
MTLNPWNRCSKWKLAHAERFAADFYVADAKSGRRALVKAGHHSKVVPLIDENLLVTTSRGTELSSTLEHWLEERNLSSEEAQIIRLEEGYIREGMRLSVVGVLSKKNGDAVILPPLEPQSTGFVLLSCLLPSYFDGIVLRLAAVPNSGVS

SEQ ID NO: 53905 - protein, 57 aa, Zea Mays
MQPNKADKSNTQDSIYGANFSCKISPWLATGCLSPRFMYEELKKHATRAISSESHPE

SEQ ID NO: 53906 - protein, 151 aa, Zea Mays
MKPEYCNFVAAIMKFSVTVVRKKSPPNDLSSPCTCSVAGANLQNDRCQQTCVSSSIPWIVGNKSPPMQASRSREVFLLYPIHNGSSFRLSVVNIVVNGEELQFRLVSIEWLVRKIPVEINIVCITMPSKSKPIRVHCRKYMKVHVLNNESC

SEQ ID NO: 53907 - protein, 383 aa, Zea Mays
MASQDAGVVLLSQELVAALLTCALFCLFPTAGRAQACLPTINFDGLFAPLIHNARQSQEQKVRCLVHYFERVTDSMPTGLVSFERKVLPRRAFSDGVPYPDIHAWVASSAPLCQFTVFSSGFIEDEEQEALQVDFANKYLGGGALSWGCVQEEIRFMINPELIVGMLFLSCMEDNEAIEIFGAERFSQYMGYGSSFRFVGDYLDTKPFDSMGRRRTRIVAIDALDCPARLHYESGCLLREVNKAFCGFFDQSKHHLYAKLFQDLHNKDDFSSINSSEYVGVSTGNWGCGAFGGNPEIKSMIQWIAASQALRPFVNYYTFEDVSLQRLEEVIQWIRLHGWTVGELWHMLMEYSSQRLGGETHKGFLAWLLPSDRPKNQVHYMSE

SEQ ID NO: 53908 - protein, 399 aa, Zea Mays
MAASIAASPFFPGSPAPAAPKNGLGERPESLDVRGVAAKPGASSNAVRAGKTRAHAAVPKVNGGKSAVADVEHETVTVPSSVPRTFYNQLPDWSMLLAAITTIFLAAEKQWTMLDWKPRRPDMLTDTFGFGRIIHDGLMFKQNFSIRSYEIGADRTASIETMMNHLQETALNHVKTAGLLGDGFGSTPEMSKRNLFWVVSQMQAIVERYPCWDWHIRDSMTGHTILKATSKWVMMNKLTRKLARIPDEVRTEIEPYFVGRSAIVDEDNRKLPKLPEGQSTSAAKYVRTGLTPRWADLDINQHVNNVKYIAWILESAPITIFENHELASIVLDYKRECVRDSVLQSHTSVHEDCNIESGETTLHCEHVLSLESGPTIVKARTMWRPKGTKAQETAVPSSF

SEQ ID NO: 53909 - protein, 245 aa, Zea Mays
MNQRMPLIYVKLYMYQICRALAYLHNCVGVCHRDIKPQNILVNPHTHQLKLCDFGSAKVLVQGEPNISYICSRYYRAPELIFGATEYTTAIDVWSAGCVLAELLLGQPVFPGDSGVDQLVEIIKVLGTPTRDEIKRMNPNYTEFKFPQIKAHPWHKIFHKRMPSEAVDFVSRLLQYSPNLRCTALEALIHPFFDELRYPNSRLPNGRSLPHLFNFKPNELRGVPEEFVVQLIPQHAKKQCAFLGV

SEQ ID NO: 53910 - protein, 213 aa, Zea Mays
MWDVRHLVRIIDDDMPLAQFAVAFNGASWVDPDSVALMVMQTMLGSWNKSAGGGKHMGSELVQRAAINDIAESVMGFNTNYKDTGLFGVYAVAKADCLDDLAFAIMHEMSKLSYRVTEEDVIRARNQLKSSIQLHLDGSTAVVEDIGRQLLTYGRRIPTPELFARIDAVDASTVKRVANRFIFDQDVAIAAMGPIQGLPDYNWFRRRTYMLRY

SEQ ID NO: 53911 - protein, 633 aa, Zea Mays
MDDIKETVRTAGDSLCRAVSSLTIRLCDISLTSTSEANETMNIVLPYLLSEGILSKVSSVQKAAISLVMKLAKGAGPALRPHLPELVSCMLECLSSLEDQRLNYVEMHAGNAGIKTDKLETLRIAVAKDSPMWETLDICIKVVDKNSLDLLVPRLAQMIRSAVGLNTRVGVASFITLLVQKVMVDIKPFAAVLMKLLHSAVLEERSSAAKKAFASSCATVLKYASPPQAQKLIEDTTSLHSGGKNDQLSGAILIKAYLSNASDILGGYNAVVIPVIFVSRFDDDKDTSALYEELWEDIPSSERVTLTLYLPEIVSLLCDGMSLSSWAGKRKSAKAIKKLCDVLGEPLSAHYQNILKSLLKELPGRFWEGKDAILDALASLCACCHVAITAEDSCLPSVILNCVCAACSRKSKLYREAAFLCLHKVITAFRDPGFFNSVFPMLFEVSNQSAISKTKGSAELDESEGASVSLDKVLNCATSCISVAFPQDIINQKKNVVELILNSLLPEESWQVKLSSFLCIKELCLKFDNSGDSNTWPQDTAYLVEELFHLVSPKLVDSIRLVKIAQVHVAASECLLDLSKLYRDFPLSNRTEAKFEDELTELCESEKSEQAKAILKECLAILKALPGVTMTTD

SEQ ID NO: 53912 - protein, 190 aa, Zea Mays
MDGRFVPNITIGPLVVDALRPVTDLPLDVHLMIVEPEQRVPDFIKAGADIVSVHCEQTSTIHLHRTVNQIKSLGAKAGVVLNPATPLNAIDYILDVVDLVLIMSVNPGFGGQSFIESQVRKIAELRRLCAEKGVNPWIEVDGGVGPKNAYKVIEAGANAIVAGSAVFGAPDYAEAIKGIKTSQRPAAVHA

SEQ ID NO: 53913 - protein, 565 aa, Zea Mays
MERTCCPSYTIRLKANDFICSKEQARVLKKIQRFLDGELDPQIGSPQCKASPTKRSLGEPLNSPTSKVSKVSAEEFQKGTSPNILKEDDIICCLANKINEATATCFRGGVFGSVQLPKAVVKTVKPQVKRKVGEAVQEKKVGEAVQALVYTCNISFQIVAAVRRALPKENGATQTEVPADLSPNSVAEKLSVAMERLGELAGFEVKACNGHLNFYLASNQAMQNHTSVVVPVQASDKSSGSKPSSVNQTNAKYPLKRKNLEIRLSTSHFDPEEFALYRRYQTKVHKEKAVTESSYKRFLVDTPILFVPPKTGDNTVPPCGFGSFHQQYRIDGKLVAVGVVDILPKCLSSKYLFWDPDLPFLSLGKYTALKEIDWVKTTQEHCPSLQYYYLGYYIHSCNKMRYKAAYRPSELLCPLRYEWVRYDLAKPLLDASQYSVLSDYATMQGEVPQPQICGPSDDSSAKVDHHESPSDEDEDDDDEDFDNYESDMMVDEETIHSEKPDTAEGSSEINDINNITLDLKGSRVKFKQVFGPIERRHLNALERQLSRYVKVVGKELSDRMVYCLS

SEQ ID NO: 53914 - protein, 60 aa, Zea Mays
MGEVEQVVVLDVAEDIRLSLAHGVRLVASSKRAVHQLFIYVLDNRIALPWKQEKEECKTR

SEQ ID NO: 53915 - protein, 346 aa, Zea Mays
MLQSMQSDNKSSKKSLKDVVTENEFEKRLLVDVIPPNDIGVTFDDIGALENVKDTLKELVMLPLQRPELFCKGQLTKPCKGILLFGPPGTGKTMLAKAVATEAGANFINISMSSITSKWFGEGEKYVKAVFSLASKIAPSVIFIDEVDSMLGRRENPGEHEAMRKMKNEFMVNWDGLRTKDKERVLVLGATNRPFDLDEAVIRRFPRRLMVNLPDASNREKILKVILAKEELGSDVDLDSLANMTDGYSGSDLKNLCVTAAHYPIREILEKEKKEKSLAKTEGRPEPALYGSEHIRPLSIDDFKSAHEQVCASVSSDSANMNELLQWNDLYGEGGSRKRKALSYFM

SEQ ID NO: 53916 - protein, 98 aa, Zea Mays
MGKLSLGWTNIRKAGSQWEWRDGESIMYPPDKRLDGGVLSSWLAGTRSGLEKPVGELTYARVKCYICRVVGDPQLSINRFRSSLLLGYEDWITALHRR

SEQ ID NO: 53917 - protein, 202 aa, Zea Mays
MVEVMMVPSSHGCGEGGGVGSDGKAEDGQQQGQGQGQVLALLLAALRKSVVLPCQMADADDPSGAAWGMEIGWPTDVRHVAHVTFDRLHGFLGLPVEFELEIPGQVPSASASVFGVSPESMQCGYDDKGNSVPKILLLMQERLYAQDGLKAEGIFRITPENSQEEHVREQLNSGIVPDDIDVHCLASLIKNMNFGFSRSDLC

SEQ ID NO: 53918 - protein, 532 aa, Zea Mays
MAALEAVRSWAVSVIPPELAAAAGGDPLAALAATAAALVAGLLILAVWFRSGGGAPSKPVATPLRPPPVKVDADADVDDGRKRVTIFFGTQTGTAEGFAKSMADEARVRYEKAVFKVVDLDDYAQEDEEYEEKLKKETVALFFLATYGDGEPTDNAARFYKWFTEGKEKEVWLKDLKYGIFGLGNRQYEHFNKVAKVVDELLEEQGGKRLVPVGLGDDDQCIEDDFTAWKELVWPELDQLLRDEDDTNGASTPYTAAIPEYRVVFIDKSDLSFQDRSWSLANGTGVIDIHHPCRANVAVRKELHKPASDRSCIHLEFDISGTSLVYETGDHVGVYAENSVETVEEAESLLDLSPDTVFSIHADAEDGSPRKGGSSLAPPFPSPCTLRTALLRYADLLNPPKKAALLALASHASDPAEAERLRFLASPAGKDEYSQWITASQRSLLEVMAAFPSAKPPLGVFFAAIAPRLQPRYYSISSSPKMAPSRIHVTCALVYGPSPTGRIHQGVCSTWMKRRMQLGSHICEAVKFQVTC

SEQ ID NO: 53919 - protein, 235 aa, Zea Mays
MGAGGEEAPRIIVPMAVEGTPNQLAFVEESKLQKRKENVDWAVRNRERRAAKRQRIRDEHKVAVRRPEEFVTAFRNKERDFLRMRTRIKVRSQPPVEALGSRLVFAIRIPGATELTLKRLLVVEPFVTYGFPNLKSVKELIYKKGRGFFDMEPFPLTSNDLIEKALGDHGIICLEDLVYEIATVGPHFREASRFLMPFQLKCPERRLQMKRKPYRDGGDSGNRGDKVNELIEKLN

SEQ ID NO: 53920 - protein, 425 aa, Zea Mays
MMADAEAGEFWGFFGGFAPLPRRAPAEGNEKHDETAFKLLCFDQGKLEPVDCQSLAHELLETNKCYFLDCGAELYVWMGRITSLMERKGASEAAEKLLSDSNRTRTHIIKVIEGFETVTFKSKFKEWPQTPELKLSSEDGRGKVAALLKRQGLNVKGLMKAAPTQEEPQSYIDSTGNLQVWRVNDKDKVQLSPSDQSKFYTGDCYIFQYTYPGDDKEECLIGTWFGKKSIEEDRVIAVSLASKMVESAKFQAVQARFYEGKEPIQFFVIFQSFQVFKGGLSSGYKRFIAENGIDDESYSEDGLALFRIQGSGPENMQAIQVEPVASSLNSSYCYILHNGNTVFTWAGNLTTALDQELMERQLDVIKPNTQSRSQKEGSETDQFWSLLGGKSEYSGQKMVRELESDPHLFSCILSKGQRNTPLYSR

SEQ ID NO: 53921 - protein, 661 aa, Zea Mays
MFGSRVQDEVEMQRRPNNRIFPDERQNQSKSLYQTTRADRFGANRIDLKNPEKLKVLNESNKPWHQRILDPGSNIVLRWNRVYLVACLFALFIDPFFYYLPLIRQNGNGSSCVAKDQGLSIRITVLRSLADLFYMLNIAIKFHTAYVDPKSRVLGKGELVVDIKKIQRRYIRTDFFVDILAAVPLPQVTVWLIMPAIKSSDYNIRNTTFALVIVIQYVIRMYLIIPLSNQIIKAVGVVAKSAWGGAAYNLLLYMLASHITGAIYYLLSIERQITCWDQHALSKGAVSSPFLEKYFFCLWWGLLQLSSSGNPLVTSAFITENAFAIAIGAISLILFAQLIGKMQTYLQSISKRLEEWRLRQRDMDEWMRHHQLPSHLQERVRRFVQVKWLATRGVEEESILQALPADIRRDVQRHLCLDLVRRVPFFSEMDNQLLDAICERLVSFLCPENTYISREGDPVNEMLFIIRGKLESSTTNGGRSNFFNSIILRPGDFAGEELLTWALLPKTNVHFPLSTRTVRSHTEVEAFALRAEDLKFVANQFRRLHSKKLQHTFRFYSHHWRTWAACFIQAAWRQHQRRKLAESLSRWESYSWWSAEDHPTGDKPRQEGTSSGGGGTRTIAEGAIAHMHKLASASRRFRTEDVAIRRLQKPDEPDFSADHFD

SEQ ID NO: 53922 - protein, 52 aa, Zea Mays
MIVELVKRQAAETVTKINILLLHDSRTIHLPESDESFVLQLQVCAHLYIQFD

SEQ ID NO: 53923 - protein, 324 aa, Zea Mays
MRTLLPVAAGRGTVACAATPVPRRSLLLSTAAAGAALQPEQVAGTRPLRLTRSVASAVAKPRTSADEAISWAKKDNRRLLHVVYRVGDLDKTIKFYTECLGMKLLRKRDIPEEKYSNAFLGYGPEESHFVVELTYNYGVDKYDIGEGFGHFGIAVEDVAKTVELIRAKAGKVIREAGPVKGGETVIAFVEDPDGYKFEIIERPGTPEPLCQVMLRVGDLDRAISFYEKYTVAMMGYGPEDKDAVLELTYNYGVTEYAKGNAYAQIAIGTDDVYRTAEAAKLSGGQVVREPGPLPGINTKITAILDPDGWKLVFVDNMDFAKELE

SEQ ID NO: 53924 - protein, 346 aa, Zea Mays
MSDFTYVENVAHANICAEQALSSNAASVAGKPFFVTNDEPMETWEFMNCMMEAMGCQRPRINLPAKMLLFAALFSKMIHHRLGFQMLSTPLLHPDTIYFLSCTRTFNTSRARRLLGYHPIVSLEDGIMRTLGSFSELADNLGLSRKQGSCGSSKADKLLGSGTAADILLWRDEKRTFSFVTVLFLLFYWFLLSDRTFVSSAAKFLLVLSLALFIHGVLPSEVFGFTVEKVTSDHFEVSHSALRNSLMCVASAWNGSFHKLRLLAEGEDWSLLLKVFAFLYSIKLMLNFQFRFLMGLVLASLFIVFIVYEQCEEEIDSLVANASVKVKWLTDRVVRNLPAFLKAYIA

SEQ ID NO: 53925 - protein, 700 aa, Zea Mays
MDTEPFDEAELLALPPSPVASPPRRLKRLKKSSSQATATTATTTSPHVGSPPPPLSPPPPPLLAEATPGEETLAFPSRDTSPHPPTPPDADAPTPLPHPSPAPVSPPLQPTVTPDNDSDEEDDGLDPLFSGAAGVAQWDPLGAPAEGDGEGDDDDDGLGGGGLIEELRREQRSAKKRLDMDEADGEVASGAGARAEAKGKRSKRKRKEEAPTMESAREKKRSEKERRAQLDSIHAESQRLLRETRKASFKPTVQPVHKPISSVLEKIRLRKMEVLKKSNTSIEDSDDNDAVPEPVVDLAEQLDVPQSKEVALDKDLRIDGAEKELGANGHSLDRCDSVQEDEDGLSCKEKYLYNCGTKASDEEFSDRLQENHENTQPSNNHNDSVDQSQLPPSSSPTESTDEISSEDEENNDKENMDPSAQNNDVHTLEHLQQAIGGNSRPDDAILKDFLDDEAEEEDDSDNDMTRFKDNEEDDGSDENEVFNDLIAAGYEEKEVDHEKRNELHQKWLQQQDAAETNNVDNNTLISPLEDDNSREVFSLIKKLNIAPKPKMRGKQSTSNHEMLMAGRNTIASKSSFLGRTASGSLASSHRSVYRSYVFGRDDSNSSSRSCISTSESNLDLDQTNSSQPKKAKFSSQPKPEGTRATPECNTSSGVSLFDVLRRTSEQSSQESCSTITESQAVHQFSAFKLSRRFSKVGSKN

SEQ ID NO: 53926 - protein, 146 aa, Zea Mays
MLINNLDLVLKRSCRHSLGLHLSSKPLPPLPNLEVSDAIVEKAANHALVWINRLLAVGHDIAIKRDRKVFIKVILILWVVSFIGMLFNFLTLIYIGVMLSLLVPPLYEKYQDQVDEKVGVAYSVLSRHIDTIITRAGQSAKQKKTE

SEQ ID NO: 53927 - protein, 249 aa, Zea Mays
MPPAFAAAPSSSICGVRIPTVRRFEAQSTVSTPRFMRNRVAAKTRSTSAWSLKAGLWDSLRSGLLKNNSSTETVEPPPAPLEVEEPLPVEIVLLERTLPDGSTEQILFSSAGDVDVYDLQALCNKVGWPRRPLSKIAASLRNSYLVATLYSIIRSSETEGEEKKQLIGMARATSDHAFNATIWDVLVDPSYQGQGLGKALMEKVIRTLLQRDINNITLFADNKVIDFYKNLGFEVDPQGIKGMFWYPRF

SEQ ID NO: 53928 - protein, 538 aa, Zea Mays
MAGRGASPAAAAAVQVRCAGCRGVLAVAPGMTEFICPKCRMAQRLPPELMPPSPPKASPTPPPSGPTPPPPPPPSLPPPPPPPPQPVPHPLTRRSAPRAQGVDPTKIQLPCARCKAVLNVPHGLDRFRCPQCGVDLAVDLSKLRHFLASAGPGFFPPPLPPPPPPQPPVPMPHLPFLPMMPRLPLPMLPMLSPAELPEEINEVAVDVERDEDESGTFGETFIDYRPPKLSFGFPHPDPVVETSSLSAVQPPEPTYKLTIMKELDETNALSSLQIETIVYACQRHHHHLPTGARAGFFIGDGAGVGKGRTVAGLIWENWQQGRHKALWISIGSDLKYDARRDLDDVGAKCVEVHALNKLPYSKLDSKTFGITDGVVFVTYSSLIASSENRSRLQQLVQWCGSEFDGLLVFDECHKAKNLIPEAGSQPTRTGKAVLEIQDMLPQARVVYCSATGASEPRNLGYMVRLGLWGDGTSFENFNQFLGALEKGGVGALELVAMDMKARGMYVCRTLSYKGANFDILESLLEERMMDIFVSMIAH

SEQ ID NO: 53929 - protein, 160 aa, Zea Mays
MNYLHKRNPPIVHRDLKSPNLLVDKKYTVKVCDFGLSRLKANTFLSSKTAAGTPEWMAPEVLRDEPSNEKSDVYSFGVILWELMTLQQPWSNLNPAQVVAAVGFKGQRLEIPSSVDPKVAAVIESCWVREPWRRPSFASIMESLKLLIKTLPPNQLLEEN

SEQ ID NO: 53930 - protein, 174 aa, Zea Mays
MEAFDGLGISIILTCNPSIQYTAFDQFKQRILHRQRRKNAGSAEDNSGVALSAFSAFLLGAVSKSIATVLTYPLIRCKVMIQAADPDEDDDDEPGRPSKSRTPKTMLGALHAIWSKEGIPGFFKGLNAQILKTVLSSALLLMIKEKISKFTWVSLLALRRYLFVSQKRIKSATV

SEQ ID NO: 53931 - protein, 1155 aa, Zea Mays
MDPALAREVLAAIKADAAGALSGFAVAVMLFVARVPRFNEGAVSVLRDAVVVSRRDYRMSRRCKWLPDCMEGEYARATQCVEKGILKSVDESIVGREHVVPSIVQVAFRLLEVSEGDQGEEAGLGEGVMSTEEIGINMLKSLFEVHEMARTEIIEQCKFRILSAKPQQSVPVLRLIGCLILSHPFPMLEFIAHLKELLDYFSFMNDKISTALISCILPLTKFSRDLKDYVILVVRKAMFKREDMVRIAATNAIIELIIAENKKNEANPFEDSTSQPSSSQQPETHLEFGRCLFQELSGLLRRCLSHQASVKEVLYEGLIRTAISDPAVSDNILDFLWPHFQNYYSEDAECPLKIGSCFKVEHAKLCIVEPLDCLLSCISRILQIKQHSKCERPRDAYWKCFGFAASQDNEVGRASSSDLFVKALSSIQKYLRISLTEQRGQSQEAGSLSSPSEMAHCHNFAMLGIIEVFIDFSASKLEKASGKSKEMIEKEIVELVDAHSGFEKKISSGRERIARRRANAGDATDKHTNEPRENSNASLQKHHGNRGKFADSSLYELSVMCVKQCHADNYNNVSQHSSQTKLNQSSNLTSFVLKAFLELLKSLASKHSRDFTIKLHGDFKKLSQPIMQLVWCFLLDPIQENGGSKKNMTQGKKNTECKKDQLYLALTCLKKFLEPSVSGEHSSDIIDFLISLAPPNIEDTMGTGDLDNNDTTMVEDRSTRNVHVILNILKTLYARLLTQSVLRESEAVIELILGISRKLQLERRHLVGKWATDLCRKKTMQSPRMAREMLKLAIHLTPAPDDMILVYEVSTELMNLMTSGDDGDSSDTFHIINCKTKSSLAALSLQMVESSLTELDWGFGKLKAMLTLGYDCANIDEDQPADEIMLRLALEKALYSRSTLVVQVLSSFAHMSPMDTQAEHFLKLTVKFYKLLTRMSKSQIVPKGYRQSIPSLKFQKLAEVTCKMLTAPLYDFVFQQNQQIPIKGNLAKIRRETKCIPDLIFQIEDYEKYLIQLSKLTKVNLLRHAKRSVARDFQIKDKSGGQQEDDHIPDNAAASDNEADKDAMGPNAPVESCADDAQKSYADENASCESGHDEDAGGPNTPAEADADEIIRSSIPYGSPVQESESDREEEELLARTKRAKTKQVVQDSDEDADE

SEQ ID NO: 53932 - protein, 895 aa, Zea Mays
MELVTAVLGDHGQRPKDDYAVVTAVTELGNGKPKFYSTPEVIAFCRKWRLPTNHVWLFSTRKSASSFFAAYDALCEEGTATPVCKTLDEIADIAVPGSKDHVKVQGEILEGLVARIVPRQSLVQMEEVLKNFPQAPFDAGDSDLGPSLREICAANRSDEKQQIKALLENVGASMCPDHSDWFGTGGLDAQSRNADRSVVTKFLQAHPADYATKKLQEMIRLMKQRHFSAAFKCYWNYHKIDSLSNDNLYYKMVIHVHNDSVFRRYQQEMRRNQGLWPLYRGFFVDVNLFKANNKKAAELAKDGNTLLKNINGALDSNGSVVDGLADEDSNLMVKLKFLTYKLRTFLIRNGLSTLFKDGPSAYRTYYLRQMKNWGTSTNKQRELIKLLDEWAVFIRRKYGNKPLSSSTYLSEAEPFLEQYAKRSPANQALIGAAGNLVQTENFLAILDAKRDEEGDLRTDHGAAPSGPVSTSVDVVPKTEGLIVFFPGIPGCAKSALCKEILNTPGGLGDDRPFHSLMGDLIKGRYWQKVADERRKKPARITLADKNAPNEEVWKQIEDMCGSTKAAAVPVVPDSEGTDSNPFSLEALAVFMFRVLQRVNHPGNLDKASPNAGYVLLMFYHLYDGKSRREFENELYERFGSLVKMPLLKPDRAPLPDAVKAILDEGISLFKMHRSRHGRAEPSKGSYAKEWAQWEQRLRATLFGNADHLNSIQVPFDYAVKAVLEQLKAVAKGDLKTPDTGKRKFGNIMFAAVRLTPPDILGLLRKVAEKDTAVDSFVNKIRLEDNLTKVHVTLAHKRGHGVSAVASYGIYQHQEVPVSFNALYYTDKMAALEAQLGAVNDEPINSRNEWPHATLWTAPGVTPKEANMLPQLASEGKAERVPIDPPITISGVVDFY

SEQ ID NO: 53933 - protein, 468 aa, Zea Mays
MSPMPTAPYTSATSLLLGSRRLPRFQFQSLRTPTKPPFRRPASSSSTPLPRCRASATPRPLAPVCASALALPVSVAAAPPPQVDGGWVGGTAAAVRRVAVAVACGALAAAWCRRAMAVGAAAAAGAGAGAPGTVEAAAGIGWMALRGGWPRVLQILQLLREHGLILAALLSLSAFFSMAETSITTLWPWKVRELAEKEPENGVFKMLRSDVTRFLTTILIGTTVVNIGATAIVTEAATAMFGEAGVSAATGVMTVAILLLTEITPKSVAVHNATEVARFVVRPVAWLSLILYPVGRIVTFLSMGMLKILGLKGRSEPYVTEDELKLMLRGAELSGAIAEDEQDMIENVLEIKDTHVREVMTPLVDVVAIDAIATLIDFKNLWETHQYSRVPVFEERIDNIVGIAYAMDMLEYVEEVEKLNAITVKEIAHMPTYFVPDSMSVWNLLREFRIRQVHMAVVLNEYGGTIGI

SEQ ID NO: 53934 - protein, 507 aa, Zea Mays
MENAEPINGEHPEILHKLDLRYAGTSWCDESLALVYESWFKTRKIRTWVLSPDKKDVSPRVLFDRSSEDVYSDPGSPMMRRTVMGTYVIAKIKKEDGNIYVLLNGMGATPEGNIPFLDLFDINTGSKERIWESDREKYYETVVALMSDKTDGELLLDQLKILTSKESKTENTQYYLQTWPEKNQVKITNFPHPYPQLASLYKEMIRYQRKDGVQLTANLYLPPGYDSSKDGPLPCLVWSYPGEFKSKDAAGQVRGSPNEFPGIGATSPLLWLARGFVILSGPTIPIIGEGDEEANDRYVEQLVTSAEAAVEEVVKRGVAHPDKIAVGGHSYGAFMTANLLAHAPHLFCCGIARSGAYNRTLTPFGFQNEDRTLWEATNTYVEMSPFMSANKIKKPILLIHGEQDNNSGTLTMQSDRFFNALKGHGALSRLVILPFESHGYSARESIMHVLWETDRWLQNYCVNGTSKVDSVSEADSKNKTLSASGGSAAREGLNPEELSSLPRSLLW

SEQ ID NO: 53935 - protein, 252 aa, Zea Mays
MIGNGQHPEVFHLVQNFNLEDKYPPFSLLKGYIQKAKQTFVEMFKKSQTHESLNWAIPKELWIAHYLAEQKLTDSKQRSAIMAEIKYLMSGYEKKQRSENLSTWASQHPPTESKRRNRKRKEEEQEHHEAQYNQQQQEQNENKLIQGKRHQLHQENMAQVTQQQQQHMQPTTRPATLKLPTPAIPLVLNAAQIQNFARPAYAAVPGVHNYPAQPGWSAAQGSPFVPQFMSPQYMGLPFNPFGLHPTCYPRRR

SEQ ID NO: 53936 - protein, 511 aa, Zea Mays
MWNKYNFPVFLLSEESTNTLQKISEKNEKTGNGYKANVAEFDLVMQTTKAQTHDSASCLKEQSCLPLGGHSVWTSLPPLNNGSTEHPKPLILAIASQDSASFFRDRSLGSDSPISGLIALLTAVDALSHIHGLSKLKKQLVFAVFNGEAWGYLGSRKFLQELDEGAASVNGISSLKIDQVLEIGSVGKAILEEYPSFYVHAEGNPSASKEILDALQSASKSLGSDNVKVKQAASSNPGVPPSSLMSFIRKNMSTSGVVLEDFDSHFSNRFYHSYLDNSVNINSSSIAAAAALVARSMYILASDDSVVDLITLNTIKVNVSLVEELIGCLLTCNPGLSCGLVKRFISPSNPCPSHYVGVFLDDPSGTQLPSYADDTSRFVWNFLADRTNSAGNKSSCTGKCGDEGEVCVGAEVEGGGRCVVSTTRYVPAYSTRVKFEDNAWHVLPANSSDPMGAADPVWTESFWNTIGLRVYAVQDPAYDWLILLAGLGITAASYCAVHFGRAYISKVAKLD

SEQ ID NO: 53937 - protein, 181 aa, Zea Mays
MHATIEEIEAEKSLIEDQAKEKMEKAIETVQANFNTVRTGRANPAMLDRIEVEYYGTPVNLKSIAQISTPDATSLLIQPYDKSSLKLIEKTIVAANLGVTPSNDGEVIRVTVPPLTSDRRKVAIRNIRRDAIKAYDKLEKEKKLSEDNVKDLSADLQKVTDEYMKKIESIQKQKEQELMKI

SEQ ID NO: 53938 - protein, 438 aa, Zea Mays
MDYDHIFRMFGAGVADLVEGVSKLSHLSKLARDNNTASRTVEADRLHTMFLAMADARAVLIKLADRLHNMNTIEALPLVKQQRFAKETMEIFVPLANRLGIASWKDHLENICFKHLNPEEHKELSSKLLMSFDEALLTSTLHNLDKSLRDEGISYHSLSGRHKSLYSIYSKMIKKNLTMDDVHDIHGLRLVVETEEDCYRALDIVHKLWPRVTGRFKDYICHPKLNGYRSLHTVIMCEGVHPFEIQIRTKEMHLQAEYGFAAHWRYKEGGCRHSFVLQMVEWARWVLTWQCETLSKERPSSLSSSVGIRPPCPFPLHSEDCSYSYSRQCNYEGPIFVIMLEHDKMSVQELPANSTVVDLMERVGANSPRWSPCSFPLKEELRPRVNHKPISDPNRKLSMGDVVELTPALPDKSLSEYREEIQRMYERGGFALATTPRS

SEQ ID NO: 53939 - protein, 314 aa, Zea Mays
MTNGRPDTDYLNWRWKPYGCEVSPFDGKKFLDGMKGKHWALIGDSILRNHVQSLLCLLSKVEDATEVYHDDTFRSRRWHFPSYNFTISLVWAPFLVKAKIFEDDDGVSTADLQLHLDVLETDWTSQWEKFDYAVISTGQWFFKTAVYWENGAAIGCHSCQNKTLEERPPEYSFRRALRVAFQFITSSPHKPVVFYRTWAPSHFENGEWFSGGTCNRTAPFKPGEAGDREWDNSMWRIEREEFHNAVPIGGDRLKLLDTFELSLLRPDGHPGPYRAYHPYEKGVTAKVQNDCLHWCLPGPIDAWNDVIMKMVAKD

SEQ ID NO: 53940 - protein, 335 aa, Zea Mays
MFMWCATRCWCSTRVYGSSSEPRKQDACTFSPSVSSKDSLHKVVTLTPVQPQKPVDSRGSHCNAGSDSGEAPFDICMSGNKCAVKLKPSIFETNRERKQRDRECSKDVRPLQLRPGMVLLKRFIKPNDQVKIVKLCSQLGVGPGGFYRPGYRNGALLKLWMMCLGKNWDPDSSSYGDRRLFDGAQPPTIPEEFQKFVQDGIQASHEFLKQQKGATNVVQEIPAMSPDICIVNFYNSSGRLGLHQDKDESQSSLDKGLPVVSFSIGETAEFMFGDVRDEEKISKVDLESGDVLIFGGESRLIFHGVNNTKPKTAPKWLTDETSLRPGRLNLTFRQY

SEQ ID NO: 53941 - protein, 326 aa, Zea Mays
MSEHNVRAMADVVINHRIGTTQGSNGMYNRYDGIPVSWDEHAVTSCSGGKGNKSTGDNFDGVPNIDHTQPFVRKDIIEWLIWLRKSVGFQDFRFDFTKGYAAKFVKEYIEESKPLFAVGEYWDSCEYSPPDYRLNYNQDVLVSFCLPDIHRQRIINWIDNTGGLCAAFDFTTKGILQEAVKGELWRLRDSEGKPPGVMGWWPSRSVTFIENHDTGSTQGHWPFPSDHIMEGYAYILTHPGIPTVFYDHFYDQGVPLHDEIAKLMQIRKCQDIHSRSSIKILEVGSDLYSAIIDDKLCMKIGDGSWCPSDPEWRLAVSGDRYAVWHK

SEQ ID NO: 53942 - protein, 537 aa, Zea Mays
MEANGDVKGLIDEFRIPEREDRKALEFVPSWRFANGMFAIVLSFGLLLTALRSRKARSWRYGAGWLRGFIADYGVPLMVLVWTGVSYIPYGNVPKAIPRRLFSPNPWSPGAYDNWTVIKDMTQVPLLYIIGAFIPATMIAVLYYFDHSVASQLAQQKEFNLRKPPSFHYDLLLLGFLTLMCGLIGIPPSNGVIPQSPMHTKSLATLKHQLLRNRLVATARKSMSQNASLSQLYGSMQDAYQQMQTPLVYQQQSVRRGLNELKDSTVQLASSMGNIDAPVDETVFDIEKEIDDLLPIEVKEQRLSNLLQASMVGGCVAAMPLLKKIPTSVLWGYFAFMAIESLPGNQFWERILLLFTAPSRRYKVLEEYHTTFVETVPFKTIAMFTMFQTAYLLVCFGITWIPIAGVLFPLMIMLLVPVRQYILPKLFKGAHLTDLDAAEYEESPAIPFSLAAQDIDVAFGNTQSAEILDNMVTRSRGEIKRINSPKITSSGGTPVAELKGIRSPSISEKAYSPRVIELWHERSPRTPSMLGEGSTPK

SEQ ID NO: 53943 - protein, 118 aa, Zea Mays
MQGWWLHPIRPHHRVLEPASLASRHTLQPSLSSPMLRVCFTGVRGEIGERSAAIKALIHRRCGVRFGPEIFVRFQGPIPWRREGACDDRDAGIARRCQEPSRSRQTPSSALSTDLSPV

SEQ ID NO: 53944 - protein, 104 aa, Zea Mays
MKFQSLKEAIEINNSVPQGLSSSIFTKRPDIIFKWLGPHGSDCGIVNVNIPTNGAEIGGAFGGEKATGGGREAGSDSWKQYMRRATCTINYGSELPLAQGINFG

SEQ ID NO: 53945 - protein, 1252 aa, Zea Mays
MFKDGFLYKKVALSSLIYWGIQPTETELLKFSSSPSNRASADDLDWLSGMYGSKKRNLPAERDMKSSSSKIKSSKAPDLKGSTSTENYDDNDEFNLHDLVLYGRKDFGVIIAVEKDGFRILKGGPEGSAVTVRKQDIKKGCVDKMFTAVDHHKKTISINDTVNVVEGPFQGKQGLVKHLYLGILFIFNESESENCGFFCAQSGSCEKIRKGLGSSTTENSDFPTPMFSEPAYEQNEHRNTEGPYRSTREQLFSIGQMLRIRKGPLKGYLCRVVRIFRNDVTVKLDSLLKIVTVQADLLSVPANRGDNLSGAPASKFGSQDTPFFGSEAGKTSWDRGLPSFGSDSWQPFSSSTLPVQNAGAESEADPWCKKTSAEDDSDPWGKKTDGDSDPWGKEAVSAADGDCNPWGKETVPSAAGDSDPWGKKVFSADGDSDPWGKKAISSAVEVWNTSATQKEGSSGNAWDKQAGVGGSDAAGSSWDRAVVNKESEKSDNWGEACRVMDMGTGADTDPWGSKVKAVDMEGPNSWEKATMPPDNKLEDVSQGWNQHKGNSTEDQAKDNVSKDEDNNRAWSSSLPVTEDGTWGKSKDDNCDGAGGAGGWDASVANWNKSSVLADAQDEGWGKGNWSSAKSEETNNEIGNWNKAGASDQAGPKSFGGDGWNKGGDQNSSWNSPGNFGGGRGFGRGRGRVRGRESGDFNGRNDQGNWKNSWGGDNAEKSSWRSDNQVDNEAGDSGGYRGRGRGGRGQYGGRGRGRDNGWRNGDGPKWGGGDNWNATNPPSNQPWSSSGGTKSYGQNQPSTWNNPEDNKPSVGEQGDPWASKVSSTEGKGQQNDSWSSKMTSRGAEDTSGGWDSKEKGSSCNGGGEGLQNDPWANKIGSNEEQEADPWASKMSSAVGADDKNGTWDTTTKGTLSNEKADDPWNSKRGNDDDSKKTDAWGAGSSGGNQESSWSKPIFSLGDQEPTWNNPRFGDDDNVNNRGGFGRGNQGRGRGRSFGGGGGGSSWNESNKNGESGGGRSGEPWNRRGFDGGRGRGRFGRGDRNQGNNLGSGDGGSWGSGRGNGGGRGGYRNWNDNNERRPFGQGGGWSQSSDWNANKGSGEGNQAFSKSKPSWDAQNASGGDDQAGKKSDTDNSWSQNRSSPSILGQPSGDANNKSSAWDGAPNGGAGRGGSGSWGKSDEDGWNSSSGGSAREKPSWGGGAEAPPRKEDDGAWGKGGEGSRSLGGGGEGGSSSSWDKPADGAWSGNNKGGSGSGGW

SEQ ID NO: 53946 - protein, 62 aa, Zea Mays
MMMRFVTVLGLAALDWTLTAIVVCVAPCSVRGVYVLHARGSIRLVYLCANKPLYVVCVCVFS

SEQ ID NO: 53947 - protein, 107 aa, Zea Mays
MSLGLPVAATGIKGRLNRLPSACVGDMVMATVKKGKPDLRKKVMPAVIVRQRKPWRRKDGVYMYFEDNAGVIVNPKGEMKGSAITGPIGKECADLWPRIASAANAIV

SEQ ID NO: 53948 - protein, 148 aa, Zea Mays
MGDFNVALVIVAAVVSVLVLLVSVYLLVNYQHPDDVNQAYFPKLVVVLGLTVAVLSILMLPADVANRQACRKAVYNGACSLTLPMRTLWLVVYIVDAVLVFLVIPFAMFYYEGDQDKSVGKRLRTALIWVVASAVVCGLVLGILYGLE

SEQ ID NO: 53949 - protein, 1221 aa, Zea Mays
MAVRGYAQKQDQYGTDYPLERRMYGEHSANLGRRDGLSDLDRRYTDQIAAGHQSSSMRHQQLLKGQLQPGSDTRQADYFAGRSAPVHQASQEIGVYGRVDADNHNMSILGTTPYGRQQAASLLEGAPRTNIDSLYGQRSSSAGFGAGLPPGRDYASGKGLLHPSSDPDYRDSILPHVHPGVSMIDDRRIDRIGSRRELDLRDEERRRDLILEREKELEWERERELRDFRDRERERERERERDLERLLREREREREREHERERERERLRERREKERERERKRGADPRREHTPSRGPGDRRHSSLRSEKPVRRISPRRDAGHRHRSPVKEIKREYICKVFPFRFVDDERDYLSLTKRYPRLAITPEFSKIVLNWAKENLNLPLDTPVSLEHDIHDSDDGADEGAIISTEKTSSFNTPATIWNAKVLLMSGMSKGAFANITSLRSTEERVVHLNNILKFAVFKKDRSLFAIGGPWNADIDGGDPSADCSCLIRTAIRCVKETVHVDLSSCTHWNRFVEVHYNRIGKDGLFSHKEITVLFVPNLLECLPSVDIWKNNWILYKKSKAEREQLTVKKVKSPGDPKEQMQGELNDGKNLDADQLKEADVGCSDMKNEKDDVDIKQQGNDGEGTGKVEEPVQKMGGDVEGKSTGDSSIDHATTGDKKPTKKKIIKKVVKVVRKKITGPSVDKSSEDKIVVAESANKTAEGGQSQQKNDDAGKQQEGAGISQQPEAKKTVKKKIIRRIVKRKVSGSGSQLNTPTTPAETSRQEAEVQPEKNVESSADVGNSQTKLQEGSKIPSEDISNQKKEEKPAEKEHPLTDLSLNADKGNHKEAFEQKDMKNDGKKDKTKDDKEKNRDLKMDLKQKLPLDTQEKKRSDEPPKYPGFILQAKRNTESKLRLTSLSLHGLLDYTAKDIEESVFELSLFAESFSEMLQHRMGCVILSFLEKLHRRYVVKRNQRKRQREEDLKKEEKSSEKRSKTTHETTKTESVDNPGGSFKMTKEGEEKMSTDQSANVHAELSKEGQIKLGTDHPIANHGEPAKGGDENMEEDPEYEEDPEEVEVYEDDEDMDDAHAEEQIAEQNENTNDREIKPKEVATTDGGNNKSTRQPEVENVTNIHERAASMEEKQSVPEIGDLVGGGEKVVSKEIKPAKDEVIDKDLLQAFRYFDINGAGYLKVDDLKCILHNMGKFLSSRDVKDLVQIALVESNSARDNRIIYPKLVKIVDL

SEQ ID NO: 53950 - protein, 136 aa, Zea Mays
MRFMKNYGRVAHSALAYAMNDEFSRVLHQQMEFFSSNPSADTLNRLRGEVSEIHTVMVDNIEKILDRGDRISLLVDKTSTMQDSAFHFRKQSKRLRRALWMKNAKLLVVLTVVIVVLLYLIISAFCGGLSLSSCRS

SEQ ID NO: 53951 - protein, 239 aa, Zea Mays
MWCSPEYEPLDLKGTSMSCPHISGVAALMKAAHPDWSPSAIKSALMTTAYTVDNTNSSLRDAADGSVANAFAYGAGHVDPQRALSPGLVYDISTHDYAAFLCSLNYSAPHVQVITKASNVSCGAPNKSRPGDLNYPSFSVVFGQKRKTKPAAALRFRRELTNVGPAASVYDVKVVGPESVAVTVTPARLTFRQAGQKLRYYVTFASRARQGHAKPDFGWISWVNDEHVVRSPVAYTWKM

SEQ ID NO: 53952 - protein, 105 aa, Zea Mays
MGADSEDAVKQLSLLMEQVEAPLKRSFQNMHQGYPKETLVRFLKAREWNVPKAHKMIVDSLDWRIENEIDSVLERPIVPVDLYRSIRDSQLIGLSGYTKEATTTA

SEQ ID NO: 53953 - protein, 120 aa, Zea Mays
MSSIFQPDTRSSKSPEPSPTGRRKLAELLQEAMQDGPEESADEEEQQQQSLSAAADGKPPVSESTSSSACSTVPTPVAVAKSRKEKAWYTGRCCLPSFVHSLTLDESERGQKMSSRPCAV

SEQ ID NO: 53954 - protein, 189 aa, Zea Mays
MEELAFKLLELIARSLKLRPDRLHGFFKDQTTFIRLNHYPPCPSPDLALGVGRHKDAGALTILYQDDVGGLDVRRRSDGEWVRVRPVPDSFIINVGDLIQVWSNDRYESAEHRVSVNSARERFSMPYFFNPATYTMVEPVEELVSKDDPPRYDAYNWGDFFSTRKNSNFKKLNVENIQIAHFKKSLVLA

SEQ ID NO: 53955 - protein, 56 aa, Zea Mays
MSATLGVRMQRRLPRHTKPTTQLGMGGPQFVALDPSTCTTIDIHTSLLPPLGLQAI

SEQ ID NO: 53956 - protein, 1078 aa, Zea Mays
MAAEPAATAAASAAAAISAVMDWRSSPDARAAAFAYLESVKSGDVRALASTSFFLVRKDQTSEIRLHGFKMLQHLVRLRWEELSAAERNEFANMTINLISDVVGPHEVWALKSQTAALVAEVVRREGVDLWITLLPSIVSLSNNGPTEAELVAMILRWLPEDITIHNEDLEGDRRRSLLRGLTESLSQILPLLYSLLEKHFGAALSEHAKQQMDLAKQHAGTVTAVLNAVNAYAEWVPVTDLAKYGLIHGCGSLLSYSDFRLHACEFFKVICQRKRPVDVAVAEYDAAMCNIFQVLMNISQQFLTRSGMQPSSIDESEYEFASCVCETMVALGSSNMQCILADGARTFQFLQQSNETFWLVISYIGISEEFGYPRIVDSWLSGKARMLEYYQHYKITLHFQSLLFWLVVLREPSKSKSIARVSGDNSAAGNSASTGDLSTEKKKGVSVFVTDEIYSTILDVSFKRMLKNNGSATSGLLEIWSEELEGKSDFCNYRTKLLDLIKVIASQRSVIAAAIVVQRINVVFGDANQATKSPQDLDAMEGAQLGLEAVVNAIFDGSVDCGKTDLDTKSQLHKIFEGLLQQLLSLKWTEPNLAVIHGHYLDALGPFLKHHPDAVASVVNKLFELLTSLPITFQDPSNNSRLARLQICSSFIRISRAADKALLPHMKNIADTMAYLQGEGRLLRGEHNHLCEAFLVMSSSAGIQQQQEVLAWLLEPLNKMWTQVEWQTAYLSDPSGLTNMFADSQFMWSIYHTVTFFEKALKRSGTKKSSATPQAPTTTVPGYLHPMSSHLAWIVPPLLRLLRCIHVLWSEPFAQSQTAEIKAAKSMTVAEQASLLGETGKLTKGQVAPADGLLDVQRDGESKENNIKNWLRGIRDSGYNVLGLAATLGEAFFRCIEGSSVTLAIMENVQVMEFRHLRQLIHLVIIPFVKYCPADLWLWLVNLLQPLFVHCQQALNYSWSSLLHEGRAKVPDSIGNLSGSELKVEVMEEKLLRDLTREVCSVLWALSSPGLNNGLPSLEQLGPSNRMDSVLKNLESFASSSLTGFQTSLFSKQFGQCLSHGESIRTVKQPCTKGIEF

SEQ ID NO: 53957 - protein, 133 aa, Zea Mays
MPRLVEVVKGSTKEKVVRVVVLSFRNLLAKGAFAAQMIDLGLPQMVQNLKAQAWTDEDLLDALNQLEVGLKENLKKLSSFDKYKQQVLLGHLDWSPMHKDPSFWRENTEVRKNALICVQRLFLGAKYASFLQA

SEQ ID NO: 53958 - protein, 80 aa, Zea Mays
MGALLVTTGPIRQHMRGDNLHRPTDLYRCHHPTHLGQTHPMAQQQQQQCVPMVQLRRNHHMDKRRHHLRMGTHSYHHPTV

SEQ ID NO: 53959 - protein, 289 aa, Zea Mays
MVTMIVGEIANFAAYAFAPAILVTPLGALSIIISAVLAHIMLREKLHTFGILGCILCVVGSTTIVLHAPPERQIESVAEVWDLATEPAFLCYAAVVLAAAFVLIFHFVPEYGQTHIMVYVGICSLVGSLSVMSVKALGIALKLTFSGMNQLVYPQTWVFSSVVTLCIVTQMNYLNKALDTFNTAVVSPIYYTMFTSLTILASVIMFKDWDRQNPTQIVTEMCGFVTILSGTFLLHKTKDMVDGLPPNLPIRLPKHADEDGYAAEGIPLRSAADGIPLRSPRATDSFRSS

SEQ ID NO: 53960 - protein, 449 aa, Zea Mays
MVAVLVLGLACAEAEPQCTRRRPPAPPRPHSVTITEFGAVGDGVTLNTVSFQNAVFYLRSFADKGGAQLYIPRGRWLTGSFNLTSHLTLFLESGAVIVGTQDVSQWPVVEPLPSYGRGMDLPGSRHRSLINGQNLVDVVITGNNGTIDGQGSTWWNWFRSNKLNYSRPHLVEFVDSEQIVISNITFLNSPAWSIHPVYCSNVVVHSVTIQTSLDAPLNHGIVPDSCSNMCIEDSSISVSHDAISLKSGWDKQGIAFGRPTSDIHISRLDLQSSLGAALAFGSEMSGGISDIHADRLLIHSSSRGVFFKTAPGRGGYIRDTVISDVQMEDVDVAIAFTGDWPSHPDDQFDPAALPVVSHITLKNMTGTRISVAGVLSGIAGDPFTDICLSNINFSLADSASPTSHWSCSNVSGYSELVFPEPCLDLQTQSSDASVCSTLPSFHAAAIAAA

SEQ ID NO: 53961 - protein, 310 aa, Zea Mays
MGAQEAAVEDVLRAAAAEVSTSSAKRRFRLFRHTLPLIIAKVIESPSDTALLVDIIFQTLPIYDDRASRKAVDDMVIQALGEPTFMKPFAAFLVQSMEKNLKVINPLTSFKLLRWSHYLLKWSQFATLSKVAFTRLASAQAVLCQVLMDGSFRRRRTCKQLFIHLLSEPSGIYKMYMEELKDLRISMRDSPAFLNLILDFTISSPSLSTEYKSVFLDLYVKTILSSKDRAPKAATEAFKPLLLEIGHEDFKNTVIPSCIKMLKRNPEIILQSIGYLLRTVRLDLSKYFMEFMPIVLHQACHSDEERRIDA

SEQ ID NO: 53962 - protein, 611 aa, Zea Mays
MRTMVKEQQKSSRRYGVIKCDPLVRQGLDRTAKHMVIPYMPMLIPPICWTGYDKGAHLFLPSYVMRTHGARQQRDAVKRAPREQMQFVFEALNTLGSTKWRVNKRVLSIVDRIWSNGGRLADLVDRTDVPVPEKPDTEDETLLKNWKWHLRAAKKKNSERHSQRCDVELKLAVARKMKDEEGFYYPHNLDFRGRAYPMHPYLNHLGSDLCRGVLEFAEGRPLGKSGLRWLKIHLANLYAAGVDKLSYDGRIAFAENHLEEIFDSADRPLEGRRWWLGAEDPFQCLAVCMNLTEALRSSSPETTISHIPVHQDGSCNGLQHYAALGKDKLGAIAVNLVAGEKPADVYTGIANRVMEIMRMDAQKDPSVEPDAARARLIVDQVDRKLVKQTVMTSVYGVTYIGAREQIRRRLKERGVIPNDSELFGASCYAAKVTLTALGEMFQAARSIMNWLGDCAKVIACENEPVRWTTPLGLPVVQPYRKLGRHLIKTSLQVLTLQRETDKVMVKRQRTAFPPNFVHSLDGSHMMMTAVACKRQGLNFAGVHDSYWTHASDVDTMNKILREKFVELYDTPILENLLESFEKSFPKLKFPPLPERGDFDMKEVLESTYFFN

SEQ ID NO: 53963 - protein, 234 aa, Zea Mays
MDKIKDSSRQSKQLEDLTAKMRECKRLIKEFDRILKDEEKKNTPDVNKQLNDKKQFMIKELNSYVTLRKTYQSSLGNKRIELFDTGNDQVAEGTPVQMASEMSNQELISTGRKQMDQTDQAIERSKMVVAQTVEVGAQTAATLTQQTEQMKRIGNELDSVHFSLKKASQMVKEIGRQVATDKCIMAFLFLIVCGVIAIIVVKIVNPHNKNIRDIPGLAPPAMNRKLLSIDAAGL

SEQ ID NO: 53964 - protein, 76 aa, Zea Mays
MYNTLTWWEQMDNGKQLTRNRKFLIVVPVVLYLIALHTTDYQQPMLFLNTLAVSVLVVAKLPNMHKVRIFGINAES

SEQ ID NO: 53965 - protein, 672 aa, Zea Mays
MLRLRAFRPTSDKVVKIQLHPTHPWLVTADANDRVSVWNWEHRQVIYELKAGGVDERRLVGAKLEKLAEGDDSKGKPTEAIRGGSVKQVSFYDDDVRFWQHWRNCSAAAEAPTAVNQQSSMFSAPAPSTRGRHFVVICCENKVIFLDLVTMRGRDVPKQELDNRSLLCMEFLSRSSSSDAPLVAFGSSDGVIRVLSMLTWKLVRRYTGGHKGAIACLMTYMSAAGEVHLVSGGNDGLLILWSADHIHDSRELVPKISMKAHDGGVVAVELSRVMGSAPQLITIGADKTLAIWDTVTFKEIRRIKPVPKLACHSVASWCHPRAPNLDILTCVKDSHIWAIEHPTYSALTRPLCELSSLVPPQVLAQHKKLRVYCMVAHPLQPHLVATGTNIGVILSEFDPRALPAIAPLPTPTGSKEHSAVYIVERELKLLNFQLSNTANPSLGNAGVASDAGRSRNDSLEQLIVNQSKKHISTPAPHDSYSVLSVSSSGKYVAIVWPDIPSFAVCKASDWSVVDSGTGKLFAWDTCRDRYALVESALAPRMPLVVKGGSSKKAKEAAAAAAQAAAAAASAASAATVQVRILLDDGTAHVLQRSIDGRSEPVIGLHGGALLGVTYRTSRRISPLTATAISTVQSMPLSGFGGSGSSFASDDPFSSKEGPPQNFQLYSWETYQP

SEQ ID NO: 53966 - protein, 440 aa, Zea Mays
MAFPVDTNVGRICVRLGWVPLQPLPESLQLHLLEMYPMLEHIQKYLWPRLCKLDQRTLYELHYQMITFGKVFCTKSKPNCNSCPMRAECKHFASAFASARLALPAPEEKCLVTLEDPNVVEFSHQTYINSGSVGQLEWSANYPKHAVSGNHQPIIEEPLSPECETENIEAHEGAIEDFFCEESDEIPTINLNIEEFTQNLKDYMQANNVEIEYADMSKALVAITPDAASIPTPKLKNVNRLRTEHQVYELPDSHPLLEGFEQREPDDPCPYLLSIWTPGETAQSIDAPKTFCDSGETGRLCGSSTCFSCNNIREMQAQKVRGTLLIPCRTAMRGSFPLNGTYFQVNEVFADHCSSQNPIDVPRSWIWDLPRRTVYFGTSVPTIFRGLTTEEIQRCFWRGFVCVRGFDRTVRAPRPLYARLHFPVSKVVRGKKPGAARAEE

SEQ ID NO: 53967 - protein, 1217 aa, Zea Mays
MEDDEYEDGMDMGYGGHHQRGGGHAGYGAEEDDEMGYGEGGGDGDEMEEEADGDAEQQEDITQDDAWAVISAYFEEKGLVRQQLDSFDEFIQNTMQEIVDESADIEIRPESQHNPGRQAEFAETLHKISFGQIYLSKPMMTEADGETATLFPKSARLRNLTYSAPLYVDVSYRVMKKGHDCEEVTETAEYPKVFIGKVPIMLRSSYCTLYQQSEKDLTELGECPYDQGGYFIINGSEKVLIAQEKMSTNHVYVFKKRQPNKFAYVAEVRSMAENQNRPASSMFVRMLSRAGAKGGSSGQYIRATLPYIRADIPIIIVFRALGFVADKDILEHICYDFSDTQMMELLRPSLEEAFVIQNQQVALDYIGKRGATVGVTREKRIKYAKEILQKEMLPHVGVGEFCETKKAYYFGRRAEDDRDHYGNKRLDLAGPLLGGLFRMLFRKLTRDVRSYVQKCVDNGKEVNLQFAIKAKTITSGLKYSLATGNWGQANQAGTRAGVSQVLNRLTYASTLSHLRRLNSPIGREGKLAKPRQLHNSHWGMMCPAETPEGQACGLVKNLALMVYITVGSAANPILEFLEEWGTENFEEISPAVIPQAAKIFVNGCWVGIHRNPDLLVKTLRRLRRQIDVNTEVGVVRDIRLKELRLYTDYGRCSRPLFIVEGQRLLIKKAHIRALQQRETPDEGWHELVSKGYIEYIDTEEEETTMISMTINDLQNARHNPEEAYSETYTHCEIHPSLILGVCASIIPFPDHNQSPRNTYQSAMGKQAMGIYVTNYQLRMDTLAYVLYYPQKPLVTTRAMEHLHFRQLPAGINAIVAIACYSGYNQEDSVIMNQSSIDRGFFRSLFFRSYRDEEKKMGTLIKEEFGRPNRENTMGMRHGSYDKLDDDGLAPPGTRVSGEDVIIGKTSPIPQDDAQGQASRYSKRDHSTALRHSESGMVDQVLLTTNADGLRFVKVRMRSVRIPQIGDKFSSRHGQKGTVGMTYTQEDMPWTIEGITPDIIVNPHAIPSRMTIGQLIECIMGKVAAQMGKEGDATPFTDVTVDNISKALHKCNYQMRGFETMYNGHTGRKLTAMIFLGPTYYQRLKHMVDDKIHSRGRGPVQILTRQPAEGRSRDGGLRFGEMERDCMIAHGAAFFLKERLFDQSDAYRVHVCEKCGLIAIANLKKNSFECRGCKNKTDIVQVHIPYACKLLFQELMAMAIAPRMLTHDMKTGKDQKKR

SEQ ID NO: 53968 - protein, 178 aa, Zea Mays
MQGIFDGPCPTSLDHAVLIVGYGSEGGKDYWIVKNSWGESWGMKGYMHMHRNTGDSKGVCGINMMASFPTKTSPNPPPSPGPGPTKCSLLTYCPEGSTCCCSWRVLGFCLSWSCCELDNAVCCKDNRYCCPHDYPVCDTGRGQCLKASGNFSAIEGIRRKQSFSKAPSWTGWLELMDQ

SEQ ID NO: 53969 - protein, 167 aa, Zea Mays
MAPHDTDRDGAVTLREFFADKMGWWMHKFASADRDGDGSLNAVEFNDFLHPEDSSQESVMLWLLKDKLSEMDHDGDGRLSQEEFVAQSHIIISGARHADDGGHAHDLERAEAAKKFTELDADKDNYLTVEEARCVLQSLVTGEFSYATSHAKFLMKVVASSNRTKLM

SEQ ID NO: 53970 - protein, 871 aa, Zea Mays
MGSHDGEDEELPPPPPVPPDVIPIKAEDAVGESPANHILKPKRLLMDRPGIGRKGQPTQLYSNHFKVAVKSTEDVFFHYYVNLKYEDDRPVDGKGIGRKVIDKLQQTYRAELSNKDFAYDGEKSLFTVGGLPQKKNEFTVVLEDVSTGKTAANGSPGGNDSPGGGDRKRVRRPYQTKTFKVEINFAAEVPMSAIGQVIRGEESENSLEALRVLDIILRQHSAEQGCLLVKQSFFYNNPSCFVDLGGGVMGCRGFHSSFRGTQSGLSLNVDVSTTMIVKPGPVIDFLLSNQNVNDPSRIDWQKAKRALKGLRIRTTPANSEFKIFGLSERICKEQTFPLRQRNGSNGDCDTIEITVYDYYAKKGIDLKYSGDFPCINTGKAKRPTYFPIELCSLVPLQRYTKALSTLQRSSLVEKSRQKPEERMTVLNDALQRSNYDSDPMLRACGVSVAPKFTQVEGRILQAPKLKAGNGDDIFSRNGRWNFTNRKFYETCSVNKWAVVNFSARCDVRNLIRDLMRNASAKGIQMEEPFDVFEESPSMRRAPVSRRVDDMFGQIKSKLPGAPRFLLCLLPERKNCEIYGPWKRKCLAEFGIVTQCLAPLRVNDPYLLNLLMKINAKLGGLNSLLQVEASSSIPHVSQVPTIILGMDVSHGHPGQDRPSVAAVVSSRQWPLISRYRASVHTQSARLEMMSSLFKPRGTDDDGLIRESLIDFYTSSGKRKPEHIIIFRDGVSESQFTQVINIELDQIIEACKFLDEKWSPKFTVIVAQKNHHTKFFQTASPDNVLPGTVVDSKVCHPKNFDFYMCAHAGMIGTTRPTHYHVLHDEIGFSADEMQEFVHSLSYVYQRSTTAISVVAPVCYAHLAAAQVKIRPSK

SEQ ID NO: 53971 - protein, 426 aa, Zea Mays
MESWHFLLLLTCSGVFWVLNLYLLLSNMEVIACPCALGLATPTAVLVGTSLGATRGLLLRGGDVLEKFSDVDAVVFDKTGTLTIGRPVITKVIPSRGMGDANTKDLGANQWAEADILSFAAGVESNTNHPLGKAIMEAAGAANCVIMKANDGSFMEEPGSGAVATIGEKQVSVGTLDWIRRHGVIHNPFPEAEHFGQSVAYVAVNGALAGLICFEDKLRGDSRQVIETLSKQGISVYMLSGDKESAAMNVASVVGIQADKVLAEVKPHEKKKFISELQKEHKVVAMVGDGINDAAALASADVGIAMGGGVGAASDVSSVVLMGNRLSQLIDALELSKETMKTVKQNLWWAFLYNIVGLPIAAGALLPATGTILTPSIAGALMGFSSVGVMANSLLLRVRLSSRRKREPLKAISDEVEKNYSSKWST

SEQ ID NO: 53972 - protein, 80 aa, Zea Mays
MLLTADHDDRVVPLHSLKLLATLQHVLCTSTEDSPQTNPIIGRIDRKSGHGAGRPTQKMIDEAADRYSFMAKMLGASWTE

SEQ ID NO: 53973 - protein, 371 aa, Zea Mays
MNLEAAVEAAAAFLNKAVKPVLVGGPKMRVSKAWEALAELADACGYPVAVMPSAKGLVPVHHSRFIGTYWGAVSTPFCAEIVESADAYLFAGPVFNDYSSVGYSLLLKKEKAIIVQPERVVVGHGPAFGCVLMKDFLHALATRLKKNTVAYENYRRIYVPPGEPLSSEPGEPLRVNVLFKHIQAMLSGDMAVIAETGDSWFNCQKLKLPEGCGYEFQMQYGSIGWSVGATLGYAQAAKDKRVIACIGDGSFQVTAQEVSTMLRWGQNSIIFLINNGGYTIEVEIHDGPYNVIKNWNYTGLVEAFHNGEGACYTAKVRTEEELTEALEAALGPKKDCLCFIEVIVHKDDTSKALLEWGSRVSAANSRPPNPQ

SEQ ID NO: 53974 - protein, 639 aa, Zea Mays
MIIVNRAANAAWHMGEWDHMADYVSRLDDADENKLRMLGNATASGDGSSNGAFFRAVLLVRYKKYDDARMYVERARRCLATELAALVLESYERAYNNMVRVQQLSELEEVIDYCTLPMESPIADGRRELIRNMWNERIKGTKRNVEVWQALLAVRELVLPPNEDRDTWIKFAELCWKNGRISQARSTLVKLLQFDPESSPELTLYHAHPQVALAYLKYQYAVGDELKRRDAFSKLQELSVQVATTMGNLPGTSANHGTMSNAGVPLIARVYLTLGSWKKALSPALDDDSIQEILISYHNATLSAKDWGKAWHIWALFNTEVMSRYTFRGRPDIAGKYVVAAVTGYFYSIACASTTKGVDDSLQDILRLLTLWFNHGDTSEVQTALQKGFSLVKIEMWLVVLPQIIARIHSNNRVVRELIQSLLVRIGKGHPQALMYPLLVACKSISILRQRAAQEVVDKIRQHSGGLVDQAQLVSKELIRVAILWHEMWHEALEEASRMYFGEHNIEGMLAVLEPLHAMLERGDETIKENAFIQAYGHELLEAHECCLKYRATGEDAELTKAWDLYYHVFRRIDKQLPSLTTLDLHSVSPELLKCRKLELAVPGTYAADSPLVTIEYFVPQLICYNVQTKAKKADNSWK

SEQ ID NO: 53975 - protein, 537 aa, Zea Mays
MSTEDEKLLKEAKKLPWDERLQHKNWKVRNDANIDLAALCDSITDPKDARLREFGPLFKKTVADSNAPVQEKALDALLAFQRAADADASRYAKEVCDAIVAKCLTGRPKTVEKAQAAFLLWVELEAAEVFLESMEKAVKNKVAKAVVPAIDVMFQALSEFGTKVVPPKKILKMLPELFDHPDQNVRASSKGLTLELCRWIGKDPVKSILFEKMRDTMKKELEAELANVSGFAKPTRKIRSEQEKELEEEAVPETSGANTSEEAVADAPVEIDEYDLVDPVDILTPLEKSGFWDGVKATKWSERRDAVAELTKLASAKKIAPGDFHEICRTLKKLITDVNLAVSVEATQAIGNLARGLRAHFSGNARMLLSVLLEKLKEKKPTMTEALSQTLQAMHKSGCFTLIDVIEDVRVAVKNKVPLVRSSTLTWVAFCIETSNKATVLKLHKEYVPICMECLNDGTPEVRDASFSVLTAIAKMVGMKPLERSLEKLDDVRKKKLSDMIGSSSDTVLSSGTAPITTSGAATSARGVADSMSMKNS

SEQ ID NO: 53976 - protein, 239 aa, Zea Mays
MKDVTVLICPLCAKGVRLNPSEDPNITWDTHVNTDCDPSNYQKVMKKKKCPVPGCRETLTFSNTIRCKDCTREHCLKHRFGPDHKCPGPRKVDSGFPFVSMLRRSQKAETRSNSSNNNGSSWWSSSLVNAATNFKSSAEAGMQKLSTVTSQAFQKAKDGIAPNSSSSSGDLVEQCVHCPARFSTVGALIEHVEKSHQINSQPSHGRVTIDVCPKCSKAFRDPVLLVEHVEKEHGGTSRV

SEQ ID NO: 53977 - protein, 62 aa, Zea Mays
MTEQEARQILGISENSTWEEIVQKYDTMFERNNKNGSFYLQSKVHRAKECLEPLYQKPDVLN

SEQ ID NO: 53978 - protein, 191 aa, Zea Mays
MGPMAAMTSLWVIGDESSTGQKQPPVLVIVLQFITAMVVMDTWQYFMHRYMHINKFLYKHIHSKHHTLVVPYSFGALYNHPLEGLILDTIGGALSFLVSGMTPRTSIFFFSFATIKTVDDHCGLWLPGNILQALFSNNSAYHDIHHQLYGNKYNFSQPFFVMWDKILGTYMPYSIEQRKGGGIESKPAKLD

SEQ ID NO: 53979 - protein, 67 aa, Zea Mays
MVRLLAGEADCCCISIIGNQESNRHSIQLTIPCENWHSNISGVFICIIGEHNSYHLYHTVASFFSIL

SEQ ID NO: 53980 - protein, 101 aa, Zea Mays
MPPRAVPSSSPLPLALAAVAIVVVALAVSSCSATTDAPGLGVGAREMVARDDPKCEEMVPCTFRRCIQYCVSIGLQPKGFCNSKPNMQAAGSSTACFRTCF

SEQ ID NO: 53981 - protein, 78 aa, Zea Mays
MSNRVANSILSGVLKVTGFVTSTVLNSKPAQKFFKLMPGEVILASLDGFGKIWDAVEVSGKNVMQTSSVVTTSVVTHR

SEQ ID NO: 53982 - protein, 280 aa, Zea Mays
MGLLLDGTVVAIKRRVGAATQVFADEVRLLSEIRHRNIVTLIGYCQEGGLQMLVYEYLPNGSVCGHLYDNRKGSATRLEFKQRLSIAIGAAKGLNHLHSLDPPLIHKDFKTNNVLVDENFIAKVADAGLVRLIRGSDDAGPSRGFSNSVYQDPEVQSMTQFSESSDVYSFGVFLLELITGREAASLIPTESREYLAHWMEAHFSSNELIDPRLAGNFTAEGMKELVGLAFQCLNPSSRRRPRMRLVATELDRILETEMSMTTFMGDGTTIVTLGSQLFSS

SEQ ID NO: 53983 - protein, 159 aa, Zea Mays
MLIDLLDDPHEIRRICIMGRNCTLDRLSDIVECTVPLEKQIAEEEEEEIEMLLENYLQRCESCHGQAERLLNSAREMEDSISVNLSSRRLEVSRVELLLQVGTFCVAIGALIAGIFGMNLKSYLETNAWAFWVTTGGIVVGAVAGFFVVYSYLRARKIL

SEQ ID NO: 53984 - protein, 721 aa, Zea Mays
MTIESSPCGESNEGEAVTFSQLNLIDLAGSESSRAETTGVRRKEGSYINKSLLTLGTVISKLTDGKATHIPYRDSKLTRLLQSSLSGQGRVSLICTLTPASSNSEETHNTLKFAHRAKCIEIQASQNKIIDEKSLIKKYQTEIRRLKEELEQLKMGIITGTPLKDTEEDNIILWKQKLEDGNVKLQSRLEQEEEAKAALLARIQRLTKLILVSTKATPASRFSPHPGPRRRHSFGEEELAYLPYRRRDIMIDNESNELLLPVEGFGVSLEDSSKEEKKNRKGLLNWFKLRKRDGASILTSSEGDKSSLTKSTAPSTPIGESVNFPAEPRISNSLAGENVSSDLFSIGHGEFPSGSIHGEETLSASGKTMDHVDLLREQLKILSGEVAFNTSALKRLTEEAGRSPKNEKIQMEMKKKTDEIKGKQQQIASLEREIAHATLGTQGKVDTLEHSPSYHELLEQLNEKSLELEVKAADNRVIQDQLNEKITECMELHAEVTHLKEQLSQALEAKDLVSNSMIHNNRVNHEVEHLVDQDVPREISSEPQQKQQSVEINELKQKVSELMEIKAQLEDRNQKLLEESTYAKGLASAAGVELKALSEEVTKLMNQNEKLATELSSLRSPTPAPRRFNNGPRGTRRESMSRREPASRRDTNASHEREKALEALLMEKEQKEAELQRKVEESKQKEAFLESELANMWVLVAKLKKSQGYDHEDLEAKHDGS

SEQ ID NO: 53985 - protein, 355 aa, Zea Mays
MHLSANEGIEGLRFAVTGGQGFVGAALSLELLRRGAREVRSLDLRASSSWSQQLLDAGVRIIQGDIRKKDDVRRAFRGVDCVFHLASYGMSGKEMVQTARSDEVNINGTCNVLDACHEQGVRRLVYVSTYNVVFGGKPIVNGNEALPYFPIEDHVDAYGRSKSVAEQLVLKSNGRPAKSDKSSRLYTCAIRPAAIYGPGEERHFPRILSLAKLGLAFFKIGDPGVKTDWVYIDNLVLALILASMGLLDDIPDRKGTPVAAGQAYFICDGSPCNTFEFIIKPLFQSLGYSVPQVVLDTSVALAVSRIFLFISTLFYPWLDSKWMPQPLILPAEVYKFFSRDLSTELLLTRPADLQI

SEQ ID NO: 53986 - protein, 255 aa, Zea Mays
MNVSSLHITFPSEGEFSKLKDSGLLQRIGLQYHWRNRNYKSFDEFLMDLKQPKRKNIRQERKKIPAQNLQMKRLRGDEIKSRHWDTFYKFYRNTTDNHWGRPYLTRDFFHLLGEKMGDNVMLIVAEKDDKLVAGALNLIGGDTLFGRLWGCLPDAYFPNLHFEACYYQAIEAAIELNLSKVEAGAQGEHKIQRGYLPVTTYSCHYFSNPGFAAAIGNYLTHETAQVKHAIKVLRDSGPYKEDILKEFAAQQDDDL

SEQ ID NO: 53987 - protein, 379 aa, Zea Mays
MSSLSRELVFLILQFLDEEKFKETVHKLEQESGFYFNMKYFEDEVVNGNWDEVERYLGGFTKVDDNRYSMKIFFEIRKQKYLEALDKHDRSKAVEILVKDLKVFASFNEELFKEITQLLTLENFRENEQLSKYGDTKSARAIMFVELKKLIEANPLFRDKLQFPSLKNSRLRTLINQSLNWQHQLCKNPRPNPDIKTLFVDHSCGQPNGARAPSPANNPLLGSMPKPGGFPPLGAHGPFQPSPTPVPPLAGWMSNPPAVTHPAVSGGAIGFGTPTNPAALLKHPRTPTTANPGMDYPSGDSDHISKRTRPVGMSEEQVNLPVNMLPVTYPQSHNYQQDDFHKTVARTLSQGSTPMSMDFHPLQQTLLLVGTNVGDIGLW

SEQ ID NO: 53988 - protein, 304 aa, Zea Mays
MDDLIDASAATPATDNAAEPQVDLFADADFQSATASTETAANTDVKASFPAAFPPQAGFIPPPSAGTSSEVNTSVSKKAAPEPFDPFGAIPLNNFDGPDPFGGFSSNAGSSTAAAPTHGSTGNISTSNQNLHAASDFAAFVSNNEGAAKDPFDLSSSANVGKTPLAAPKIDASDFGAFVSSTEEAAKDPLDLSSGSNLGKTGQAPAAASKPSAKKDNFQVKSGIWADSLSRGLIDLNITAPKKVNLADIGIVGGLGDGSDEKALPSWTMGAGSGLGMSGIPPSTQQAGGIESLANYNKHHFGFK

SEQ ID NO: 53989 - protein, 544 aa, Zea Mays
MEAVIWFLARWVATYLVPLDVSRGKVSREIDNVGTNGSQHSRKLLNSFAWENNQGELVLDFVVLISMLALTTYQGENELQTLTCQKLLATVVRRKHTCTYLVQLDSWRDLTRAFASGRSLLSLSGRLQRSLAETLASAASCIKDPEASAQYLRDLMGPVAGCLVENASRSDLKSVAQQADVIYMVCCLLERLRGAARATQPRTQKVLFEMAHTVMNPLLTLLEVYKNHSTVVYMILKFVVDFVDGQAVFLDAKETSALVSFCLQLLQIYSSHNIGKVMLSLSSSLRNESQAEKYKDLRALLRLLTNICSKDLVGFLSDCGGEGSPDIAEVIYIGLDIVTPLISLDLLKYPKLSRDYFVLISHLLELYPEKVAHLNSDAFTRIIGSLDFGLRNQDSDVVERCLAAVNALASYNFKERLGGRGRLNSQLMESEGSNGKLQESISSHFLRLLLQILLFEDFRSELAGYAADALLPLLFCEQELYQRLVHELLDKQQNPTVKSRLATAFHNLTSSNNLSSSLDRPNRQRFRKNLLSFMADVSGFMQIK

SEQ ID NO: 53990 - protein, 416 aa, Zea Mays
MQLRKKLIKFIEDHIYPMEAEFYKHAQSTSRWTIHPEEENLKALAKKEGLWNLFIPLDSAARARKLLFEDHSQISLGSSNNLLLGAGLTNLEYGYLCEIMGRSVWAPQIFNCGAPDTGNMEVLLRYGTKEQQKQWLVPLLEGTIRSGFAMTEPQVASSDATNIECSISRQGDFYVINGRKWWTSGAMDPRCKILILMGKTDFSAPKHKQQSMILVDINTPGVQIKRPLLVFGFDDAPHGHAEITFENVRVPVTNILLGEGRGFEIAQGRLGPGRLHHCMRLVGAAERGMNLMVERALNRTAFGKRIAQHGSFLSDLAKCRIELEQARLLVLEAADQLDRHGNKKARGILAMAKVAAPNMALKVLDMAMQVHGAAGVSSDTVLSHLWATARTLRIADGPDEVHLGTIAKLELRRARL

SEQ ID NO: 53991 - protein, 133 aa, Zea Mays
MNNVEVIYTPWANLKKSPSMDVGQVGFHNPRMVHVLIVEKRVNEIINRLNKTRVERRAPDLKAEKEASNAAEKAERKMQLKEKKRKEEMERLEKEKWAEIRSYKGLMVAEKMTSNRQIASAGKSMQEMEDEFV

SEQ ID NO: 53992 - protein, 255 aa, Zea Mays
MSRSGRDGRKKLNLGDDNEFIEEEESEMDETNGLKEPDSPQGVKIETPGLTTRQRALQGRGGNGESFIEFPDGLPAASSRKQKEKLSDMEIQAKKAEAALRRKMQVEKAEKEQQAEAMRKILGIDSEKKKEEKKLKEREEREKQARLEEYRKNCVQTVMGPTGTVITFPESMGLPSIFNSKPVSYPPPREKCAGPSCTNPYKYRHSKTLVPLCSLACYKAVEDRPPAQGSEGGGGQGSDAGQGTDAAQESAGKQA

SEQ ID NO: 53993 - protein, 337 aa, Zea Mays
MAPWAIAIHGGAGVDPNLPEHRQEEAKRVLARCLQVGVDLLRAGAQALDVVEAVVRELETDPFFNSGRGSALTRAGTVEMEASIMDGRGRRCGAVSGVSTVKNPVSLARRVMDNSPHSYLAFDGAEEFARAQGLETVDNSYFITDDNVGMLKLAKEAGSILFDYRIPLAGTDTCSALAGAADSNGGGVHKAGMVMNGLPISVYAPETVGCAVVDASGACAAATSTGGLMNKMAGRIGDSPLIGSGTYACGACAVSCTGEGEAIIRCTLARDVAAVMEYKGLPLQQAVDYCVKERLDQGFAGLIAVSGTGEVAYGFNCTGMFRGCATEDGFMEVGIWE

SEQ ID NO: 53994 - protein, 138 aa, Zea Mays
MSLPLFSAACWCEEEAKKKIYSVCTSTYTGFGALISEELSYKVKGLPGVLWVLPDSYLDVPNKDYGGDLFVDGKVIHRPQFRFNERQQVRSRPRPRYDRRREIAQVEPRETMQRGPSTTQQQRPPCPQEAATQNQEQH

SEQ ID NO: 53995 - protein, 594 aa, Zea Mays
MASQGEPSASASDPKEKKDFSTAILERKKSPNRLVVDEATNDDNSVVALHPDTMERLQLFRGDTVLLKGKKRKDTICIVLADETCEEPKVRMNKVVRQNLRVRLGDVVSVHQCQDVKYGKRVHILPIDDTVEGITGNLFDAFLKPYFLEAYRPLRKGDLFLVRGGMRSVEFKVIETDPAEYCIVAPDTEIFCDGEPIKREDEERLDEVGYDDVGGVRKQMAQIRELVELPLRHPQLFKSIGVKPPKGILLYGPPGSGKTLIARAVANETGAFFFLINGPEIMSKLAGESESNLRKAFEEAEKNAPSIIFIDEIDSIAPKREKTNGEVERRIVSQLLTLMDGLKSRSHVIVMGATNRPNSIDPALRRFGRFDREIDIGVPDEVGRLEVLRIHTKNMKLAEDVNLELISKDTHGYVGADLAALCTEAALQCIREKMDIIDLEDETIDAEILNSMAVTNDHFKTALGTSNPSALRETVVEVPNVSWEDIGGLENVKRELQETVQYPVEHPEKFEKFGMSPSKGVLFYGPPGCGKTLLAKAIANECQANFISVKGPELLTMWFGESEANVREIFDKARQSAPCVLFFDELDSIATQCG

SEQ ID NO: 53996 - protein, 71 aa, Zea Mays
MRMRYSGLPMLMLKSISFSSHVLGAVHVIATAPGIEISPTTSPSKPLFFVSKYLALGRTYFLEYCRAHMLT

SEQ ID NO: 53997 - protein, 153 aa, Zea Mays
MFDHPLVDSLHYIYHEPKAKIVPSIGQLLETAEIQKVLFLETPERISSALRPYWAKAIEGRAHVVQAQPDMLELVPPATSKGNGVKVLLNHLSISPDEVMAIGDGENDIEMLQLASFGVALANGSDKTKAAANVIGATNDEDGVAQAIYEYAF

SEQ ID NO: 53998 - protein, 211 aa, Zea Mays
MLTRDPKKRLTSAQVLQHSWLREGGGASDKPIDSAVLSRMKQFRAMNKLKKMALKVIASNLNEEEIKGLKQMFMNMDTDNSGTITYEELKAGLAKLGSKLSEAEVKQLMEAADVDGNGSIDYVEFITATMHRHKLERDEYLFKAFQYFDKDNSGFITRDELESALIEHEMGDTSTIKEIISEVDTDNDGRINYEEFCAMMRGGMQQPMRLK

SEQ ID NO: 53999 - protein, 480 aa, Zea Mays
MNPVDDTEEPADVCVIELGGTIGDIESMPFIEALGQFSYRVGPGNFCLVHVSLVPVLNVVGEQKTKPTQHSVRGLRGLGLMPDILACRSTQPLEEHVKVKLAQFCHVPIPNIINLHDVTNIWHIPLLLRDQKAHEAILKVLDLQCASKVAREPQLSEWTERVSRCDRLKSPVRIAMVGKYTGLSDSYLSVIKALLHASVALDRKLVVDWVPSCDLEDSTAKETPDAYEKAWESLKGADGVLVPGGFGDRGVQGKILAAKYARENNVPYLGICLGMQIAVIEFARSVMKLHGANSTEFDPTTKTPCVVFMPEGSKTHMGATMRLGSRRTFFQATNCKSAKLYGNACYVDERHRHRYEVNPDMVPEFEKAGLSFVGRDESGERMEIIELPTHRFFVGAQFHPEFKSRPGKPSPLFLGLVAASSGQLDHLLQRGLTSSAGRDICGKGGAQKPKACQNGHVMKPLNGLVHGHYSATRCNGVIPI

SEQ ID NO: 54000 - protein, 74 aa, Zea Mays
MCDARVLVKPYKEKGKVPDRFRKLQHPHLGDFAGCTSPTGLLDSRDPFDLQQPQIAFLLLNLPLMQINKLVCLF

SEQ ID NO: 54001 - protein, 331 aa, Zea Mays
MKCFFKRPPETQKALGDTLAAGLSDTHQDVHDRALFYYRLLQYSPNVAERVVNPPKQAVSVFADTQSSEIKDRIFDEFNSLSVVYQKPSYMFTDKEHRGPFEYSEDLTGLTEDPENVISAQRYQENDNDLLLSTSDKEDNGTRASNGSSTSTYNAPSDLISPSLISSQAPAETSLVNTGGTYSSQSNFSLDDLLGLSVTEAPALPQPTLALNSKPVLDPGTFQRKWGQLALALSQECSLSPQGAVALMNPQSLIRHMQSNHIQCIASGGQPPNYKFFFYAQKDGAAAFFLVECIVNTASAKAQLKIKADDGTAAEAFSSLFQSALSKFGLS

SEQ ID NO: 54002 - protein, 581 aa, Zea Mays
MASANAISTASLLRPLSQGRATRSQRFVVRANAKDIAFDQKSRAALQAGVEKLANAVGVTLGPRGRNVVLDEYGNPKVVNDGVTIARAIELYDPMENAGAALIREVASKTNDSAGDGTTTASVLAREIIKLGLLSVTSGANPVSLKKGIDKTVQGLIQELENKSRPVKGGGDIKAVASISAGNDEFIGSMIAEAIDKVGPDGVLSIESSSSFETTVEVEEGMEIDRGYISPQFVTNLEKSIVEFENAKVLITDQKITSIKEILPILEKTTQLRAPLFIIAEDITGEALATLVVNKLRGILNVAAIKAPSFGERRKAVLQDIAIVTGAEFLAKDLGLLVENATEEQLGTARKVTIHQTTTTLIADAASKDEIQARIAQLKKELAETDSVYDTEKLAERIAKLAGGVAVIKVGAATETELEDRQLRIEDAKNATFAAIEEGIVPGGGAAYVHLSTVVPKIKEAIEDPDERLALILFKIRWYELYLPEALVAPASLIAHNAGVEGEVVVEKIKESDWEVGYNAMTDKYENLMEAGVIDPAKVTRCALQNAASVAGMVLTTQAIVVEKPKPKPQVAEPPEGALTV

SEQ ID NO: 54003 - protein, 224 aa, Zea Mays
MSLLAAAIPSTSSHFSAPFLPSFHMPRKNLTAPLHRIRRPRPFTVVSSVPDPAAGPVEYTPWLIAGLGNPGNKYYGTRHNVGFEMVDRIAAEEGITMNTIQSKSLLGIGSIGEVPVLVVKPQSYMNYSGEAIGPLAAYYQVPLRHILLIYDDTSLPNGVLRLQKKGGHGRHNGLQNVIEHLDGRREFPRLSIGIGSPPGKMDPRAFLLQKFSSEERVQVCNTRG

SEQ ID NO: 54004 - protein, 597 aa, Zea Mays
MAREATNAWPRPSPSARKRSKGKRAVLSPAPPTQAAATEMEAEASVPATDYVYDALPGLHLAFSPEETLDDAAAGQDEDDATATYAVFRNEITEAGDVLADIPAADFFSLDVSTSASVEPEPEPEPPSPAPTAAAATPSISRALEDQPPQGSERAWFRGGRRFRSPMLQLHKEILDFCDFISPSTEEQSSRAAAVQDVSDVVKHIWPQCKVEVFGSFRTGLYLPTSDIDVVIFESRVKTPQVGLYALAKALSQKGVAKKIQVIAKARVPIVKFVERKSGIAFDISFDIDGGPQAADFIKDAVKKLPALRPLCMILKVFLHQRELNEVYTGGIGSYALLTMLITHLQLVWGGKDILGYHRSKEHNLGILLVRFFDFYGRKLNNWDVGVSCNSSRTFFLKSDKDFMNHDRPHLLAIQDPMAPDNDIGKNSFNYFKVKSAFSKAYSVLTDANLFISLGHNRSILGTIVRPDSVLLDRKGWNNEDMLAEPWEPITQQFDTENDAVYNWHVIDEDEPLPRNSQSTSEDTSSSPSKKRKSPKSRRKSRKKSKATASGSSDVANGFRKDRSSKREAGSSKRRKGPKEYDRFTNTLPKYTHVSKW

SEQ ID NO: 54005 - protein, 253 aa, Zea Mays
MSSSTTLQGHYGDIAMNPSGSFLVEKCFTASNFSHKEAIVAELLAVQSDLSKTRHGFHLLKKLDVDRYARRPEQWRASRTSKETTQKKFEAEFGSNSQSTGQIVKEKFSQSRTKKRKQKEKVDKITEDARSNKPDFSQKGNSKRPKSGNATSENPLSEGASASMVFLKGSVKRKSPGFLSDKPSFKKQKPHKPDSGRPDGKRFVRDSDTSAPFVKNAGKQKQSIAELADLAGKEKLTASEVRKLLKPEMSGKS

SEQ ID NO: 54006 - protein, 289 aa, Zea Mays
MLSFGWNWNLLHKLVKKLIKEKKDDAGISEYIDMEKELQEVITLTEEILATAKQTESAQNVAGLSPPSYSAGVQSEGLDDLSHSHKFAVGTRVQAVWSEDGEWYNATVEALTPNGYYVAYDGWGNSEEVDPDNVRLLEEEAADALGQAEKEAEATKMAIKRKIEQAATSDFQARSLPAKLRIEPSDPEDVKAAKRKKIHAFKSKSRFEQLEFAQNKRQNAWQQFQTKGKAKKVGFFSGRKKESIFKSPDDHRGKVGVTGSGKGLTDFQRREKHLHLKGGSGDAADDDEE

SEQ ID NO: 54007 - protein, 83 aa, Zea Mays
MDSEVLDEDLVEIGSSGVLDPSFIEKLSEENIALFSRREELRQRDTQLKQTIGDLELELEETKKKCGQLAAQLKAWKNQQHLP

SEQ ID NO: 54008 - protein, 1113 aa, Zea Mays
MTTSPPPAEQEQQEEEEVLVPHGPHQELPNGAQPMEVVPAEPAATVENQQIEDPPISRFTWTIENLSRVSTKKLYSEIFVVGGYKWRILIFPRGNNVEFLSMYLDVADSGVLPYGWTRYAQFSLSVVNQIHNKFTIRKETQHQFSARESDWGFTSFMPLGELYNPSRGYLVNDTCIVEAEVAVCKVVEYWSYDSKKETGYVGLKNQGATCYMNSLLQTLYHIPYFRKIQLTTDISCQAVYHMPTTENDMPSGSIPLALQSLFYKLQYNDSSVSTKELTKSFGWDMHDSFMQHDVQELNRVLSEKLEDKMKGTVVEGTIQQLFEGHHMNYIEYLQLDVKGCQDVYASFDKYVEVERLEGDNKYHADKHGLQDAKKGVLFIDFPPVLQLQLKRFEYDFMRDTMVKINDRYEFPLQLDLDRDNGKYLSPDADRNVRNLYTLHSVLVHSGGVHGGHYYAFIRPTLSDQWFKFDDERVTKEDAKRALEEQYGGEEELPQTNPGLNNTPFKFTKYSNAYMLVYIRESDKDKIICNVDEKDIAEHLRIRLENDREEKERRKKEKAEAHLYTIIKVARDDDLKAQIGKDIYFDLVDHDKVPSFRIQKQMTFAQFKEEVAKEFGIPTQFQRFWLWAKRQNHTYRPNRPLCPQDEAHTVGQLKELVNKAHNAELKLFLEVELGLDLKPLPLPDKTREDIFLFFKLYEPEKEQLRYVGRLFVKASGRPQDILLKLRMLAGFSQDDDIELYEEIKFEPNVMCEYIDNRLLFRSCQLEDGDIICFQKPSKPDSADRYRFPDVPSFLTYIRNRQVVHFRSLEKPKDDEFCLEMSKIFTYDQVVEKVAEKLGVDDPSKIRLTSHNCYSQQPKPQPIKYRGVERLLDMLIHYNQTSDILYYEVLDIPLPELQALKTLKVTYHHATKDEVSVHSIRLPKNSTVGDVLNDIKTKVELSHTNAELRLLEVFYHKIYKVFAPNEKIENINDQYWTLRAEEVPEEEKNLGPFDRLIHVYHFTKDTQNQTQVQNFGEPFFMVIREDETLSSIKERIQKKLKVPDEDFSKWKFAYISLGRPDYFEDSDTVALKFQRNMYGAWEQYLGLEHPDTAPRKAHTANQNRHSFERPVKIYN

SEQ ID NO: 54009 - protein, 784 aa, Zea Mays
MEPRTEGDASRNLRQGRLLEPPPVPAVRTSPEGVQRHTGQDVIASRSQSAAASETGSSLPCEDGNATAETIGSSTHPVHIGVQNQDIEQEQVHETGKRYKRLTSDVWNYFTKKKEIIEENGKKREQIWGYCNFPNCKRRYRAEGRQGTTAFKNHLRSAHSIVRGQQQLKFEKDLGNNITHIQPFMYDQEVSVKKLIMAIIMHDYPFNIVEHGYFVDFIKSLHPSFPIKSCNAVGKEVMDTYLEEKEKLYAHLKTVHCRFSVTMDMWTSCSNKSYMCVTVHWINDDWCIQKRIIGFFNVKGRHTGKKLSETFTEAMVRWNLDKKLFSLTLDNASANELAVKDIISDLKDGQASLVCDGLFFHVRCACHILNLVARDGLKVISKTIDKIKALVLAVKGSPLQWKELMKCASESELDTKRGISLDVSARWNSTYLMLRDALYYKDAFARLKSSNRHMYVKNYPSPDEWDMALKIFQCLKKVYSLAEILSGTSYPTANLFYRGFCDIKVLLDDWCSSDDATISEMAIAMSQKIEKYWEHSNLALAVACFLDPRYKKKVIEYYMKKFHGDGYHVELEKIVNVVRGLYCFYSSSTPAPAKSTSPEPANSASDILMASVSDELDSFLYGTNEPTLVRSNELEKYMADPLLRLGGPFDGPFDILAWWKSKREVYPILSQIVRDVMAIQVSTVASESVFNAAGRFVDPYRNRLEPEMVEALICTKDWIAAERKDSKIVGSIVSDLEIETLSTVMANKIRAVDDKDIEWKDQEHDGENEYIDSDLDVMDDHNEL

SEQ ID NO: 54010 - protein, 298 aa, Zea Mays
MPKDEVNISLNAAAGRLKQTREERDQFDEANNQIIFSLKKKEDDLSKSIALCNVESNVVKIWIGFLEDSWKLQSSYNEQKDNKTCDELEKCVSDFLKLTKHHLSAFKEVLSQLIENIETYVGNLAVLTSREEEKEHGDDEASERTDPRKSLEEEYLETEKKIIIAFSIVDHIKKLFYSGEGADSRRDDPEVKSLIEEIEKMRESFESIERPTLSIESEKAKPLPVEGSKLSPSPLQAPATPKAAHVDSPKSPMKPEQHFDSDAELATLGSEIGKEDKEYSVEEISGWEFDELEEDLKS

SEQ ID NO: 54011 - protein, 204 aa, Zea Mays
MEAHDRRDVSAGVQGARRLLGRRRGPRVRQRPLRRRRLALPDHHRRSAAPATATSPRHGAWGDAPQARPGRRRSLGCGRGVRRDRPCGAPWRWRGRLVRAVRARGEGALRARCGRRCCRRRVADAGPAARRRRQRRRARQHRAVLLERLQRLLMLTHRLHHLYSWLMHAPIMHLEEQGSTKEREREKRVTREEIEGARQREMSI

SEQ ID NO: 54012 - protein, 239 aa, Zea Mays
MTSLKDYTVEALVSTVDHLGFVSYKVDNLVSEKAVEVKETEFLVSSVEQRVRICQQTTDQEARSQQALLIKAPKYHRRYILPGLDLLESSIHPVSEPPRYSRQYTGRKMHKSQSFRRQATMRREPSPTPNDRSRSLSPSRKARAKSPSPRIVNTNTARETRAGSPIPNSSPMARSASTVARRPPSNSRHLRLASMQLHSDWEQQERSSSKGRRGFLRSLLTRRRWRNDESSLYSYLDEY

SEQ ID NO: 54013 - protein, 108 aa, Zea Mays
MDNLVGNERAYYERSPINFVNQFTCPVILFQGLEDKVVPPDQARKIYSALKEKGLPVALVEYEGEQHGFRKAENIKFTLEQQMLFFARLVGKFEVADDITPIKIENFD

SEQ ID NO: 54014 - protein, 959 aa, Zea Mays
MYQWRKFEFFEEKSAGRGGGGGSAAAVPAEIAGRVTCCSGGRGRVAVGCDDGTVGLLDRGFRLSYGFQAYASSVLFLQQLKQRNVLVTVGDDDQSSSQASAICLKVFDLDKVQEEGSSTTTPFCVQILRIFTDQFPQAKITSFMVLEEAPPILMIAIGLDNGFIYCIKGDIARERITRFKLQVEAASDGSTSLPITGLGFRVEGQAHQLFSVTPGSVTLFSLHIQPPRRQTLDQIGCQTNAVAMSDRMDLIIGRPEAVYFYEVDGRGPCWAFDGEKKFVGWFRGYLLCIIEDQRTHKSTLNVYDLKNRLIAHSMPVGDVSHLVCEWGYIILIMSDKKILCIGEKDMESKLDMLFKKNLYTVAINLVQSQQADPASTAEVLRKYGDHLYGKQEYDEAMSQYIHTIGHLEPSYVIQKFLDAKRIYNLTNYLEKLHDRGLASKDHTTLLLNCYTKLKDVEKLNHFIKDEDGVGEIKFDVETAIRVCRAAGYHEHAMFVAKKAGRHELYLKILLEDLGRYDEALQYISGLEANQAGLTVKEYGKILVEHRPAETVEILLRLCTDVGDPTSRRGSNSMHLLMIPSPMDFVNIFVHSPQYLMGFLENYIKTVTDSPAQTEIHNTLLELYISNDLSFPSISQENEYENHYIKEIKGKETANVYRSGIKEKTGLGKEDPKVAKNIVDRRRKGLALLKSAWTSEMEDPLYDVDLALILCNTNAFKDGLLFLYEKLKLYKEVISCYKQAHDHQGLIACCKKLGDSSQGGDPSLWGDLLKYFGDLGEDCSKEVKEVLTYIEKEDVVPPIVVLQTLSKNPCLTLSVVKDYIARKLEQESKLIEDDRKSIDKYQAETELMKREIQDLKTNAKVFQLSKCSACTFTLDLPAVHFLCMHSFHLRCLGDNEKECPECAPEYRSVMEAKQKLEQNARDHDLFFRQLRGSKDGFSVIADYFSKGIVSKTTLPPENGR

SEQ ID NO: 54015 - protein, 276 aa, Zea Mays
MLSYRKFRKGLKNEVDEMLRAEKAENPMRIVYSFGISHEHPGTFILSYIRSTNPHHEYIGLYPKGFRFRKRDFDNIDRLVSYFQKNIDKPPPDAGPSMRNVAAMVPMKNSAWGSGGGGDANGGWRGDGSNDRDRPFSGRSGGRFDSRNSSGGRGRGRGRGRGNFGDDDNAGGGWSGGGGGGNSGRWTDNIGTGGSGGSSWGGGGGGDDSNRGGGGGGWGSAGGGADNAGGGNGAWGAAAGGSDDPGLGSAKKVVPAQDGGTGWGSEGGGGGGGGGW

SEQ ID NO: 54016 - protein, 994 aa, Zea Mays
MGEEAESNCKRKAPDSSVEEQPSLAPAPAQSQADPAAKRPNISRSCVHEVAVPNGYESVKDEAVHGTLASPAFNGEMAKQYPFKLDPFQSVSIACLERNESVLVSAHTSAGKTVVAEYAIAMAFRDKQRVIYTSPLKALSNQKYRELSQEFTDVGLMTGDVTLHPNATCLVMTTEILRAMLYRGSEVIKEVAWVIFDEIHYMKDRERGVVWEESIIFLPPAIKMVFLSATMSNATEFAEWICSLHKQPCHVVYTDFRPTPLQHYMFPIGGSGLYLVVDENGQFREDNFAKLQDSFAKPNNQLDGRKGGGPKASGRIAKGGSASGNSDIYRIVKMIMERKFQPVIIFSFSRRECEHHAMSMSKLDFSTEEEKECIEQVFCNAIGCLVEEDRSLPAIELMLPLLKRGIAVHHSGLLPIIKELVELLFQEGLVKALFATETFAMGLNMPAKTVVFTSVKKWDGDSNRYIGSGEYIQMSGRAGRRGKDERGICVIMIDEKMEMSVIKDMVLGKPAPLVSTFRLSYYTILNLMSRVEGQFTAEHVIRHSFHEFQYEKALPEIAQKITRLENEATLLDSSGETDLAEYHKLGLDISELEKKIMSEMIRPERALLYLVPGRLVRVRDGSTDWGWGVVVNVVKKPPASGTLPPALSASRSNNYTVDTLLHCSSNSSENGSRSKPCPPRPGEKGEMHVVPVPLPLVSGLSSVRINIPPDLRPPEARQNILSAVQELGKRYPQGLPKLHPINDMGIQEPELVDLVHKLEDLEQKQCSHRLHKSGQSEQELSWYQKKADLNTEIQQLKSKMRDSQLQKFRDELRNRSRVLKMLGHIDADGVLQLKGRAACLIDTGDELLITELMFNGTFNDLDHHQVASLASCFVPCDKSSEQIRLRNELSRPMMQLQEAARKIAEVQRECKLEVNVEEYVESTCRPYLMDVIYCWSRGATFAEVMEMTDIFEGSVIRLARRLDEFLNQLRAAAEAVGEVNLEKKFKNASESLRR

SEQ ID NO: 54017 - protein, 221 aa, Zea Mays
MLELYEQNRVQPPPSQGNDTEGSSASVANQRVPGKVPGVADEPPAHDHNQAPRPSSQQNMLDHRGYDHPHPDKQNYRIPPNDARDGTANSNEGPNVSSSMMDAMKKVNKDKVKAALEKRRKSKGDFSRKVDVMDDDDLIERELEHGVELAAEDEKVKQERKQSWPHLAHHQSTNRENTEEGELSMDSQEYRSPEHDNRKRKDVREYRNYDRDERDLKRLRS

SEQ ID NO: 54018 - protein, 368 aa, Zea Mays
MKSDAIFGTDRSAKVSFYRTPTKSSKRLIQAKIVYLEHVPLSWDENKVKEYCEEYGEILKADVFQISKNMENETISFVEFSSRKGALACVTGINKANIVDGSFKLCAYLAWPKSASKVNSAAPSNAATATEKDKTHTEKILVDIDLQHKFQKGDKSKLTSQTKEAIMKKKKSSKLPNDNDTKLTSQGAAEVPQTSKSSEGKRKVGKNKHASVYQKPLKKAINNRNVDESQLTHRSAAVLQTSNTSKGKRKASENRSLYLNEKALKKARGNSNLGGSSRSKSYASDLEPHAGFISPAIRDNGSDAYNRQRTARYDIHPIDVHPYARAPPSAYSGYKSHAGYEAANTYEYAGNRAPTPPSGSYIPRRGHY

SEQ ID NO: 54019 - protein, 463 aa, Zea Mays
MLACSSSKPHRPVKALGAQFSPALPSAASLQPQQHVHFTCPFLPPFPLPPRHLRSPPPAAPAMAMTEGLVPITRTYLARYYDKYPLPPLPDATTDLAARLRALSADLAAVAPIAPDEELLEQEAAGIPAHKIDENLWKNREQMEEILFLINTSHRPVALQQKSTPEDAEIVCTLDDIEAKLKDMLKNLEQFQLKNADNVFNTVMTYMPQDFRGTLIRQQRERSERNKQAEVDALVSAGGSIHDRYALLWKQQMERRVQLAQLGSATGVYKTLVRYLVGVPQVLLDFIRQINDDNGPMEEQRERYGPALYTLTKLVLAIRLYLHVSLARYGQRKIEKDDAAVLQQAVVIYTKEFLKFTEFIGEVFVNAPFFISAEDAGAVDARKSDEYKETIIPAGKTHEVILSVEAVNSYIAWDFSLQQGALNMDIGFHVEYISPSGEKTLILPYRRYEADQRWALQWRREAP

SEQ ID NO: 54020 - protein, 201 aa, Zea Mays
MQCPNCRKIEKGNWLYANGSRSAHDVSMDEWAHDEDLYDVSYSDMPFRFHWCPFGRLTQLPSLFEEGESSPPVTFHDFMGQHVFTEQVAVSAAAGTTNPCPYVAYLHPLTPLTSLSSSHVPDRTMDRPAYHDHWNPMAGPSDVRSMQTMQPADFHHSHWAHVPHSYGQPNSNNEQPGIPFGARAVRVDDLVPDLDLPMFLL

SEQ ID NO: 54021 - protein, 83 aa, Zea Mays
MSDNKRYRPVFFRKEDLDNSLHRTSRDQQKPNPAVRFGDTQVSSLEDIIKSMKDSSSSKWDDVVFIPPGFDLATGSTPSQLRK

SEQ ID NO: 54022 - protein, 285 aa, Zea Mays
MDPMDIVGKSKEDVSLPKSTMVKIIKEMLPPDVRVARDAQDLLVECCVEFINLLSSESNEVCSREEKKTIAPEHVIKALSDLGFREYIEEVYAAYEQHKLETLDSPKAGKFTRIEMTEEEAVAEQQRMFAEARARMNNGAPKPKEPEQEPPQLPQAQPQLQLHTEPQQPMQSQVQLHSQTQHYLQPQLQLHHQPQQLPQVQLHSQPQLQPQVHLHPQPQLPPQLQVHQQPEVQPQEAQLQSSAQQTSQPQPQAQLQSQGHSQAQLQAGLLGQLQTQAQTGPDMDS

SEQ ID NO: 54023 - protein, 66 aa, Zea Mays
MWSNKAMTAHQAHLSKAMRGWRLGLETLTGHPNQPAARARPLASQLRVGAASGGSARRPSTRVGGQ

SEQ ID NO: 54024 - protein, 988 aa, Zea Mays
MATPLAGKGPIAAAIPRSPPPLAEGGAGGSAAEAPVLIFVYFHKAIRAELERMHAAAVRLAMGRAGGDVATLEARCRFLFTVYRHHCDAEDAVIFPALDIRVKNVAGTYSLEHKGENDLFAHLFTLLQLDVQNDNAIRRELASCTGAIRTFVSQHMSKEEEQVFPLLIKKFSHEEQADLVWQFLCSIPVNMMAKFLPWISASVSTDENQDILDCLSKIVPEEKLLQEVVFTWFGGKSESSSTCESSSGQTDKHAHSLEHTKIGKRKSIESSQLVTHPIDEILYWHNAVLRELSDIAEETKRIHQSGDFSDIAGFNMRLQFIADVCIFHSIAEDQVIFPAVDGELSFVQEHAEEERRLNKFRSLIEQIQLAGAKSTVVDFHSELCSQADQIMQKIESHFNDEEIKVLPKARIKFSPEKQRELLYQSLCVMPLKLLERVLPWFIVKLNDAEAVSFLQNMRLAAPSSETALVTLLSGWACKGRLEDTSNPGKFVCMASGAVTCASDGNGFKTCQSLCPCYVSSNGAFSKPVKRASQGESSTNTDRNHSSHNAATEASQCNNRACYIPRLRVESSYLGVHSSTPTKSFRPLSFNYVAPSLYSSLFSWDTDTLVSGPDNISKPIDTIFKFHKAIRKDLEFLDLESGKLIDGNESCLSQFIGRFRLLWGLYRAHSNAEDEIVFPALESKEALHNVSHSYTLDHKQEEKLFQDISTVLSELSQLHDGLSYPLDVEAGTNDISSNEIDWARKRNELLTKLQGLCKSIRVTLSNHVHREELELWPLFDKHFSVDEQDKIIGHIIGTTGAEVLQSMLPWVTSALSLEEQNMMLDTWKQATKNTMFDEWLNEWWKGPSTSSDPSDKASTPSEESHFQENLEQNDQMFRPGWKDIFRMNQSELEAEIRKVSRDSTLDPRRKAYLIQNLMTRNHHNQASKDIMDVHDDLDVLLRTETQGNKYLAVSITKETASLLLHAAISYSLADSVTIKLVTIQWTGNQ

SEQ ID NO: 54025 - protein, 1041 aa, Zea Mays
MVAEFLPWLSTSVTSDEHQDIRNCLCKVVPDEKLLQQVVFTWMEGKATREVAESIAAGISARNNSVEDVPDQGKIHICLHHNSKLGSKNCGESNGPQADKHPIDDILYWHNAIRMELRDIKEETRRVQQSGDFSDISAFNERLQFIADVCIYHSIAEDQVVFPAVDSELSFVQEHAEEECRFNNFRCLIQQIQIAGAESTALDFYSKLCSHADKILEAIEKHFCNEETKVLPQARMLFSLEKQRELSYKSLCVMPLKLLERVLPWLVSKLSDVQATSFLQNIRLAASPSETALVTLISGWACKGRDKSKDGEYLCLTSGAARCLSDDVDDLGKCRSFCPCASPNSSDLSLQLHTENDSRPGKRGKDAVSFSHTNGIYCSQTADIEAIPCSKKPCCIPGLRVESSNLGIGSLASAKSFHSLSYNSTAPSLYSSLFSWETDTSLSCSDSISRPIDTIFKFHKAIRKDLEYLDVESGKLIDGNESCLRQFIGRFRLLWGLYRAHSNAEDEIVFPALESRETLHNVSHSYTLDHKQEEQLFEDISNVLFQLSQLHDSQGHAQTEVNEVKKSCFHSSNDVDFARKYNELATKLQGMCKSIRVALTNHVHREELELWPLFDKHFSVEEQDKLVGRIIGSTGAEVLQSMLPWVTSVLTQEEQNKMLDMWKQATKNTMFGEWLNEWWKGAGTASDSSAEASSAPEDSHLQDKLEQNDQMFKPGWKDIFRMNQSELEAEVRKVSRDSTLDPRRKAYLIQNLMTSRWIAAQQKLPEPNSEECNHDASIPGCAPSYRDQEKQIYGCEHYKRNCKLVAACCNKLFTCRFCHDKVSDHTMERKATQEMMCMVCLKIQPVGSFCQTPSCNRLSMAKYYCNICKFFDDERTVYHCPFCNLCRLGKGLGVDFFHCMKCNCCLGMKLTEHKCREKGLETNCPICCDFLFTSSAAVRALPCGHFMHSACFQAYTCSHYTCPICCKSLGDMAVYFGMLDALLAAEELPEEYRDRCQDILCNDCERKGRCRFHWLYHKCGSCGSYNTRVIKTATADCSTPN

SEQ ID NO: 54026 - protein, 483 aa, Zea Mays
MALAFDEFGRPFIILREQEKKTRLRGLDAQKANIGAGKAVARILRTSLGPKGADKMLQSPDGDVIITNDGATILEQMDVDNQIAKLMVELSRSQDYEIGDGTTGVVVMAGALLEQAEKLLERGIHPIRVAEGYEMASKVAFDHLERISEKFEFSADNIEPLVQTCMTTLSSKIVNRCKRALAEIAVKAVLAVADLERKDVNLDLIKVEGKVGGKLEDTELVYGIIVDKDMSHPQMPKRIEDAKIAILTCPFEPPKPKTKHKVDIDTVEKFQTLREQEQKYFDEMVQKCKDAGATLVICQWGFDDEANHLLMHRNLPAVRWVGGVELELIGRIVPRFQELSPEKLGKAGLVREKSFGTTKDRMLYIEQCANSRAVTIFIRGGNKMMIEETKRSLHDALCVARNLIRNNSIVYGGGSAEISCSIAVETAADRHPGVEQYAIRSFADALDAVPLALAENSGLSPIDTLTAVKAQQVKHVIYCRLEL

SEQ ID NO: 54027 - protein, 108 aa, Zea Mays
MEPETFEQLEVSKELFGKAAAYLKDEMKVNLQYFDGRPMSGTVPQRVTCTVVEAQPNTKGLTAQPQYKRVLLDNGLTVLAPPFIEAGENIVISTADDSYMTSLQMYQH

SEQ ID NO: 54028 - protein, 87 aa, Zea Mays
MQFAMLFVSLVHDAVLFCKAAETCVCIVSLPCQISYYFLCFKLFQIISYSNFPESQTILGLKHLKFNQIYIENCQKSMTSNWYITKI

SEQ ID NO: 54029 - protein, 115 aa, Zea Mays
MEGAYNRVLSARQAVPHETYVYFIDLLAKTVRDEIAGCSEKGYDSLSVSDAKQMLMFSSDQDLHEYITEEHPEWEIKNGAVFFQKAKESQPCKEIPSLQLINQTLSYARELERIV

SEQ ID NO: 54030 - protein, 744 aa, Zea Mays
MIHYTSSTDSASAHTELSSSAAAAPEDINSNGGGAVSSETDNQGSSLESFWVDLLESSMKNDTPVDASACGGSLVSNQQTNNGMGDSGNNILYINATSNAIFSPPTNVVSEAYANPGLSQVSESYFGSLKDQANHAPSLLTSDLDSQSKQHTNSLMKTPVSDNMPNDVPARQNSLGLWKYLDDDISLDDNPSSGILPTEQVTGEIPFQITEISSEWAYCTEDTKVLVVGCFHENYRHLAGTNLFCVIGDQCVDANIVQTGVYRFIARPHAPGRVNLYLTLDGKTPISEVLSFHYRMVPDSQNLAEDEPQKSKLQMQMRLARLLFTTNKKKIAPKLLVEGSKVSNLLSASTEKEWMDLSKFVTDSKGTYVPATEGLLELVLRNRLQEWLVEKLIEGHKSTGRDDLGQGPIHLCSCLGYTWAIHLFSLSGFSLDFRDSSGWTALHWAAYCGREKMVAALLSAGANPSLVTDPTHDVPGGQTAGDLAAGQGYHGLAAYLSEKGLTAHFEAMSLSKGKRSTSRTESLKRNTKEFENLSEQELCLRESLAAYRNAADAASNIQAALRERTLKLQTKAIQLANPENDASAIVAAMRIQHAYRNYNRKKMMRAAARIQSHFRTWQIRRNFMNMRRQAIKIQAAYRGHQVRRQYRKVLWSVGVVEKAILRWRKKRKGLRGIATGMPVAMATDAEAASTAEEDYYQVGRQQAEDRFNRSVVRVQALFRSHRAQQEYRRMKVAHEEAKVEFGRK

SEQ ID NO: 54031 - protein, 235 aa, Zea Mays
MVCCSCIDDEGLELLSKGSDSLQSVDVSRCDHVTSHGLASLIDGRNFLQKLYAADCLHEIGQRFVSKLATLKETLTTLKLDGLEVSDSLLEAIGESCNKLVEIGLSKCSGVTDEGISSLVARCSDLRTIDLTCCNLSTNNALDSIAGNCKMLECLRLESCSLINEKGLKRIATCCPNLKEIDLTDCGVDDAALEHLAKCSELRVLKLGLCSSISDKGIAFISSNCGKLVELDLYR

SEQ ID NO: 54032 - protein, 546 aa, Zea Mays
MWDRASSDPRYASSADVGWEDVYKALGNLRSGNRQSHLRVGLLNFNSTEYGSWTQLLPADSHVISTVRLEHAKDSVTWQTLYPEWIDEEEETEIPSCPSLPEPNVPRGARFDVVAVKLPCTRVAGWSRDVARLHLQLSAAKLAVASSKRNHDVHVLFVTDCFPIPNLFPCKNLVTREGSAWLYSPDSKALREKLRLPVGSCELAVPLKAKSRLFSVDRRREAYATILHSASEYVCGAISAAQSIRQAGSTRDLVILVDETISDHHRRGLEAAGWKVRVIQRIRNPKAERDAYNEWNYSKFRLWQLTDYDKVIFIDADLLILRNVDFLFAMPEIAATGNNATLFNSGVMVVEPSNCTFRLLMDHIDEITSYNGGDQGYLNEIFTWWHRVPRHMNFLKHFWEGDSEAMKAKKTQLFGADPPVLYVLHYLGLKPWLCFRDYDCNWNNAGMREFASDVAHARWWKVHDRMPRKLQSYCLLRSRQKARLEWDRRQAEKANSQDGHWRLNVTDTRLKTCFEKFCFWESMLWHWGENSNRTKSVPMAATTARS

SEQ ID NO: 54033 - protein, 238 aa, Zea Mays
MMCSVFVASWTGVIKYHGPRPSTRPHQVFVANHTSMIDFIILEQMTAFAVIMQKHPGWVGFIQKTILESVGCIWFNRNDLRDREVTARKLRDHVQQPDNNPLLIFPEGTCVNNQYTVMFKKGAFELGCAVCPIAIKYNKIFVDAFWNSKKQSFTMHLVRLMTSWAVVCDVWYLPPQYLREGETAIAFAERVRDMIAARAGLKKVPWDGYLKHNRPSPKHTEEKQRIFAESVLMRLEEK

SEQ ID NO: 54034 - protein, 216 aa, Zea Mays
MLIYVSHLFTFFTGAEWWAQDFRKSLPFFGWIPLPFLSEIEIPLYVLVLILMIVCAVIPTVRSNVSNVQEVVEARKGSMALALAMILPFIVLLAGVAIWCYLSPSSIMRNQPHLLVIGTGFNFGYLVGRMILAHLCDEPKGLKSGMFMSLVFLCFPIANALIAKINDGSPLVDELVLLLLYCAYTVGLYLHLAVSVVHEIKDALGIYCFRITRKEA

SEQ ID NO: 54035 - protein, 235 aa, Zea Mays
MGYTPGLFIVGLFGILIMWMYGYFWITGMLLVAGGCMCSLKHARYVIPVLTSYGVYSVAVRVGWLGVFLTLNLSFLTNDLLNKLVQGYEGSTEESQFEDMKDSDPVMDEFYRSCEFPSVPDSEPETVSCAKPYCSAPIQDVLHVQKEEPPSKVVKSDSTSLDEIKRIMDGSNHYEVLGVPRNRSIDQKTLKKEYHRMVLQHPPPPQKKIYIYINSYYCPVSTVLCFVSLGPACTS

SEQ ID NO: 54036 - protein, 228 aa, Zea Mays
MDRIRDGRRSGVSGGAGPPPPRRRLRSNGGGGPRDSPRSERRRGERLMLNGGGAGAGRDDADDTSDDSLGDDDEDAEEELAPRYQQQRRSPSTAPPPPSPPQPGGGHHHSTSMKQQPFPQGHFFISNTYAPPAPGAGGAAALGLYQKRPGDKTQQQQQQQASHQQSAMSAAGGNNVKALHPSSGGFMHLAAQSAGGMAHTHVSAGQLTFGTMPTPLKPSSDQKPAAGK

SEQ ID NO: 54037 - protein, 313 aa, Zea Mays
MTADRKAGEQFGSVFPHLITQDLPRLVAIKDADFSDVDAVFCCLPHGTTQEIIKSLPRHLKIVDLSADFRLRDINEYAEWYGHSHRAPELQGEAVYGLTELKRDDIRNARLVANPGCYPTSIQLPLVPLVKAKLIKLTNIIIDAKSGVSGAGRGAKEANLYTEIAEGIHAYGITSHRHVPEIEQGLTDAAESKVTISFTPHLMCMKRGMQSTVYVELASGVTPRDLYEHLKSTYENEEFVKLLHGSNVPCTSHVVGSNYCFMNVYEDRIPGRAIIISVIDNLVKGASGQALQNLNLMMGLPENMGLQYQPLFP

SEQ ID NO: 54038 - protein, 399 aa, Zea Mays
MVLGGMRGMIGMLWETSLLDPEEGIRFRGLSIPECQKVLPTAVKGGEPLPEGLLWLLLTGKVPTKEQVDALSKELLARSTVPAHVYKAIDALPVTAHPMTQFTTGVMALQVESEFQKAYDNGLPKSKFWEPTYEDCLNMIARLPPVASYVYRRIFKGGKSIETDNSLDYAANFSHMLGFDDPKMLELMRLYVTIHTDHEGGNVSAHTGHLVGSALSDPYLSFAAALNGLAGPLHGLANQEVLLWIKSVIQETGSDVTTDQLKEYVWKTLKSGKVVPGFGHGVLRKTDPRYSCQREFALKHLPEDPLFQLVSKLYEVVPPILTELGKVKNPWPNVDAHSGVLLNHFGLSEARYYTVLFGVSRSMGIGSQLIWDRALGLPLERPKSVTMEWLENYCNNKAA

SEQ ID NO: 54039 - protein, 158 aa, Zea Mays
MAAAAAGGENSGAGAGAGEGEFYLRYYVGHKGKFGHEFLEFEFRPDGKLRYANNSNYKNDTMIRKEVFVSPSVLREARRIIQESDIMKEDDSNWPEPDRIGRQELEIVMGNEHISFTTSKIGSLVDVQSSKDPEGLRIFYYLVQVKKTSESLPQPYAA

SEQ ID NO: 54040 - protein, 117 aa, Zea Mays
MWEEMGLVRVYTKPQGQQPDFTDPVVLSTDRGGCTVEDFCNHIHRSLLKDVKYVLVWGTSARHYPQHCGLGHGLNDEDVVQIVKKKEKEEGGRGRFKSHTNAPDRISDRVKKAPLKT

SEQ ID NO: 54041 - protein, 418 aa, Zea Mays
MAAAARPASAHLLLLAPLPSPPRLSHLIHTRRLYALAPARRPAAARARRESSPPSAPSPPAPADSLDCVGTGSDVECFVDAGAEDAAPLLPALSAGASKDDGKSEGDAAVSASPTGRELLEWASLVSPFFFWGTAMVAMKGVIPRTGPFFVAAIRLLPAGALLVAFAAARGRKQPSGWEAWLAIAAFGLIDAACFQGFLAEGLQKTSAGLGSVIIDSQPLTVAILASLLFGESIGAIGVGGLVLGVVGLLLLEVPALSVEGNDTTIWGSGESLMFLSAQSMAVGTIMVRWVSKYSDPIMATGWHMIIGGLPLLVISVLNHDPALSGHIQDLTWSDILALGYTSIFGSAVSYGVYFYNATRGSLTTLSSLTFLTPMFASVFGYLYLGETFSTVQIGGALLTLVAIYMVNYKSIIGIHHY

SEQ ID NO: 54042 - protein, 398 aa, Zea Mays
MLFVIIAGSYIGFQTGWVGYKVAGGFFPYGANGMLAGSATVFFAYIGFDSVASTAEEVKNPQRDLPLGIGTALSICCSLYMLVSVVIVGLVPYFAMDPDTPISSAFAKHGMHWAMYLVTTGAVLALCSTLMGSILPQPRILMAMARDGLLPSFFSDVHKTTQVPVKSTVVTGICAAALAFFMDVSQLAGMVSVGTLLAFTIVAVSILILRYVPPDEVPLPSSLQASFRLSQENDEEKLRGTLGDDDHEQGSAEISDVVVEPITDPLIEKQLYASNLSEAKRRKTAACSITSVCIGVLILTTSASATFLPFPVRCSVCVLGGMLLLAGLGMLCWIDQDDGRHSFGHSGGFICPFVPLLPWRHVDASGGVASDGGVRLHFLWPHPQLVDGCRVCPCGRGE

SEQ ID NO: 54043 - protein, 602 aa, Zea Mays
MLGIEYQSKRGYIELDYFGRTVGIKIMPVGVHMGQLELGLRLPDREWRLSELQRQFQGKTVLLGVDDMDIFKGINLKLLAFENMLRTHPKWQGRAVLVQIANPARGRGKDLEAIQAEIEESCQRINGDFGQSGYSPVVFIGRDVSSVEKIAYYTIAECVVVTAVRDGMNLTPYEYVVCRQGAPGSQSVSEVSGPKKSMLVVSEFIGCSPSLSGAIRVNPWNIEATAEAMNEAISMPEQEKQLRHEKHYRYVRSHDVAYWSKSFIIDLERVCKDHFKRTCWGIGLGFGFRVVALDPHFTKLNMDSIINAYELSESRAILLDYDGTLVPQTSLNKEPSPQVLSIINTLCSDSRNIVFLVSGRDKDTLGKWFSSCPRLGIAAEHGYFLRWSREEEWQTCTQALDFGWMQMAKPVMNLYTEATDGSYIEAKESALVWHHQDADLGFGSSQAKEMLDHLESVLANEPVSVKSGQFIVEVKPQGISKGIVAERILASVKERGKQADFLLCIGDDRSDEDMFENIADIIGRNLVAPRTALFACTVGQKPSKAKFYLDDTFEVVTMLSALADATGPELETDSADESVAYISSLDIGDEQSESSDKPVEGS

SEQ ID NO: 54044 - protein, 298 aa, Zea Mays
MLVFFSKAFNVLALIPVVKQVLTESTVDPFLCLIEDCRLQALDSANESCTKLYGSKEDDELALKSLSNIDMNENQSKETSVPLILDSLEDMSESELSAIRKQLLEEFSADDSCLGSHFTETPSQYPAQNGKLHHKSMEVIPLGFVFEDDTLAEASDSSVEPHLQHPPCNNILDVNRLLDSVLETSQHVGRSSVSTNQDLPFKDVANQCEALLIGKQQKLSACMSVCEKEAGESSVEQSSRQDPQADTFLCTADEQWHPNSWPACRCVFNPKPGVMKVSWTELKNSLYKPEDLVMSHQG

SEQ ID NO: 54045 - protein, 693 aa, Zea Mays
MGSVGVEADDDGSIVKEFLQRCEPSGDAAYGELRALLARLHDPATRRDARLFLAALHRHQQRSSSAAGGLTHEQFFRRFGFRMQELLLQDTATDITASSFIATKPAAAAGFQQMKKLTMMEIPSIFIPEDWSFTFYEGLNRHPDSIFRDKTVAELGCGNGWISIALAEKWCPSKVYGLDINPRAVKIAWINLYLNALDDDGLPIYDGEGKTLLDRVEFYESDLLSYCRDNKIELDRIVGCIPQILNPNPEAMSKIVTENSSEEFLYALSNYCALQGFVEDQFGLGLIARAVEEGISVIKPSAESSIIHMDLDRSFLPVPSAVNASVFESFVRQNITDSETDVRSSIQQLVKDSYGLSAAGCAEIIYGNTSVALFNKLVLCCMQEQGTLLFPLGTNGHYVSAAKFVNASTVTIPTNPSSGFRIEPKVLADTLKNVSRPWVYVCGPTINPTGFLYSDSDIRELLSVCAEYGARVVIDTSFSGLEYETDGWRQWNLAGCLSSLKRSEPSFSVVLLGELSFALTAGGHDFGFVILGDSSLAETFHSFSSLSRPHTTLKYTFKKLLGLKNQKDQHFSDLIVEQKEELKNRANQLIQTLESCGWEAAIGCGGISMLAKPTAYMGKAFKAAGFDGELDASNIREAILRATGLCINSSSWTGIPGYCRFSFALERGEFERAMGCIARFKELVLGGAQMNGA

SEQ ID NO: 54046 - protein, 686 aa, Zea Mays
MDSSGEELLKKIRELEVGQAQLKQEMSKLIPGAGERRRSQSVSPRRGVPVPPPPPAKAKAGAPGRRLSGGFEGGQRAWARGSASFPHSSPLQREGRAGAGDASTSARLPERQYSRVLQSMGQSVHILDLDGRIIYWNQSAENLFGYPASEALGQDALMLLVDSHDHNAVNNIFQRISMGESWTGKFPVKNKQGHRFSAVATNTPFYDEDGSLMGFICVSSDSRQLEQIFCKPPTSARSQSESSMTSCDGSCSNTSHRINSLNRSSFDSNLPLQSTLASKITNLATKVTNKVRSRVRTDENDDGGSGESHCLDRGAKEEPTSSGTSTPRGDAPHGPFATEENSPGKSTNPNSDESEGKVGLHKILGSKAEALLNKKGISWPWKGRENEGPDERNHVILPWLHGGQENGVNHQKVSDSSISPDAQGAEHNQPSKNEASGSWSSFNNNSTGSASSTGSTNSSALYKVDHEADCLDYEILWEDLVIGEQIGQGSCGTVYHALWYGSDVAVKVFSKQEYSEEVILTFRQEVSLMKKLRHPNILLFMGAVMSPQRLCIVSEFLPRGSLFRLLQRSATKLDVRRRVHMALDIVRGMNYLHHSSPPIIHRDLKSSNLLVDKNWIVKVADFGLSRLKRETFLTTKTGKGTPQWMAPEVLRNEPSDEKSDVYSYGVILWELVTQKIPWENLNSMQF

SEQ ID NO: 54047 - protein, 103 aa, Zea Mays
MDETIQILRGLRERYELHHKLRYTDDALIAAAQLSYQYISDRFLPDKAIDLIDEAGSRVRLRHAQLPDEAKELDKELRQISKQKNEAVRGQDFEKVYCCLAQR

SEQ ID NO: 54048 - protein, 231 aa, Zea Mays
MAAADPETAAALRGEVAALRMRVQELEAENQRLARIASTCTCGFKEGSVGSITAHHNVKFHQNSTMEKDLSSPFDHTVISNANEMQCNRNADDNGLPEDSSKHTKRTGRKVGILSHCPKRLVALKVMYFGQRFYGFSSEGNIEPTVESEIFKALERAKLMVANRKESCYSRCGRTDKGVSATGQVISLYLRSNIKDVGGDMLDERSEFFQEIYVYWVGVLFQQIFMQDSPV

SEQ ID NO: 54049 - protein, 75 aa, Zea Mays
MLLGWLQEFGPRRRFLQVCTRRTRQSSARNWMRRTGKRGRIHGTRRFQDHSIWLIFLCKFILPALLYLVLEAANE

SEQ ID NO: 54050 - protein, 546 aa, Zea Mays
MARRAASSLVSRCLLARAPAGAPPAAPSAPRRTDGMHRLLPGVLQRFSTAAAVEEPITPSVHVNYTKLLINGNFVDSASGKTFPTLDPRTGEVIAHVAEGDAEDINRAVAAARKAFDEGPWPKMTAYERSRILLRFADLIEKHNDELAALETWDNGKPYEQAAQIEVPMVARLMRYYAGWADKIHGLIVPADGPHHVQILHEPIGVAGQIIPWNFPLLMYAWKVGPALACGNTLVLKTAEQTPLSALYISKLLHEAGLPEGVVNVVSGFGPTAGAALASHMDVDKIAFTGSTDTGKIILELAAKSNLKTVTLELGGKSPFIIMDDADVDHAVELAHFALFFNQGQCCCAGSRTFVHERVYDEFVEKAKARALKRVVGDPFRKGVEQGPQIDDEQFNKILRYIRYGVDGGATLVTGGDRLGDKGFYIQPTIFSDVQDGMKIAQEEIFGPVQSILKFKDLNEVIKRANASQYGLAAGVFTNSLDTANTLTRALRAGTVWVNCFDVFDAAIPFGGYKMSGIGREKGVDSLKNYLQVKAVVTPIKNAAWL

SEQ ID NO: 54051 - protein, 169 aa, Zea Mays
MSANIQVRVANELGAGNGEGARFATIVSTVTSLVIGLFFWVLIMGLHDKYALIFTSSPVVLDAVDHLSVLLAFTILLNSIQPILSGVAVGSGWQSMVAYVNIGCYYLIGIPMGILLGWLFNLGVLGIWAGMIGGTAVQTLVLAIMTVRCDWEKEALIASTRMGKLSEVR

SEQ ID NO: 54052 - protein, 217 aa, Zea Mays
MSALVGYLQDSDINTNCEGKSREYLLSCDLLWGLQHYQKCDRVITPMFKTIEALFSKKVFLNKEGYSEFYSGLVDSVSSELKGSKDFTKLCAGLSILGYISSESDGTCTKAFSQLLTFLGHRYPKIRKAAADQVYLVLLQNDDLIVSENMDKAQELLAETCWEGDVEEARRRRSEINEMAGFRVTTSQKSGKQETRTVAASTDENRSYSSLVDFSGY

SEQ ID NO: 54053 - protein, 79 aa, Zea Mays
MCAERYTVTEDLLKLSGRLRLITAQVDKAASNMSEPTSGEMQDAAFQSDEEEEDEDVDETVFGQDSDSSQNSGTDDDAK

SEQ ID NO: 54054 - protein, 537 aa, Zea Mays
MAADADAAEVERLYELGERLSSAKDKSELAADYEAIIAAVKGQSVKAKQLAAQLIPRFFRSFPALATRAMSAMFDLVDMEELAIRIQAIRGFPLLGKDTEFVSKIADVLGQLLTSEENVERDAVHKALMSLIREDVKNSLQPLFKHVEQGSEIREKIICFLRDKVFPLKAELLKPQAEMERFITDLVKKSVQDVTGSEFELFMGFLRSLSIFGDSAPRESFQELIEIIQAQADLNSQFNVSDIDHIERWISCMYMALPIFMRGASASKFLNYFVKQIVPAFEKIPEEKKLDLLKTIASSSPYATAQDSRQLLPSVVQLLNKYMPGKKVDDINHNYVECLLYTYHHLAHKTPNTTNSLCGYKIVTGQPSDRLGEDFTEHYKDFTERLTGTEETVRAASKRLTQGMADFSKAISSAKTEEEKTKIKGDQQTSTRTMRSYNNILAMAQPLHSKSPLFIGDKKIALSWMEHPKKPTATTAGGKRSQPATTNGNGPANKKGRGGMHNQLVNRAFEGLSRGGRGTGRGRGRGGRGRRGWGGYR

SEQ ID NO: 54055 - protein, 230 aa, Zea Mays
MTALGKGGVARFAAALFVLLNLSAAIAGKSYYDVLQVPKGASEDQIKRSYRKLALKYHPDKNPDNEEANKRFAEINNAYEVLTDQEKRKIYDQYGEEGLKQFQGGGGGGGGMNIQDIFRNFFGGGGGGMEEEEEQILKGDEVIVELDASLEDLYMGGSVKVWREKNVIKPAPGKRRCNCRNEVYHRQIGPGMYQQMTEQVCDQCPNVKFVREGEFLTVDIEKGMKDAQTN

SEQ ID NO: 54056 - protein, 328 aa, Zea Mays
MGSTAGDVAAVVDEEACMYAMQLASSSILPMTLKNAIELGLLEVLQKEAGGGKAALAPEEVVARMPAAPGDPAAAAAMVDRMLRLLASYDVVRCQMEDRDGRYERRYSAAPVCKWLTPNEDGVSMAALALMNQDKVLMESWYYLKDAVLDGGIPFNKAYGMTAFEYHGTDSRFNRVFNEGMKNHSVIITKKLLDFYTGFEGVSTLVDVGGGVGATLHAITSRHPHISGVNFDLPHVISEAPPFPGVRHVGGDMFASVPAGDAILMKWILHDWSDAQGVFHVDMIMLAHNPGGKERYEREFRELAKGAGFSGFKATYIYANAWAIEFIK

SEQ ID NO: 54057 - protein, 238 aa, Zea Mays
MGLTSTAVKKGGLYSLDVSSVYKYKNTTVDVKLDTESNISTTLTVLDALPSTKLVTSVKLPDYNSGKVELQYFHENATFATVVGTKPTPVIDLSGTVGAQGVAFGAEAGYDTATGKFTKYTAAIGVTKPDYHAAFILADKGDTIKVSGVYHLDEKQKASAVAELTRRLSTNQNTLTVGGLYTVDPQTAVKARLNNTGTLAALLQHELKPKSLLTISGEFDTKALDRSPKFGLALALKP

SEQ ID NO: 54058 - protein, 449 aa, Zea Mays
MDASAGGGGNSLPTTGADGSKRRVCYFYDAEVGNYYYGQGHPMKPHRIRMTHALLGRYGLLDQMQVFRPHPARDRDLCRFHADDYVSFLRSVTPETQQDQIRALKRFNVGEDCPVFDGLYSFCQTYAGGSVGGAVKLNHGHDIAINWAGGLHHAKKCEASGFCYVNDIVLAILELLKYHQRVLYVDIDIHHGDGVEEAFYTTDRVMTVSFHKFGDYFPGTGDIRDVGHSKGKYYSLNVPLDDGIDDESYQSLFKPIMGKVMEVFNPGAVVLQCGADSLSGDRLGCFNLSIKGHAECVRFMRSFNVPLLLLGGGGYTIRNVARCWCYETGVALGHELTDKMPPNEYYEYFGPDYTLHVAPSNMENKNTRHQLDDIKSKLLDNLSKLRHAPSVQFQERPPEAELPEQDEDKENPDERHDADSDVEMNDAKPLQDSGRAPAIALKKRTWLLS

SEQ ID NO: 54059 - protein, 500 aa, Zea Mays
MAELPLAAGLMDLRNCKLSPKPAPPLPLPALRRMHTSATATTAPSPRHAVPELHSTTELADGSIVFRFGHPKSKALEPEPASVKTSPYSRVAPASGAVPGSQMEPEIDSEHGLDGVRIGTTAGVEKPSPNAAAEAWPTPPPPDAGAVTGATSAALEEAPEQEAGSNAAVEEVDTRPSSAESLVPSRSEDGPKGDGVAVEAGMPTSGAAMDTIETALEGRGASEDDSAVDVSGGLDEAATSGLEDSEAASEGSTAQDFYTDVETESSGSSSDEQRAEFGFSLPPPEQVSNKADWKNDTSEVKSSDRMIPIAQRTRVLSSGAAILPHPSKVATGGEDAYFIAANGWFGVADGVGQWSFEGINAGLYARELMDGCKKFVTENQGDPDLRPEQILSKAVDEACSPGSCTVLVAHFDGQALQASNIGDSGFIVIRNGEVFKKSKPTLYGFNFPLQIQKGDDPSKFVQNYAIDLEDGDAIVTATDGLFDNVYEHEIAGIVSKSLQE

SEQ ID NO: 54060 - protein, 596 aa, Zea Mays
MGMFLKQFEGKKVITLDMGLLVAGTKYRGEFEERLKKLMEEIKQNEDIILFIDEVHTLIGAGAAEGAIDAANILKPALARGELQCIGATTLDEYRKHIEKDPALERRFQPVKVPEPTVDETIQILRGLRERYELHHKLRYTDDALIAAAQLSYQYISDRFLPDKAIDLIDEAGSRVRLRHAQLPDEAKELDKELRQITKQKNEAAGELRDREMELKAQITAIIDKSKEMIKAETESGEVGPLVTEADIQHIVSSWTGIPVEKVSSDESDRLLKMEETLHTRIIGQDEAVKAISRAIRRARVGLKNPNRPIASFIFSGPTGVGKSELAKALAAYYFGSEEAMIRLDMSEFMERHTVSKLIGSPPGYVGYTEGGQLTEAVRRRPYTVVLFDEIEKAHPDVFNMMLQILEDGRLTDSKGRTVDFKNTLLIMTSNVGSSVIEKGGRKIGFDLDYDEKDTSYNRIKSLVTEELKQYFRPEFLNRLDEMIVFRQLTKLEVKEIADIMLKEVFDRLKAKDINLQVTEKFRDRVVDEGYNPSYGARPLRRAIMRLLEDSLAEKMLAGEVKEGDSAIVDVDSDGKVIVLNGGSGVAEPLEPALST

SEQ ID NO: 54061 - protein, 54 aa, Zea Mays
MPPCMNYALGGCCSTLWWCAFAFVWSYCMRNLTDGSLIATCLNNLHDLASFCLI

SEQ ID NO: 54062 - protein, 147 aa, Zea Mays
MAGSGNLQTFRLLRYLRGRISAEGQVNYGLQMAVSLAIGFLFLGGGTHTFSTQNSAIAALLISLYPRLPTGPNDNRCHLQAFRHLYVIATEPRWIQTVDIDTELPVYCPLEVTVAETDYYDETNYCEVTPCLLPERSVNFGKYVESA

SEQ ID NO: 54063 - protein, 86 aa, Zea Mays
MLPLFTASHRDNACLHFYWIRVNHGILRFISVCWAVWMLSFQGQLLGFIFMIPYVTLFVLDQWSLFTWLEFYQFNQSISCVNLGHC

SEQ ID NO: 54064 - protein, 54 aa, Zea Mays
MHVIVGRPIEVVKNPQPTIDEINQVHGQFVVAMQDLFEKYKSRTGYPDLQLRVL

SEQ ID NO: 54065 - protein, 692 aa, Zea Mays
MSIQRVAPTVDAVLLSHPDMMHLGALPYAMKHLGLSAPVYATEPVFRLGLLTMYDHFLSRWQVSDFDLFTLDDVDAAFQNVVRLKYSQNYLLNDKGEGVVIAPHVAGHLLGGTVWKITKDGEDVVYAVDFNHRKERHLNGTVLGSFVRPAVLITDAYNALNNQGYRKKQDQDFIESLIKVLATGGSVLLPVDTAGRVLELLLLLDMYWDERRLQYPIYFLTNVSTSTVDYVKSFLEWMGDQIAKSFESSRANAFLLKKVTLIINKEELEKLGDAPKVVLASMASLEVGFSHDIFVEMANEARNLVLFTEKGQFGTLARMLQVDPPPKALKVTMSKRIPLVGNELKAYEEEQERIKKEKSLKASLVKEEELKASHGSNTKASEPMVIDASSSRKSVNASHFGGNNDILIDGFVPPLTSVAPMFPFFENTAEWDDFGEVINPDDYMMKQEEMDNTLMLGPGDGLDGRIDDGSARLLLDSTPSKVISNEMTVQVKCSLVYMDFEGRSDGRSVKSIIAHVAPLKLILVHGSAEATEHLKMHCAKNLDLHVYAPQIEETIDVTSDLCAYKVQLSEKLMSNIISKKLGEHEIAWVDAEVGKEDEKLILLPPSSTPPPHKPVLVGDLKLSDFKQFLENKGWQVEFAGGALRCGEYIMVRKVGDSILKGSTGSQQIVIEGPLCEDYYKIRELLYSQFYLL

SEQ ID NO: 54066 - protein, 428 aa, Zea Mays
MLGAALVAKKACELGLEVKPWIKTSLAPGSGVVKKYLDKSGLQKYLDQLGFHIVGYGCTTCIGNSGELDESVSAAITENDIVAAAVLSGNRNFEGRVHPLTRANYLASPPLVVAYALAGTVNIDFEKEPIGISKDGKEVYFRDVWPSTEEIAEVVKSSVLPDMFKSTYESITKGNPMWNELPVSTSTLYPWDPSSTYIHEPPYFKDMKMSPPGPRPVKDAYCLLNFGDSITTDHISPAGNIHPDSPAAKYLKERGVERKDFNSYGSRRGNDEIMARGTFANIRLVNKFLKGEVGPKTIHVPSGEKLAVFDAAMKYKNEGHDTIILAGAEYGSGSSRDWAAKGPMLQGVKAVIAKSFERIHRSNLAGMGIIPLCYKAGEDADTLGLTGHERYTVHLPTNVSEIKPGQDVTVTTDNGKSFTCTLRFDTEV

SEQ ID NO: 54067 - protein, 319 aa, Zea Mays
MKEAKPQGFAERYPALVTGFFFFLWYFLNVIFNILNKKIFDYFPYPYFVSVSHLFIGVLYCLIGWSFGIPKRAPINSTLLKQLVPVAVCHAIGHVTSTVSFAAVAVSFAHTIKALEPFFNAAASQFILGQPVPLTLWLSLVPVVIGVSVASLTELSFNWTGFINAMISNISFTYRSIYSKKAMTDMDSTNLYAYISIIALFVCIPPAIIIEGPQLVQHGFKDAIAKVGLTKLISNFFVVGLFYHLYNQVATNTLERVAPLTHAIGNVLKRVFVIGFSIIAFGNKITTQTGIGTSIAVSGVALYSFIKAKIEEKKQIKSA

SEQ ID NO: 54068 - protein, 552 aa, Zea Mays
MPEIKCGAAEKVKPAASPEAEKPADIAGNISYHAQYSPHFSPFAFGPEQAFYATAESVRDHLIQRWNETYLHFHKTDPKQTYYLSMEYLQGRALTNAVGNLGITGAYAEAVKKFGYELEALAGQEKDAALGNGGLGRLASCFLDSMATLNLPAWGYGLRYRYGLFKQHIAKEGQEEVAEDWLDKFSPWEIPRHDVVFPVRFFGHVEILPDGSRKLVGGEVLKALAYDVPIPGYKTKNAISLRLWEAKATAEDFNLFQFNDGQYESAAQLHARAQQICAVLYPGDATEEGKLLRLKQQFFLCSASLQGMSAEEKQKVTPRTVMIGGKAFATYTNAKRIVKLVNDVGAVVNNDPEVNKYLKVVFIPNYNVSVAEVLIPGSELSQHISTAGMEASGTSNMKFSLNGCVIIGTLDGANVEIREEVGEDNFFLFGAKADEVAGLRKDRENGLFKPDPRFEEAKQFIRSGAFGSYDYEPLLDSLEGNSGFGRGDYFLVGYDFPSYIDAQDRVDAAYKDKKKWTKMSILNTAGSGKFSSDRTIAQYAKEIWDIKASPVV

SEQ ID NO: 54069 - protein, 183 aa, Zea Mays
MVEEAARLSKLFCDRNLPIFAFLDTHYPDKPEPPYPPHCIIGTGEENFVPDLEWLEKEPNVTIKRKSCIDGYISCIEEDGSSVFVDWVGKYQIKTVLVLGICTDICVLDFASSTLAARNIDRVPPLRDVVIYSEGCATYDLPVEIAMNIKGALAHPQDLMHHIGLYMAKGRGAKVVDRVVIEP

SEQ ID NO: 54070 - protein, 523 aa, Zea Mays
MGNACSGALRSKYLHSFKHAASQRHDSEYSASADDSPRKPTPPATTDAHAPAPPAAAMRRGAAGATPDLGSVLGHPTPNLRDLYALGRKLGQGQFGTTYLCTELATGIDYACKSISKRKLITKEDVDDVRREIQIMHHLSGHKNVVAIKGAYEDQVYVHIVMELCAGGELFDRIIQRGHYSERKAAALTRIIVGVVEACHSLGVMHRDLKPENFLLANRDDDLSLKAIDFGLSVFFKPGQVFTDVVGSPYYVAPEVLLKSYGPAADVWTAGVILYILLSGVPPFWAETQQGIFDAVLKGAIDFDSDPWPVISDSAKDLIRRMLNPRSAERLTAHEVLCHPWIRDHGVAPDRPLDPAVLSRIKQFSAMNKLKKMALRVIAESLSEEEIAGLKEMFQIMDTDNSGAITYDELKEGLRKYGSTLKDTEIRDLMEAADIDNSGTIDYIEFIAATLHLNKLEREEHLVAAFSYFDKDGSGYITVDELQQACKEHNMPDAFLDDVINEADQDNVRAAGQGSNTSGTKKN

SEQ ID NO: 54071 - protein, 523 aa, Zea Mays
MLNSRCGTGLSTMPGMSGTARCRSSPGWISSGTSTSTWRSCLVQLPMRARCSSAGCLGDPTQPAGILTSSLSCGTGRSSVPGLSMSEFEERCREVERARAIYKYALDRVPKGRAEELYRKFLAFEKQFGDREGIEDAIVGKRRFQYEDEVRKNPLNYDSWFDYIRLEESVGNKDRIREVYERAIANVPPAEEKRYWQRYIYLWINYALYEELDAQDRERTREVYKECLRLIPHKKFTFAKMWLMAAQFEIRQRNLKAARQILGNAIGMAPKGKIFKKYIEIELYLGNFDRCRTLYEKYIEWSPANCYAWRKYAELEKNLSETDRARSIYELAIAQPALDTPEVLWKEYLQFEIDENEFERTRQLYERLLDRTKHLKVWISYAEFEASAGLGGEDGEDKEKKNEVSYQEQQMERVQKCRAVFERAFDYFRTSAPELKEERAMLLEEWLNKEVNFGDLGDVSLVQKKAPRKVKRKRPIPTEDGSTIAYEEYIDYIFPDEVALAPNLKILEAAYKWKKQKTGDGDE

SEQ ID NO: 54072 - protein, 58 aa, Zea Mays
MRLTIKCLAFYCSIVYLVLPAHNHSCALCISFRFVTRDAKDKSRVDPKMMLVNEPKDG

SEQ ID NO: 54073 - protein, 1226 aa, Zea Mays
MFCPGYNLVIFFSPCKLVGLLAICLVQVVIEGFKSYKEEISTEPFSPKVNVVVGANGSGKSNFFHAIRFVLSDMFQNLRSEDRGALLHEGAGHSVVSAFVEIVFDNSDNRIPVDKEEVRLRRTIASKKDEYYLDGKHVSKTEVMNLLESAGFSRSNPYYVVQQGKIASLTLMKDSERLDLLKEIGGTRVYEDRRKESLKIMTETANKRKQIDQVVHYLEERLRELDEEKEELKKYQQLDKQRRSLEYTILDHELNDARNELASMDDNRRKISESMSLADNEVVDVREMIKSFDKEIKVSTKGINDTKAQKEGVEKRRTEALKVVAKIELDLRDIKDRIVNEKRAKDEAARDLQSVRRESEKSKSELAEISKVHQAKLKEEEDISKSIMDREKRLSILYQKQGRATQFANKAARDKWLQKEIEDLKPVLLSNKKQEGLLQEEIQKLKDEINDLTNYIESRKSESSKLEETLAKRHNDYNDLRKQRDVLQEERKSYWKEESEVTAELDRLQEDLIKAQKSLDQATPGDIRRGLNSVSRIIKDHGITGVFGPVLELVDCEEKFFTAVEVTAANSLFHVVVENDDISTKIIQILTREKGGRVTFIPLNRVKVPDLSCPQSPDFVPLLKKLKYRSDHRRAFEQVFGRTVICRDLETATKVARSNGLDCITLDGDQVGKKGAMTGGFYDSRRSKLKFVKIIRDNKTAIDRKTGHLESVVNKLKDIDKKITDLVTKQQQMDAERDHAKSELEQFKADIARAMKQRGSLEKALVKKEKSLNNICNQIEQVQSSIAMKNDEMGTELIDQLTSEERDLLSRLNPEITDLKERFLMCKNSRIEIEARKEELETNLSTNLIRRQKELEAIISSADSRTLPLEAEAKEQELKSSKRNLDELTSLLKANVDAINNFTRKMDDLKRKRDDLKAREAILEQTVQDGAKDLEQLMNSRNTYLAKQEECTKKIRDLGLLPADAFEAYKRKNKKQLHKILYDCNEQLKQFSHVNQKALDQYVNFTEQREQLQRRRAELDAGDVKIMELISVLDQRKDESIERTFKGVARHFREVFSELVQGGHGYLVMMKKKDGDAVDDDEEEDGPRDPGPDGRIEKYIGVKVKVSFTGKGETQSMKQLSGGQKTVVALTLIFAIQRCDPAPFYLFDEIDAALDPQYRTAVGNMIRRLADMADTQFIATTFRPEIAKVADKIYAVRHKNRVSNIDVVSKEEALDFIERDQTYNAS

SEQ ID NO: 54074 - protein, 68 aa, Zea Mays
MGWGLGVRWWPGLPGQANPRIYILYRGARAGVAMGGGTGRDAVRWTRTWTSTVVECWNVGGSHRSDAS

SEQ ID NO: 54075 - protein, 1255 aa, Zea Mays
MYKHMGSQFHEELQRHNLPSYMLKEINSRLDKIEPKVRSSDTAMQYKAVESRSVSANPKRGSPRTKSTPRESTLYGGDTDVTENPVEPVKVHSEKELLREFEKIAATLSPEKDWSLRIAALQRIEALVYGGAIDYPSFLMLLKQLVPPLSNQLCDRRSSIVKQACHLLNILSKELLGDFEPCAELFIPMLFKLVVITVLVIAESADTCIKTILRNCKVARILPRIVDTAKNDRSAILRARCCEYALLILEYWADASEIQRSADLYEDMIKCCVADAMSEVRATARTCYRMFAKTWPERSRRLFMLFDPAIQRIINDEDGGVHKRYASPSLRDRVVQPSRASSHSSGTYVPGYGTSAIVAMDKSAAISSDSSFPSTNLRLSQSKTIGRSSERSLESVLSSSKEKVSAIESLLKGVSMSGQNFSAARSTSLDLGVDPPSSRDPPVLLAAPASNVLSLQNSALLDSSLPTIPPSSRNGGSRLLETMTTHLPTKERSRSPYLSNMSSESMSGLSLPYSRRSSERLQEGGRMDESYDIRSTRRMPQMHFDRNYVDMPYRDASHRDSHNNNVPNFQRPLLRKQVMSRASASGRHSFDDSHVPSGDVPSYTDSLASLNDALSEGLSPSSDWVARVSAFEFIRNLLKQGQKGIQEITQNFEKVMKLFFRHLDDPHHKVAQAAFSTLAEIIPASKKPFESYVERILPYVFSRLIDPKELVKKPCSITLEVVGRTYAIDMLLPALVRSLDEQRSPKAKLAVLEFANKSFSKYTVDSDGYSNSGFLKLWLSKLAPLVNEKNAKLKEASISGIISVYSHFDSTAVLNFILSLSVEDQNLLRRALKIKTPRIEVDLVNYLQSKKERPRPKSYDQVDFGTSEDGYALTSKKSYPFGRFSSSSLDAEGGKMISSMHEPVLHNVSIGRTTSDMSMDHAIQSLESSTGAEVHLTRSREPKNNINSVVEAARSWTNYTEKTDASLDGETATSTPRLDVSRFVTSDGHNTVGSTTEESVQEGDMIVNLSSIKTSLQMDNGLSVPQLLYQISNDTEVSSSEKREALQQLVDASLDNNSSIWAKYFNQILKVVLEVLDDSDSSMRELALSLITEMLNYQKDAIEDSMEIVFEKLLHVTKDAVAKISNEANQCLNVLLAKYNPFTCLAITVPLLVSDDEKMLVVCINCLTKLVGRLSQEELIVQLPTFLPALFDAFNNQSPDVRKTVVFCLVDIYIMLGKAFAPYLEGLSSTQLRLVTIYANRISQARSGKPIDSNQ

SEQ ID NO: 54076 - protein, 277 aa, Zea Mays
MLGALRKHRSIVDIYGHQLSSKWVQVDGDKEYRILQSIILMEYVNGGSLKGYLTKLLKEGKKCVPIDLSVYIAREVACALLEMHKKLVIHRDIKSENVLIDLDPKRNAGAPIVKLSDFDRSVPLYSLSHTCCISQLGTHPPDVCVGTPCWMAPEVVKAMHEKHHYGLEIDIWSFGCFLLEMLTLQMPYQGLSDTEIYDLILRKKQRPRLTQELEAFWTMDEPATRLKLGITSDAHADKLRHLIDLFYQCTRGHASRRPKAVQIYNSLCSLPTCYDMR

SEQ ID NO: 54077 - protein, 340 aa, Zea Mays
MAPALTSNPPSFRPLTSPLRRRAATVPCRVGKPGKDSSAADDATGPNKRPNLFADFGNAKSLIQAFPSQSLFAGGGRGRKDPQTVFVAGATGQAGVRIAQTLLRQGFAVRAGVPDLASAQELARLAAAYRLISPAEARRLNAVEAGFGDPDAIAKSIGPAAKVVVTVGSAEKGPEGGGVTTDDALRVVRAADLASVAHVVVVYDEGAASGGLGGGGSTYNVLDGFTSFFSNLFSREQQALTLSQFLAKVAETDVRYTLVKASLTDDYTPESYYAQLVLTKEGVSPSDTGKVSRSQIAALVADVFSNVAVAENKVVEVSTSSSATAKNIAEAFTCSKFMIT

SEQ ID NO: 54078 - protein, 256 aa, Zea Mays
MTFNFSMQAIDHIINSAAKSNYMSAGQISVPIVFRGPNGAAAGVGAQHSQCYAAWFAHVPGLKVLTPYSSEDARGLLKAAIRDPDPVIFLENELLYGESFPVSAEVLDSSFCLPIGKAKIEREGKDVTITAFSKMVGYALQAAEILSKEGISAEVINLRSIRPLDRAAINASVRKTNRLVTVEEGFPQHGIGAEICMSVVEESFAYLDAPVERIAGADVPMPYAANLERMAVPQVDDIVRAAKRACYRAVPMAAAA

SEQ ID NO: 54079 - protein, 239 aa, Zea Mays
MFKFLKEVVAGSGSGLKDFPYTIGEPYASAWGSWKHHRGTSKDDGSPVSIFSLSGSNPQDRHMVAGRNGVKRLRTVRHPNILSFLHSTEAEAADGPAMKYTIYIVTEPVMPLSEKLKELNLGGTQRDEYFAWGLHQISKAVSFLNNDCKLVHGNVCLASVVVTQTLDWKLHAFDVLSEFDANNEASGSPMLQFEWLVGTQYKPMELSKSDWASIRKSPPWAIDSWGLGITSLLLEKSEA

SEQ ID NO: 54080 - protein, 338 aa, Zea Mays
MRMTRTWDSTMSMLPKGGDTIWGNLDWSPEDGLECKAKKHKTNDTEVSKDSNGENIEVQPEPINYGRLVSFGKDVAEAPSSEIEQIEFRDAVKGNDIVHSNASCREIWTEYHELGWGGIKAVADYKVYTASSVIDLLHFVAPRMMQRGNVHFSYGIADNLDDPKYQHYKYWSNPLETKLPNAPDMEIISMYGVGIPTERAYVYKLAPQAECYIPFRIDASADGGEENKCLKGGVYLADGDETVPVLSAGYMCAKGWRGKTRFNPAGSKTYVREYSHSPPSTLLEGRGTQSGAHVDIMGNFALIEDIIRIAAGATGEEIGGDQVYSDIFKWSEKIKLKL

SEQ ID NO: 54081 - protein, 516 aa, Zea Mays
MSPFEHGEVFVLDDGGEVDLDLGNYERFIDVTLTRDNNITTGKIYQSVIEKERRGDYLGKTVQVIPHVTDEIKQWIQSVSSVPVDGQTRPADVCVIELGGTVGDIESMPFIEALRQLSFSLGKENFCLIHVSLVPVLGVVGEQKTKPTQHSVRELRALGLTPDLLACRSAQPLIGSVKEKLSQFCHVPVENILNIHDVPNLWHVPLILRNQKAHEAIIKQLNLARSAGPPELRDWTDMAESYDNLNNSVKVALVGKYTNLTDSYLSVVKALLHASVACSLKPSIQWIAASDLEDATAISAPDAHAEAWETLKGSSCILIPGGFGDRGISGMILAAKYARENRVPYLGICLGMQISVIEISRHVLGLEDADSEEFNKDTPNHVVMYMPEVSKTHMGNTMRLGCRRTFFSKPDCLTSKLYGSPPHVDERHRHRYEVNPSFVPMLESAGLHFVGCDESRNRMEIVELQDHPFYVGVQFHPEFKSRPRRPSPPFTGLIMAATKQLGANSNSSNGFVGASD

SEQ ID NO: 54082 - protein, 590 aa, Zea Mays
MDPAAFARERNMPSDSDRILNEDKCFMSCSMPREHQKFFDVPAASVRELHLQSDAPSTSEANCSRGRMISGDLFAPRTRSLSPIPKGHAFAVSNGNSREFGFSPRSPVRKMDGLRSPPHPLPLPPASGACSPLHPASGACSPLHPASGACSPLLPTHSFCSPLPSSPSSCPPLPASPTNCSQSQSQWKKGKLLGSGTFGQVYLGFNSENGQFCAIKEVQVIMDDPHSKERLKQLNQEIDMLRQLSHPNIVQYHGSELSDESLSICLEYVSGGSIHKLLREYGSFKEPVIRNYTGQILAGLAYLHGRNTVHRDIKGANILVGPNGEVKLADFGMAKHISSFAEIRSFKGSPYWMAPEVIMNCKGYSLSVDIWSLGCTIIEMATARPPWHQYEGVAAIFKIANSKDIPEIPDSFSEEGKSFLQLCLKRNPASRASAVQLMDHPFVQDHPAVRAAKSSVLRNTPSSPADGRHTMSNRELPSRKIITPLKDIGLGMRDFTGFSTTVPSPHSPIPGRANMSTPVSPCSSPLRQFKQSNVRGMRSPPHPMLSPGLGNTVSYTQNQTRRNPAPAISDPWMDVGQMKLQSPNISPRRF

SEQ ID NO: 54083 - protein, 69 aa, Zea Mays
MLKQADGSYACVAESEARFTLGQAKEELLRVIGLQEEEGSSLEFLRRGYKNATWWEENVDQETSSAWRT

SEQ ID NO: 54084 - protein, 447 aa, Zea Mays
MPFIEALGQFSYRVGPGNFCLVHVSLVPVLNVVGEQKTKPTQHSVRGLRGLGLAPDVLACRSTEPLEEHVKAKLSQFCHVPVSNIVNLHDVTNIWHIPLLLRDQKAHEAILKVLDLQYDGKVPREPELTKWTKRATKFDKLKTPVKIAMVGKYTGLSDSYLSVIKALLHASVAMERKLVVEWVPSCDLEDSSAKETPEAHKKAWKLLKGADGVLVPGGFGDRGVQGKILAAKYARENNVPYLGICLGMQIAVIEFARSVMKLRGANSTEFDPATTSPCVIFMPEGSKTQMGATMRLGSRRTYFHVSGCKSAKLYGNASSVDERHRHRYEVNPDMVPDFEKAGLQFVGKDESGKRMGIVELPSHKFFIGAQFHPEFKSRPGKPSPLFLGLIAAASGQLEPLLQRSNPTTKACSISKVPKLKLYPTGPVNNPLNSLVNGYYPNGTGIHT

SEQ ID NO: 54085 - protein, 262 aa, Zea Mays
MNHDQMDGDYRNAVKLVIEFKETGLKPEVYSYLIGLTALVKEQKEFSKALRRLNASVKDGSISKLDAESMHSINKYQSDLLSDGVLLSNWVVQEGSSEVLGLVRERLLSLYTCAGCGLEAEHQLWEMKLLGREPDTQLYDVVLAICASQGEAAAVRRLLAGVESTSAGRRKKSMSWLLRGYVKGGFILDASETLIQMLDMGLLPDYLDRAAVLTALRRNIQESGSLESYLKLCKRLSETDLIGPCIVYLYVRKFKLWMAHML

SEQ ID NO: 54086 - protein, 300 aa, Zea Mays
MPPPCVKNPYLNTDPCIDAAVYGGRQCNSAVFSPSIGGNGLSRYRTDFHEIEKIGYGNFSVVFKVLNRIDGCLYAVKRSIKQLHNDMERRQAVKEVQAMAALGSHENIVRYFTSWFENEQLYIQMELCDRCLSMNRNQPVKRGEALELLYQICKGLDFMHERGIAHLDVKPDNIYVRNGIYKLGDFGCATLVNRSLAIEDGDSRYMPPEMLNDKYEHLDKVDIFSLGAAVYELIRGTPLPESGSHFTSIREGKIALLPGCPMQFQSLIKSMMDPDPVRRPSAKEILRHPSFDKLHKASSK

SEQ ID NO: 54087 - protein, 337 aa, Zea Mays
MALAWKNRTQQPRRLNKVLCMSVQQASRSKVAVVPIELEKAKEPPLHLYKPKEPYTATIVSVERLVGPRAPGETCHVVIDHGGNVPYWEGQSYGVIPPGENPKKPGSPNTVRLYSIASTRYGDSFDGKTASLCVRRAVYYDPETGEEDPSKRGVCSNFLCGSKPGDKVQITGPSGKIMLLPEDDPNATHIMIATGTGVAPYRGYLRRMFMEDVPTFKFGGLAWLFLGVANSDSLLYDEEFTNYLQQYPDNFRYDKALSREQKNKSGGKMYVQDKIEEYSDEIFRLLDGGAHIYFCGLKGMMPGIQDTLKKVAEQRGESWDQKLSQLKKNKQWHVEVY

SEQ ID NO: 54088 - protein, 348 aa, Zea Mays
MDSMEQPEPKTAGHYYALQVGSVFLTGYYNVLTNQPHLANQFYTDNSSVVRLDCETGRWSFGETVEVINDMMMSMKLSKVEVKTANFLESWAGAITLLVTGLVKLKHYPVRKRFAQNIVLAPKEDGYFIFSDIFKLICDEYDDQYPFADYNCADNMPQVEASYTMAEIGSDYLDGEPEAQETVDPAENHVQHQDYLEYKAGNVIDDETHLEEHIPPFPSSTDVKRDSPLALPHPPSPTLEEPVEEAPKTYASVLRTKSKATLAITESQQAQQLAQQPQSASVHEKSNLDNHRDVSVPEDEEEFLSVYVGNLSPSTSVFDLEKVFQAFGRIKPDGVAIRSRGWSILWLC

SEQ ID NO: 54089 - protein, 56 aa, Zea Mays
MELEAEVQKLREQNQELERKQAEIMEMQNNEVSEMLKDPFGRKKRLCLRRTLTAPW

SEQ ID NO: 54090 - protein, 152 aa, Zea Mays
MEAYQVSPEMTKVVNSSPFLMPSARNSLQQIRSATGKLKKDPANRSGYLPVNFGLSSFQRKDIVMHVEGVSSLRQLVHQVVLNNEETAFEELARERLLKELASEKAASLQVKQKPRKRDGSVTAAAVGASLGAGLGIVMAVIMGAASALRKP

SEQ ID NO: 54091 - protein, 217 aa, Zea Mays
MTRHVSMISITLSPRELDKHTPGYQAPVYIEQPRQQQVPPPQRQPRRPPAQFQQLEYEDSYARGRGRGRGRGRGWGRGGYGGYGGYGNNQGGYHQGGGYYDNQGGYNGYDNQGGYSGYDNQGGYGGGYGYNQGRYGNYQENGGYNRGRGSGMRGRGNWGYRGGYEGGRGGGYGGGRGGGYEGGRGGGYEGGRGGSAQGGRGYGGRGRGRMGGRGRGN

SEQ ID NO: 54092 - protein, 499 aa, Zea Mays
MVVKDNFEEKQQTKEVIVDPTPHEANNFPSTDNHEENEQNKEIVADTTSHKISAVQSMGSTEEKEHIEDFIAKLASEEIIFTSNRDIVEQQDETDMKTNYEIDRARNLEATEEIAAGGESNTGTITDVVEDKFPNEEITLGTISLNMADSSVKEEKMHDEEVNEDLDSRDDIMVHGPDNVKEKMCEETMSGPTLDKFSLPTSTDSPEEGNKDESTRADPMSHETNVAQTSDGADEEKKIRELAVDPTSSIGTMGNIGNAEDKKPSEETTTDPRPVENTTTQGTEDADSSKQNENTASVGGVEGKKQGEETTADPRSVENTTVEGKKQGEETTADPRSVENTTAQGTEDAESSKQNENTNVMEEERVTVEDTTSREISAIESTDDLKGKATNENEEIADKEMVTDSDKNHVSLKVLLADKNVEAKEKEKKATSAKDRVLSFRRRVSKDNVSPPVKPGSPTKDKDGSGQQDWNSPARLPVEKKPKGRKQQWVPFICCSSVQ

SEQ ID NO: 54093 - protein, 934 aa, Zea Mays
MSDVARKLFSESQIKRCRNYLKMPALIIDEKEKEHLRFLTKNGLVVDPVLVEKERIMINPWTQDEKEIFMEMLAKFGKDFSKISSFITHKTTADCVEFYYKHHKSDSFREVKKLLDLHQQLPASNYLGAKSGQKWNPESNAASLDMLGVASAEAAHDLEYANKVEKISVKSLIRTAYGSNVSFVTKKSSDKECIDNVPLHERESVAADVLAGICGTPSPDGMGSCITSSADPGLKISMKRVEHVLSQENDKNVNEEESLSDQECEFDPVDWNDDEKSIFIEAMNNYGKDFSRISSCVKSKSYEQCKVFFSKARKSLGLDLIHQGAADVSMPASDTNGGRSDTDEACAVEMDSAICRKQSCSKIVQDVCPTEGAILGPDSVLISKQTEGDISNRCIVDVKIEEDDKEADKNCSNVDDKRSSDSTHQAGPININCPESTDKLQGTDDAVDQVNMHSSVLNSSNEHAMAMHSEVRSSLHSVDVLQTDKAEGTGTDPSQVEECSHHAVYTPMTAGNSGSSAFLTSDSGIKDNVHISNMSGASTVSPAFTSNYQHSLPGDMPLSKPKPLVTSLTPKDLMPVQFSSVLPDPTAFRFEGIKPNFEDSSGNKVSSALGAKDICKYPAFKDPSDNEHDTLFRNIDGYMNNHLTTELPVFSQRTASGTVSTSQTKFQNGRSSSVCLPNSSEGIQWPRKPEEVPEDSLRPCARNAKTEGGEKQKRPGDVKLFGQILSHQPTLPSSGSLCNGSQSKPPSPKIDKTSVRLTNNPRDLVVFSSRPGVSPHVGLEERSVRSYGHLDGSTIQPEPLLVMAKCQRSLASVPFYSAKNSTVGVFPDYQQPSMQPHQLDPKPLEMFSDSQKRNGLELVSGFGGAGILVSNVSDHVAALKARYGPGSKIMGSDADPWKDIGSSTIPFGSLTCQQRPSATVGSLEVITRCFVSRV

SEQ ID NO: 54094 - protein, 352 aa, Zea Mays
MARFEVIEKLGPDVKCRCTDPGLLLPRANLTIWRDGSVVRERNAMLPTISSKDWIDIDFGIAEGVDFIAVSFVKSAEVINHLKSYIAARSRGSDIGVIAKIESIDALKNLEEIIRASDGVMVARGDLGAQIPLEQVPSIQQRIVRMCRQLNKPVIVASQLLESMIEYPTPTRAEVADVSEAVRQRADALMLSGESAMGRYPEKALSVLRSVSLRIERWWREEKRQEALELQGVSSSFSDKISEEICNSAAKMANNLGVDAVFVYTKDGYMGSLLSRCRPDCPIFAFTSSTSVRRRLNLQWGLIPFRLSESDDMESNLNRTFSLLKARGMVQSGDLVIALSDMLQSIQVVNVP

SEQ ID NO: 54095 - protein, 987 aa, Zea Mays
MATYKLGVEVASAHDLMPKDGQGSASACVELTFDGQRFRTAVKEKDLNPVWNERFYFNVSDPSNLPELALEAYVYNVNKTLESSRSFLGKVRIAGTSFVPFPDAVVMHYPLEKRGMFSRVKGELGMKVYITNDPAIKASNPLPAMDPVSNNPLPAPSPAEQIAADITGTNLHTSQEHRSEAKTLHTIAKEVHHHHNHGHLPATFGEQPSKYSIDQMKPQSQPPRIVRMYSAASQQPMDYALKETSPFLGGGQVVGGRVIRGEKNASTYDLVERMQYLFVRVVKARDLPDMDVTGGLDPYVEVRVGNYRGITKHFEKQKNPEWNAVFAFSRDRMQASVLEVVVKDKDLIKDDFVGFVRFDLNDVPIRVPPDSPLAPEWYRLVSKSGDKSMGELMLAVWVGTQADEAFPDAWHSDAATLEDPSAVTHMKSKVYHAPRLWYLRVNIIEAQDVAILDKTRYPDVFVRAQVGHQLGRTKPVQARNFNPFWNEDIMFVAAEPFEDHLVLTLEDRVGPNKDEMLGRVIIPLAMIDRRADDRIVHGKWFNLEKPVLVDVDQLKKEKFSTRLHLRLCLDGGYHVLDESTNYSSDLRPTAKQLWKPSIGLLELGVLGAQGIVPMKTRDGKGSSDTYCVAKYGSKWVRTRTIMNNPNPRFNEQYTWEVYDPATVLTVGVFDNGQLGEKTGEKTSSGKDGKIGKVRIRLSTLETGRVYTHSYPLLVLHSSGVKKMGELHLAIRFSSTSLVDMLRHQAVQIVAARLSRMEPPLRKEVVEYMTDFDSHLWSMRKSKANFFRLMTVFSGLFAVSKWFSGVCSWRNPITTVLVHILFIMLVCFPELILPTVFLYMFLIGIWNFRYRPRYPPHMNTKISHAEAVHPDELDEEFDTFPTSRNPEVVRMRYDRLRSVAGRIQTVVGDIATQGERVQALLSWRDPRATAVFVLFCLVAAIVFYVTPLQVIAALGGFYVMRHPRFRHRLPSVPVNFFRRLPARTDSML

SEQ ID NO: 54096 - protein, 84 aa, Zea Mays
MNIQIGEASRRTWLGEEADPQYSDRLLRAYKRPVEVDADQSRWFISKDAIVSGLGLLGIKQGGPEATFSKSRRKRVIRKKVTSG

SEQ ID NO: 54097 - protein, 166 aa, Zea Mays
MVMKFMLLPWKPELVFTGLSIMGVNPKNLKFNSHVDLWDSIQNNEYFSSEGLWDVFKQLRIYKTPDIETPNYLILKRTAHYEVRSYAPFLVVEAKGDKLTGSSGFNNVTGYIFGNNASSEKIPMTTPVFTQASDNTLSDVSIQIVLPMNKDLDSYQLQIQQLLCGR

SEQ ID NO: 54098 - protein, 594 aa, Zea Mays
MLGCESFMVVSIGPKHDCASTSKVTGKEASAAWIANRVKPMLIKEPGLGAREMQYRLEDQFTVTLSYNKVWEGRKLALKELHGTWEDSFKLLWNWKAAVEATCPGSLIEIDCKKVKGQMHFSKMFVALRPCVNGFLMGCRPYLGVDSTHLTGKYLGQLASATAIDGHNWMYPVAYAIFDKETNLNWKWFMTLLKRAIGTPPGLTIHTDACKGLAYGVSQVFGDAAEHRECFRHLMANFRRKYNGEVLKYMWPCAWACTHERHQVLMDKISETCPNAVAYLRYDHPHLWTRAKFNKICKVDYVNNNISECFNNWIKNVKELPAVDLMDMLRVMIMEKIATRQSIANKMQGHILPSVVNDLHEKSRNLRYTITKSGYMKGEVSGASRDGVAWRYGVNLVTQACSCGQWDVTGKPCTHAIAFITSQRNLRIEDYVGECYSVQRFKDAYQFEVYPMGDRLQWPKLDPGFEMRPPKLEGRPAGRPRKKRIKSAGEPGKRGPYQCKRCFQYGHIEKGCKNPVVEPHEDLPDNHLQRKTKKGTKKRKKSEPEQTSTSLVQISPSSSGPMTRRRVAMSPTCSSPSASKQGEAPASSKRRLII

SEQ ID NO: 54099 - protein, 815 aa, Zea Mays
MYVVKRDGRQETVHFDKITARLKKLSYGLSQDHCDPVLVAQKVCAGVYKGVTTSQLDELAAETAAAMTASHPDYASLAARIAVSNLHKNTKKSFSETIKDMYRHFNERSGLMAPLVAEDVYEIIMNNAARLDSEIIYDRDFDYDYFGFKTLERSYLLKLGGKVVERPQHMLMRVSVGIHKEDIESAIRTYHLMSQRWFTHASPTLFNAGTPRPQLSSCFLICMKDDSIEGIYETLKECAVISKSAGGIGVSVHNIRATGSYIRGTNGTSNGIVPMLRVFNDTARYVDQGGGKRKGAFAVYLEPWHADIFEFLDLRKNHGKEENRARDLFYALWVPDLFMQRVQSNGEWSLFCPNEAPGLADCWGEEFDNLYKKYESQGKAKKVVPAQTLWFDILKAQIETGTPYMLYKDTCNRKSNQQNLGTIKSSNLCTEIIEFTSPTETAVCNLASIALPRFVREKGVPLESHPSKLVGSSDSKNRYFDFEKLAEVTSTVTYNLNKIIDINYYPVETAKRSNMRHRPIGIGVQGLADTFILLGMPFDSLEAHQLNKDIFETIYYHALKSSAELAVKEGPYETYEGSPVSKGILQPDMWNVVPSTRWNWPSLRETISKAGIRNSLLVAPMPTASTSQILGNNECFEPYTSNIYSRRVLSGEFVVVNKHLLHDLTEMGIWTPTLKNQIIYDDGSVQKIAEIPDDLKAIYKTVWEIKQKTLVDMAVDRGCYIDQSQSLNVHMEQANFGKLTSLHFHAWSKGLKTGMYYLRTRAAADAIKFTVDTTLLKENGNGMNDGKPTEEDVEAKMAQMVCSFNNREECLACGS

SEQ ID NO: 54100 - protein, 352 aa, Zea Mays
MKGEYPQRIGQPECQYYLKTGTCKFGATCKFHHPREKAAMATRVQLNELGYPLRPNEKECAYYLRTGQCKFGSTCKFHHSQPSTMMVAVRGSVYSPGQSATSPGQHAYQGAVTSWPLSRSASFIASPRWPGHSSYAQVIVPPGLVQVPGWSPYTAQIGSSSSEDQQRTPGAAQYYTGSRQSGTSIGDQGMFSSYQAGSVPVGLYAVQRENLFPERPDQPECQFYMKTGDCKFGAVCKFHHPRERIIPTPNCALSPLGLPLRPGEPICSFYNRYGMCKFGPNCKFDHPMGNAMYGQAPSPASEAPAPRRMLAHVPPSHPEASPDGGSGRSRRIAHSDSQQIPSGERSAEREAS

SEQ ID NO: 54101 - protein, 87 aa, Zea Mays
MRGGGGGGMMDDEERVGHAEIPTSFGPELRACLRCRLVKTYDQFRENGCENCPFLEMDREHDNVVNCTTPNFTGSSCRGDERGEFNE

SEQ ID NO: 54102 - protein, 144 aa, Zea Mays
MRALQELVPNTNKTDRAAMLDEILDYVKFLRLQVKVLSMSRLGGAGAVAQLVADIPLSVKGEAGDGGGAPQQQQQQHVWEKWSTDGTEKQVAKLMEEDIGAAMQFLQSKALCMMPVSLAMAIYDTQHPLDGHGHSLKPEPNASS

SEQ ID NO: 54103 - protein, 417 aa, Zea Mays
MRRPLASAALRLRFFSSTSPARLLSPCPFLLSRRDDDGGREASSSPLPPLPPSGSAFSPRPLLFSASAAAGLFSLHGGWWRQALPPAASRPLGSVSDAAPVRLTISRSYSLRVAKGKKKAHFDDEHSHRAVNMALWCNFLVFSLKFGVWISTSSHVMLAELVHSVADFANQALLAYGLSSSRRAPDALHPYGYSKERFVWSLISAVGIFCLGSGATIVHGVQNLWNSHPPENIHWAALVIGGSFLIEGASLLVAIKAVRKGAEAEGMSIWDYIWRGHDPTSVAVMTEDGAAVTGLAIAAASLVAVQMTGNAMYDPIGSIIVGNLLGMVAIFLIQRNRHALIGRAIDDHDMQRVLEFLKSDPVVDALYDCKSEVIGPGFFRFKAEIDFNGVVLVQNYLERTGRGSWAKQALNPLTNKP

SEQ ID NO: 54104 - protein, 1018 aa, Zea Mays
MQLFDCLLTEVHERCKKGLSLAKRLNSTLAFFCYDLLSIIEPRQVFELVSLYMDKFAGVCQSVLHDCKLTFLQIICDHDLFVEMPGRDPSDRNYLSSVLIQEIFLTLDHDDLSQRAKAARILVVLICKHEFDARYQKSEDKLYIAQLYFPLIGQILDEMPVFYNLNAIEKREVLVVILQIVRNLDDATLIKAWQQSIARTRLFFKLLEECIIHFEHNKTGDNMLLGASSRSPDVEHPASPKYSERLSPSVNTYLSEASRHEIRPQGTPENGYMWNRVSPQLSSPNQPYSLREALAQAQSSRIGSTARALRESLHPVLRQKMELWEENLSTAVSLEVLGITEKFSVAAGARSITTDYAKLDCVTSILMGLLSRNQSLAFWKAFLPVVYNIFNVHGATLMARENDRFLKQIAFHLLRLAVFRNDSIRKRAVVGLQILVRNSFNYFKNTTRLRVMLTITLSELMSDVQVTQMKFDGSLEESGEARRLRKSLEEMADVRSKDLLKDCGLPVTALEAAPEGSSDNRWSWVEVKHLSKCLVQALDAGLEHALLGSVVTVDRYAAAEGFYKLAMAYAPVPDLHIMWLLHLCDAHQEMQSWAEAAQCAVAVAGVIMQALVGRNDAVWSKEHVASLRKICPIVNTDVSAEASAAEVEGYGASKLTVDSAVKYLQLANKLFTQAELYHFCASIQELIIPVYKSRRAYGQLAKCHTSLTNIYESILEQEASPIPFIDATYYRVGFYGERFGKLNKKEYVFREPRDVRLGDIMEKLSHIYEAKIDGSHTLHIIPDSRQVNADELQPGFCYLQITAVDPVMEDEDLGSRRERIFSLSTGTVRARVFDRFLFDTPFTKNGKTQGGLEDQWKRRTVLQTEGSFPALVNRLPVIKSESLEFSPVENAIGMIETRTAALRNELEEPRSSEGDQLPRLQSLQRILQGSVAVQVNSGVLSVCTAFLSGEPATRLRSQELQQLIAALLEFMAVCKRAIRVHFRLIGEEDQEFHTQLVNGFQSLTAELSHYIPAILSEL

SEQ ID NO: 54105 - protein, 94 aa, Zea Mays
MNDITGRSNFGWPKQQYVKEQPAPTFVERMPKAKDAVEFTSSNIAEVPDIMYQLGRQPSRKDVTLANNMRNSVAYPTRRVEPDDDDEHLNNLLQ

SEQ ID NO: 54106 - protein, 101 aa, Zea Mays
MNGSTKKSLVNGVLDQPNANSGLESSGNDYPSYTNSSSAMPPASTELIGSAAAVIDVDSAENGPGTKPEQPAKGASRASKSKVVPRGQKRVLRSATRGRAT

SEQ ID NO: 54107 - protein, 340 aa, Zea Mays
MDVLEKQKDVLDTVLNIYIKTMTEDDDKEVVAQACMSVADIVKDCGFAAIEPYMLRLAEVTLVLLRQESSCQQVESDGEDDGDIDHDEVLMDAVSDLLPAFAKVMGSYFDPIFAKLFDPLMKFAKSPHPPQDKTMVVATLAEVAQEMGAPISAYVDKIMPLVLKELASSDATNRRNAAFCAGEICKNGGAAALKYYGDILRSLHNLFSNSESDDAVRDNAAGAIARMIMVQPQSIPLNQVLPVFIKALPLKEDHEESMTVYGCVCGLLLSSHPQILPLVPDVIHVFAQVVVSPDESDEVKTNIGKAISHLISVYGQQMQPILSALPPAHANALASFASRR

SEQ ID NO: 54108 - protein, 1036 aa, Zea Mays
MVQLNGRSVSPGTKVPLTGGDEVIFSSCGKHTYIFLYPLNDKVPKTVLSSAVSLLEAPVASVKRIRTDKRTGDTSAVAGTEMMTSTSNQKDVAAVPPASAGENSQRVVRPLASSASDKLKGRAVSPEKEFANGENANEVNSNIEDSPMVVAAAPISPDAAANDTCQQNGFVSDSHLGAEIALEDQRDHIIRELNASTNVPPSRCQAFKDGMKQGIINPSDIDVTFENFPYYLSENTKNVLLSSAFIHLKKKEFIKQFVEISSINQRILLSGPAGSEIYQETLVKALAKHFSARLLVVDSLLLPGAPSKDPEFQKDVGKADKSGDKAAAEKFAIYQKHRSSLADTVHFRRPAAPTSSVNADIVGTSTLHSASLPKQESSTATSKSYTFREGDRVRYVGPAQPCSLSQRGPSYGYRGRVMLAFEDNGSSKIGVRFDKQIPDGNDLGGLCEEDHGFFCSAELLRPDFSAGEEVERLAMTELIEVISEENKSGPLIVLLKDVEKSFTGVTESLSSLRSKLESLPPGVLIIGSHTQMDSRKEKAHPGGFLFTKFASSSQTLFDLFPDSFGSRLHERSKESPKTMKHLNKLFPNKILIQLPQDEALLTDWKQQLDRDVETLKAKSNIGSIRMFLSRNGIECNDLEELFIKDQSLSNENVDKIVGYAVSYHLNQNKIETSKDAKLVLTTESLKHGLNMLQSMQNDNKSSKKSLKDVVTENEFEKRLLADVIPPNDIGVTFDDIGALENVKDTLKELVMLPLQRPELFCKGQLTKPCKGILLFGPPGTGKTMLAKAVATEAGANFINISMSSITSKWFGEGEKYVKAVFSLASKIAPSVIFIDEVDSMLGRRENPGEHEAMRKMKNEFMVNWDGLRTKDKERVLVLGATNRPFDLDEAVIRRFPRRLMVNLPDASNREKILKVILAKEELGSDVDMDSLANMTDGYSGSDLKNLCVTAAHYPIREILEKEKKEKNLAKTEGRPEPALYGSEDIRPLSIDDFKSAHEQVCASVSSDSANMNELLQWNDLYGEGGSRKKKALSYFM

SEQ ID NO: 54109 - protein, 231 aa, Zea Mays
MFGQGTSQEKAILEVNLEAAKQIARELRLRDIGGIIIVDFIDMSDDSNKKLVYEEMKKAVEKDRSTVGVSELSKLGLMEITRKRVRPSVTFMISEPCTCCHGTGRVEALDTSFSKIEREICRRLAASRRKSDPEKPKSWPRFLLRVDHEMCTYLTSGKKTKLGLLSSSLKVWILLKIARGFSRGAFELLPYSEKENYSMEKETSELPQKESRPKLSVFPIKKWMSRAKRAK

SEQ ID NO: 54110 - protein, 271 aa, Zea Mays
MGNLHGWGGPLSQNWLDQQLALQKKILSRMIELGMVPVLPSFSGNVPAIFAKLFPSANITRLGDWNTVDANPKWCCTYLLDPSDSLFIDVGQAFIRQQIKEYGDVTNIYNCDTFNENTPPTDEPAYISSLGSAIYEAMSRGNKNAVWLMQGWLFYSDAAFWKEPQMKALLHSVPIGKMIVLDLFADVKPIWKVSSQFYGVPYIWCMLHNFGGNIEMYGILDSISSGPIDARTSYNSTMIGVGMCMEGIEHNPVVYELMSEMAFHNKKVEVE

SEQ ID NO: 54111 - protein, 394 aa, Zea Mays
MTHQAALASVTAQAQMHLQSPTPSACSEVPSSPFYMTPRSLVPLQHSPSVTEGNICTPIADKSFSSDSKSHHVVNMVADGFNWRKYGQKQVKSSDNSRSYYRCTNSGCLAKKKVEHFPDGRVVEIIYRGAHNHEPPQKTRFAKERVTPISVPSGGETLRLVNTEIVESSTPTCELERSAISETSEQHLFCSSDCEGDAGNKSEDEHPSAEALPKRRTLEATAPNLTPVRRTVREQKIIVQAGKMSDGYRWRKYGQKIVKGNPNPRSYYRCTHGGCPVRKHVEKAPDDVNNIVVTYEGKHNHDEPFRSSSIPVSVISPSATATEQPNTSSTSDERPPTITQKDANSESDKETTLKFGGEKALESAQTLLSIKTNSDDMKNSVLKETSAAVPVQNN

SEQ ID NO: 54112 - protein, 374 aa, Zea Mays
MEAAPTTITVQVKFAGRTIPVEVPAAASGAELKRLLQPLTNVLPRGQRLICKGKVLQDAASLSSMQVVGGSKVMLIASQGLHQGDGPITNNSSSSATTVRRPSNVKENQTQKPEVVVTKSRSERWKLTGVVALQDCDLKVIPEEVWDCGTSIRILDISYNCIKEIPHKISALKSLNKLLLTENDIVDDSICWEGLSCLQKLLNLSLSENRLVSLPPTLGSLTSLRELCVAKNRLDNLPVEIGLLKHLQVLIANNNRITSLPSSIGDCESLTVVHLSSNLLTELPETFANLRNLKNLLISNNGLTSLPAAFFKKCSQLTTLDLHGTEITNDVLRQVEGWEEFDQRRRQKHQKQLDFRVGSSGVFDEGADDDNRRR

SEQ ID NO: 54113 - protein, 82 aa, Zea Mays
MFSKPLKELLSTDEGEVDDVALISMDSKGIDIRVRQGAQFNIQRVPFEVDHSVETLDEATEALRRIISKSRWHTKSSVIGRP

SEQ ID NO: 54114 - protein, 104 aa, Zea Mays
MAGMEELLTLLFNALLLVFVVKLLLALFHTKIIVILLYILVLLFAMLLSGRFPGWRSNPIPMQTFFQSAMGTASSFICAISWFFSVSSHWWRNQDPNSLLFCMY

SEQ ID NO: 54115 - protein, 729 aa, Zea Mays
MVKHACMNERMVGILKRVLEEVEKVMQEFRGMLYKSMEDPHLDLAEIENIVRLLLELEPETDPVWHYLNIQNSRIHGLFEKCTQDHDSRMEVLQNKIREKVLSDSKWRQLQQDSNKSLEVDSTIGDSPRVDQLSTNFMAEEADSLRATYIRRLTSVLIQHVPAFWRLALSVFSGKFAKAASGNVVSDFDVNAKPTANKNDEKGGEVKYTNHTLDEVGSMVQATISAFDTKVQSTFRDFEECNILCPYMSDTIKEIAKACQTLEGKDSSPTAVKMLRTLHFEMTKLYILRLCSWMRATTKEISKDETWVTLSTLERNKSQYAISCLPLEFRDITVSAMDRIDTMILNLMSETAKSYDISQPLQEINESVRLAFLNSFLDFAGYLERFGGELTENRPNKENNYVSNGYINGTRETFVNTDGDLHKKLLVVLSNIGYCKAELSEELYSKYRHIWSPVRNNEERSSDMRDLRTSFSALEEKVLDQYTFAKSNLIRSAAQSYLLDSGIYWGAAPMVKGIRDATLDLLHILVAVHAEVYSGARPLLEKTMKILVEGLVDIFLSVFHENKTKDIRLLDANGFCQLMLELEYFETVLHTYFSPEAQQAMKSLQENLLEKACESVAEAMENPGHQRRPTRGSEDTASDDRQPSVSPDDLLVLAQQCSSDLLQGELERTRLNIACFMESTLQPTAAPAGPKPAAHSSYQAQHAPVQTSSPSFRRQQTGTSSPVVSRRRR

SEQ ID NO: 54116 - protein, 51 aa, Zea Mays
MLVGDLPWDLFTTICGKLRIMRGSDAAGMAPRSPEQIVGTRIRNVARHAES

SEQ ID NO: 54117 - protein, 184 aa, Zea Mays
MDSSSSSLSQQPEFDYLFKLLLIGDSGVGKSSLLLRFTADSFDDLSPTIGVDFKVKMVSIGGKKLKLAIWDTAGQERFRTLTSSYYRGAQGIIMVYDVSRRETFTNLSDIWAKEIDLYSTNQDCVKMLVGNKVDKESERAVTKKEGIEFAREYGCLFLECSAKTKVNVEQCFEELVLKYWPVCT

SEQ ID NO: 54118 - protein, 207 aa, Zea Mays
MKVTKEKNTLAEQLKNAEASRKRFDDELKRYAAETQTREEIRKSLENEVRRLTQTVGQTEGEKREKEEQITRCEAYIDGMESKLQVCQQYIRTLETSLQEEVARHAPLYGVGVESLSFNELEALANIHEQSLRQIKAIQQRKGSSHLLGGTALSHIPALFSPPPPSAAVGSPASRIPASPMAPNGAGMHGNGHHMNSTTGGRWFNPS

SEQ ID NO: 54119 - protein, 302 aa, Zea Mays
MPARTIRVRGIGIQHSSHLLPRPTAPPQRDGGEQQHHGMRDAAGADLRGARDRVGGVVRVGAGRGVRAPGAVARGHPGRAAPAGRAGGLRGRVLEPARPACLLPLRHGVARRAPHRAPRLRLRRHPRVRRLPRARPRLRRLPPRRLLHVAPRVRLRRPRALGQGQGLPRRLRHLQEARAPGRLHQRRPVLSVAPLPAPVRVLQAAVGVRVQLREPDGVVRPGGAAGGGRGLRAVEQRPGAAVLRVRVLQGGPPGGAPGPVAQGQRRPRRRHRRPRHPLPRRLQRLQERAGRRHLRTPQVLAS

SEQ ID NO: 54120 - protein, 114 aa, Zea Mays
MAPKRRRADQGSSVPAPPPPLRKAKLQPVVIFAHGAGAPSSSDWMVHWKKMVQDALDAVAVVTFDYPYMSGGKRRAPPKAEKLVDHHLGIVKDAAVKYQGHPLILMGKSMGSRE

SEQ ID NO: 54121 - protein, 204 aa, Zea Mays
MMEVGLMLAHHCDRYVMRQGVGSYDGDSLEQTIARSRCHKGRLLYYFPRQFSKQTDFDSVSSWCGWHTDHGSLTGLTCGLFTKNSMEVPCPDSAAGLYIRTRDNQVVKVVFDEDQLAYQIGETTEILSRGYLCATPHCVQAPSSENASNVDRSTFALFMQPDWNEKLKFPSEIPYHQELIPPNGTLTFGEYSERLVDKYYQTTT

SEQ ID NO: 54122 - protein, 403 aa, Zea Mays
MDIATSTDLLGVETRSTGFIFSIGKEPLKTRPSVFALGERINILKEIDQPALIPHIAEAKSQKYSYEVLFRSLQKLLIDTATSEYLFTDDFFGEESIFHDIFAGPIQVVDEHFNTVLLNCYDAIGIMLMIRIIHQHQLIMFKRRIPCLDSYLDKVNMSLWPRFKMVFDLHLNSLRNANIKTLWEDDVHPHYVTRRYAEFTASLVHLNVEHGDGQLDLNLERLRMAIEDLLVKLAKMFSKPKLQTVFLINNYDLTISILKEAGTEGGKAQQHFEEVLKSNIAIYVEELLLEQFSSLIRFVKSRPADETAANSEKASIAEVEPLVKDFASRYKAAIELMHYDVITSFSNFLCGMEILRATLAQLLLYYTRLSECVKRINGGSALNKDLVSISSILFEIKKYSRTF

SEQ ID NO: 54123 - protein, 353 aa, Zea Mays
MDGDLMFPQPRLDRRFSVCDPVNLGGRPSDFDGSLRCPGSPDEDTIDMEMGDSVQVSPFPHSYSASAPSEQNDDQSNSSRYCLVASKQMVGIFLTVWVRNEIRDDVRNLKVSCVGRGLMGYLGNKGSISVSMCLHQTSFCFVCCHLTSGEKEGDELRRNSDVLEILRKTRFPRVRGAGDVRSPETILEHDRVIWLGDLNYRIALSYCSAKALVEMHSWKQLLEKDQLRMQQRYGRVFQGWKEGRIYFPPTYKYSFNSDRYAGEGRHPKEKRRTPAWCDRILWHGNGLSQLCYVRGESRFSDHRPVYGIFLAEVGVVRQRRRNNAGYFGSRVEVEELLPRSRSYRLRDDEVLLS

SEQ ID NO: 54124 - protein, 172 aa, Zea Mays
MEENSDTFVLHSEQERKGKVKPVHIVDVPGHARLKPKLDEVLPKAAGVVFIVDAQDFLSSMQAAAEYLYDILTKASVVKKRIPVLIFCNKTDKVTAHSKEFIKKQLEKELNKLRESRNAISSADISDEVQLGVPGEAFNFSQCQNKVAVAEGAGSTGNVLAVEQFIREHVRA

SEQ ID NO: 54125 - protein, 141 aa, Zea Mays
MNVKLLIIAFPLSQLSGRMRALLNYEAPEIHDSEPFTQRSDVYSFGVVMLELLTGRKPYDSSRPRAEQHLVRWADSQLHDMKSLSEMVDPSIRGECSVILLSCFADIISRCIQPGPEFRPAMSQIVQDLARIVGASSEVSE

SEQ ID NO: 54126 - protein, 883 aa, Zea Mays
MELGRDSDTGGQVKYVVELARAMSMMPGVYRVDLFTRQVSSPDVDWSYGEPTEMLCSGSNDGEGMGESAGAYIVRIPCGPRDKYLKKEALWPYLQEFVDGALAHILNMSKALGEQVGNGRPVLPYVIHGHYADAGDVAALLSGALNVPMVLTGHSLGRNKLEQLLKQGRMSKEEIDSTYKIMRRIEGEELALDASELVITSTRQEIDEQWGLYDGFDVKLEKVLRARARRGVSCHGRFMPRMVVIPPGMDFSNVVVHEDIDGDGDSKDDIVGLEGASPKSMPPIWAEVMRFLTNPHKPMILALSRPDPKKNITTLVKAFGECPPLRELANLTLIMGNRDDIDDMSAGNASVLTTVLKLIDKYDLYGSVAFPKHHNQADVPEIYRLAAKMKGVFINPALVEPFGLTLIEAAAHGLPIVATKNGGPVDITTALSNGLLVDPHDQNAIAQALLKLVADKNLWQECRRNGLRNIHLYSWPEHCRTYLTRVAGCRLRNPRWLKDTPADAGADEEEFLEDSMDAQDLSLRLSIDGEKSSLNTNDPLSSDPQDQVQKIMNKINQSSALPPSMSSVADGAKNATEATGSTLNKYPLLRRRRRLFVIAVDCYQDDGRASKKMLQVIQEVFRAVRSDSQMSKISGFALSTAMPLSETLQLLQLGKIPATDFDTLICGSGSEVYYPGTVNCVDAEGKLRPDQDYLMHISHRWSHDGAKQTIAKLMATQDGSGDTVELDPASSNAHCFTFLIKDPKKVKTVDEMRERLRMRGLRCHIMYCRNSTRLQVVPLLASRSQALRYLFVRWGLYVGNMYLITGEHGDTDHEEMLSGLHKTVIVRGVTEKGSEGLLRSPGSYKKDDVVPSETPLAAYTTGEMKADEIMRALKQVSKTSSGM

SEQ ID NO: 54127 - protein, 240 aa, Zea Mays
MPTIIVSVDLECSRCRAKIQRVLNRIQEKGEFCIDDIDFDEKNNKVKVTGPFDPDKLADKLCCKACKIIKQIEIVEPPPPPPPKPKEEPKKEEQAPPPPEKKEEAAPPPPEPPKEKPPPPKEEPPKEKPPPPKEEKPAPAPPKEEKPAPPPPKVVEVPYPWPYPYPYPAWPSDCCCHHGHGGCHCCSCGKAPEPAPAPAPAPPPPQYFPQYMPQPYPCNPCGGGYRIVCEEDPSYACAIM

SEQ ID NO: 54128 - protein, 415 aa, Zea Mays
MVHKVTDLRVMVPLLSWGHALRIMAMDTHLEVCLHLKTTTHPTVATHRRDRQEVAWAGTRGRAHQPILRTRVVVLTTTSRDLSHMIASHPATLLGQGITTVMGNPRALTMANLSIRNMHLNRTTAMAMVILDTMPPLRTSSTMVSHRWPRSKAILNSQIPMLGLHTVDLVNGPPGVLPPQMAPTRRHLHLMGHRLSNLLLMGKHMVQQRDLMGMVNRVTHSRVARYQLHMVRVHQQLQDILSKARSKVAMHSTRRPNQHMVIKQLKPMRTMGTRELQQIPTTEVRTHSSQGMVLLVRQLVRLVMHPLRQRPASLCMARLDIPSHLQILQVMISLQHQRRLRAVMLRPLQIHNSLLQQKGSRHSLLLLLLLDMVLAGSGRHEPRLPNFDDSKVRLDIRFWRVFECLHLLDVCGRIM

SEQ ID NO: 54129 - protein, 106 aa, Zea Mays
MEPKLPGEYTVNQQVRQITITIRTIVTGLCYLATSVFGINAVGLVLYSLQLTLQSIMDDDSSSSTGKISEQSNTLASSDSSTSSRESDSSDMQVTDKSKNSAEKQS

SEQ ID NO: 54130 - protein, 1473 aa, Zea Mays
MEAPPGGVDDMTRLSYLHEPGVLQNLATRYELNEIYTYTGSILIAVNPFQRLPHLYDTHMMEQYKGADFGELSPHVFAIADVAYRAMINEGKSNSILVSGESGAGKTETTKMLMRYLAHLGGRSGVEGRTVEQQVLESNPVLEAFGNAKTVRNNNSSRFGKFVEIQFDKTGRISGAAIRTYLLERSRVCQINSPERNYHCFYFLCAAPPEYTQRYKLSDPRSFHYLNQSSCIEVDGINDAEEYLATRRAMDIVGINEEEQEGIFRVVAAVLHLGNINFAKGTEIDSSVIKDDKSRFHLNIAAELLKCDCQNLEKALITRVIVTPEEVITRTLDPASAVASRDALAKIIYSRLFDWIVEKINVSIGQDPNSKQLIGVLDIYGFESFKVNSFEQLCINYTNEKLQQHFNQHVFKMEQEEYTREEINWSYIEFVDNQDVLDLIEKKGGLIALLDEACMFPRSTHETFAQKLYTTFKNNKRFAKPKLSRTDFTVVHYAGDVTYQADYFLDKNKDYVVAEHQDLLNASSCLFVAGLFPPLPQETAKSSKFSSIGSRFKLQLQSLMETLSSTEPHYIRCVKPNNLLKPAIFENTNVIQQLRCGGVLEAIRISCAGYPTRKTFYEFVNRFGVLAPEVLEGSNDDKIACQKILEKMGLENYQIGKTKVFLRAGQMADLDARRAEVLGRAARIIQRQIRTYIARKQFAELKRSATQLQSFVRGTLARKLYECMRQEAAAVKIQKNMRRHKARESYLQLQAAAITLQTGLRAMSARKEFRFRKETKAAVHIQAQWRRHRDYSHYKNLQGAALTYQCAWRQRLARRELRKLKMAARETGALKEAKDKLEKRVEELTWRLGLEKRLRTDLEEAKAQEIAKLQETLHDMQLQVEESKAMVVKEREAARKAIEEAPPVIKETPVLVEDTEKINSLTTEVEQLKALLLTERQATEAAKREHAESELRNEELIKKFESAEKKIEQLQETVHRLEEKATNMESENKVLRQQAVAISPTSKSLAAYPKSPFQLKTPENGNALNGEVKSSPDITPILPNPKELEAEEKPQKSLNEKQQENQDLLIKCVSQDLGFSSGKPIAACLIYRCLLHWRSFEVERTGVFDRIIQTIGSAIESQDNNDKLAYWLSNSSTLLLLLQRTLKTTGAAGFTPQRRRSSAASFGRVFSGMRASPQSAGRAFMGSRLIGGLGDLRQVEAKYPALLFKQQLTAFLEKIYGMIRDNLKKEISPLLGLCIQAPRTSRASLIKGSRSQANALAQQTLIAHWQSIVKILTNYLNVLKANYVPSVLISKVFTQIFSFINVQLFNSLLLRRECCSFSNGEYVKAGLAELEQWCIYATEEYAGSSWEELKHIRQAVGFLVIHQKPKKTLKEITNDLCPVLSIQQLYRISTMYWDDKYGTHTVSSDVISSMRVMMTEDSNNAVSSSFLLDDDSSIPFSVDDISKSMTEIEVTDVDMPPLIRENSGFTFLHQRKD

SEQ ID NO: 54131 - protein, 596 aa, Zea Mays
MAGAPLRRSDLDFADVFGGPPRRVSGNEHRSQRGSQDTSSFESATRAGSGGPDTPVFGDRGSSDRRRQLGEEFYKDIFPGSEAASPRRSGAGDWGNVFGAQASPVSTARPRSSFSIRFNRGMDSSMPTSPSQQMSNRNDDGTSYAYSVPTSPNASMNNYLAQGAARQDSKKNPFSWHRYPFLSRFRSQSGEKKSTSNHVSSMDNEFEGTPVNLESIMANNKFHFSFYKWAGKGALLVLPATAQEKSVDIIGLRSFPQVVIQGIDLIDCEDSMSTATGTAKNQTDYEDSKSGKHSANSATKDGAIPLLFEDYMQGTKQSNDHTKNDVSSTTLSSKISRSPSGERSRSSRVKEKMKGFIKLFSPESSPKRKRAPETQRQTSVGKNGTKTELHDKFSMSSLEASEDVETVQMNSQNAFTAEPFPMTEVQERLDKPVLTANSKMDTATGSNEAASNEPIHDDTKDKAANTIEHEDIEDLDGCVVEHFSEDHVLHNDQEKELIKISEAKIREWSRGKEGNIRSLLSTLQYVLWPESGWKPVPLVDIIEGAAVKKAYQKALLCLHPDKLQQRGAAMHQKCIAEKVFDILQEAWKEFNSVTFG

SEQ ID NO: 54132 - protein, 838 aa, Zea Mays
MEGLQKLLEDHQVELESKRRDFELELERERKSFDQNMTQKQADLLKREKDVKSLEAKLSKSEQALNDKKKSMENLQNDLDAKSKALKSWDESLKNDEKRLLKEKQQMDHEREQLETYKLELEKIKSALEAEKEKISEEQNNLKLTAQERQEHSLLIAKLKKEIEEYRMRSNSLSEEMEDLRKQRQKFEEEWEQLDEKRALLVEEDKRLNIERMNLERWRDNEEKRLNDMKLKMDEEYKQQLESLERKEKALSDDMKHKQMENDEFLKGERADVQRKLQLKRHELEMEMEQKQATKEKELEEKENELNKKIDFVENKLRHAIELNESKIEKLLLEKREVQMERELLLEERKKTETDKADIRRDIESLHSLSKSLKERREAYNRDRSRLIELFEKYKACKNCGISIFEGLDSLLLKDSAEIEHPSLAVEGDDHALTTDTSGPDTGTLVNSGGRFSLLQKCSRLFKFSPRKKGEQSSEQPSERNISFGARLEEATQSDGDYVPTPVYEIAHDSFNAEDELPSDGETRENEESERHDIADNAQMESSVGVADNSIDILGTKSFDGANDMAVEATIVSVDQNGEDSVVPAEAGVEPETSEQGRRQQNQRGRRKGGMKRTRSVNAVVEDAKMILGEVFEEKTDDQGDTVKVGATRKRRFAGATISEQDEEGSEAHSESVSLGGQRRKRRQTAGAVTDAPGERRYNLRHSRAANAGAATAQADKKKSSKARNKHTVEASADDTEGTSKVVEEPAPESKRVSESADYDASQLHEFSQVEVGDAHAVDGEGAGEEDGDILDGQDALPDVPMTPSGSEFGAEQEDEDDDDSERRNQSISKKLWSFFTT

SEQ ID NO: 54133 - protein, 311 aa, Zea Mays
MYDHNTQRPRGFGFITYDSEDAVDKALHKSFHELNGKMVEVKRAVPKEQSPGPAARSPVGVGQNYAMNRVHSFLNGFNQGYNPNPIGGYGIRVDGRYGLISGARNGFSSFGPGYGMGMNVEGGLGGTFGASSGFISNSNGRQMGSYFNASSNRLGSPIGYLGLNDVPGSMLSSMSRNVWGNGSLNYPSNPTNMSAFASPRNGGQVSLPSDNWGGLPSAHGMDNISSLGSGNLGRGTGDNNFGLPSGSYGRNNSTGTIGEPFSAAGNTYEVNNRDTYGSSSIYGGTAWRFASSEVDMPSFVHDIGNVDPTIK

SEQ ID NO: 54134 - protein, 163 aa, Zea Mays
MVWEILLYMYVLYSPDWHYRSTMPTFLFLYGAAFAVVHFFARFQVVFKLHYVGLCLLCIPRMYKYYIQTKDVGAKRLAKLWVLTLTLGTLCWLVDRVFCKKLSHWYVNPQGHAWWHVLMGLNSYYANTFLMFCRAQQRGWEPRITHLLGFLPYVKVQKPEKRE

SEQ ID NO: 54135 - protein, 206 aa, Zea Mays
MASLLARQAAQALRARQTAQLGPAASAMQGHLRTYMNAGIPKRFKEDEEKEQLAKDLAKDWNAVFERSINTLFLTEMINYPFEKGPLSPRFRGEHALRRYESGEERCIACKLCEAICPAQAITIEAEEREDGSRRTTRYDIDMTKCIYCGFCQEACPVDAIVEGPNFEFATETHEELLYDKEKLLENGDRWETEIAENLRSESLYR

SEQ ID NO: 54136 - protein, 611 aa, Zea Mays
MQRHALIEMIQIMTVEPYELVEAPVSTPLEDYKKSVVPLIEEYFSNGDVKLAASDLKELGHDGFHCYFVKKLVSTAMDRHDKEKEMASVLLSYLYGNVVSSTQIRLGFVLLLEAVDDLAVDIPDVVDVLALFIARAVVDDILPPAFLSNAKVSLSGSSKGMQVVQIAEKSYLSAPHHAELIERRWGGSTHITVEEVKRRIADLLKEYIRNGDTAEACRCIRELAVPFFHHEVVKRALTLGMESPAAEALIVKLLKEASEECLVSSSQMMKGFHRVAESLDDLILDIPSAKSEFQLLVSKAISEGWLDSSYVNSGVNGSVEDDEHEKLARYKREAVSIIHEYFFSDDTTEVIRSVKELGYPEYNPIFVKKLITIAMDRKNREKEMASVLLPSLSMELFSSEDIAKGFVMLLESAEDTALDILDASDELGLFLARAVIDDVLAPLNLDEISSKLPPNCSGAETLNMARSLASARHAGERLLRCWGGGTGWAVEDAKDKITKLLEEYESGGDVGEACNCIRELGMSFFNHEVVKKALVMAMEKKNERTLNLLQECFGEGIITINQMTKGFSRVRDGLDDLALDIPDAREKFLSYVQRAKKSGWLLPGFGVASSA

SEQ ID NO: 54137 - protein, 208 aa, Zea Mays
MCCSHLYVNKEFLRNRSMDENQLAQQMWNSVAANDKKAAYSLIVRSRANVNLVHGEIHSSPFLTLGKALQQEQPASPPVGSPRFFDCNSHDKISREPLSPASTSSCRDGMEDGCEGLSLLHLACRVADVGMVELLLQYGASVNMNDSMGRTPLHHCILKGRHRHAKLLLSRGADSQAMDRDGRTALQYAINGGTSDEDILALLQDHSR

SEQ ID NO: 54138 - protein, 211 aa, Zea Mays
MSGSASRKLFQAARSIVLSASQRSSFSVLAAEGRTAALANFGRKILPSACSYHRQGSHAASGWGAIAAAVPAAVYMLQDQEAHAAEMERTFIAIKPDGVQRGLISEIVNRFERKGYKLVAIKLIVPSKGFAEKHYHDLKERPFFNGLCDFLSSGPVLAMVWEGEGVIKYGRKLIGATDPQKSEPGTIRGDLGVVVGSFHIIADRPRQDVIK

SEQ ID NO: 54139 - protein, 529 aa, Zea Mays
MSESNVKWIDGLHFTSLYWPPPQDVEQKQAQILAYVEYFGQFTADSEQFPEDVAQYLPRGSPSEACLMRIFVATVEAILRRAFPSETPEQSRKPRSQSKNLAVAELHTMIHSLFVESCASMDLASRLLFVVLTVCVSHQALPGGSKRPTGSDNHSLEEATEHSRLTNGRSRCKKRQGPVATFDSYVLAAVCALSCELQLFPCISKNGSHSNLKDSMKIIIPGKNNGINNELHSSISSAIIHTRRILAILEALFSLKPSSVGTSWSYSSNEIVAAAMVAAHVSELFRRSRPCLNSLSALMRCKRDAEISTRASSLYHLIDLHGKTVSSIVNKAEPLEAHLTLTPVKKVNQHRCEENNTNSSDSAKLENKNGSTHKKNGFSKPHLKCAEEVLNGNVASTSGKSIASLQVEASDLANFLTMDRNGGYRGSQTLLRSVLSEKQELCFSVVSLLWQKLIASPEMQMSAESTSAHQGWRKVVDALCDVVSASPTKASAAIVLQVKILLYSPRRTCSLGLLETTNKARRCGESTNV

SEQ ID NO: 54140 - protein, 308 aa, Zea Mays
MAERVVGTGSFGIVFQAKCLETGETFAIKKVLQDRRYKNRELQLMRAMEHPNVICLKHCFFSTTSRDELFLNLVMEFVPETLYRVLKHYSNANQRMPLIYVKLYMYQLFRGLAYIHNVPGVCHRDVKPQNVLVCVMWTRICSSFDLVISSELVSSSLFDVQVDPLTHQVKLCDFGSAKVLIPGEPNISYICSRYYRAPELIFGATEYTSSIDIWSAGCVLAELLLGQPLFPGESAVDQLVEIIKVLGTPTREEIRCMNPNYTEFRFPQIKAHPWHKIFHKRMPPEAIDLASRLLQYSPSLRCSASCRP

SEQ ID NO: 54141 - protein, 387 aa, Zea Mays
MAGVPATFSSATAQIGGFLSKKPYAPPLWATHLSPMPCHTFSLGHFPTPIHKWNLPNLPEGTEVWIKRDDLSGMQLSGNKVRKLEFLMADAVAQGADCVITVGGIQSNHCRATAVAAKYLNLDCYLILRTSKLLVDKDPGLVGNLLVERLVGAHVDLVSKEEYGKIGSVALADLLKKRLLEEGRKPYVIPVGGSNSLGTWGYIEAIREIEQQIQQSSDVQFDDIVVACGSGGTIAGLALGSRLSSLNTKVHAFSVCDDPEYFYDYVQGLIDGLNSGFDSHDIVSMENAKGLGYAMNTAEELKFVKDIAASTGIVLDPVYSGKAVYGLLKDMAGNPAKWKGRKVLFIHTGGLLGLYDKADQLSSLAGSWRRMDLEDSVPRKDGTGSSP

SEQ ID NO: 54142 - protein, 52 aa, Zea Mays
MLTENKLQTSSTVRRLATGWTSSDRATGNVSLSISFSLFYIKKCPEPLVCGL

SEQ ID NO: 54143 - protein, 688 aa, Zea Mays
MEESTVENVVSRITTERDVLVETDVVSGKDKEDIRTLESEKSIVDSTPYVSDDGPPSLTFSRGKGSDAGNGSGSLSRLSGLGRAARRQLAATLDEFWGHLFDYHGKLTQEASTKKFGILLGIDLRTPSTSVRTDKQAAEILKSPLVRDSMRGAAFLSSSVDMMSPKNETSNLELAYGLQRGPGMGLSSWSQGMQLPNTQLQSSSNSLLEQSARLNSNFSSSYSDNNQFYQPATIHGYQLTSYLKQMNASPSLYSSMPLDPQRLPKSSVSAVPNYADSMMHARNHNLLASLGGTTTQLPATSRVGSMMPERSYYDPSSVDGNENAGSPAYSKKYHSSPDMSGIIAASRAALLNEAKLGAAIGPQSYLSRLAAERSQYASSTARPAAPLAFDELSPPKLQSDIFSAQSSMRPSARSLWAKQPFEQLFGMSSAELSKGDFNLPGRSGGVAKDDFSYKESETKLLQSLRLCIMKLLKLEGSGWLFKQNGGCDEDLIDRVAAAEKLLMQGTAENQLLLHGGDLQQHSSDQAGIQYMRTLPNCGEDCVWRASLVVSFGVWCVRRVLDMSLVESRPELWGKYTYVLNRLQGILDPAFSKPRGALTICTCLQKDTRVRNSPPHSGLTAMGPVPTPIRGAFTTAGVVLEMIKDVEAAVSGRKGRSGTAAGDVAFPKGKENLASVLKRYKRRLASKGQ

SEQ ID NO: 54144 - protein, 119 aa, Zea Mays
MLANLPSGMRKNDFANQHEQSSSRMLPHFNSSFTEANECELKIKDEPVAAPRKGRAPAPRWYISTEELDSLSSYMRGRLTLEKVNIAINEVASYADANAHLVTCPKKKLSEDTWEKALV

SEQ ID NO: 54145 - protein, 462 aa, Zea Mays
MERVIGGKYKLGRKIGSGSFGELYLGVNIQNGEEVGIKLEPVKTKHPQLHYESKVYMLLQGGNGIPHLKWYGVEGEYNVMVIDLLGPSLEDLFNSCHRNFSMKTVLMLADQLINRVEYMHSKGFIHRDIKPDNFLMGLGRKANQVYIIDYGLAKKYKDLHTHKHIPYRENKNLTGTARYASVNTHLGIEQSRRDDLESAGYLLLYFLRGSLPWQGLKAGTKKQKYDKISEKKMLTSAEINTVGYQFDYVFDWTVLKHPQIGSNNKLVQWDKRPGTDSRVLLRHSPEEIQALVAMEIIPGTKALQIPLAHPTKQLPTQRKRTSCPGEGARRKCPRLRPAGRPPRGTAVTRTTGGFLAVVAAAGGRPQCRGTTTRQAPRTAGRPRAPPWPGTRPREEAPARGTARRSGASSASPSPPAGGSELPRTTPTISVSERRLLGRHLLRDRCSLQLKQIGKWMDGIAAQ

SEQ ID NO: 54146 - protein, 69 aa, Zea Mays
MRTVEVEPFFFFAVGLCKLRAVVSVVYLCLQFPVGWSVLVVWHGTLVFFSVISALLKDGMDIQIVWDLW

SEQ ID NO: 54147 - protein, 319 aa, Zea Mays
MLAAVMDYFSTCWGPRSRAGHRGKGSDAAGRQDGLLWYKDAGQLVTGGFSMAVVQANQLLEDQSQVESGSLSLADYGPQGTFVGVYDGHGGPETSRFINDHLFNHLRRFATEHKSMSADVIRKAFQETEEGFLSLVIKEWSFKPQIASVGSCCLVGVICAGTLYVANLGDSRAVLGRLVKATGEVLATQLSAEHNACYEEVRQELQSSHPDDPRIVVLKHNVWRVKGLIQISRSIGDVYLKKPEYNREPLHSKFRLRETFQKPILSSEPQITEHRIQPNDQFVIFASDGLWEHLSNQEAVDLVQSSPRNCPFHSLPLNL

SEQ ID NO: 54148 - protein, 110 aa, Zea Mays
MIETEAISDEESDVSDSETNGELELSKVMEMRIIPSDPGQLDELFEAFCNCAELNPDPSAESDEEHGWVHGDEGYEDTVDGSDTEFSDVNPIGQTGEQDINHAVIEDCNI

SEQ ID NO: 54149 - protein, 443 aa, Zea Mays
MIPEHPLMRARGRSILGGEKQSFQEYTESGAASRSDGLGGTSTSNARRIRRRSISITPEIGDDIVRAVRAMNETLKQNRLQRDHVEGSCSYVTEDQSNANDCPNKDDASRIIGATDSDSRNRTGPTQKAMSLPSSPHEYRGQDTQKGDDFISKEKMALAWNKVFQSSPFLNKPLLPFEEWNIDFSEITIGTRVGIGFFGEVFRGIWNGTDVAIKVFLEQDLTTENMEDFCNEIYILSRLRHPNVILFLGACITPPHLSMVTEYMEMGSLYYLIHMSGQKKKLSWRRRLKIIRDICRGLMCIHRMKIVHRDLKSANCLVNKHWTVKICDFGLSRVMIDSPMTDNSSAGTPEWMAPELIRNEPFTEKCDIFSLGVIMWELCTLSRPWEGISPVQVVYAVANEGSRLEIPEGPLGRLIADCWAEPENRPSCQEILTRLLDCEYTVS

SEQ ID NO: 54150 - protein, 100 aa, Zea Mays
MAKLAAQLKSKFFGLVGRITSCGRAGATHKDAAGATEAKSSVGSHLLRSGQGEVLLPLMEGPRVTSTVTPSRGEGEEKRRDRREEKKLTDGAWTWTLSAA

SEQ ID NO: 54151 - protein, 214 aa, Zea Mays
MAKIADSMMKHILVPAISNIHVSVLVECGPEHTVSVLSVVHSEENKDNRDGSNLYSRIVDVIKFVCKFICMENSKWVQFFAKLTWPRISDLVITHFLSKAVPNEASKLIEFQDVVQSTTEFENKLRSMMFLLPDRKDGKLTQFVDDVEVHFAVRKRSEILVKARNILVQYDYDSPLESGDQGDSVVDLLFQPEKCFTSKSALLVMKLVHGALKS

SEQ ID NO: 54152 - protein, 109 aa, Zea Mays
MLLENYLQRCESCHGQAERLLNSAREMEDSISVNLSSRRLEVSRVELLLQVGTFCVAIGALIAGIFGMNLKSYLETNAWAFWVTTGGIVVGAVAGFFVVYSYLRARKIL

SEQ ID NO: 54153 - protein, 85 aa, Zea Mays
MERYKLIRKIGDGTCGNVFMASNVETNEIVAVKKMKRKFCHWEECISLREVKALQKLFHPNIVKLKEVTMENHELFFIFEHMLIF

SEQ ID NO: 54154 - protein, 110 aa, Zea Mays
MTVGTTYGERGMQAAMPGFGAVTFTPSRRYIFSFLLLNTLIDFHGAGSKIYLAQIKSATYPGRLVHIPKRNNKSISFSCVRLCQAFCSKYRCAFPRFPVANTDVQELCPG

SEQ ID NO: 54155 - protein, 177 aa, Zea Mays
MRSGRACSALASLLLLWLGVAAAQKASSWKTLSGKAPAIVAKGGFSGLFPDSSEYAYQFALLASSPDTILYCDVRLTKDEIGICLPDIKMDNCTNIPDFYAQGQKSYLVNGVPTSGWFSVDYNGTELEQVTLKQSINSRTPRFDSSFFPLLAVEDVQSKFKPSGIWLNVQHDSFYSQ

SEQ ID NO: 54156 - protein, 147 aa, Zea Mays
MAAPLRRSLPSLGRALLTPAPARMLSAEASDALVEIKPGEIGMVSGIPEEHLRRKVLIYSPARTASQQGSGKVGRWKINFLSTQKWENPLMGWTSTGDPYANVGEAGLTFDSAESAKAFAEKHGWNYVVRKRHAPLLRDVDKDKLLG

SEQ ID NO: 54157 - protein, 54 aa, Zea Mays
MASVEQQTIEWRQENESKMVKVDTKVDYPTILYLYMTSRNQNNTGQGLQGRALP

SEQ ID NO: 54158 - protein, 1354 aa, Zea Mays
MALGDLMASRLVHSSSSRGLSSSPTPPLPNQHHHQNHNHTGDGLLAASGPEPRNGLEADEVDKSAPVPYLPQLVVLCEQRHEPEGIDEAAAAAAGPSTSGLVSKWRPKDRMKTGCVALVLCLNISVDPPDVIKISPCARMECWIDPFSMAPPKALESIGKTLHSQYERWQPKARYKLQLDPTVEEVKKLCNTCRKYARSERVLFHYNGHGVPKPTSNGEIWVFNKSYTQYIPLPITDLDSWLKTPSIYVFDCSASGIIVKAFLERLDWSSSSSASSRKDCILLAACEAHQTLPQSAEFPADVFTACLTTPIKMALHWFCKRSLLRGSLDLSLIDQIPGRQNDRKTLLGELNWIFTAITDTIAWNVLPHDLFQRLFRQDLLVASLFRNFLLAERIMRSANCSPVSYPLLPPTHQHHMWDAWDMAAEICLSKLPQLIADPNAEFQPSPFFTEQLTAFEVWLDHGSEDKKPPEQLPIVLQVLLSQSHRFRALVLLGRFLDMGPWAVDLALSVGIFPYVLKLLQTSAMELRQILVFIWTKILSLDKSCQVDLVKDGGHTYFVRFLDSLDAYPEQRAMAAFVLAVIVDGHRTGQEACMNAGLIDVCLRHLQPENPHDSQTEPLLLQWLCLCLGKLWEDFPDVQLLTLQTNTPEIVLCLLSEPQPEVRAAAVFALGTLLDTTSSNGADDDSDYDEKVKAEINVVRSLLQISSDASPLVRSEVAIALTRFALGHNKHLKSVAAEYWKPQSNSLLKSLPSLANINNPNNVYSPNNILQGSIGPVLRVGSDSSAAGRDGRMSTSSPIATSSIMHGSPQSDDSSQLSDSGLLLRENASNGGPGYTRSRPVDNVIYSQFISTMCSFAKDPYPRIATIGRRALSLIGVEQVVMKNTRFNSGGAHRGETSASNFGMARSSSWLDMNSGNNLIKFRTPPVSPPQHDFLPGLRRVCSMEFGQHPISSPDGLAVPLLSSAAATSNAELSILPQSTIYNWSCGHFSRPLLIGSDDNEEANARREERERLALDYIAKCQRSSCKMTNQIASWDTRFELGTKTALLLPFSPIVVAADENEQIRVWNYDDALPVNSYQNHNLSDRGLSKLLLINELDESLLLAASSDGNVRVWKNFTQKGGQKLVTAFSSVQGHRTAGRSIVIDWQQQSGYLYASGDMSSILLWDLDKEQQLSTIQSSGDSAISSLSASQVCSGHFAAGFAAGSVRIYDIRSPDRVVYTARPHAPRTEKVVGIGFQPGFDPYKIVSASQAGDIQFLDVRRSAEPYLTIEAHRGSLTALAVHRHAPVVASGSAKQMIKVFSLEGEQLTIIRYQPSFMGQRIGTVNCLSFHPYKSLLSAGAGDNALVSIYAEENYK

SEQ ID NO: 54159 - protein, 139 aa, Zea Mays
MHSVIAATEDLFDFILSRKGWRVRVFLVQDIVNASDVFLQEATFPYVYAKVGKIGDLNPERSKMIRRLVNTVQSFRQAINLAPDAWSAMLIRTLLKPESQKFVLDVFLALANHSSYKIPETFWLFMSRFLNYLDKQDIL

SEQ ID NO: 54160 - protein, 186 aa, Zea Mays
MGGARSLRARRRPQHRSPPGTSDAPGLQVLHHQLTGVATCRRSAVNRRHLPLLPGPLSGPSRRPAPAPAAAAQAEGGAGVSRVAGEPIVRHPRGREGQSHVLLLRGAEPVERRAQAGTHAGALLLRVRELDRHPARHLPVLRMGLVNSKASRDLGWCFNRGRRAMLLRLAAAPPSSVYIIIVIIMV

SEQ ID NO: 54161 - protein, 84 aa, Zea Mays
MKEPFEQTKSSLPFHYCYLFIISPLMYPVSLPSRTIWLSDIKLDRLPRCYLLLQPFFYLNISLLSDIPFCGANTQACNIFVLFF

SEQ ID NO: 54162 - protein, 604 aa, Zea Mays
MADTVQYRLERMTDELDDLERRGLFTRGELADVVRKRRDFEYRLRRHSPLRQDFLDYIAYELRLDSLRNLRKRAIIRAAAEDDDDEPQHDARSSDDEGGRRKRKKDKSKKKWKKSVSDVAGVLRVLDIYRMATVRFKGDLDLWFRYLEFCRDKRHGRMKQVLAQAIRFHPKVPGLWIYAAAWEFDQNLNVAAARALMQSGLRSCPQSEDMWIEYLRMELTYLNKLKARKVALGEDVKTLQKKDNDASQWKEENKELFMPLNEQVKDPKEPGSAGDALEEKEDLFWRQGLLIIQTIYHGAVEALPSSLTLRKKFLEILNSVDLAHSDELKLEVLDDLKRDFSHSEDYWDWFARLQLSNLNSSSNSNRKDAISNKLNRSIQVYDEAIRKLPNSKMYSLYAKFWMDVIYTDREDSVTLFQDSEFDASEFTSSILKVYENAESCGCLTEDLACQYISLYLKLERLEEAKTLAEKLCDGPLSNAANLWSLRFTMEINSIATAPGSSSLSKENLSSLLDLFSTVLSKLSVTEAERLWHMAMKLFSHDKVCFEKLVKCAMLSLSLAGGSDSGASVSSAIVGWYLQRDGVKHARKMYKRCHVSGCCFCVTLK

SEQ ID NO: 54163 - protein, 578 aa, Zea Mays
MKEALLWTDGRYFLQATQQLSDRWKLMRMGEDPPVEAWIADNLADEAVIGINPWCISVDSAQRYENSFSKRHQTLFQLSSDLVDEVWKDRPLVEPRPVIVHPVEFAGRSVPEKMKELREKLVHEKATAIIITALDEVAWLYNIRGSDVDYSPVVHSYAIVTLHSAFFYVDKRKVTVEVQKYMSGNGIEIREYETVQSDASLLASGKLQSSVHVEKYMDEVESSKIWIDSGSCCLALYSKLSPHQVLTLQSPIALPKAVKNPTELDGLRKAHIRDGAAVVQYLAWLDNQMQENYGASGYFSEIKGSHKNEHLATKLTEVSVSDKLEGFRATKENFKGLSFPTISSVGPNAAVIHYKPEASTCSEMDADKIYLCDSGAQYLDGTTDITRTVHFGKPSAHEKSCYTAVLKGHIALDIAVFPNGTTGHALDILSRAPLWREGLDYRHGTGHGIGSYLNVHEGPHLISFRPSARNVPLQASMTVTDEPGYYEDGAFGIRLENVLICKDANAKFNFGDKGYLAFEHITWAPYQTKLIDTGLLTPVEIDWVNTYHSDCRKILEPHLNEQEKQWLMKATEPVAARG

SEQ ID NO: 54164 - protein, 598 aa, Zea Mays
MQGDIGVARSFDQGATWEFLGIALDEAWHLSYPFVFKYENEIYMMPEGNKKKELRLYRAIKFPLEWTLEKVLVNKPLIDASLIQFEGYWWLFASDFTRHGVEKNAELEIWYSNSPLGPWTEHKQNPIYKSDKSLGARNGGRLFVFEGSLYRPGQDCSGTYGRRVKLYKVEKLSKEEYKEVPVNLGIDEPKKGRNAWNGMRFHHMDAQRLASGAWIAVMDGDRVPSGDSTRRSLIGYIAFLLASALVIFVGFMKGAITCYIPSSLWVPLTRRTELPRIFSVHRFNQKVRRYSTSISRYISAAKTKLGEKTWSNMLFFCVVALFTIVNVCIAVHFLYGGNGAEEAYTYQGQHSQFTMVTMTYEARLWNLKVFIEHYSRCESVREIVVVWNKGNPPSSDAFDSTVPVRIRVEEINSLNNRFRVDPLIKTRAVFELDDDIMMTCTDLEKGFRVWREHPERMAGFYPRMIDGNPLQYRNERYARGKNGYNLILTGAAFMDSEFAFKTYWSEKAREGRDYVHKNFNCEDLLMNFLYANASSTRTVEYVHPAWAIDTSKLSSVAISRDTQKHYDIRTDCLAKFSSIYGPLPQKWEFGMREDHWDK

SEQ ID NO: 54165 - protein, 366 aa, Zea Mays
MTANSSHLVALVNLPNTSDEGRRSLRWVFSLRELRSATNSFNYDNKIGEGPLGSVYWGQVWDGSQIAVKRLNNAKNGTEAEFASEVEILGRIRHKNLLSFRGYCADGPERVLVYDFMANSSLYAHLHGPHSAECLLDWRRRASIAMGTARALLYLHRHATPKIIHGSVKATNVLLDSDFRAHAGDFGLARLIPDDGTDHEKIASSESQRGYLAPEYAAMSGKPTAGCDVYSFGIILLELASGRRPVEKSGSGKACGIRSWVLPLARQGRYDEIADSKLGDKFSGPELRRMVLVGLACTRSEPEKRPTMLQVVPLLKGESKETLVKLEREELFSPDSTTVSSQGTPTPDGSTDSAPPLKKDKELVGA

SEQ ID NO: 54166 - protein, 150 aa, Zea Mays
MRGKQSTSNHEMLMAGRNTIASKSSFLGRTASGSLASSHRSVYRSYVFGRDDSNSSSRSCISTSESNLDLDQTNSSQPKKAKFSSQPKPEGTRATPECNTSSGVSLFDVLRRTSEQSSQESCSTITESQAVHQFSAFKLSRRFSKVGSKN

SEQ ID NO: 54167 - protein, 129 aa, Zea Mays
MTLIHVLLDNNNFTGRIPPTLGLLNTLEVMRFDNNYQLTGPVPSNINNLTKLAELHLENNQLTGPLPDLTGMIALSFVDMSNNSFNASGVPSWFTTLPSLTSLYLENLRVTGQLPQALFSLPAVQTLVC

SEQ ID NO: 54168 - protein, 557 aa, Zea Mays
MKKTLVFHRGRAPKGERTGWIMHEYRTTEPEFESGEQGGYVLYRLFRKQEEKTERSSPEEVDRSGYSPTPSRSSPDNLEANEEANTPLNKESPESALHESPIELPKSVETNGGSMTRWLADRNDNLMVTAPDVSHIPFHGHAAGVAKVDPSVGASGHLVNPHNGNDDYNKFVSDFTPILPLENAFFTDIQQGAFGFDGIMNPLDPLDAFLNQTLVDPDEHSSTTSKVQYDSDIPTEFENHWNMKVEPQDDQCWWANIGFEPDEPNPLLPCDTTDQDILSVDSGADSFNELFNSMEETGIIVRPQQLDSTVQPNHVFASQGNAARRLRLQVESREIITKDESEDEVSCVLTPDCLNDSVEESTAEKDVASDGDEAESTGIVIRSHHPAPRSSSESSFTQQGTAMQRLRLQSGLNKGQRPSTDDSSSCIIDEPGSQHKAEKAEIEEDASTNLAGSADDLPGNIHDDEQKNIPEHGAEMTSPEAKSVLRLRKTSEEGNKDVKQESCLEPHVRAPMQKGGFQSYIIWLVLPVALLLLLCVGTYGWPYPAVRHPGIAKAAEK

SEQ ID NO: 54169 - protein, 106 aa, Zea Mays
MTSVSIRSRPSSLRFKICCSAKKETVDKVCSIVKEQLALPDGTAITGESKFAELGADSLDTVEIVMGLEEAFNITVDETSAQDIATVQDAADLIEKLMLEAPPKVV

SEQ ID NO: 54170 - protein, 140 aa, Zea Mays
MDRTSHHVVIKQAKLLFRRAEKMVMSLSCDKAVWNAVMNNEAVQDFRRSLHDGKENDRNENTGGPAEVLKWILESAQAKIVEFLENVQKIINMLIHTPEDDDNPDGYSDAVKVSFMLTVFVFIVVAIARINYEHWDYKVW

SEQ ID NO: 54171 - protein, 115 aa, Zea Mays
MGGEIMWSCLKYIPHRLAGVAILAPVGNYWWSGFPPDVFKEAWRVQFPQDQRAVWVAHHLPWLTHWWNTQKLFRGSSVKDGDPAMLSKEDRLVADKFEKRTYEASGHWRRRLLKS

SEQ ID NO: 54172 - protein, 940 aa, Zea Mays
MEEPGREGDSPGPPWAPSESSAFRAFVTAVGERAVASPSGSDNGDSVCSSNLRAVRKRPFVARLTTYIIQTFEKCNPEFKYSESLNPKRFLTNPAVPVHNHGLDNANSDLILYVNLELLNKKSSRRYVVQEMLGQGTFGQVAKCWDAETNSYVAVKVIKNQPAFYQQAIMEVSLLRLLNEKFDPDDEHHIVRMLDFFLYQNHLCIAFEMLGNNLYELLKRNSLRGLQMKYVRTFSRQILDALIIMKDAGIIHCDLKPENILIAPTVKTAVGVKVIDFGSVCMEGKTIYSYIQSRYYRSPEVLLGYPYTTAIDMWSFGCIVAELYIGLPLFPGASEYDVLCRMIEIIGGQPPDDLLREAKNTGKFFKHVGSIYPSSEARNGASSAYRILSEDEIEARDSKKPKVGRWYFPRGRLDRLIYTYPWKNLSEGNLPETEKADCLALVDFLRGLVEFDPNKRWSPLQASYHPFITGEAFTGPYEPVQETPRIPVGRAAVVDHNPGGGHLLGAGLSPQVGSINRCLRFNNALQPNMPFSYGSSCGSFGSHGSFNDNAGFSYGSYDFNSVDIYNSPMDPSGFNLRSQLGGSFLGSSPHIRRRPHLSHGGGIRLSPGGPGHMSLGASPSQFTPPNSQMQIPTGPNGRYGASPSRGGHGSSLGKVAVVGQYNRRRNQGYPPMPMPPHEHTSQLIQGHQGDGVSTARFGAYAQGNSTYLHNALPNSSHYSWRSQRGSGSGLPLDPSSSRGSFPPTNYYGFPLHSDASADTLPSTSSVSDPADWDLNSSDKSLLQEDRTLSAGLSDLRLIDASGQTNRSSRLAPFQSHDILSSNPSTMNQRNGHLFHASSLGESTHTPGHVTLDGYEHTTYSQRSFPIYRGQPFQQYNNMTSSYIRPMRAHHNGQPVWSNYRLTEPPPTTMGDGMLWGGRGGHSFAASGLPPTLRKDFGRIF

SEQ ID NO: 54173 - protein, 390 aa, Zea Mays
MILRGKEIEHHNIVTDMMLKKEVTYRPVAPNGHPKDSNMVADVTIGFVKDAKHHIDVQGFNVYHMNRLIKPFWRVWTAAGSGGRGVIGVLEANFIEPAHDKQDFERTTLLARLEARLVQMQKDYWSGNAHRIGYVAPRFGRNTEAGDGEDSPENTASAQPSPYHSGKGYTHAKDLSNNIKKGGKASTSFGIQQRAEKSARTKRSTKSILHGLSDSDNSDSEFMGTLSRSRSHTLKTNRKLFQNGSTGLITPQSSGLIERERVRTKSQPLDPKATSNGDLHTMDEYQSVIMQLRDENSSLKERLSKMEESMSQELVVECDKNKSLTERVEDLQRQLESATKEQEALIDIFSEERNRRDQEEESLRKKLKDASSTIQDLLEQLNAARKGRKV

SEQ ID NO: 54174 - protein, 53 aa, Zea Mays
MATMLWGVFPSVPAQQGLTNVAPKYQFHTGSSAQLRHRTWSNSTGTTQLSNYV

SEQ ID NO: 54175 - protein, 628 aa, Zea Mays
MVFQKRSSSELEASGGGQVAEMPRVPKSARGKRSVRKKEAQNPPQMSAFDLLATVAGKLLDEGVGSLGNMSAGAPALTACAKDVRVKKEQCDEEMKQFKHEVTDQDSCNESAILPHIVFQRAVNNARNEDPKAKSEAQDKESSMISCTKAELGCNFGVIADRWSPESVESGAFTGDAVASLMPPAPAGFHKNAPEMYNLLDSMDVDVKPPPLVSSDSTGEMPLYGDKVHRSTSLPRVSKGVGFFAVDRDDDDDKSSGCTHPSTTTNKDFRSNCTAEYSRVRKLLTSKYRKVAPARVYKSDLSYSDVDRKPSFRNKKMHYTRQRTQRSTFKRRKLFDRHSVLASEFGTAHGKGNTKKVTGRDSHAVSLEANKGTSSTPFQKSRGSNDCHVKLKIKSFKVPELLVEIPESATVGSLKKTVLEAVTAILGGGLRVGVLHHGKKVRDDNKTLIQAGIGQEDMLDNLGFSLEPNCTQNPQVQAPEDISFLETIDTAEPLARIAPADSSSKHGEVDLSQEFALTPLAMNYQGSDHDSVHSPGGVSSPDKVSTNSRALVPVPAADPNAGAIVPANKSKRSPEQGQRRIRRPFSVAEVEALVLAVEKLGTGRWRDVKLRAFDNAKHRTYVDLKAMD

SEQ ID NO: 54176 - protein, 73 aa, Zea Mays
MAAPSSAATACFVSPLPPPRRPPATSSPISMSSVARQTLGSHLLISQCMKHKLLDLTRTRMLLFCVSKHQRIN

SEQ ID NO: 54177 - protein, 2024 aa, Zea Mays
MYQISDVENLIPNLRSAVLSAISKYVTASTNHILHTLSQDSANAFINSDFDSQEINKILAEAGKELSEIWKNVHAVTESNLFNDNGFTIGVDEDLPTTKILIELFNHCFPYYKKLSLLDLQCPSQSKWLVLSLSLVLLLCSSKESCFYFVDTGGMEQIINLLCWRTPKSAATTLLLLGIVEHATRNGFGCEAFLGWWPRAEHTSIPVGSSDGYCSLLKLLLEKERHDIASLATYVLQRLRFYEILSKYESAVVKVISNIQADKLSTDGVPFLISASVELGEMLKLIIFCGPIEDPSPVATASRIFKSEHLEGLLSYKATIDLITSSKYSFLQYDTDPYLLSLIQERSFFPLSAALLSSPILHLPNGPAAEILMGIASSIESIILSLLFCRSGLSFLLSQPEATELILLSLQDAEKMNKSECITLRQAFVLLSKGFFCRPKEVGLITELHLKVGSAATRILSVPPNSDELLWVLWELCAISRSDSGRQALLALGYFPEAISVLLRSLSSYKDLDSVMAENGGSPLGLAIFHSAAEILEVLVVDSTASSLESWIGFAVDLHKALHSSSPGSNRKDAPTRLLEWIDAGVVYQRNGARGLLRYSAILASGGDAHLSSGNVLVSDSMDVENVVADSNSRDGQVIDNLLGKLVADKYFDGVALCSTSVVQLTTAFRILAFISDDKPVASSLFEEGAITVIYVVLMNCKSMLERLSNSYDYLVDEGAELSSTTELLLDRTHEKAIVDLMIPSLVLLINLLHILRETKEQYRNKKLLSSLLQLHREVSPRLAACAADLSFMFPTFAIGFGVVCHLITSALACWPLYNWAPGLFHCLLENTEATNASVPLGPKAAFSLLCLLGDLFPDEGIWLWKVELPSLSAIRSLSTGAVLGPQVEKGVNWYLHPEHVTILLVRLMPQLDRLARIIDNFATSVLMVIQDMLRVFIVRVALEKIECAVVLLRPIFMWLDDKVDKTSLSERDTFKVHQLLQFTVKLSEHPTGKALLWRMGFTRILSKLLQNCSRASFPYDNQTFGRAHSKNDLMLKWRIPLFKSIAYIFSIDPCNNEKADVEESLNEKSVHECSSVMHDLMMFCQVLPVGREMLACSLAFKELVYSYTCRSAVTLILSQIHTSNKDVLEKDESDPNHNSPSLDGWNCFSSLFKCWKKLVKYVGSNERTDYLVETIYSLTLGAITLSQYGENLEGLLILRYLFGLPSDPSGSLESSGESPSEIELFMKTYEEKICQGIENSATAVGKTLLRKLLNSIKLLRSILENSGQSADTVQMVLEEGTDSLSEIARSVVMTAHLMPSLANVSVNDESPFLFSNMWKVIVDSEEPLDCQEGEFAKRLVWELPDSSLDRQLAPGQSARRKLALGESASRRVRDNQLPEPTGQFSRGLNTSNASSGHTRRDTFRQRKPNTSRPPSMHVDDYVARERNIDGASSASNIVNSTPRGTLSGRPPSIHVDEFMARQRERQNHAPAPTGDAPQAKSQTTSLDDSLRTKPENLRQPKTDLDDDQEIEIVFDEESGSDDKLPFPQPDDSLQSPPVIIGENSPGPVIDETENQENERVPFFQRATSIPKDDENLGIGISSQTAMLSEANSSLELKHSVSSPGKNSFRDHAEESNYDSIGVSGRPSLQADHQQLSRRHEKRSPRKFSETSLSNGFHGREHRHSNNHPPLPPMPPPISSVSMQNTDSVNRQSSSFSARDRPTPNPSGYPTQSFDSSMPSAFTGLQGQTQYMLAGAGSSSANELPNVEAKLLWNTFPANRIPLETFSSGLPARPMPPLTPYSAVATQHATMNSGSPANLYSQGSVVQPSPTASIISDSNLAMNSASGSMLASNLLPSFASQFLMSRPSMPTPFFGTPLQQVQFSSGLPQNISNPQPPVSIQPRPPPPPPPPQQPHPSQTLQQLGAIQLPHQDQQHSYPHSAILPQVTLQFPNQLPIPQVQLYHQSQQESGQTLRQVGEQSQLQNQGMQADSFSQQQQDSGINLNQFFSSPEAIQSLLSDREKLCQLLEQNPKLMQMLQDRIGQL

SEQ ID NO: 54178 - protein, 306 aa, Zea Mays
MAGAIYIKGIPVTNYKRSVVNSEEEWPSKHSKFFAELDDGLEFSFTDKRRFARVRLFEDPETLPPISELGPDALFEPMSVDSFLDSLGRKKIGIKALLLDQSFISGIGNWIADEVLYQSRIHPLQIASNLPRESCEALHQSIEEVVKYAVEVDADMDRFPKEWLFHHRWGKKPGKVDGKKIEFITAGGRTTAYVPQLQKLVGTQSSKTISVAENGDAKDSGTEGEDADADVLKPRKRAATSRGQRNKDTAGSRKARGNGADAEAAEPATGVVGSNSEQAFGQANSDAVDKSDRATRRSSRKVKARK

SEQ ID NO: 54179 - protein, 239 aa, Zea Mays
MNTKMRSNAFAAYGALSAYGVGLQRTAFIEQIHATLPRLILHLHDDDLSVRLACRNTFQLLATLMEVEGLSVLLSKQYFASDRRSDYEDFIRDLTRQLCRLSPARVDSYLESAIQAFDAPWPVIRANAVCLVSCMLSFLDDQRFIAPYFSQVFATLVGRMSQSPDAIVRASASSALGILIKRSNMLRSLVSRYDRADSSRNSQSGDSNTKTPSEFQEQAEGNPNDGASGAAIKGTEADH

SEQ ID NO: 54180 - protein, 149 aa, Zea Mays
MKLRHEVLKSDVEAALQVLNFAIYHKELTEMEEREQREAEMKQQADHDADATGGTVDGHGSSGNDPMDVDVGNTSNDQNVPLARMEAFEAFLGQHVLANHIDQMSIDEIEQVVNRESTAPYTRSQVEFILERMQDANRVMIRDGVVRII

SEQ ID NO: 54181 - protein, 283 aa, Zea Mays
MMNELKEVKKAVNPTEVLLVVDAMTGQEAAGLVSSFNDEIGITGAILTKLDGDSRGGAALSVKEVSGKPIKFVGQGERIEDLEPFYPDRMAQRILGMGDVLSFVEKAQEVMRQEDADELQKKILSAKFNFNDFLKQTQMIAKMGSFSRLIGMIPGMNKVTPAQIREAEKNLKFMESMINVMTLEERERPELLAESRERRKRVAKDSGKTEQQVSQLVAQLFQMRAKMQKMMGAMQGKESPDMDELMGSMKAEEQSAAGTGRRRRKYGNLRQRQLDAMRGFRRR

SEQ ID NO: 54182 - protein, 86 aa, Zea Mays
MTLGVLAPYRGLGIGTKLLNHVFDLSAKQNISEIYLHVQTNNDDAIAFYKKFGFEITQTIHNYYMNITPPDCYVLMKFIGQAATKK

SEQ ID NO: 54183 - protein, 53 aa, Zea Mays
MGPGVHAGCCAGLPRRTQAAHLSRQEASREEEPLHQAWLQRRLAQHRASRLGP

SEQ ID NO: 54184 - protein, 62 aa, Zea Mays
MTKTGKRRLIILAGRRKEPTKRKLQAFSPFEHKLLIVLTKEGFSCQSQQMPAFDIRRRMASS

SEQ ID NO: 54185 - protein, 194 aa, Zea Mays
MFGQRAMKVENMVKLKEEFDYKSLCRKLDIELDKLIAENERQRKHFDDEVERIRAEAQCRIAEAERECKITLENEKMKYHEEYLDSIRILEEKWKVHQQSPKKQNKEAESTSNDTGEVHNLLQNEKMLRQSAEDEASDLKNQISHWKKLEATATAEIIKLQKMLDAEASQKEKLEEEIGVLRSQLLQMSMEADQ

SEQ ID NO: 54186 - protein, 1921 aa, Zea Mays
MAAALAWRFNGTNGGAHGSADLERHTDKVQDSEPQTPMSIVKMGKNRVNVEDEETLSSVAQCIEQLRQSSSSSQEKESSLKQLLDLVQTRDTAFGAVGSHSQAVPILVSLLRSGPSGVKMLAATVLGSLCKEEELRVKVLLGGCIPPLLALLRSKSAESQTAAAKTIYAVSQGGIRDHVGSKIFSTENVVPVLWEQLKISLKNESLVDGLLTGALKNLSKNTEGFWSATVQCGGVDILIKLVSSGQTNTLANTCYLLGSLMMEDSSVCSKVLSGETTKQLLKLLGPGNETSIRAEAAGALKFLSAQSKEARRQIANSNGIPSLINATIAPSKEFMQGESAQALQENAMCALANISGGLSYVISSLGESLESCSSPAQIADTLGALASALMIYDTNAESISASNPVDIEKTLLKQFKPKVPFLVQERIIEALASLYGNPVLCKTLADSDAKRLLVGLITMAATEVQDDLTKSLFALCKKDCDLWQALQGREGVQLLISLLGLSSEQQQECAVALLALLSKENDESKWAITAAGGIPPLVQILETGSSKAKEDSATILGNLCNHSEDIRACVQSADAVPALLWLLKNGSDNGKEIASKTLNHLIHKSDTGTISQLSALLTSDQPESKVYVLDALKSLLSVAPLNDILHEGSAANDAVETMIKILSSPKEETQATSATALAGLFHCRKDLRETHIAVKTLWSVMKLLDMQSNKILTGASCCLAAVFLSIKENKEVAAIGRDALNPLVSLANSSVIEVAEQATRALANLFLDQELSLQVPFEEILFRVTRVLREGTIDGRTHAAAAIARLLQCRTINQPLSDTVNRSGSVLALAGLLEAANGEAAATSEVLDALVLLSRSKASSGHTKAPWAILAENPHTILPLVSCIADAAASLQDKAIEVVSRLCSDLHDVVGGLVSETPGCMSSITRRIIGSNILKVKVGGCALLVCAAKEYCQKQIEVLNDASLYIQLIHSLIGMIHMANTQAENVSSESISDIRISRHSKENNSDGETLCCTAVISGNMIPLWLLAIFSRHDSKTRAELLEMGAVEMLIEKISQNAFQYVGEEDNTSWVCSLLLTLLFQERETIRSNSALHSIPVLSNLLRSDEPAYRYFAAQALSSLVCNGSRGTLLAVANSGAAIGLISLLGCADVDIADLLELSEEFMLVPNPDQIALERLFRVDDIRVGATSRKSIPLLVDLLKPIPERPGAPFLALGLLTQLAVDCPPNMLLMAEAGILEALTKYLSLSPQDATEEATTELLGILFSSPEIRHHESALGVVNQLVAVLRLGGRNSRYSAAKALESLFCADHVRNSESTRQAIQPLVEILSTGMEREQHAAISALVRLLSDNPSRALAVADVEMNAVDVMCRILSSDCSVELKGNAAELCCVLFTNTRIRSTMAAARCVEPLVGLLVSEANPAQLSVVRALDRLLDDEQLAELVAANGAVIPLVGLLYGKNYMLHEAVARALVKLGKDRPACKLEMVKAGVIESILDILHDAPDFLCIALAEMLRILTNNATIAKGPSSAKVVQPLFSLLSKADMGPEGQYSTLQVLVNILEHPECRADYNLTPRQTIEPVITLLNSSPPAVQQLAAELLSHLLLEDHLQKDTVTEQAITPLIQVLSSGLPNLQQRAIKALANLAIAWPNTIAKEGGVFELSKVLLQSDPPLPHVVWESAASVLSSILQYSTEFFLEVPVAVLVQLLRSGTESTVVGALNALLVLESDDSTSAEAMAESGAVEALLDLLRSHQCEETAARLIEALLNNVRIREAKAAKNAIAPLSMYLLDPQTQSQQGRLLAALALGDLFQNEGLARSTDAVAACRALVNLLEDQPTEEMKVVAICALQNLVMYSRANKRAVAESGGVQVLLDLISSSNPDTSVQAAMFVKLLFNNHTIQEYATSETVRVITGKQYPFLVLSYSFA

SEQ ID NO: 54187 - protein, 170 aa, Zea Mays
MLVQLYMVKAGKPFKQSGKSSKDQKETKSSKDSKEPKPSKDAKQPKPSKDTKEPKPPKVSKSPKDSKEQKKATLKDPKKAPKDSKGLKKALKDPKEQESLEDPKEHTAKKAGKRVTFAEVEPEKELKASNSDWHPSSDFHAAYPEQNPWASGFMIFEDENSYWNRGPLDC

SEQ ID NO: 54188 - protein, 185 aa, Zea Mays
MGVKEMYLQYYNSYIQYLRRRRVLIYITICVVFLWYKLNRLHRKSVKYGPLLQRDLERERRLNRLYNGTEANCISELRMRKFVFHRLCSHLRSRRLLEDTVNVSVEEQVAMFLKFVGHRWTNRSVGFEFLRSGETVSRYFNLVLDALCVMSRDLITMRTTGTHPKISSSPRRFHPYFELKDITGI

SEQ ID NO: 54189 - protein, 110 aa, Zea Mays
MAMDPDAVAKAFVEHYYRTFDTNRAALVGLYQETSMLTFEGQKFQGPSAIAGKLGSLPFQACEHQIVTVDCQPSGPQGGMLVFVSGSIRTGPEEHPIKFSQNDMFRLNYG

SEQ ID NO: 54190 - protein, 305 aa, Zea Mays
MPSISCHNLLDLAAADDVPLPSPTPLRLPRVMSVASPASPTSPPAPAPPRRVIVSHRLPLRASPDPAAPFGFAFSVDAGTVAYQLRSGLPANAPVLHIGTLPAAAAEAASDELSDYLLANFSCLPVYLPTDLHHRFYHGFCKHYLWPLLHYLLPLTPSSLGGLPFQRTLYHSFLSANRAFADRLTEVLCPDEDLVWIHDYHLLALPTFLRKRFPRAKVEQGRAMGYLRVGRRLRLEEDRGAGDAAVHGGNRWLLHRAQGERHRVAPPRGGSGLRFLPGQGTARPSRERAGQRARGGEERPAHRRG

SEQ ID NO: 54191 - protein, 884 aa, Zea Mays
MDDFQGLLARDFGLRPQGKAAPMSAARSSSPSGSAWTNTRSAVGSAAPSAPSYDELFGSAPPPPPKATPSLDNIFNSFKEPASTAPPPKPKHSSAPVFDKPVYDDDIFIGVPGVKSSSVPYDDVFGGSQSREAPPAFDDLLGGFGKSSQVREEVDDKRKPEAPTAVAATGFDYLIPSFGGRSSPRQRDAIGAKQKKVSMSTSKQSASLSDPFVVLETTSSSAHPFADPLDESGKAAKYQGKNRESTSVGSSLFEDSSTFNQAPKFEPFFTPEVDNGSKDRNESSRAQNSNPVQDFSKRNSSQQPSVEDFENIFPKSQSARYSDVHVDIGSEKYSGNGINDQSPRSDESEDEIWLTASEIPLFTQPTSAPPPSRPPPPLAVKQKHGSRSTRKDEHLRRSRKNNDHQRSFSNQAGVSTVDGLEDFTMGKSQNVHTFNEEEFERSTAAAAMKEAMDKAEAKFKHAKEVRERERDAKLRNREQQERDNVIRSYAQDREDKERNERLEQEREMKQKEEKEREQRRLEEERELERHRERERARQAVERATKEARERAASEARAKAEREARKRSERAAVQRAQQEARERAAADAKDRAERATAEANERAATEAKEKAASQARDRAAAEKAAVERAQQEVRKRAERAAVERAAAEARERQAAAAAAAREKTSKPDDLESLFGMGARANSAPKQRAPTVDSMFDSQTQNRGTSTSTSMKKASSTANVADDLSALFGGAPTSSNEFQEVDGESEERRRARLERHQRTRERAAKALAEKNERDMQQQRDQAERHRLAETLDFEIKRWAAGKEGNLRALLSTLQYVLWPECGWQPVSLTDLITAAAVKKVYRKATLCIHPDKVQQKGANLQQKYIAEKVFDLLKEAWNKFNSEELF

SEQ ID NO: 54192 - protein, 85 aa, Zea Mays
MLGSLRCRVMPRPRTATSVSSHITELRRALENGHQPPPSEGLQRPKLRQSTTDIDASDCDPFSSFKESTVKLRQPSDRIFRVLQS

SEQ ID NO: 54193 - protein, 234 aa, Zea Mays
MGGSGTLISVYPDELTFLFELEKPCYCNLKVVNNSEHHVAFKVKTTSPRKYFVRPNASIVQPWDSCTITITLQAQKEYPPDMQCKDKFLIQSTKVAASTDMDEIPPDTFNKETDKVIEEMKLRVVYTLPSGGGSDDSSVSSLGSRSFKAASDDLMMLKNASIEEIQTIQRVKEERDNMLQQNQQMQRELDVLRRRRSRKGDAGFSLTFAAFAGLIGVLVGLLMSLIFSSPPVDA

SEQ ID NO: 54194 - protein, 290 aa, Zea Mays
MTVRQVADKLASFVAKNGRQFENITRQRNPGDTPFKFLFDKNCPDYKYYEFQLAEEERALAQSKEAEASKANSGTASFKAPGGTYRSSFEQKSNYQTPASALYGAYEGSSSQGSSSSYGDHTAPPSDPVALMEFYAKKAALEERKRPPRQSKDEMPPPPSLQGPPKKGHHMGDFIPQEELEKFMARCNDAAAQKATKEAAEKAKIQADNIGHKLLSKMGWREGEGLGSERRGRADPVMAGDVKKDHLGVGAVQPGEVTSEDDIYEQYKKRMMLGYRYRPNPLNNPRKSYY

SEQ ID NO: 54195 - protein, 502 aa, Zea Mays
MAATRAPLQNRPASRAMRCCSPGAAARQSSVSSSSLAPVVSSSTSPVATPPDLSSARRTEKRRRGGRSHSSDRRAWNNNNGASSSSSRLDPAAPLLPRHGSSGGREGGGLSSQPKTFANVFIAVVGAGVLGLPYTFSRTGWAAGSLLLFSVAALTFYCMMLLVACRRRLADEHPKIASFGDLGDAVFGAHGRFAVDVMLVLSQFSFCVGYLIFISNTMAHLYPITAAASSSSALLSPKALVIWAMLPFQLGLNSIKTLTLLAPLSIFADVVDLGAMGVVLGQDVAAWLAKPVPVVAFGGAGALLYGLGVSVYAFEGIGMVLPLEAEAANKSKFGVTLGLSMAFIAVMYGLFGVMGYVAFGDATRDIITTNLGAGWLSAAVQLGLCINLFFTMPVMMNPVYEVAERLLHGKRYCWWLRWLLVVVVGLAAMYVPNFTDFLALVGSSVCVLLGFVLPASFHLKVFGAEMEWPGVLSDVLLVVIGLALAVFGTYTSLLQIFQSSSA

SEQ ID NO: 54196 - protein, 226 aa, Zea Mays
MKKKLKDELDSRNTIQHYICPSCNKRYSAFDALQLVSYTDEYFHCETCNGELVAESDKLASEEMGDGDDNVRKRRREKLKDMQQRIEEQLKPLVAQLDRVKNIPAPEFGSLQTWERANIGAFAIGDPAAADSSRNSQGQYGTPMPYIGETKVEVDLLSDGVKEGAESGKTDSELKVLPPWMIKDGMNLTKEQRGEIIAPQKLEKSDAGDDKKHDLKDDDCFRSAQE

SEQ ID NO: 54197 - protein, 195 aa, Zea Mays
MALASTSATAPAAVLKTPAPSRPSPSARCWARSCCSWGGWSRSGGWTSSTRTRSPSSGPRPGPALPRTSPTSPATRATRAASSSTRSASPAPSRTASTSPTSRSSSGLSWPRSSTPASPCLPCSFSTSRPDRARRRSARLAYDLHAAAHDVCRIISHPVSRLRASWYGCIGSDASNKMGEFFFCSSSSVYVPCSV

SEQ ID NO: 54198 - protein, 107 aa, Zea Mays
MQRGRRRTWKRGRRGRRPWISSPRSLDSARRPPRRKPLMRDIPQAPKASLRRFLEKRKDRLTAKAPYPGSPSDVTPVKKEMSDGQPWLGLGPQIANPDLSLSKEASQ

SEQ ID NO: 54199 - protein, 95 aa, Zea Mays
MRASTLGTRSTGLASTASPMATATKAPGTKARSRDLGCTRSGTATGDRGTGILGLSRPPCPPLILPSSVLYRPLSVLRRTHFACLELMSRSTRRS

SEQ ID NO: 54200 - protein, 379 aa, Zea Mays
MALPSMSLVAKGVLPFSARTSSGVTQRPVSVTASLEHKTSDARRKFLKLALGNLGVGLPTLLGAKKALADEQGVSSSRMSYSRFLEYLDKDRVKKVDLFENGTIAIVEAISPELGNRVQRVRVQLPGLSQELLQKLREKNIDFAAHSNQEDSGSLLFNLIGNLAFPLILIGGLFLLSRRAQGGLGGPNGPGFPLGFGQSRAKFQMEPNTGVTFDDVAGVDEAKQDFMEVVEFLKKPERFTAVGARIPKGVLLVGPPGTGKTLLAKAIAGEAGVPFFSISGSEFVEMFVGVGASRVRDLFKKAKENAPCIVFVDEIDAVGRQRGTGIGGGNDEREQTLNQLLTEMDGFEGNTGIIVIAATNRADILDSALLRPGRFDRQQ

SEQ ID NO: 54201 - protein, 848 aa, Zea Mays
MSRMKHLLRKLHLAGGPAGAGAGGAAPDHHRSRHRRSGHPTPPPPGAAVAAPEPPQPAVTPAAAVSIAPAVEEPRGLEAEAATTRLEEDYQVRLALAISASDHAGLVDADSVQIRAAELISLGAGAGSGHDRSPAEALSARYWNHSVVNYDEQLPDGFYDVCGAQLHPGFQAKFPSLEYLRAVPLGRDAPFLAILVDREHDPALKRLEDRAAQIAAQTRAGHGGAASAELAQKIVGLIVNAMGGLVEDADGMNREWSIKSHELSLQLNSVVLPLGSLRVGLSRHRSLLFKVLADRVNLPCKLLKGICYTGTDEGAVNLVKVDFDSMEYIIDLMGAPGTLIPSDISGSQFQDSNNSQLSSDAIEESVAELCLALEQINGGYENKNTIGGCSSGHSSILALTSSHLGDLSQTELKQNVVSEKKNDGDISEHVKVDDVSKYIVPEVVDPQFAQNLHDLLLESGALLPSDLLSDQNNHDIHEKESTGWLLVAQTTQNLPNAFVAKDSSSPDEDEQPRAENTEAAIRDLDLHGHTASVISNEDQMVAGSLVNMSGSSNGNLDTLSWSSVKTISSVIDDIAEYEIPWEDLDIGERIGLGSFGEVYRADWNGTEVAVKKFLDQDLSGVSLEQFKCEVRIMSRLRHPNVVLFLGYVTQSPNLSILTEYLPRGSLYRLLHRPNSRIDEVRRLKMAFDVAKGMNYLHSSHPTIVHRDLKSPNLLVDKNWVVKVSDFGMSRLKHHTFLSSKSTAGTPEWMAPEVLRNEPSNEKCDVYSFGVILWELATMRVPWSGLNPMQVVGAVGFQNRRLEIPKDVDPQVASIISSCWDSDPSKRPSFSQLLSPLKQLQHLVVTESC

SEQ ID NO: 54202 - protein, 472 aa, Zea Mays
MLKAATIMRGTAWTATSHIVAAVVGSGVLALAWTVAQLGWVVGPLVLVGFSCVTYYTSALLADCYRYPDPVHGAVNREYIDAVRCYLDRKNVVLCGCAQYVNLWGTLVGYTITASASMIAIKRVNCFHRDGYGAAGCNPSGSTYMVVFGLFQLLLSQLPSLHNIAWLSVVAVATSLGYSFISLGLCSAKWASHGGHVRGTLAGAAAVAGRADDDKQAAFNVLLALGNIAFSYTFADVLIEIQDTLRSPPAENRTMKRASAYGLAITTVFYLALGCTGYAAFGDHAPGNILTGFAFYEPFWLVDAANVCVVLHLVGAYQVFAQPIFARLESCVACRWPDAKLINATYYVRVPPCLLLLRTSSSSSPPPTLAVAPLKLVLRTIVIMFTTLVAMLVPFFNAVLGLIGALGFWPLSVYFPVSMHMARLNIRRGEIRWWMLQAMSFVCLLISVAASIGSVHDIVHNLKAAAPFNTAN

SEQ ID NO: 54203 - protein, 165 aa, Zea Mays
MHDFCFTIPYGFAVLAGGVLGYLRRGSTASLAGGAGAGALLLLAGFVSLKAFEKRRNSYVALALETLCISLNFRYGAKIPRDFEDYASWCRCWPQCCDVRVLSVQNCKRRQPHPTKERVNWTLTCKVCSIELGRLRATALSSCMVTSGTSILFSICGVARVYHGL

SEQ ID NO: 54204 - protein, 194 aa, Zea Mays
MISVLPGRDGLPPVGAVPVGRRRQLVHGRRLHRAGVLAEQPRRRHPRGRPALRRLRRSGPRPGLLLAAVHGHHQTGRPRHHALHRVQEHGPRRHADRVGAGEGPRRRQEDGQVHRAQHDRGLQGLAAARRQGARRGLRRLRAPGGGPAPPVRLRAAQDGGALARAARGGRRLGRLQPAPRDLGLLQLHQGNGCH

SEQ ID NO: 54205 - protein, 281 aa, Zea Mays
MRLHIAEEVCQMKCSVGHVPGLAVVLVGDRRDSESYVRYKTKGCEEVGIKSLLAKLPGNCSEDEVMDSVSRFNEDPSVHGILVQLPLPEFMDEEKILSIISLNKDVDGFHPLNVGNLALRSRNPLFVPCAAKACIELLLQSGIELMGKHVSVIGRSKVVGLPTSLLLQRHHATVSVIHAFTTNPEAITRESDIVISAAGVANLVRGSWLKQGAVVIDVGTNPIEDPTSDYGYRLTGDVCFEEAVNVASAITPVPGGVGPVTIAMLLGNTLDSAKRVYGLSD

SEQ ID NO: 54206 - protein, 457 aa, Zea Mays
MRPSDGRTQLSGFAQSDESTLDVEGHCYHQQSFPSSPSMQPIASGCTHTENSAAYFLWPTSNLQHCAAEGRANYFANLSKGLLPKSGRLPKGQQANSLLDLMTIRAFHSKVLRCFSLGTAVGFRIRKGALTDIPAILCFVARKVHKKWLNPDQCLPAIVEGPGGIWCDVDVVEFSYYGAPAQNPKVQMFTELVDKLCGSDECIGSGSQVASQDTFGTLGAIVKRRTGNKQIGFLTNRHVAVDLDYPNQKMYHPLPPNLGPGVYLGAVERATSFITDDVWYGIYAGTNPETFVRADGAFIPFAHDFDISTVTTTVRGVGDIGDVKVIDLQSPLNSLIGRQVCKIGRSSGHTTGTVVAYALEYNDEKGISFFTDLLVVGENRQTFDLEGDSGSLIILTGQDNEKPCPIGIIWGGTANRGRLKLRCDHGPENWTSGVDLGRLLDRLELDLIITNESLKDN

SEQ ID NO: 54207 - protein, 224 aa, Zea Mays
MALLSATSPAKAHLSALLSCHDEPQQHQHALPVPHPRCFGGGKARRRARGRCAASMRPPDASVAPASAPAGEARRKKKPRVLVAGGGIGGLVFALAARRKGYDVTVFERDMSAVRGEGQYRGPIQIQSNALAALEAIDMSVAEEVMRVGCVTGDRINGLVDGMSGSWYRVFLGHKQYFVSSDVGAGKMQWYAFHKEEAGGTDPENGECLEKFSSLTSEIGTASL

SEQ ID NO: 54208 - protein, 511 aa, Zea Mays
MAVVDQSLLPQIHALFSDPLRVVSYKWLSRNFSVSSNDAKRLLQDFVNKHGTDLQVIYSVSGWLKSNPQNYCVKLISGPKLEEARQIFKDSCSVQIYSIQACIPKDTAVLWNPEFVQAEELFNQPFDYENCLRDNRFCGVLNSFVKRTSNGKHVSSLPPKPLNSAAAAAQSKPSVTPKEQFVTARRQDLPVSSKQGADTKSEKDNSTVLDKAGNGPVVKEQSVDAHASKSKAQNGKAMPSNGGSLANMWGRASAKPKPPSTTNSTAVASVAATADAQICAKEEADGNSSDDEHGIKYKRGSTNANNRKRRAVFDYSDDEEDDNIVSIASPELPKQHTPDPVVGIAEDAEVNQKNLETEHHVPNNGKGSSTGVDSDFTSECKIKTIDPMNDSGITLKEKSSDPPINDKKQDSAAEPASTSPKRRKVLKTRIDERGREVTEVVWENEASADDKAEQNVNTIDATASGATVPSKPKPATNADKSKAPSKTAAGNKKAAKAGAKQGSIMSFFKKA

SEQ ID NO: 54209 - protein, 255 aa, Zea Mays
MEANRFYDAVSCLMSYMNDNGGFATYELTRSYPWLELINPAETFGDIVIDYPYVECTSAAIQALTSFKKLYPGHRRKEVDNCISKASNFIESIQKSDGSWYGSWAVCFTYGTWFGVKGLIAAGRTFENSPAIRKACDFLLSKELPSGGWGESYLSSQDQVYTNLKGNRPHAVNTSWAMLALIDAGQAERDPTPLHRAAKVLINLQSEDGEFPQQEIIGVFNKNCMISYSQYRNIFPIWALGEYRCRVLGAGKPWR

SEQ ID NO: 54210 - protein, 275 aa, Zea Mays
MEDFCVVCADTLEWVAYGPCGHRDVCSTCVARLRFVMDDKKCCICKTVCPFVFVTKAMGEYTRVVADFSVFPIGVNEGKAGDFWYHEDTQAYFDDVDHYRMIRAMCRLSCSVDNAEDQVALAAQAKRRSKFRSIDQLKGHLFHVHRLHMCNLCLEGRKVFICEQKLYSRSQLAQHIKTGDSEVDGSEVERNGFAGHPLCEFCKSSFYGDNEIYMHMSREHYSCHICQRQHPEQYDYFRNYDDLELHFRKDHFLCEDEACLAKKFVVFLSEAELKG

SEQ ID NO: 54211 - protein, 312 aa, Zea Mays
MPWPEMWLPPAAGEGAVAAGLFLDGVDGTAHGALLAAMPGCSLSFGHQHRRRRGAPLGFLSLTMSVKGGRGFAPAPVGLLPDAEEKARAEESDALVAGKRAVEVAAEAEGVILLQEKEKKDGRAGAGAMNVSKHLWAGAVAAMISRTVVAPLERLKLEYIVRGEQRNLFELMHAIATTQGLKGFWKGNFVNILRTAPFKAVNFYAYDSYRKQLLKWSGNEESANFERFIAGAFAGVTATIMCIPMDTIRTKMVAPGGEALGGVIGVARHMIQTEGFFSLYKGLVPSLISMAPSGAVFYGVYDILKMAYLHSP

SEQ ID NO: 54212 - protein, 363 aa, Zea Mays
MLKITGNTENFGADLLETLLKMAPTKEEEIKLREFKEESSPVKLNPAEKFLKAVLDVPFAFKRVDAMLYIANFDAEVNYLKKSFETLEAACDELRSSRLFLKLLEAVLKTGNRMNVGTNRGDAHAFKLDTLLKLVDVKGTDGHTTLLHFVVQEMIRTEGARVSASTQTTPRTQANPLREELECKRLGLRVVGGLASELGNVKKAAAMDSDVLSSYVAKLAGGIEKVTEVLRLNEEVKSRDDAWQFHDRMQRFLKKADDEIIRVQCQESVALSLVKEITEYFHGDSAKEEAHPFRIFMVVRDFLAVLDQVCKEVGRINERTIASSARHFPVPVNPMMPQLFPRLHALRAGFSDDESSAASVSSP

SEQ ID NO: 54213 - protein, 138 aa, Zea Mays
MPFVGAIDDDCNQTGQMLAGLLKWPQGTFASKVTLDTEKQKATVEREVDGGIETICLDLPAVITTDLRLNQPRYATLPNIMKAKSKVIKKVAAEDLGVDIRSDMEVIEVNEPPKRKAGVILSCVDELLDKLKNEARVL

SEQ ID NO: 54214 - protein, 422 aa, Zea Mays
MDGNARSAATNQKKPVVADDDLVELLWHNGSVVAQPQAHQRPAPTYDPDRPGTSGLTGEETAAWFPDTLDDALEKDLYTQLWYSTIADAAPQHEGTLPGPTSQPSPSPPVGSSGVESSWAGDICSTFCGSNQVLRTPARIRGKDAALQSELPSNTGAHDGTSSSGGSGSNYGGFGLPSDSVHVQKRKGRCRDDSDSPSEDAECEEASEETKPSRRYGTKRRTRAAEVHNLSERRRRDRINEKMRALQELIPHCNKTDKASILDETIEYLKSLQMQVQIMWMTSGMAPMMFPGVHQFIPQMALGMNPGCIPAAQGLSQMPRLPYMNHTLPNHIHLNSSPAMNLMNPLNAANQVQIGHLRDASSHLLHLDGGRAAVVPQVPGPGPHVHGHQIAQAEEHNKILEVAASTVIPTSKAGQPPTLHRV

SEQ ID NO: 54215 - protein, 524 aa, Zea Mays
MIVTLNAYNVIAARCAAEYLEMNETVDKGNLIYKIDVFLSSSIFRSWKDSIIVLGTTKAHLPWAEDLKLVSQCIDSVASKASIDVSKVEWSYTYNRKKLPTENGHDSPWNGVNQRQVVPKDWWVEDLTDLDIDAYKQVITAVKTKGMVAKDVIGEAIKAYTYKKLPSLSKVSMIHGDAKVRAMLVTITCLLPSEKGSVSCSFLLKLLKATNLLKCGDMCRKELMKRIARQLEEASVSDLLIPAVDEDTSVYDIDLILSIVEEFIRQDSKNAQRHNGGEVNDHVSAPSASMITVAKIVDGYLAEVAKDPNIPVYKFFSLAETVSANSRPVHDGLYRAIDMYLKEHPSLGKSDKKRLCALMDCRKLSPDACAHAVQNERLPLRVVVQVLYHEQTRASAAATVRADSIGIGSYESSRSGATTNTEDEWDGVMAVEDLSLSSKTTKLEKCDAASTVSEKNHGGNKGANGRAKGGVMPKKAVGRTTMSGNKGQAGERSSSDSSDSAILPCQLEHPKRAAARSTTKSAAV

SEQ ID NO: 54216 - protein, 127 aa, Zea Mays
MADDDYNEIDMGYEDEPPEPEIEEGAEEELENNEDAPDDVIGGEGEDKEQEKTKRERKTTKYMTNMNAPVMVELEGETDPLEIAMKELRARKIPFTIRRYLPDGSYEDWGVDELIVEDSWKRQVGGD

SEQ ID NO: 54217 - protein, 158 aa, Zea Mays
MYLEDRTVRLQLWDTAGQERFRSLIPSYIRDSSVAVIVFDVASRQSFLNTSKWIEEVRTERGSDVIIVLVGNKTDLVDKRQVSIEEGEGKAKDLGVMFIETSAKAGFNIKALFRKIAAALPGMETLSSAKQEDMVDVNLRSGNANSSQSQAQAGGCSC

SEQ ID NO: 54218 - protein, 738 aa, Zea Mays
MRERARHATRVSPMPPPTGGEDPEADAAPSCSGSADEADPHEQVLPNGDIYTGQWRGAVPHGAGKYLWADGCMYEGEWRRGKATGRGRFSWPSGATYEGEFLDGFMHGAGTYVGASGDTYRGVWAKNLEHGAGEKRYANGDCYDGEWRAGLPDGCGRYAWRDGTEYAGGWRAGLIHGRGTLVWANGNRYDGGWEGGRPRGQGTFRWADGSLYVGFWGREAPSGAVHQKGVYYPSPAAMGNSPRARDPREVFARDLPECVRSGTEAQSALTSLRSLKWLMRSVSGRGSSSSGWSNGSGGSLVHFWGSDGEVKCDLGDDWRRRSVREGRGLPPPSPALVPYLPNGAPLRLSKKQGVTIAKGHKNYELMLNLQLGIRHAVGRQGQVLLDLKSSAFDPKEKVWTKFPPEGSKHTPPHNSCDFKWKDYCPKVFRTLRKLFKVDPADYMLSLCGDDALRELSSPGKSGSFFYLTNDDRYMIKTMKKGEVKMLLRMLQAYYNHVRAFEDTLVTKFFGLHCVKSGSHQKKVRFVIMGNLFCSDHTIHRRFDLKGSSLGRITDKPPAEIDEYTTLKDLDLNFIFRLQKQWYQEFQRQVDKDCEFLEQEKIMDYSLLVGVHFRGAIDIDGDKPATPRVSRWDRDHFRSDPNRWSKIKLGANMLSRAELTIRKNDSDVFGEPTGEYCDVILYFGIIDILQDYDIGKRLEHAYKSFQYDSTSISAVDPKQYSRRFKDFIYKAFQEDKLDS

SEQ ID NO: 54219 - protein, 1153 aa, Zea Mays
MAWGEDEAIGPDVASAGLHVSERIGRDAAAQPDLEEALEASRYASHPYSSHPKEWPPLVEVAETRQLPPMLIERYNTAAGEGTALCGIFSDIHRAWATVDNSFFIWRFDKWDGHCQEHNVDEQAICAVGLARAKPGIFIEAIQYLLVLATPVELILVGVCCSASADGTDPYAELSLQPLPEYMIATDGVTMTCITCTDKGQIFVAGRDGHIYELQYTTGSGWRKRCRKVCLTTGIGSLLSRWVLPNAFKFSTVDPIVDMVMDEERNTIYARTEGMKLQLFDLGVNGDGPLTKITEEKNIVDPRDGPYGGRRSNAPRAARSPRPSIVCISPVSSVESKWLHAVAVLSDGKRLFLTTSGGSGSSVGLNSGLQRPTCLKIVATRPSPPLGVGGGLTFGAVSVAGRALPEDLALKVESAFYSAGALVMSDSSATAMSSLLAVQKDSAAQLSLPSTFGTASRTSRALRETVSALPVEGRMLCASDVLPLPDAAYMMQSLYADVECFTCFRKPSEKACIKLWAKGDLPTQHILPRRRVVVFNTMGLMELIFNRPVDILRKLFDGNTLRSQIEEFFNRFGAGEAAAMCLMLAAKLLYAEDSLISNAVSEKAAEAFEDPGLVGMPQINGTTALSNTRTQAGGFSMGQVVQEAEPLFSGAYEGLCLCSSRLLYPIWELPIMSIRGPSGNNKREDGVIVCRLSAGAMKILESKIHSLETFLRSRRNKRRGLYGYVAGLGDSGSILYKTGPIIGPGGHSNGRSPYNSQIRDMNPVDKSASNKKPRLLYTSAELAAMEVRAMECLRRLLRRSGEALFLLQLICQHNVARLAQTLGNDLCKKFVQLTFHQLVCSEDGDQLAMRLISALMEYYIGPEGRGTVEEISTKLREGCPSYFNESDYKYYLAVECLERASMTNNADERDILARDAFNLLTKIPDSADLSAICKRFENLRFYEAVVRLPLQKAQALDSNADIINGQIDPRHHDTIMLQREQCYRIVMDALCTLKGVGHSRMQSADKSSALATAADPASRSKYIKQIIQLSVQWPDTVFHEHLYRTLIELGLENELLEYGGSDLVSFLQSAGRKHQEEVRAVSSVTPGAAKMHDLGAPISTSQTKYLELLARYYVRKGEHIAAARMLLILAERQCSNSEEAPALDKRINLLLES

SEQ ID NO: 54220 - protein, 337 aa, Zea Mays
MGGGGGMHDPFDIFQSFFGGGSPFGGGGSSRGRRQRRGEDVVHPLKVSLEDLYNGTSKKLSLSRSVLCSKCNGKGSKSGASSRCAGCQGSGFKVQIRQLGPGMIQQMQHPCNECKGSGETISDKDRCPQCKGDKVVQEKKVLEVFVEKGMQNGQKITFPGEADEAPDTVTGDIIFVLQQKEHPKFKRKGDDLFYEHTLTLTESLCGFQFVVTHLDNRQLLIKSNPGEVVKPDSFKAINDEGMPMYQRPFMKGKLYIHFSVEFPDSLSPEQCKALEAVLPPKPVSQYTDMELDECEETMPYDVNIEAEMRRRQQQHQEAYDEDEDMPGGAQRVQCAQQ

SEQ ID NO: 54221 - protein, 326 aa, Zea Mays
MLMQKGYGGFSYLVEPLWWIGMISMIVGEIANFAAYAFAPAILVTPLGALSIIISAALAHAILQEKLHTFGILGCVLCVVGSITIVLHAPQERDIDSVKEVWDLATEPAFLCYAAIVVAAALVLIYFVVPHHGQTNIMVYIGVCSLLGSLTVMSVRALGIALKLTLSGTNQLFYPQTWAFALIVATCVSTQINYLNKALDTFNTAVVSPIYYVMFTSLTIIASVIMFKDWDHQNPTQIVTEMCGFMTILSGTFLLHKTKDMTDSPGQSLLTRRPKHASQNAFAIEVMPLKCQDYIDDETLTLSLPKVENGYLKEEYLLRYKDSSIV

SEQ ID NO: 54222 - protein, 584 aa, Zea Mays
MGTFTAPVSIPQIDNPSIVSPMGSCTADPRSSVINNPALIPRFNGFSTVNSYTSLSAVTQSIGTSIPKLINVDNVDKRYRGFPLDSFSVSHSRHQVAVSSNLEQKNSQKLEDSDQQSHGKGMKNFNLNETLSDCQEDGLVEQDGRCASSFQHDKDGGSVLGISWLKKKLMSADPTAVEKPGKIFGHSLGTAIELKNTKDQNEPAVTIRNLSDSASTSVGCAIKKDRPSDNIVTGTLPVCNKAQEGATCLPLSCQKHVPKDGQAAEGATKKSGAPIRNFIDLNDDVPNDDNSEESVVSHECHVEPSRNNHPKRAFVIDLEVPACEEDASWDIDQECAQPKPDAYQEVDDGSDTSALAAAENIVALSRNTPTAAEASDDTLQWFADLAVLNINDLAEQAELQACTNDSSNYESDSFESLTLKLEETKIDDLWSRPLEPETATDEQTVSAAHLLTKPRRGQQRRRRQKRDFQRDVLPGLSSLSRPEITEDVQLLEGLVQASGGSWESSLTRRGRCGGRARGRKPRKTVVTVIVEEEEEEEVEVSPPPKPAGTGELEADGRGMIGWGRTTRRCRRARCPSGNSMATAS

SEQ ID NO: 54223 - protein, 97 aa, Zea Mays
MTAPETTILYPNAGGNIHTFRAITPCALFDVLSPPYSAEDGRHCSYFRKSQMNQPSVVLPAEIDSTQVVWLEELEDHQPPEGFVVARGMYKGPVIRR

SEQ ID NO: 54224 - protein, 581 aa, Zea Mays
MHFAAQTHVDNSFGNSFEFTKNNIYGTHVLLEACRISGQIKRFIHVSTDEVYGETDEDAVVGNHEASQLLPTNPYAATKAGAEMLVMAYGRSYGLPVITTRGNNVYGPNQFPEKLIPKFILLAMRGEPLPIHGDGVNVRSYLYCEDVAEAFEVILHHGEVGHVYNIGTKRERTVLDVAKDVCRLFNLEPDKVIMFVENRPFNDQRYFLDDEKLKSLGWAERTPWEEGLKKTMEWYVANSDYWGDVSGALLPHPRTLMMPGCEGSEEIKGILSRFNNIQTKVGSTSDNAPEPHAFKFLIYGRTGWIGGLLGKICEKKGIPYEYGNGRLQERSSLVLDIQTIKPTHVFNAAGVTGRPNVDWCESHKPDTIRTNVVGTLNLADVCRKHGLLMMNYATGCIFEYDAHHPEGSGIGFKEEDTPNFTGSFYSKTKAMVEELLKEYENVCTLRVRMPISSDLSNPRNFVTKISRYNKVVNIPNSMTILDELLPISVEMAKRNLRGIYNFTNPGVVSHNEILEMYKQYIDPSFKWTNFTLEEQAKVIVAPRSNNEMDATKLKNEFPELLSIKDSLIKYVFEPNRKVPTD

SEQ ID NO: 54225 - protein, 308 aa, Zea Mays
MAAAAAPVSLVFLCTRGQQQLVLVDATKPPLPLRSRAFSVRAAQQQQQQQHRARPRPPRRNKPPGPARRPPRVPLDQDEYDGGYDDREEGRFAGGTRAAAMPKPPAGFVLDDQGRCIAAASKRIVTIIDDTNNRPLECIIRRVFRSSQDHDCMLLCPVDMPVQVLKSTNFSGWVAVDDDQLKQIIPSVAYALARVHMHFVESGFCYTARGGFCFPEEAIQEFHDSGEGVPFEGVEICCFNLDGAHYMIYTPVDPLLFVAIKDKDGVLRIAEDDLMEDPAVLDAVDEETEFTALVEEEEALLETVLGER

SEQ ID NO: 54226 - protein, 573 aa, Zea Mays
MNGAEKLRWAFSDGSVTDLLDARSLHGSPLDLRCGAKKSLADLPKHPLALKSCDISSVCSHQILVGGSDAFARLYDRRMLPPLSSCQTKRKPPPCVKMFCPLHLADSKKTYSHLTHVAFSPNGKEVLLSYSGEHVYLFDVDPDGMSSRYTADYVREQLFVPPFHKVSAKGHAKQKKASVNTTSRSLSRVDMCKKFMQVATRSLETGKNLMLGIEACSEVLESMEPDIDDDTRHEFLCTRAALYLKRKWKNDVYMAIRDCNRTWKIDVTSYQAHLHMAEALLQLGRLKEASEHAEVANGLLPPHCPLREQVDDFKQRIASAELEKNRADKNGSSKADTHGKLRSLSEILFRPDVGGSSQEGREDSDYDDDTEMDYETTVSGHESRENDQGVFRGSLSFQFHQREDQTNVHTDENGSVESPRKDDYAFQSDVAIDMKQRYVAHCNVGTDIKQASFLGEQGEFIASGSDDGRWFIWEKRTGRLIKMLAGDGAVVNCIQSHPFDCAVATSGIDNTIKLWTPDANATSMVSGPELDVLSAIENNQQKLCRNRHFVLPSEFLERFQMHEFSEGFECAQS

SEQ ID NO: 54227 - protein, 255 aa, Zea Mays
MCGRARCTLSPAEVARAFGFPTTSANAGGGGDGPAVPTLHLNRFRPSYNVLPGAYLPVGAMRALPGCAHGGGGSDGEGPVIQCMKWGLVPSFTGKAEKPDYFRMFNARSESVKEKVSFRRLIQKNRCLVAVEGFYEWKKNGSKKQPYYIHFQDHRPLVFAALYDAWTNSEGEITHTFTILTTHASTSLNWLHDRMPVILGSKDYVDAWLNDVSVKLEEITAPYEGADLVWYPVTSALGKASFDGPECIKEVDKSE

SEQ ID NO: 54228 - protein, 288 aa, Zea Mays
MYGIAVAALGMLSTIATGLAIDAYGPISDNAGGIAEMAGMSHRIRERTDALDAAGNTTAAIGKGFAIGSAALVSLALFGAFVSRAGVKVVDVLSPKVFIGLIVGAMLPYWFSAMTMKSVGSAALKMVEEVRRQFNTIPGLMEGTAKPDYATCVKISTDASIKEMIPPGALVMLTPLIVGTLFGVETLSGVLAGALVSGVQIAISASNTGGAWDNAKKYIEAGASEHARTLGPKGSDCHKAAVIGDTIGDPLKDTSGPSLNILIKLMAVESLVFAPFFATQGGLLFKYL

SEQ ID NO: 54229 - protein, 206 aa, Zea Mays
MRLSYSPAAHIFLFLVQWTDCSLAGALGLLRILIYKVYVDGTTTMSTHERKSSIKEFYAVIFPSLLQLQRGITDVEDKKQKAVCMEKYRKKDEDGRDTLSDIDVEREEECGICMEMNSKVVLPNCTHAMCIRCYQDWSSRSQSCPFCRDNLKKTCPSDLWIYVEDQDVVDMETVSSENLRRLFMYISKLPLIVPDVIFSVYDSHIK

SEQ ID NO: 54230 - protein, 168 aa, Zea Mays
MATPGKGGAARFAAALFVLLNLAVAIAGKSYYDVLQVPKGASEDQIKRSYRKLALKYHPDKNPDNEEANKRFAEINNAYEVLTDQEKKKIYDRYGEEGLKQFQGGRGSGGGMNIQDIFSSFFGGGGGGMEEEEQQILKGDEVIVELDASLEDLYMGGSLKSCLREGQA

SEQ ID NO: 54231 - protein, 672 aa, Zea Mays
MAHKQMLVNGCPVVLRGVNRHEHHPRLGKTNLEACMIKDLILMRQNNINAVRNSHYPQHPSMVERDKNHACIIVWSLGNESSYGPNHASMSGWIRERDPTRLLHYEGGGSRTSSTDIVCPMYMRVWDVVKIAKDPSETRPLILCEYSHAMGNSNGNIDAYWMAIDNTFGLQGGFIWDWADQGLLKEDSDGSKFWAYGGDFGDTPNDSNFCLNGIVWPDRTIHPALHEVKYLHQPIKISSADNMLKIENGHFFETTEALDFSWVLHGDGCVLGSGPLNIPTLAPQTSQLINMESSPWFALWSACAAKEVFLSVNVKQRHETRWAKAGHLLASAQLCLPQKNGFVPSVIALSSSPLVCERIGDNVTICKNNAWKIKVNSQLGTIDSWKVNDVELMSKGILPCFWRAPTDNDKGGFFTKPYDSRWREAFLDNVSFHSSQFSVKELPDNTVEFSTLYYGVPGHLPKPDDEASESILFRVKMVCRIHGSGDVVLDYEVNPRSDLPPLPRVGVVFSAGRSLSHVTWYGRGPFECYPDRKAAAHVGVYESSVEELHVPYIAPVECGGRADVRWVALRDAGGLGLYASAHGGSPPMQMSASYYGAAELDRATHVHRLVKGDDIEVHLDHRHMGLGGDDSWSPCVHEQYLLPPTRYAFSLRLCPLLPSSSCHDIYRSQLPS

SEQ ID NO: 54232 - protein, 370 aa, Zea Mays
MIEGNDPVTGHIISTTIGGKNGEPKKTISYMAERVVGTGSFGIVFQAKCLETGETVAIKKVLQDKRYKNRELQIMRSMDHCNAVSLKHCFFSTTSRDELFLNLVMEFVPESLHRVLKHYSNMNQRMPLIYVKLYTYQIFRGLAYIHTVPGVCHRDVKPQNLLVDPLTHQVKICDFGSAKMLVKGEANISYICSRYYRAPELIFGATEYTTSIDIWSAGCVLAELLLGQPLFPGESAVDQLVEIIKVLGTPTREEIRCMNPNYTEFRFPQIKAHPWHKIFHKRMPPEAIDLASRLLQYSPNLRCTALEACAHPFFDELREPHARLPNGRPFPPLFNFKQELANASPELINRLIPDHARRHLGLTLLPTAGP

SEQ ID NO: 54233 - protein, 510 aa, Zea Mays
MPVVIPEGKALPCVIYCHGNSGCRADASEAAIILLPSNITVFTLDFSGSGLSEGEHVTLGWNEREDLKAVVNYLRTDGNVSCIGLWGRSMGAVTSLMYGAEDPSIAGMVLDSPFSNLVDLMMELVDTYKYPLPKFTVKLAIQHMRKIVKRKASFDIMDLDTIQVAKQCFVPALFGHATEDDFILPHHSDKIYESYIGDKNIIKFDGDHNSPRPQFYFDSITIFFHNVLNPPEVAEDHYFMTPHGSLGQGHWDTEQDIEYRFSQSPTANATTTEDAIAQLRSRRLMSRMEVPSGATTEDRTDRTEGFDSDLGPSSSSVSTATPPNGRNGRLLTPTSDDGEYVEYSFDSLSDMPHTVEDEDRMLMQAILESLKDYEQSNTKNVQSTASDPASKANGTVKDCNGVAAAALEQDASSFDAPDKHTNVPNSGEKVSEGQSTDCNAGKSSASVSASGSSEPLAPTQMVNGQPASVDSQKVTQNANGEDGTRATLVVQKSRTGGLIEKWGSFFKNND

SEQ ID NO: 54234 - protein, 989 aa, Zea Mays
MPPLTSSLLSRSTTGGSSARGVAVAAAISRPAADAAPSSSSPPARPTPRPRPSPASPFASGLAGRLFGGHRAATRSASSAAAVFERRFASAATRNSYDEILTGLGRPGGGEEFGKYYSLPALSDPRIDRLPYSIRILLESAIRNCDDFQVTGKDVEKILDWERSAPKQVEIPFKPARVLLQDFTGVPAVVDLACMRDAMSKLGSDPNKINPLVPVDLVIDHSVQVDVARSANAAQANMELEFYRNKERFGFLKWGSSAFRNMLVVPPGSGIVHQVNLEYLARVVFNNGGILYPDSVVGTDSHTTMIDGLGVAGWGVGGIEAEAAMLGQPMSMVLPGVVGFKLSGKLRNGVTATDLVLTVTQMLRKHGVVGKFVEFYGQGMSELSLADRATIANMSPEYGATMGFFPVDGKTLDYLKLTGRSDDTVAMVESYLRANKMFVDHSQAEAERVYSSYLELNLEEVEPCLSGPKRPHDRVTLKNMKSDWLSCLDSDVGFKGFAVPKESQGKVAEFLFHGTPAKIKHGDVVIAAITSCTNTSNPNVMLGAALVAKKACELGLEVKPWIKTSLAPGSGVVKQYLDKSGLQKYLDQLGFNIVGYGCTTCIGNSGELDESVSAAITENDIVSAAVLSGNRNFEGRVHPLTRANYLASPPLVVAYALAGTVNIDFEKEPIGISKDGKEVYFRDVWPSTEEIAEVVKSSVLPDMFKSTYESITQGNPMWNELPVSTSTLYPWDPSSTYIHEPPYFKDMTMTPPGPRPVKDAYCLLNFGDSITTDHISPAGNIHPDSAAATYLKERGVERKDFNSYGSRRGNDEIMARGTFANIRLVNKFLKGEVGPKTIHVPSGDKLSVFDAAMKYKNEGHDTIILAGAEYGSGSSRDWAAKGPMLQGVKAVIAKSFERIHRSNLAGMGIIPLCFKAGEDADTLGLTGHERYTVHLPTNVSEIKPGQDVTVTTDNGKSFTCTLRFDTEVELAYYDHGGILPYVIRKIAEQ

SEQ ID NO: 54235 - protein, 222 aa, Zea Mays
MAGPSVPAAALAALLAVAALTCCAIPPGTLGRLTNLRVLSLRSNRVLGTVPDDVLQLASLKALFLQQNLLSGPIPTGIQKLGGLERLVLSHNNLSGSIPFALNKLTALRVLKLDGNHLSGSIPSISIAGLGALNVSDNNLNGSIPKSLSHFPRESFAGNLQLCGDPLPPCSSSFFPPAPSPGLSPGPATGSSKRRKLSGAAIAGIVVGGVVVGLLLLIASIS

SEQ ID NO: 54236 - protein, 324 aa, Zea Mays
MAAQNAGIIIDCRQAMSPDPPAVELEVIGSSSPSITPCPAAAAPADADFDHDGCTAELSSSTDRELQDHIRQWEGSYGQGVLRRMPDGGEKMHSRVLRMKKELERRRARQRMDVTPLRQTVQAKRTGGSSGEIYNLKSDDETMDSTASKHYPNSSCTTSTKTYTQVKGAAYEEQSSLSHGKYAYPKNGGQISKESLRHQSKTWNLAKNKASPLEIKKDVVLLDDDDDIEPARSADVQISNKWEESNIHYPSSTDPEAVELTYSDMKCLEPEEYLKSPVINFYLQYLKKARPRRDLHMFNTYFYSKLEEALSMPNSASYGDGGEV

SEQ ID NO: 54237 - protein, 987 aa, Zea Mays
MNPLPPPPGPRRVPTLLPVTAAVVSPVLFTNSEFHCAALLLPPSLSLRVRSLGSHAAAGCGGGGVRGLGFSVWRSLGVCEEEEEEEEEEEERMGTAGKGAWVVPAPAYREVEGWEGAGDDAPGFRCAHSLTAVAPTKGHGPRLILFGGATAIETGASSGLPGIRLAGVTNSVHSYDVETRRWTRLHPAGEPPSPRAAHAAAAVGTMVVFQGGIGPAGHSTDDLYVLDLTNDKFKWHRVVVQGAGPGPRYGHCMDLVAQRYLVTVSGNDGKRALSDAWALDTAQKPYRWQKLNPEGDRPSARMYATASTRSDGMLLLCGGRDASGMPLSDAYGLLMHTNGQWEWTLAPGVSPSPRYQHAAVFVGARLHVTGGVLRGGRAIEGEGAIAVLDTAAGVWLDRNGIVTSRTLKSSNEHDASSDLLRRCRHAAASVGSQIYIYGGLRGDILLDDFLVAENAPFQSEITSSMYNVDRVPRGETQNRNNNFHSDSPVHQSTNNRQEAASGFSADKKSIDMLIEASTAEAEAVSAVWRAAKEASAASSEDSLSEGIGSESPLSETSPMPEDFDDGGSLEPDVKLHSRAVVVAKEAVGDLGCLVRQLSLDQFENESRRMHPSNNDQSYPGRRTLNRQRSPQGLHKKVISFLLKPRNWRAPADRTFFLDSYEVGELCYAAEQIFMQEPTVLQLKAPIKVFGDLHGQFGDLMRLFDEYGFPSTAGDITYIDYLFLGDYVDRGQHSLETIALLLALKIEYPENVHLIRGNHEAADINALFGFRLECIERMGESDGIWAWTRFNQLFNYLPLAAMIEKKIICMHGGIGRSINTVEQIEKLERPITMDVGSIVLMDLLWSDPTENDSVEGLRPNARGPGLVTFGPDRVTEFCKRNKLQLIIRAHECVMDGFERFAHGQLITLFSATNYCGTANNAGAILVVGRGLVIVPKLIHPLPPPVNSPESSPERGDATWMQELNIQRPPTPTRGRPQAAGDRNSLAYI

SEQ ID NO: 54238 - protein, 173 aa, Zea Mays
MATLTMQPIGPTPAPAAQQDPSKGENPPTVDGTDLGDIDSGWVILKNSDVVSADLAAAAVCGGQRLGSSTIPSWARWVLGGVVYTLVPFYNRVRHLEDETVGFVENAVEVVEHLAEVTEKLAANVAKQLPEDGSLQKAVEEVEHIAEVVDDDAEKVEAVTEKVVFCTEMLYNT

SEQ ID NO: 54239 - protein, 162 aa, Zea Mays
MAAVRHRQLEANGITMHVAEAGPVNASAPAVLFVHGFPELWYSWRHQMGYLAARGYRCVAPDLRGYGGTTAPPEPNSYTVFHIVGDIVALLDALHLPQVFVVGHDWGAIVSWNLCLLRPDRVRALVNLSVAFMPRRPGVKPLEYFRAAYGDEYYVCRFQCQV

SEQ ID NO: 54240 - protein, 365 aa, Zea Mays
MPPYLLAAGALIVFLYIIKNRRSRKLPPSPPSLPLIGHLHLIGRVAHRSLLELQVRYGGGGGLLFLQLGRRPTLVVSTAAAAADLFKNHDLAFASRPRSVGGDKLMYECSNVSFAPYGENWRRGKKIAVVHLLSPRRVESFAPVRAAEVAALVARTRRTAEAGEAVELRELLNGYANAVATRAATGAAGATAEKLKELMGNSEPEALMAGFQPEDVLPDAPARFVRWVTGLNKKLEDLVESWDKFLSDIVAAHKEKGGGDAEEDEDFLDVLLRLREEGADGLELTDDRIKATVKDMIAAATETSSQTLEWTMAELIANPRVMSKLQGEIARVVSADQTTIAEPDLNKMDLFFFFENPSLFSLWPE

SEQ ID NO: 54241 - protein, 274 aa, Zea Mays
MRLFDEYGAPSTAGDIAYIDYLFLGDYVDRGQHSLETITLLLALKVEYPQNVHLIRGNHEAADINALFGFRIECIERMGERDGIWTWHRMNRLFNWLPLAALIEKKIICMHGGIGRSINHVEQIENLQRPITMEAGSVVLMDLLWSDPTENDSVEGLRPNARGPGLVTFGPDRVMEFCNNNDLQLIVRAHECVMDGFERFAQGHLITLFSATNYCGTANNAGAILVLGRDLVVVPKLIHPLPPAITSPEASPDHIEDTWMQTTNSDQGASPSSS

SEQ ID NO: 54242 - protein, 149 aa, Zea Mays
MKLLQGAAERLLDPNESTRFREPVPNAAAARNSGQVSHAQQEAAPPKKNVISSSLNSASPPFYPSGAACQDFPVATQRRDIQTGGSNKIPPSSMKMDDNSILQSGSMVRGRTAMDYGGRDRFHADGPVRSSLGRVPNGVTEFRIYIIIW

SEQ ID NO: 54243 - protein, 256 aa, Zea Mays
MDSSLASAAAIADQRQKIEQYRHILASVLSSSPPDISQAKRFLDHMVSDEVPLVVSRQLLQTFAQDLGKLESDAQKEVAHYALTQIQPRVVSFEEQVVVIREKLAELYESEQQWSKAAQMLSGIDLDSGIRMLDDTNKLSKCVQIARLYLEDDDAVNAEAFINKASFLVTNSHQEVLNLQYKVCYARILDLKRRFLEAALRYYDISQIEQRKIGDEEIDENALEQALSAAVTCTILAGAGPQRSRVLATLYKVRLL

SEQ ID NO: 54244 - protein, 372 aa, Zea Mays
MQAYRESMDRLLIYNNKKIGDTVLKDDYEPSTYASVTDVPMENAYGDDESEAHTYLLPGAYNGGLASKNSHKKKHHLPQRMNGARSYEIGVDSPYEPLYLESKSGNQQLLSNGKQTDFLSIPIKRIRTAARQRVVSPFPAGASGTPQFTNKTDASSGDTNSCQDDQSSLHGGSFSRKNADIESTVDFDRQLLYDGSEVSTKSKKKKKTKHPGYKALPNVSESCSLRAPGKGNYDHRSQIDMIAQYEQKDYIKKRQETNGNFVVNGLHAAKKPKLLNQAPDISLEALKPIGPMASLAASQMSNMANPTRVIKISTRGRKSKGLKMRAGHSGPGSPWSSFEDQALVVLVHDMGENWELVSDALNSIIQLKGFGS

SEQ ID NO: 54245 - protein, 52 aa, Zea Mays
MYLLWDTRLEDMKINGLQKIDGIQGITCEIFCCSLKDDCIVTRYYEICIRLL

SEQ ID NO: 54246 - protein, 117 aa, Zea Mays
MVQWPDKSVSLGVTQALAWKRSGLMVRPSIQVSVCPTFGGSDPGVRAEVVHSLKEELNLMCGLSCSQRPSAYTALSIGRSKWNGQVGSSGVVITLETPLNNIGRPSLSVQLNGGFEL

SEQ ID NO: 54247 - protein, 131 aa, Zea Mays
MAEPEVGVAADTAMETEAPEAAGQKRERDEVGDPAAEGGEAAVEEAAAAKKPKLEEETKEVEEASEEKAEETAEGKTEEANEKTVEAERKPVKLGPKEFSSSVEMFDYFFGLLHYWTPQIEFNKAAAVTSL

SEQ ID NO: 54248 - protein, 172 aa, Zea Mays
MGEITNVMEYQAIAKQKLPKMAYDYYASGAEDEWTLQENREAFSRILFRPRILIDVSKIDMTTTVLGFKISMPIMVAPTAMQKMAHPDGENATARAAAAAGTIMTLSSWATSSVEEVASTGPGIRFFQLYVYKDRKVVEQLVRRAERAGFKAIALTVDTPRLGRREADIKNS

SEQ ID NO: 54249 - protein, 368 aa, Zea Mays
MSIAILPMSAEFGWNPQTVGLIQSSFFWGYLLTQIAGGIWADTVGGKTVLGFGVVWWSIATALTPVAAHLGLPFLLVVRAFMGIGEGVAMPAMNNILSKWVPVSERSRSLSLVYSGMYLGSVTGLAFSPLLIHKFGWPSVFFSFGSLGLVWFTTWATKAYSSPLEDPGISAAEKKLIASQSTAGEPVKTIPWRLILSKPPVWALIVSHFCHNWGTFILLTWMPTYYNQVLKFNLMESGLICVLPWFTMAVSANVGGWIADTLVSRGVSVTTVRKIMQSIGFLGPAFFLTQLSHVNSPAMAVLCMACSQGVLLGLSNTAGVLAGVFGTAATGYILQHGSWDNVFELSVVLYLVGTLVWNVFSTGEKILD

SEQ ID NO: 54250 - protein, 3293 aa, Zea Mays
MATEDEEREAADGTEVPVEAVVLGTFHLHAHPEGKLSSLMDIKSMGETIDSTEGTLKIPEDQVLVEAPSDVQLPPEHNLNGEASSLNGHTDKEEKVSVEQPHDNDQEEAELDQNNRINKEDAADGLSHGESTTEDSCLLKHKKDEESKGDEQQDLGVTVDDDLVQEDTLKTDNAIEQTDDGQQDQDQEPEKANENTEPASIANNDDVEIVAETPTGLQAPVESRMNDSDGIPETIDEETETDEPAQADGVVHPEDVAKVEDQQSQQDDTVDADVAPEEVKCEETDQQEEKPKSEAHEPTIDTREALNQEPAEETDDSMNKKIEETAHQRNMAAPKETTLEHEATMSATPVNTQVQDQEPLEEIEDTEKGIQPSSGSGDAIPEDQSNLSVTIDNDTVNEDTVIGIEQQDDGQQDEDLEPEKATEDTQPASMTNIPQVEVVTEASSGVQTPGDLNLNNSDAVPDTIDANTETDEPSKAHSVVHPEKKERFLEDATTEEPTEEVVKVEAQQSQQADVMDANMVQEEVPKSEHADEPATDAFEVLNQESVDEPAIQAPVTIQVQNQEPLEEIELAEAVDTEATVQQSSAAFEESVPEHQCNLGATHNTEQEDTLEASGQSKGGQEYQDLGPENATENTQQASMTNILDVEVITETPSGIQTPMEINLVISDAIPDATDGNTETDEPAKAHTFVHPEKNEVFPENTFTTKPTAEVVKVEDQQNQQDDAMDAEVVLEEVPKSERADEPATDALEVPKSEHADEPATDALEVLNQDYAEETNDPVNEKTEETGNQSNMPPSEETTPEYDTTTREPPVNIQAQNQESLEEREATVEESEVAEAVDTEAPVQQSSVALEDAVPEDQYNLIATNNTVQEDTQEAIGQTKEGQQYHDLGPENATENTEPASTANTPDVDVITEAPSGIQTSIEINLDISDAIPDTTDGNAKTDELVKVDGVILPDHKESFSEDTCVVEPTEEMIEVDQLGQQADAIHAEVLQEEVPEMIEVDQLGQQADVIHAEVLQEEVHKSEQSDEPGVDAQEVLNQESAEETDGLVNVKTDETEHKSNMVVPDDTIPEHDAQTREPPVNIQEQSRESVGDAEAVNTEAEMQQNSVAFEETTPENHVATSEPCSEIQHAHHVEPEEINGPEDGKDDEITNMSSREYLVRDNVLQSGPIIDIQPVQELEQIKTDEASNQTHAVIFNDLAQEDATATSEPQVTETELKDIEATEAEEITKLDHVTHSKELAVENDSTADEPHKGEIHQTLEQDLVEVKDTGTYHEKTISTSEDTVQDNLTEDEPSFGSQEVDDAESTEETKQNIAENIAEVSDVAIVDDAIEQNVLQTEDIVEMHKQELEREETERIEPVESEEASDQRNDAPFDYSAREDNTKESEIQQTESATETNEIEPTEIEAVPRESNTCVSEEPSQEDHIKESETSFDNQEVNITESSEVNDSHKDIISGGISDPSNTASAGDSSEGSNVPEGEPPEQAVQELGSEEIKNTQIDEVNETSLEMNATVFQIPSQEENPDTTKLHESTEVSNIEATEMHGNPHQSDLAAQSEEQTTEGISSGLKPESIEGNDTEAKKCQSTSQEKTISASESVPEDATTEPDVDHQQLQDQESAKLKETEADKFQEIVSSNTLSSEEFTSTEPSSDTEADNSQLAEETEDTEIVKSNTALAEAAAPETDATADTSSFHETDLEENKDTGTIETEDGMVSSDYTSEKMDTETMETEAVPHDSSDANIKEHTEDDTSTPNAPHAGTEPVHELESVEVSADTTEHPGETHDSASDELTPTEENTAVTEPSFSTQEVQNLTSQEIKDSEDDKTDEFSDINSFPIPGEADQVPRSETTPDVQEVEELGLTEETRDIEAIEPGDQQEDIVSTLEKPEIDGEPSADNQQVHEDKLPEVEDNKAIEAEASKQSNIATPDNAAEERNELESDPDPYAQPAEQVELSKDNENSQLVKTEETSDQSNFVVLRRTTEDSVAREIDPPVAIKQEQPVEEIKGVDATEAEEDFRTTQAVAIEKLASVNKIATVEPTYDIQRMDDLEATEEKKHAEAINEGDQSNIAVSEEQTPTYNGETPEDHHVESNEGTMGNETDNIILAHGIKDEIQKSAELKDGPCDLSETVLTTRRSENMIDEDNVQTYGNDTVEASNSIHQVKEEPDAGTEHNSSQMISECSGENETHVQDRDVDMWILTEGVIAEASQALLENDPQAAQDTIEKDDTTKSSEPISDHDSRQHCDVEALQQQSCETEALSILEQDEALQKIDSDQKQKEVEEIESQNDELQVDEQKHEDKRDDLAKEPLVEYQNFENRASNNTKDNDAFKVEQTEAANSEILKNKALHISKESTPSIMAMKVENIKETSEGTEEDDAAKNDNKDEQENAENVDIVSKTSTNEQGQTTDEIRKEEDPVHIIQASEKEIADEIEESKEIHEDNAICHDKLQTNSEKEESPQPHSNEPYNVDAKIDDTTSLCEEIIHDNTSINPREIEEIGENKGPDFTSEPSVESSIQNNVEDSSSHHKVEDEKLSMSEKNDVDTEAMQEINDESGADINQTEQCQEEITADDVLQLETEGNSFDKIEETASNEETETSTAATEAVTFNEDITDKVSGADGAPSNGSLKTFTDTGRDIDVPLVITTSKEESVNDTMENLNLDLPGHQAQDGNTAEKVLSLEEREREMPSSEKLLQTEPGENQIPNEQDEKDIRDENQTLKEKDEDDMQDTEFGEAKKEVQQELPVSHFLMNLILGKESSDANEDSESEAARKQGEATEDDSCTFISEQEESLGSLPTENKVDDNPTFVEQEKHEVKCSEETQEMVEEQSDDQLHTERSIEIDEDIKKNTRALEIPAYQDNPQDGISGELQTEEAAGVSTKMVTRDIDISSVVLDNRTVGTVCQEKMEVSTKNENGSLRSSLNDSTNTMAPQDDTLGEGQSRLVLEPLPEDKSVDVVSEQAPLLTESGMTDANDLSSDTTSAQNPVSTKPTESARVEATYSTDIQLENEEVDKKEEDQHANTTKDEVSKEIVESSHINLQKITRPEEKSNELETQITEPVCDSQAILAHEKEISEENFPTAVEIQADGPNMQINQDKQDEAADIETEMKPEKLGESNFQEHQDNGTEQKSPKETDEGDQQLVAKKEILTQEMDVHETVERPQQAVESPQQTVSITSNEDQELFDSKVQERDLNVVSPREASEAEENFVDVTKPEFSTDEEQSPKADAEEKIYDEKIKDIEGTKNLTDEAAIKTEAPGAAQKTRKKYSLLSGVGSKVKHQLAKVKKAIVGKPGHTKPVSPTA

SEQ ID NO: 54251 - protein, 362 aa, Zea Mays
MVIFLGDLNYRLDGITYDEARDMVSQRSFDWLRERDQLRAEMKAGNVFQGMREGPIRFPPTYKFQRHQSGLSGYDSGEKKRIPAWCDRILYRDSRPVPIAECSLECPVVAAITAYESCMDVTDSDHKPVRCTFSVDIARVDELIRRQEFGKIIESNKKVRSLLRELRSVPDTVVNANNITLENHQEDVILRITNNCETSKAAFEILCEGQTVRKQGGTQSEELLPRASFGFPLWLEVQPSMGLIGPGETAEVVVRHDDFLTQEEYVDGAQRNRWREATRDLEVVLSVTVTGSSSSSAEAVAHRVTVRHCCPAPPAPLPANRRSAAASPRDDVAASDNQSNHLHRSDLASFGSSEVRDLCGGL

SEQ ID NO: 54252 - protein, 219 aa, Zea Mays
MILKAGIKTGYESVLELVDAAVDPSLLEPIKETILRVHGVKGCHRLRGRKAGTSLYLDVHIEVYPFLSVSAAHDIGETVRHQIQKEHNQVAEVFIHIDPSYLVGPTMDLKRILKDSDGTNSEAIPRQQSAEAIVSNIISSHFSEKMALEHLMLHYVQGRVLLQVQVSMSPEILIRDAMEVAKQAEEEILRADASISQISLQLRLGQQIKQLQLASQERR

SEQ ID NO: 54253 - protein, 1092 aa, Zea Mays
MGKVNFVEIRSFWHIFRSFDRMWIFLILSLQAMIIIAWNGGTPSDIFDAGVFKKVLSIFITAAILKLGQAILDLIFGWKARRNMSFAVKLRYILKLICAAAWVVILPVTYAYTWENPTGLARTIKSWLGDGQNQPSLYILAIVIYMAPNIVASMLFLFPFMRRFLESSNVKVITIIMWWSQPRLFVGRGMHEGAFSLFKYTMFWVLLLATKLTVSFYIEIKPLVQPTIDIMREPIRTFQWHEFFPHGTNNIGVVISLWAPIILVYFMDTQIWYALFSTLIGGIYGAYRRLGEIRTLGMLRSRFESLPEAFNERLIPSDANKSKGLRAAFSSRPKKEKRAARFAQMWNVIITSFREEDLIDNREMDLLLVPYCKDRELDIFQWPPFLLASKIPIALDMAADSGGKDRDLTKRIKSDPYFSFAIRECYASFKNIINTLVFGQREKDVLAQIFAVVDQHIEDETLIKDLNMRNLPALSKKFVELLELLQKNKEEDLGQVVILFQDMLEVVTRDIMEEQDQLGTLLESAHGANSRKHEGITPLDQQDQLFAKAIKFPVDESIAWTEKIKRLHLLLTVKESAMDVPTNLDARRRISFFANSLFMDMPNAPKVRNMLAFSILTPYYKEDVLFSLQNLEEPNEDGVSILFYLQKIYPDEWKNFLERVGCKNEEGLREDEELEEKLRLWASYRGQTLTRTVRGMMYYRKALELQAFLDMAEDDDLMEGYRATEVMPEDSQLMTQCKAIADMKFTYVVSCQQYGIQKRSNEPCAHDILRLMTEYPSLRVAYIDEVEAPSQDRNKKIEKVYYSVLVKASVTKPDEPGQSLDQVIYKIKLPGNAILGEGKPENQNHAIIFTRGECLQTIDMNQEHYMEEALKMRNLLQEFEKKHGVRYPSILGVREHIFTGSVSSLAWFMSNQETSFVTIGQRVLANPLRVRFHYGHPDIFDRLFHITRGGVSKASKIINLSEDIFAGFNSTLREGNVTHHEYMQVGKGRDVGLNQISLFEAKIANGNGEQTLSRDIYRLGHRFDFFRMLSCYYTTIGFYFSTMCGLYMFSSMGGYILYLVDLMKRWLLEGGLCTMHLSRLRLHRSLLCSLGF

SEQ ID NO: 54254 - protein, 1005 aa, Zea Mays
MESAHKSGGGSAPGAGAGGEGVLCHACGYQYPNGHPSAKQRRAHRKHCGKPASAAAAAEGSGEHEASELLLGEVGAGAAECGGGSPGSAHEHGDAAEGGDSADPSGNGAGHRVVGDTSAEDCLISGSSVLSEITSESSRTDDGTLTTVATQYSEKGSSTEDGDPSDPAVGSEQIQDVPTSVVPAEPEDRAKFSSEISESEIQNPSIVRPESDAAGGGTSELTDDVARQQDEVAVTGEDAVFDAIDGSKSSERNSVQGDELNLSCQDILQTETGGGHSSTVVEEDSGSKDPTASDGQEILIEETEPNQQSKHALTGSFEKVPDIESVGSSAEKSVGTGDDLLQSGKGACHSEIPVDIIAQLQLDPTSGTADHPAISKGADNFEGQHYHTTDESIGAIPSTFEPAVGAKVVSVDVTADLTEDVCSSDITIDDGMQENVTSGTIVPSQVDILDSSPSATAHEVNIVGSINDDDEKSQDGKSSADLASYEVKEMVVKDNFEEKQQTKEVIVDPTPHEANNFPSTDNHEENEQNKEIVADTTSHKISAVQSMGSTEEKEHIEDFIAKLASEEIIFTSNRDIVEQQDETDMKTNYEIDRARNLEATEEIAAGGESNTGTITDVVEDKFPNEEITLGTISLNMADSSVKEEKMHDEEVNEDLDSRDDIMVHGPDNVKEKMCEETMSGPTLDKFSLPTSTDSPEEGNKDESTRADPMSHETNVAQTSDGADEEKKIRELAVDPTSSIGTMGNIGNAEDKKPSEETTTDPRPVENTTTQGTEDATDPKPVENTTPQGTEDADSSKQNENTASVGGVEGKKQGEETTADPRSVENTTVEGKKQGEETTADPRSVENTTAQGTEDAESSKQNENTNVMEEERVTVEDTTSREISAIESTDDLKGKATNENEEIADKEMVTDSDKNHVSLKVLLADKNVEAKEKEKKATSAKDRVLSFRRRVSKDNVSPPVKPGSPTKDKDGSGQQDWNSPARLPVEKKPKGRKQQWVPFICCSSVQ

SEQ ID NO: 54255 - protein, 91 aa, Zea Mays
MGFGSLGFPDRGPLDKVMRPRALESLQDHYVSQISTGLYHTVAVTSKGIVFGFGDNERAQLGQEYIRGCLKPTEIMFQKSMEDIPIAAPSG

SEQ ID NO: 54256 - protein, 79 aa, Zea Mays
MNILRSVVNGDVYEGIRALSIDKDNAPKWNPTTLEEVKYEDIDRLFQPFSPELELQVPSDDSNRWSGKYENTVYGRASQ

SEQ ID NO: 54257 - protein, 609 aa, Zea Mays
MKYVLVTGGVVSGLGKGVTASSIGVVLKACGLRVTSIKIDPYLNTDAGTMSPFEHGEVFVLDDGGEVDLDLGNYERFLDIKLTRDNNITTGKIYQSVIDKERRGDYLGKTVQVVPHITDEIQDWIQRVAMNPVDDTEEPADVCVIELGGTIGDIESMPFIEALGQFSYRVGPGNFCLVHVSLVPVLNVVGEQKTKPTQHSVRGLRGLGLMPDILACRSTQPLEEHVKVKLAQFCHVPIPNIINLHDVTNIWHIPLLLRDQKAHEAILKVLDLQCASKVAREPQLSEWTERVSRCDRLKSPVRIAMVGKYTGLSDSYLSVIKALLHASVALDRKLVVDWVPSCDLEDSTAKETPDAYEKAWESLKGADGVLVPGGFGDRGVQGKILAAKYARENNVPYLGICLGMQIAVIEFARSVMKLHGANSTEFDPTTKTPCVVFMPEGSKTHMGATMRLGSRRTFFQATNCKSAKLYGNACYVDERHRHRYEVNPDMVPEFEKAGLSFVGRDESGERMEIIELPTHRFFVGAQFHPEFKSRPGKPSPLFLGLVAASSGQLDHLLQRGLTSSAGRDICGKGGAQKPKACQNGHVMKPLNGLVHGHYSATRCNGVIPI

SEQ ID NO: 54258 - protein, 447 aa, Zea Mays
MAEQERRDAEAGGDAAGAAVASHTSSMQRVKVYRLADGGKWDDQGTGHVSIDYIEGSKELGLTVLDEDDNETLLMHNITSDDIYRKQEETIISWRDREAATDLALSFQEAAGCSYIWEHICEIQRNLQFSNLGAPEVGRRQSSESLEASRIMHSNDDSFRSANGEFRELPPVELSNLPFILKTVLEGGITDQIHMAELITQDRDFFPKLVDIFRMCEDLENIDDLHMIFKLVKGIILLNSPSIFDKIFSDEFILDIIGALEYDPEVPRVQKHRAFLKDHVVFKEAIHIENVSVISKIHQTYRIGYLKDVILPRILDDATLGSFNTMIHSNNASVISMLKDDTPFIRQLFARMRSSDISMESKRELVLFLHEFCTLSKSLPVVQQLRLFRDLSGEGVFEIISDVLQSQDRKIVSAGTDMLILFLNQDPNLLRSYIVQQEGNSLLGLLA

SEQ ID NO: 54259 - protein, 219 aa, Zea Mays
MNPKSSSYKFTPKEDAVSGFPIDPPARAAADNGYPQRVPLMQAGRSSSTLGRSSGMDPKAQRFHTSQIVTTEMSGQSTASGQRGNAPKMSNLGESARRQYLREHRSSSRYSQLTAADPSDRPEWNHQFQERPSSSHRKDDAVANKEHTVVNGTKKNRIHYSGPLMPPGVNMDEILREHERQIQQAVRRARLDKGKGKHSGERDQSESLLCTTGNLRADR

SEQ ID NO: 54260 - protein, 334 aa, Zea Mays
MPAGSGAPALARQGSVYSLTFDEFQTTLGGASKDFGSMNMDELLRNIWTAEESNAMAAAAPATATATAAASVDAHAQQQQQQQHGAPIQRQGSFTLPRTLSQKTVDEVWREIVSLTSGEDAQQVAAPAPAPAPEPEPAPAPAPLPAQAQAQQTLGSMTLEEFLVRAGVVREDMGGHQTLLLQPHAQGLFSQGNAVAPQTLQLGNGMVAGVVGQGLGGGVTVAAPTTPVVFNGLGKVEAGDLSSLSPVPYPFDTALRMRKGPTVEKVVERRQRRMIKNRESAARSRARKQAYIMELEAEVAKLKDQNEELQKKQVEMLKKQKDERKTVDLSGCRF

SEQ ID NO: 54261 - protein, 185 aa, Zea Mays
MSPHEERLILELHARWGNRWSRIARRLPGRTDNEIKNYWRTHMRKKAQERKRNMSPSSSSSSLSYQSGYPDTPSIIGVKGQELHGGSGCITSILKGTHPDMDGYPMDQIWMEIEAPEVPSEVGFVGGNENVCSSLATPLPPPTVWEYYPEVCWKLDDEIKMAPQFGYIVKELTPASDTIYIGSDY

SEQ ID NO: 54262 - protein, 526 aa, Zea Mays
MSKPWGGVGAWALDAERAEEEEREQVLAFPAPEPPAAAGGAASFPSLREAASAGGKGKSKKKNKGTTLSLSEFTTFGAAAAQRRAAPVEPKGLTHEEMMLLPTGPRERSAEELDRSRGFRSYGGGGGGGFGAGAGGERRGGFDDEGRRGPGRSSDLDMTSRADEADDWGATKKFTPAPADSGRRDRFGGPSPLGRADDIDDWSRDKKPLPSRYPSLGSAGGFRDSPGFRDSSASSDADRWVRGATPMPHNGQGAGERPRIVLNPPKRDPSTASTPPAEVARNRPSPFGAARPREDVLAEKGVDWKKFENEIDQKTSRPTSSHSSRPNSAHSSRPGSPGSQVSAVGSEGAPRARPKVNPFGDAKPREVVLQEKGKDWRKIDVELEHRAINRPESDEERNLKEEINLLKVDLKEIEGKMSNGSEQTSVDAKDLSEKISMLESQLEQLSRELDDKIRFGQRPRSGAGRVTTLAPTSLGEEPQATVVDRPRSRGGMEPPPRQEERWGFQGSRERGSFGGSRNSDRIDAHW

SEQ ID NO: 54263 - protein, 356 aa, Zea Mays
MGNSRFFSYDELYQITDGFSAQRLLGEGGFGSVYKGRLPDYKDVAVKRLKDGGGQGEREFQAEVEIISRVHHRHLVSLVGYCISNDQRLLVYDFVSNNTLHYHLHGHGMPVLEWSARVKIAAGAARGIAYLHEDCHPRIIHRDIKSSNILLDNNFEAKVADFGLARLALDAVTHVTTRVMGTFGYMAPEYASSGKLTERSDVFSFGVVLLELITGRKPVDASRPMGDESLVEWARPLLSRALDTGDLEGLVDPRLEMKLDEVEMFRMVEAAAACIRHSASRRPRMSQVVRVLESSADIDLTNGVQPGQSQLFNVANAAEIRMFRRMVAGAQDDDSSDLTQYDWSRGSDAAPGSRIL

SEQ ID NO: 54264 - protein, 389 aa, Zea Mays
MDDNEPDPASSSDTTTIPDEDTSNESQKAEQDNCDLYRGEWVTDSSGPLYTNNSCPIITQMQNCQGNGRPDKDYENWRWKPEQCNLPRFDARKFLELMRGKTLAFVGDSVARNQMESLLCILWQVDVPQNRGNKRMHKWLFKSTKTTIARVWSSWLVHRSTEAVGIAPKGIDKVFLDIPDETFMEFLPRFDVLVLSSGHWFAKRSAYILNENVVGGQLWWPRKAGKMQVNNVDAFGISVETCLTAVVNNPNFTGLAIVRTWSPDHYEGGAWNTGGSCTGKVKPLNEVVRNGFTDAMHEKQVAGFRKAVKNAGEHGSRLKLMDITEPFAFRADGHPGPYRSPDPNKKTQRGPDGKPPPQDCLHWCMPGPVDTWNEMLLETIRREFETDRT

SEQ ID NO: 54265 - protein, 281 aa, Zea Mays
MMAIGLMNVVGSCTSCYVTTGAFSRSAVNHNAGCKTAMSNVIMALTVMVTLLFLMPLFVYTPNVVLGAIIIAAVIGLIDFPAVYHIWKMDKMDFLVCVCAFAGVIFISVQEGLAIAVGISIFRVLMQITRPKMMVQGNIKGTDIYRDLHHYKEAQRVSGFLILAIEAPINFANSNYLNERIKRWIEEESFEQDKHTELHFIILDLSAVPAIDTSGIAFLIDIKKSIEKRGLELVLVNPTGEVMEKIQRANEAENYFRPDCLYLTTGEAIASLSALAKMTKP

SEQ ID NO: 54266 - protein, 338 aa, Zea Mays
MAPGSKAERKAALDAGAWMFNVVTSVGIIMVNKALMATHGFSFATTLTGLHFAMTTLMTLVMKWLGYIQPSYLPLPELVKFAFFANLSIVGMNVSLMWNSVGFYQIAKLCIIPVLCILEIMFDKVRYSRDTKLSIVLVLVGVAVCTVTDVSVNSQGLLAAVIAVWSTALQQHYVHHLQWKYSLGSFNLLGHTAPAQAASLLVLGPFVDFWLTNKRVDAFNYTSIVTFFIVLSCIIAVGTNLSQFICIGRFTAVSFQVLGHMKTVLVLTLGFFFFGKEGLNFHVALGMFLAVIGMIWYGNASSKPGGKERQVYSTPSEKTQKHGVLSSQSELDQKNCRP

SEQ ID NO: 54267 - protein, 477 aa, Zea Mays
MTLQQILARAVGDDAILNGSHVVDFIDDGSKVTAILEDGRKFEGDLLVGADGIWSKVRKTLFGHSDATYSGYTCYTGIADFVPPDIDTVGYRVFLGHKQYFVSSDVGAGKMQWYAFHNEEAGGTDPENGKKKKLLEIFDGWCDNVIDLINATDEEAVLRRDIYDRPPTMNWGKGRVTLLGDSVHAMQPNLGQGGCMAIEDGYQLAVELENAWQESVKTETPIDIVSSLRRYEKERRLRVAIIHGLARMAAIMATTYRPYLGVGLGPLSFLTKLRIPHPGRVGGRFFIKYGMPTMLSWVLGGNSSKLEGRLLSCRLSDKANDQLYQWFEDDDALEEAMGGEWYLIATSEGNCNSLQPIHLIRDEQRSLFVGSRSDPNDSASSLSLSSPQISERHATITCKNKAFYLTDLGSEHGTWITDNEGRRYRVPPNFPVRFHPSDVIEFGSDKKAMFRVKVLNTLPYESARSGNRQQQQVLQAA

SEQ ID NO: 54268 - protein, 1057 aa, Zea Mays
MHIPKRLVLVNSGLNQAATNFYSFDQGRIAAYRLYEMISRSTSSTNQEGTTLPQVQGNIEFRNVYFSYLSRPEIPILSGFFLTVPARKTVALVGRNGSGKSSIIPLMERFYDPTLGEVLLDGENIKNLKVEWLRSQIGLVTQEPALLSLSIRENIAYGRSATFDQIEEAAKTAHAHGFISSLEKGYETQVGRAGLALTDEQKIKISIARAVLSNPSILLLDEVTGGLDFEAEKAVQEALDVLMLGRSTIIIARRLCLIKNADYIAVMEEGHLVEMGTHDELLNLDGLYAELLRCEEATKLPKRMPTKNSREHKSLQSEDALVSQYFQESSSPKMAKSPSLQRTHGMLQFWRSDANRNSHDSPKDLSPPSEQTMDNGIPMVAIETERTPSIKRQNSFEMKLPDLPKVDVHPIQRQSSKNSEPDSPISPLLTSDPKNERSHSQTFSRPQSEQDDTSSERSELDEVQHQKPPSFWRLATLSIAEWPYALLGTIGAAIFGSFNPLLAYTIALIVSAYYQIEIRDMRHEVNRWCLFIVGMGVITVLVNWLQHFYFGIMGEKMTERIRRMMFSAMLRNEVGWFDKDENNADTLSMRLANDATFVRAAFSNRLSIFIQDTAAVSVALLIGMLLGWRVALVALATLPVLVISAIAQKLWLAGFSKGIQEMHRKASLVLEDAVRNIYTVVAFCAGDKIMELYRLHLGKILKQSLVQGLAIGFGFGLSQFLLFACNALLLWYTAISVDRQRLTIATGLKEYILFSFASFALVEPFGLAPYILKRRKSLTSVFEIIDREPKIDPDDTTGLKPPNVYGSIEFKSVDFSYPVRPDILVLSNFNLKVSGGQTLAVVGVSGSGKSTIISLIERFYDPVSGQVLLDGRDLKSFNLRWLRSHMGLIQQDPVIFSTTIRENIIYARHIATEAEIKEAARIANAHHFISSLPHGYDTHVGMRGVDLTPGQKQRIAIARVVLKNAPILLLDEASSAIESESSRVVQEALDTLVMGNKTTILIAHRAAMMKHVDNIVVLNGGRIVEQGTHDSLMDQNGLYVRLMQPHFGKGLRQHRLV

SEQ ID NO: 54269 - protein, 163 aa, Zea Mays
MHTSAVSVAVLPQADEVDVQLRNEDLRIDTYRSGGSGGQSVNTTDSAVRITHIPTGTVVAIQDERSQHMNKAKALKVLRARLYELERRRLHMDRSKLRSEQIGSGDRSERIRTYNFPQGRVTDHRVGVTHHSIADVMEGESLDMFVDALLLQEEMDAIASFGA

SEQ ID NO: 54270 - protein, 209 aa, Zea Mays
MTNESKVAKQREWKAKQTVVGRPGNKEPLLPEPKSVFQKPVGVSSYVRYNSRGRGRGRGRGQSHPITKFTEDFDFMAMNEKFNKDEVWGHLGKRIGQLNDEPNGYEDDVIEDDEISPRKPEAKAVYVKDDFFDSLSCNQIDNGGRNGRVKFSEQRKIDTETFGDSARHRPMGIRGRGPRGGARGRGYYGIRGYGYTGRGRGYSYPNHQP

SEQ ID NO: 54271 - protein, 228 aa, Zea Mays
MKVRAGFYRNSLLPKGKAALLTPAVHKQNTIVASENENPPLMPAIMTPGGALDLATVLLGNRIIFIGQYINSQVAQRVISQLVTLAAIDEEADILIYLNCPGGSLYSILAIYDCMSWIKPKVGTVCFGVVASQAAIILAGGEKGMRYAMPNARVMIHQPQGGSEGNVEEVRRQVGETIYARDKVDKMFAAFTGQPLDMVQQWTERDRFMSSSEAMDFGLLDALLETRY

SEQ ID NO: 54272 - protein, 79 aa, Zea Mays
MDLVAWVTAKVEQYGLESVLDQNLDEQFKDEMCMVLKIGLLCVSNLPTKRPSMRSVVMLLLEVKEENKPKLKAVATLPI

SEQ ID NO: 54273 - protein, 182 aa, Zea Mays
MPDKAVDDVMEAAVGAHFSGLRLEALRLSTSAPSSPSSSPAAAAHTHSNGAVYANGTTELPSPAAARQPFVIGVSGGTASGKTTVCDMIIQQLHDHRVVLVNQDSFYRGLTAEESAHAQDYNFDHPDAFDTEQLLECMGQLKCAQPVNVPIYDFKKHRRCSESFRKSICNFIFDPSLSAPEE

SEQ ID NO: 54274 - protein, 425 aa, Zea Mays
MHARFLSAPSPASAAPSPYVRLAFTGALPRRACWKPRGPASASAPPPRPLHSLCARASMQPASPAHDGHGGPPVHGVSNTVIGVLGGGQLGKMLCHAASQMGIRIVILDPLPGCPASSVCDEHVIGSFNDGDTVREFAKRCGVLTVEIEHVDAATLEKLEKQGVDCEPKASTITIIQDKYRQKKHFSRYEIPLPDFMEVDTLRSIEEAGEKFGYPLMVKSKRLAYDGRGNAVAKNKEELSSVVASLGGFERGLYVERWTPFVKELSVIVARSRDNSTVCYPVVETVHKENICHVVEAPADVSNKIKKLATSVAEKAIKSLEGAGVFAVELFLTEDDQILLNEVAPRPHNSGHHTIESCYTSQYEQHIRAILGLPLGDPSMKAPAAIMYNILGEDEGEAGFFLAHQLISRALTIPGTSVHWYAKPG

SEQ ID NO: 54275 - protein, 109 aa, Zea Mays
MSAAPAAGGQGGGGIDAALLDDIIRRLLEVRTARPGKQVQLSESEIRQLCTVSRAIFLSQPNLLELEAPIKICGSPVDASRQQHDGAKLEVSIGQGQLPEQRNQIIYHT

SEQ ID NO: 54276 - protein, 92 aa, Zea Mays
MLAALMYVLVPMPCLFFGGGSTHFLTSREGGGWINAAKFLTGASAMGSLAIPAILRHAGLIETGAMFIEFTSFFILVCTVLCFHRATLDEDW

SEQ ID NO: 54277 - protein, 662 aa, Zea Mays
MQPTPVSSEGIEGFRASHPMLLVVAGDETNGLGAVQGGRLSALIRDTNSEPQAGSCISTPTVVRFYSLKSHTYVHVLRFRSAVYLVRCSPRIVAVALAAQIYCFDAVTLENKLSVLSYPLQGAPGVNIGYGPMAVGPRWLAYATNTPLLSNTGRLSPQNLTPSPGVSPSTSPSSGSLVARYAMESSKQLASGIIDMGYKTFSKYRQELLPDGSNSPLSSSPGRRSGKIPSSVHPLEADNAGMVVIKDFTSKAVVSQFRAHTSPISALCFDPSGTLLVTTSVHGHNINVFRIMPTCVANGTGATRYDWTASHVHLYKLYRGMTSAVIQDISFSHFSQWISIVSSRGTCHIFTLSPFGGDASLQPQNSHSDGPPLAPCQSRPWWSKPSFLMDQQLHQVPSTVTNSVVSRIKNNNSGWLNTVSNVAASASGKLSVPSGAVTAVFHNSIYQGSLPVPSKANALEHLLVYSPSGHVIQHELLPSSGSESSGSSPRVGSGHNSQLQDDEMHVTAEPIQWWDVCRRTNWPERDENIANIVLYNQRSSMMAMDVSDCEDSEHSDSTASNDGISGKEIMRVRERSSWYLSNAEVQINSWRIPIWQKSKICFYVMDHPAAESVESVSSGGEIEIEKLPLHEVEIRRRELLPVFKQFLYSERHSSDRNIANGV

SEQ ID NO: 54278 - protein, 275 aa, Zea Mays
MCCEFNVHVLVRATTQSTTEVTHQTGKGKHHQRRRERTPSLSSRTARSYPVSPFSGLGESEMASSASRFIKCVTVGDGAVGKTCMLICYTSNKFPTDYIPTVFDNFSANVVVDGTTVNLGLWDTAGQEDYNRLRPLSYRGADVFVLAFSLVSRASYENIMKKWIPELQHYARGVPVVLVGTKFDLREDKHYLMDHPGLVPVTTAQGEELRRQIGAMYYIECSSKTQQNVKAVFDAAIKVVIQPPTKLREKKKKKSRKGCSMVNILSGRKMLCFKS

SEQ ID NO: 54279 - protein, 210 aa, Zea Mays
MELVRFNDEARGLDVLPTTISRFRAGGDEQTARLLEDIIYPEEVTHCSAGVRWFRYLCLRSHGNHPTSCSVPGLEPRSSGLPGDGTADGKTAREAEGEPTPKLAKDVRGDDKMVQQVEDELPSRIAQDANGRSKVTEHVEDGLAKCKLDDSIEKYEELVIRTFHRVVREYFRGPLKPPFNTEARKAAGFEPAWYEPLAVKEACIEGETIE

SEQ ID NO: 54280 - protein, 245 aa, Zea Mays
MDLKGAHYEVKAFEDYKFLNSSYVPVLRQLESANLQKFYFENKLENATKDASNMKFRNPKYLSMLNHLRFYLPEMYPKLHRILFLDDDVVVQRDLTGLWKIDMDGKVNGAVETCFGSFHRYAQYMNFSHPLIKAKFNPNACGWAYGMNFFDLDSWRREKCTEQYHYWQNQNENRTLWKLGTLPPGLITFYSTTKPLEKSWHVLGLGYNPSISMEEIRNAAVVHFNGNMKPWLDIGMNQFRHLWTK

SEQ ID NO: 54281 - protein, 158 aa, Zea Mays
MREIMHAMWRPQKFKAIYLLATLYVLTLTLPSAAASYWAFGDELLTHSNALALLPRTPFRDAAVVLMLIHQFITFGFACTPLYFVWEKLIGLHDCRSLCKRAAARLPVVVPIWFLAIIFPFFGPINSAVGSLLVSFTVYIIPALAHMVTFRSPQSREW

SEQ ID NO: 54282 - protein, 993 aa, Zea Mays
MRGSGTATTASRHTVPPTASVSAGPAFTSASSTVSALVSFSEPCPGRGGFVCNATYCNLIVYGSGSVDPSTLQVLSPGLRYSVAVAISPDAEYGRLVLVMGRGFCTDAAGHPFTRTPNSTFTLRFDRRSDSMNITATVAEKMVQIQGVTRLVQASNEEEGLRIYLAFAQPVLNSSEQILRALTATDAVAVHLTPTNRSTLGNRRFGYVVKKMSDAAAIVSVACDTSSIISRQGTPVVPAEPFTFLYDTQRPWVKLGTSTRRTSSRDILVLIKFAKPVFNFSSSAVQVSGGNVLSFHEASKSIYTLQIQAVGQLVSVQVAENAAMDVAGNPNLASDRLQVRHYSVPASSSWIAAITTVVFLTTAAVAALLTVSTSSLVAAGAVSRPSSYMISEPSRNVLRMACHIQIFALSRWLSANLPIEYYEFAKGVEWSIPYMRLPWEGPAADPYLGYSTMPAIAYSESELLDRSAVGGAANISSYRPRAQQGQPVTPAQIIPSDPVFPTEIPEDGKPTPPVQTPGGDATPPVMPVQTPLPLDGMPLTAMEYRSFFENPDMKPEAQIIMKLQDLDGWKYFGRNMFWLGVIGGGLILLHLLTLLYFKLRYRDRERRRHGYAALLLPRLEIMVVVLAMPCVAQAAAALIRGGTTCGLVVGIVLTAVLTSVLVALLLFLSLGITMGKLLQYREVHHEEGQEEYHWYQDLARRTLGAGKRGQWTWKDPRRAACLPRLGPLFEDLRGPPKYTRGGGGGKRRAEGGGPERRVIASEDENEGSRAPLVQQLLGVLRIYLTLLESVKRVAVGIVAGAHASSGRSSRAHAVAVLSVASFQLLFMLLGKPFVKKRVQLVETLSVASEVAVFAACLALIDRTASSGGWLPDGEARGVGLAMLGAFVLGFAAQVCNEWNALYRQARLLSADRSSFLDGAKTAGLGLLVLVLPSSALGDHRDPPPPDGGGGAGESVSASTAADGGRGGSSNNERWWLGQLWEMAKASFSKESNA

SEQ ID NO: 54283 - protein, 187 aa, Zea Mays
MSKRLTEEAEQYFEDFLSNVEDTDFSSFDGEKSDSSSTRKDLLLLHAMTETPVKLPEVALPAEADGVVLPWLQWETTNDFQTSPCKTKAQGESTRGSTSNQTASSRGSWSPGDHATSSVASKNSLLTRFGEVGICRSSLSDYARTLSFHIDDYLHLRQSEDLLLETWMQKQRIDSGGLVLCSKSTIL

SEQ ID NO: 54284 - protein, 485 aa, Zea Mays
MICLVLALGWAAASIVRKGVIKNMRRNIVDGNSFAFLCDNIDELEHSVQENLPRVSVVMPLKGFGEHNLQNWRTQITSLYGGPLEFLFIVESKDDPAYHAVSRLITEYKDNLEAKVVVAGLSTTCSQKIHNQLIGVEKMHKDTKYVLFLDDDVRLHPGTIGALTKEMEKNPEIFIQTGYPLDLPSGSLGSYCIYEYHMPCSMGFATGGKTFFLWGGCMMMHADDFRQDRYGIVSGLRDGGYSDDMTLAAIAGQHKRLIFSPPVAVFPHPLASDLSFSRYWNYLRKQTFVLESYVSNVNWMMNRALFTSHCYLSWGFVWPYIMALVHVLAALRAPYSKVVKEASDSSWGLFLVGLLFTCTLIELVSMWNLTKVEIQLCNMLSPEGPKVSLDSYNWGLVFIAVLVDNFLYPVSAIRSHFSQSINWSGIRYYLRDGKISKIERENSSKYTDLGGKHLYGKRTYPPNKSLLGYLSRTLVQWHQPKKYDV

SEQ ID NO: 54285 - protein, 177 aa, Zea Mays
MLLVVKKATQEAGSKFELLGFASVHNFYHYPESIRLRISQILVLPPYQGEGHGLGLLEAINYIAQSENIYDVTIESPSDYLQYVRSSIDCLCLLMFDPIKPALGAIVSSLKETNLSKRAQSLRMVPPVDLMETQPEDLRTQEQQLNELVDIQIEEIDGVAKNVTSRGKDKMAELAVQ

SEQ ID NO: 54286 - protein, 60 aa, Zea Mays
MWHLRCNRVPGLKCSCYRQLTTDLVYFRPYCIITGIGWSIFAVFHSILMVKLLLGVCCPD

SEQ ID NO: 54287 - protein, 99 aa, Zea Mays
MYLACHAPVRRMLVRSWLPVLNVCRDIVQPMHSQKSTNCQELEGAFLQIISTLPFLEAQELLQQCLGFSTRNVDDCPHLVTAFKTWFRRAGRAPLGGEN

SEQ ID NO: 54288 - protein, 232 aa, Zea Mays
MKVRTFQIIVLQGIVGSLPWAAVVFFTMWFELIGFDNSSSAALNSFFAIGCASGSFLGGVIADVLSRYYPDSARVMCAQFSAFMGIPFSWILLTVIPQSVDYWSAYAVTLFLMGITISWCATCANNPMFAEVVPPKHRTMIYAFDRAFEGSFGSLAAPAVGLVTEKIYGYNAKAVDLSHGSVDGAYALSRGLLTMMIVPFALCLMFYTPLYTVFKRDRENARLASIKEQELT

SEQ ID NO: 54289 - protein, 164 aa, Zea Mays
MNYRMTQEFKPPFRVTALIEEAGPARAEVLLKIRADFSASATANTIVVQMPVPAYTMRASFELEAGAVGQTTDFKEGSRRLEWNLKKIVGGSEHTLRAKLTFSQESHGNITKEAGPVNMNFTIPMYNASKLQVRYLQIAKKSKAYNPYRWVRYVTQANSYVARL

SEQ ID NO: 54290 - protein, 119 aa, Zea Mays
MRPWSSTSRPSWRRSSPCAGTPGTAMCPWGTSSPRRRPPPLTAPSTTSRRPPSASSPPSPPPAPSRRPSTASARSTAPPPRSAGPMPATRWRSSTSRSPWMRCSWTTTPASGLCKVEPG

SEQ ID NO: 54291 - protein, 280 aa, Zea Mays
MRKEMVQYLQTGQESIARIRVEHIIREQNILAAYEIVELFCEFVLARVPIVEVQKECPLELREAIASIIFASGRCSDLPELMHLRNLFTTKYGKEFVAGAMELRPDSSVNRTIIEKLSVKAPSGDSKLKVLKAIAQEYNIEWDSSNTEAEFNKKYEDLLDGSGSSVHQIQTPIIEGSVSSPVVSAPRDKTPALNSPVIDAEKHQVRESPTSPAGGARAGVVTKGNVVTMGHHSPAEEMPSTSPSSSDALEKARAAIAAATRASAAARAAAELAKVKITNQ

SEQ ID NO: 54292 - protein, 428 aa, Zea Mays
MVACSRGLAWPPFDLTTARGAASWPRRRAAIRCCCAGADAQPQRRLSRAAAVAPERAEEWRIDGNKPSAAAPGRRRTSLTAMPPLPFPAPRSRRQVKQPDFYPRCTPRGSAPQSRDTPPKRDTGIASEKEWGINLLDEAVKESGINEDGSTWYRESGDDIGENGYRCRWARMGGQSHDGSTEWKETWWEKSDWTGYKELGAEKSGRNAEGDSWWEKWKEVLYQDEWSNLARIERSAEKQAKSGIENAGWYEKWWEKYDAKGWTEKGAHKYGRLNEQSWWERWGEHYDGRGFVLKWTDKWAETDLGTKWGDKWEEKFFAGIGSRQGETWHVCPGGERWSRTWGEEHFGNGKVHKYGKSTTGERWDLVVDEETYYEAEPHYGWADVVGDSTQLLSIQPVERPPGVFPAIDFSSAPPPKDAPPGMPPSPLD

SEQ ID NO: 54293 - protein, 107 aa, Zea Mays
MRLTSTTPIKELPWTSASLALCAAGSNTGRPEHGGSLHRRPDLRRLRSISVQLGCSSFRSIGSGKLSSMKLNCTGAEEAVPCLVSCLRPDVQRSSSYRGRIRRYSEF

SEQ ID NO: 54294 - protein, 294 aa, Zea Mays
MEDEGSGDRRRAAEALVSPPPRAKTVTIPVARDFIIPHAADQCRCSGFEVAEEGSPTGSSALGPASAGGGVPCEGALQDTPDYIRRSAARHRVAPLELFSSASPPPAGLGAADAVASSAKCHATEGEAVGGRQPQETRVDKSDCWGISEQQYGVLLREEEECRKLLDDLMAENELKTRECREAQESLRDLRMELMRKSMHVGSLASAVEGQVKEKSRLCQLLKALGEKLKVLKSEHQNLRQESLEYRKCVLDASQMSATIQRYVNQYVSLECEFKDLKEKFNEEAKERKDLYNK

SEQ ID NO: 54295 - protein, 386 aa, Zea Mays
MAGVSGRGAAERVAAAVEAVGSGGWEFRNAYRRQLLALSRRIRLLGPFVEELREVPCVPAVEPERALAVLADALEEALDLLQLGRDGSRIFLVLDRDKVMKKFHESIVQLEQALCDFSYDKLDISDEVREQVELVHVQLKRAKERVDMPDDEFYNELLSLYNKSHDPSAELDILGRLSEKLHLTTITDLTQESLALHEMVASGGGNDPGEHIEKMSMLLKKIKDFVQTQNPEMGPPMTTKLMDPNGEPRPRNIPDEFRCPISLELMKDPVIVATGQTYERAFIEKWLASGHQTCPNTQQRMPNTTLTPNYVLRSLIAQWCEANGIDPPKRSTQPDKPTSSCSSSERANIDALLSKLCSADPEEQRSAAAELRLLAKRNANNRICIA

SEQ ID NO: 54296 - protein, 752 aa, Zea Mays
MFWRMTGLSAASPVDTILDKENFTLEELLDEDEIIQECKALNSRLINFLRDKAQVEQLLRYVVEEVPDDAERKRSFKFPFIASEIFTCEIDVILRTLVEDEELMDLLFSFVKPDHPHSTLLSGYFSKVVICLVLRKTAPLMSYVQGHPEIVVQLVDLIGITSIMEVLIRLIGADETIYSNYGDTLQWLENTNVLEMIADKFNSSDSPEVHANAAEILCAVTRCAPPSLAAKICSPSFVRRLFHHALEESRPKSVLLHSLSVCISLLDPKRLASASYQAFKSNLSHGALVMASPETVDGMLESLGNLLNLLDTSAAESVLPTTYGCLRPPLGKHRLKIVEFISVLLTIGSETAEKELVRQSAIKRSIDLFFEPEVVEHVLHECDIVGKILVSERLSSLSTESNGPTVPTEGKTHPRVGNVGHMTRIANKLIQLGNSNNTIQAHLQENNEWVEWQTNVLVKRNEVENVYHWACGRPASLHDRGRDSDDDDFRDRDYDVAALANNLSQAFRYGIYSSDDIEEAQGSLERDDEDVYFDDESAEVVISSLRLGDDQEGSLFTNSNWFTFDGERGIDDRSSASVPSSSPNSEETSLKTEEADDGKVIGTEDEMETVYLGNGSVEEVKDVAECTEQPNCCTEEERLKNEEGMEWHPNASNNDTEAEAAAESSAPSVEIVAEKTVDEPLEVGRKLDEPAESSLDSSVSVALPAPVNGSEPANSEVSSEQVAHATDVQQPVKEAPAEDDDAKKTDAAKTNE

SEQ ID NO: 54297 - protein, 323 aa, Zea Mays
MSKAHAYAPLDDSLTLQGPLCTVCEESNESESKSSSCEGKAVGFMYSSAGKDSVLVTAWGSGLLQVDALADEIQPRWNIGVPSRLNVDSHGQINNVAMICDSNSQDPLALRSHRPSSTGSNVKSNIEAVWMGHSPPLLRLAIVDLALPKTPNDNSLSLFADPLVPERFYCAHGGGLDMVTLHFLPFSYPEMSSTPPSVHPVLTTGNSETSSPFLSGFVTIADAYGHVQLAGITCLGECFVVEMKGWKEPAPLQLDLESKIVKDVEPPATGMISKELIAGPDPPILPSSSSLKSLTPDSIEGKSTLHHYIKVFHEYYVEYGHKG

SEQ ID NO: 54298 - protein, 666 aa, Zea Mays
MAQYRQQYGVGFSDSRGHHHQVLPDWHRPHHASAKSSSRIRRPGKPAPRRRSPAAAAAVAAALLLAAVFLLSRRISRSPAEISQDSSARETLPDWNQSKSWKELKFGHGGGGRSARDSRYWDRDDRRRDEDYTEDEKEKISGGSGTSGDAGGSSDKGTTSEGGGEDKGLTTGSDAKDVPEVSEGGKGGTLYNEGGRKELEQYEAAAMGATGTGVKEVDPDDEYDDGIDTQDEMEDAHLHSSDGGRKLGGGSHEGAEKKDEVATERHTEAGGGIAGSHDISSPDKKKVSGTGDKKHGPKKKPKRKKSGSICQMKFLNSTAQLVEPVRNEKFASFKLEYVEVEERPIGSEFWEPRFAGHQSLQEREESYKAHDQQLTCAFVKGPNGTSTGFDISDDDRKYMSKCHIAVSSCIFGNSDRLRTPFGKTITSLSKKTVCFAMFLDEVTLHTLESEGQKMDSMGFIGIWKIILIKNMPYNDMRRVGKIPKFLAHRLFPSSRFSIWLDSKLRLQTDPILILEYFLWRHGYEYAISNHYDRHCVWEEVAQNKKLNKFNHTIIDQQFEFYQADGLTRFNPSDPNKLLPSYVPEGSFIVREHTPMSNLFSCLWYNEVDRFTPRDQLSFAYTYLKLRRINPDRPFRLNMFKDCERRSIAKLFHHRSEESHSGAQLTR

SEQ ID NO: 54299 - protein, 73 aa, Zea Mays
MRQHTPPAGCSWLRPCFLPDDLLQLLAECRALLLHRSLTSLSVRNIGIYIMDAVSHLLGTGSHHCQLSNACMQ

SEQ ID NO: 54300 - protein, 648 aa, Zea Mays
MMFRSFQAPAKGVMAAVGSLQPGVETLHVQDYKDAPPAKAVAAAVESLQPAMESLHVQEFKDAAPAKGVSAAAVGSLQPGMENLQVQDYKDASMYYGAYPAYPYGAPYGGWGEYSTYLSHDGAQTPTAGAYADMYYGHAAYGHIYGSQNYQYPSTYSKQQNSTAKLSSNGKSEKLAPAPEGDVSTIVVDEVKVLKNPNPTLKADRNAPGSNGSYGRSSVRSGNYQNQTSWSHYPYYSSEMFSDKQQKFTSNHNSTAPNDKTKGQSRNQNTRQYPHLMGLQTPTSPSVYSANGIYRYDGSYGPSLWYGSHMYSSGLYGGWNSLYDGKYRTRGRCNNGYYAYGNGSLDGFNELKRGPRSGMYTNQLGLGATTEVPAKEQDLLSANGSHPAMKDQYNRADFAETYSDAKFFIIKSYSEDDVHKSVKYNVWASTPNGNKKLDAAYQEAKEKSSETPVFLLFSVNASGQFVGLAEMVGRVDFNKTVDHWQQDKWTGCFPVKWHIVKDVPNSLLKHIILENNENKPVTNSRDTHEVKLEQGLQVLKVFKDHVCKTSILDDFGFYDNREKMMQYRKAKQQQSLKKVIDVKVPNATDADTSLVGTGSTELTNVEADVLNKELSLDKAVEKNEEKGNDVAPQDLKSSAEKSASPNGC

SEQ ID NO: 54301 - protein, 50 aa, Zea Mays
MGREGMMSRLDLSWQARDESKGANSTMHSDRSRRGPPSVPARRRRVAVHV

SEQ ID NO: 54302 - protein, 118 aa, Zea Mays
MVVGASSVSGAAASGGTSGTAPPRKGKSCKGCLYYSSVLKSRGYNPICVGIPRSIPQVPNYVVDEPKEDATAQGHDLRRFRYGCAGYSIFVNRDGQGGEGEGKTLLPYCRGLEVLPTF

SEQ ID NO: 54303 - protein, 482 aa, Zea Mays
MATANGSSKGPFEVPKVEVRFTKLFIDGKFVDAVSGKTFETRDPRTGEVIASIAEGGKADVDLAVKAAREAFDNGPWPRMTGYERGRILHRFADLIDEHVEELAALDTVDAGKLFAVGKVHGATLKMAQRMHGYTLKEPVGVVGHIVPWNYPTTMFFFKVGPALAAGCAVVVKPAEQTPLSALFYAHLAREAGVPAGVLNVVPGFGPTAGAAVAAHMDVDKVSFTGSTEVGRLVMRAAAESNLKPVSLELGGKSPVIVFDDADLDMAVNLVNFATYTNKGEICVAGTRIYVQEGIYDEFVKKAAELASKSVVGDPFNPSVSQGPQVDKDQYEKVLRYIDIGKREGATLVTGGKPCGDKGYYIEPTIFTDVKDDMTIAQDEIFGPVMALMKFKTVEEVIQKANNTRYGLAAGIVTKNIDVANTVSRSIRAGAIWINCYFAFDPDAPFGGYKMSGFGKDMGMDALDKYLQTKTVVTPLYNTPWL

SEQ ID NO: 54304 - protein, 192 aa, Zea Mays
MYGHVGKLAEEIKKGALSVEGVEAKIWQVPEILSEEVLGKMGAPPKPDVPVITPQELAEADGILFGFPTRFGMMAAQMKAFFDATGGLWREQSLAGKPAGMFFSTGTQGGGQETTPLTAITQLTHHGMVFVPVGYTFGAKLFGMDQVQGGSPYGAGTFAADGSRWPSEVELEHAFHQGKYFAGIAKKLKGSA

SEQ ID NO: 54305 - protein, 423 aa, Zea Mays
MTKISRSLLVVIALVLLGPHLPPSEALTPKQGVRSKTFLSPPILLRPGDVADKFYYDIPFPRGHLALKSFNGEVVDERGAPVPLHETYLHHWVVQPYYALVVSAEGGSSRPRTIPARNAGVCSGHTLGQYYGLGSETRRTATWVPDPYGIEIGDPAAAPAEGYEQRWLLNVHAIDTRGAADRTMACTECRCDVYNVTADWRGHAIEPGYAGGLRCCYDGTRCGAAAEGAEGKARTVFLRYTVMWRDWSPAAVLPVRIYIFDVAGCGVEYDVEEQCSGGAGGECVHVKTATQALPRGGLHRRHVHVLPAPGRRHGARRRAAHRRVQVQQRPAPHGRHGPLLHPRGRPRPAAAAAGGPVLQLPGPMVPTVMAVEQPVRSFGVESWCYVLISCLVRVRFGAGDGRAKQGRPRGSLRYSYSSSNVKI

SEQ ID NO: 54306 - protein, 59 aa, Zea Mays
MASEVEDEAATPLLANGAADVRRRRDQAKAILSTQAVRIATKAEQHERFIFKPCSLSLS

SEQ ID NO: 54307 - protein, 113 aa, Zea Mays
MQFGRATEKTDVYSFGVLVLEILSGKRPTDASFIEKGLNIVGWLNFLASENREREIVDLNCEGVQTETLDALLSLAKQCVSSSPEERPTMHRVVHMLESDVITPCPSDFYDSE

SEQ ID NO: 54308 - protein, 1065 aa, Zea Mays
MVSLCYFCPGLTTRSRMPVKRYKKILAEIFPKTQDEEPNERRIGKLCEYASKNPLRVPKITVYLEQHIYRDLRSEQYGFAKVVMLIYRRLSVSCKEQMPLFASSLLSIVHTLLDQKRQDDLCIVGCETLFDFAVNQVDGTYQFNLEGLVPRLCEIAQEVGEDERASALRAAALQSLSAMVWFMGELSHISSEFDNVVQVVLENYKPQKMQNDDQGTNDADNQLVQEDQKAEHPPSPFIITPAPSWESIVNVKGGVNLPEEDARDPKFWSRICVHNMAKLSREATTFRRILECLFRYFGNNSSWLSENGLALCVLLDMQLLVESSGQNMHLMLSLLIKHIEHKTMLKQPDMQLSIVEVAATLAEQSSAIASPTTMGAISDLVRHLKRTFHITLGSKDTELVKWNEKFRKGIDECLVQLSKKVSDAGPVLDMMAVMLENIASTPVVARSTAAAVYRTAQIIASVPNLQYQNKVFPEALFHQLLLTMIHPDHEARVAAHRIFAIVLVPSSVSPSIQASPSSRPKKHDMQRTLSRAVSVFSSSAAIFDKMKKDKNSENSQGESKDNSMHSVGEGTGQSKSQNLHVSQSRRSMKAPNFSMKRGPSMAMRAPSVAIRAPSISLRGPSMSLRASSMSVKEDQSSSNKSDEETESVLVKLSARQITLLLSSIWAQSTSPENTPVNYEAIAHTYSLLLLFSGSKASTFEALTQSFQVAFSLRSYSLTEADSLQPSRRRSLFTLSTAMIIFSSRAYNVLPLIPICKQMINDRAADPFLHLVDESRLTAVKDSSNDPSKIYGSPEDNNNALKSLSEIELSESQSRECIVSTIMNNIANMLDAELHNVRSQLLSDFTPDDMCPTSTQFFEVHADNPSSGSYETGHHQEGLLIDLGNDHDAFGEASESAEASASSIPASDLLSIDQLLETVGAEPAPQAGVVSADIGFKDMTSHCEALTIGKQQKMSAFMSFQQSVQAAGLPSSQPNQMELDLSQDPQLPQTGAHSTNPFTDDSLQGYPQYTKGPNGDNAQPGQDFQQQSLKLPAASPYDNFLRAAGYSHELSIPQEIKEEVCPCMRS

SEQ ID NO: 54309 - protein, 264 aa, Zea Mays
MRSERCNTSLLIDYCQDERAHKYIIIDVGKTFREQVLRWFVRHKIPCVDSILLTHEHADAILGLDDVRVVQPFSPTNDIDPTPIYLSQFAMDSICQKFPYLVKKKLKEGEEVRRVAQLEWKIIESDIQKPFTTSGLEFVPLPVIHGEDYICLGFLFGRKSKVAYISDVSRFPPSTEYAISKSGGGQLDLLILDCLYRTGSHNVHLCWDQTLDAVRRICPKRALLIGMTHEMDHHKDNQTLEEWSRREGIDVQLARDGLRVYIDL

SEQ ID NO: 54310 - protein, 58 aa, Zea Mays
MPNEPNCVVKFNFGPDFEFFPQDFGSLPVPQPMSEVTHQALEVKNEGPTENGIAEKTS

SEQ ID NO: 54311 - protein, 427 aa, Zea Mays
MSARGVRPGVLHHKENNPADAQPGKRQRTAAGAGRQPLAAAPPPQEEPMVFSGREDVDALLNEKMKGKNKMDYKGKSEQMMEYIKKLRACTKWLLEREDANLVEIERITGQLDATHKQHSEIVAVLKNTIEETKSICEELQKQCASLQEALKTVEAEKMDALRSLGDEREARMGVESLRNGLLEDLNRAKLEEKRLNDQIKMLQDTNKRLQEYNTSLQQYNCNLQADATKNAETIVKLQKEKNTMVETMNGLKDHANSVKMQLDIARSLQNEATKQKTDLLKEVESIRMELQRAREDRDTKSAQVDSLLVDIGTYKEMTGKSVIELDSAMAKTSALEETCSSQRKMIETLEIKLAAANEKLKRSNMTASETMTEYENMKKMLESVQSRLEEAEQTILEGENLRKKLHNTILELKGNISTCPKCPRWL

SEQ ID NO: 54312 - protein, 469 aa, Zea Mays
MNLVSYEYVACQGSKKGVLILSEFAGAAQSLGAGAILVNPWNITEVADSIRHALTMPSDEREKRHRHNYAHVTTHTAQDWAETFVFELNDTVAEALLRTRQVPPGLPSQMAIQQYLRSKNRLLILGFNSTLTEPVESSGRRGGDQIKEMELKLHPDLKGPLRALCEDERTTVIVLSGSDRSVLDENFGEFKMWLAAEHGMFLRPTYGEWMTTMPEHLNMDWVDSVKHVFEYFTERTPRSHFEHRETSFVWNYKYADVEFGRLQARDMLQHLWTGPISNAAVDVVQGSRSVEVRSVGVTKGAAIDRILGEIVHSENMITPIDYVLCIGHFLGKDEDIYVFFDPEYPSESKVKPEGGSASLDRRPNGRPPSNGRSNSRNPQSRTQKAQQAASERSSSSSHSSTSSNHDWREGSSVLDLKGENYFSCAVGRKRSNARYLLSSSEEVVSFLKELATATAGFQATCADYMHVLG

SEQ ID NO: 54313 - protein, 567 aa, Zea Mays
MNRFCFEKRDWMTVQPNELPHGSQLIMGLNPPFGVKASLANKFIDKALTFKPKLIVLIVPKETKRLDQRRTPYDLIWEDSECLSGKSFYLPGSVDLNDKIVEGWNASAPPLYLWSHPGWTKKHMQVAEEHGHTCMGKIACHVEESNLSDDLSVRKQSDATNKLNSRSGKETPFNDRMSNLLDDGSARKQARSEEEKRTLGKIEHHVKKANIPDNLPVKKEPEASSKVMSHSGKDRKIGRYNRRRHDNRSSKGTPDHTESLPPEKQVEVAYEETRVIPSKKIAHNEKKSAQYNYEQTAAGMPNMRSRGGDSDMSISPPVSCNARSKPMSYSLTRPIEHLDTNAHLLAEEPSDSVLNRVPNHDSYLAIKEEYCDGFKRKNDPIFSHIDDSSRMRGSSIEEVTKPYITAPNSDPWSKGDGSFYRHPSSEDLNANADVLMPGYSARYGQIGGDSNPQASMVPLATDSRLHGGTVADNYLSARYSLGSSGARVSQPAPTVPPFGLSGASSQRGSVMDRYSYGLSGPTGTQRSVIDRYAPSLDGTNTTRSRSSLPEQYPFGQPGSSGGGWPHH

SEQ ID NO: 54314 - protein, 510 aa, Zea Mays
MAPWVWVALQAAAVAASAAEALSLDVHHRYSATVREWAGHRAPPAGTAEYYAALAGHDLRRRSLAGGGEVAFADGNDTYRLNELGFLHYAVVALGTPNVTFLVALDTGSDLFWVPCDCINCAPLVSPNYRDLKFDTYSPQKSSTSRKVPCSSNLCDEQSACRSASSSCPYSIQYLSDNTSSTGVLVEDVLYLVTEYGRQPKIVTAPITFGCGRTQTGSFLGTAAPNGLLGLGMDTISVPSLLASQGVAAANSFSMCFAQDGHGRINFGDTGSSDQQETPLNMYKQNPYYNISITGATVGSKSIHTKFNAIVDSGTSFTALSDPMYTQITSSFNSQVQDKPSQLDSSLPFEFCYSISPKASTNPPNISFTAEGGSVFPVNDPIITITDSVSNPMAYCLAVMKSEGVNLIGENFMSGLKVVFDRERKVLGWKNFDCYSVGNSRSNLPVNPNPSGVPPKPALGPNSYTPEATKGASPNGTQVNVLQPSASFSPKLRCNRNVLVAAALLFLVIL

SEQ ID NO: 54315 - protein, 1609 aa, Zea Mays
MGGGRRATWPLCGVARMELVPDLASTSQSGRGLRRAGGRIMAFAAVAAGRQEGSALASVIGEGSGAATASGSPPMDRCRKRPDSDPEGCSEPEPPADKRPCTAEPSTSAAAVAAAPPPGARQAEQGGSDMDTSSSGHHGDADVDADDGDGDGDGDGDGDGGSSCESDGDGSPGPRGSGGGRFQRMVDAVADDGAGQDALLAALTELCEALSFCTEDVGGYFPTEAAARALVRRAGGGDGAGTTPDVILLSVRAITYLCDAMPRAADAVVRHGLLPVLCSRLLTIEYVDVAEQCLQAFEKISRRQPTQCLQAGMINAVLAFIDFFAASIQRVAVSAVANACKKVPSDCSQFVLDAVPTLCNLLQSEDKVIVEKVAACLVSIADSFSTSVDLVDHLCHQGVMEKVLPLIHTGGLTALSPSTCSNLIGLLAKLACTSLVAVKSLFELGVSSTIKGILITSDISHGMPYLPLEKQNNQVNEALKLANQLIPSAARDVEDTQIILAKEKILTDEPRFLCQFSRDILPVLIKAVNSGANSYICYGCASIVNNICYFSKSEILQDLLKETNIPSFLAGLLSRKDHHVLTSSLKIVEILMQKLPNAYLGFFIKEGVVNAVEALLNQQDCSKSTHMPDNMQQPETQPVIRNKTTCFCYAFDACRSEAAEKRTCRIGKDSLFTFARHVKTTYFTKDVVSSEMGLTEILQKLKNCCAVLNETTDKSSEQCNLQNEEYLSTILSEVMMELHGGETMTTFEFLESGLVKSLSNYLSNGKYLQVEDNMGCSSDHLLAVVKRFQSFSRMSFSRMGQGWDDMLLTLLVRKLQNALTSLDNFPVIMSHNFKPRSSIADIPTRHSTITPCIRVRFKKDEDETKLSSYNSAVNVEISSSLQTIEEFLWPKVSIDVNSQKAESPPSDTALEIKYADDDSQEQDSTPSQKADSPSEGLTCGSQNLPAETCPKQGTSSSGQAERNTTILSDYTIQQKLVFSLNGKELDRSVTLYQSILQDHINAGSEIILDMQFWRSVHDITFKAANPEANRTAVNPEANDSPRHSSTAMSSINENTTGFTWQMLPFFSSMLLGKLPCKLDRSGASYDILFMLHILEGLNRYSFHLVSDERNRSFAHGRITNLDDLKAEVFSIPQQEFVSAKLTDKLEQQMHDPLVSRSCCLPLWCIELMSACPFLFSFEARWKYFQLTAFGSLKNHHGHMMDASVNSVAERGSSHSRKKFKVDRDDILVSAAKMMKSHAKSNALLEVEYKEEVGTGLGPTMEFYTLISHEFQKSGLGMWRGELPCKSGTHDTHVSRFVVASNGLFPRPWSASEDPASFQEVSERFHLLGLVVAKAIKDNRILDIPFSKAFYKLILGQELNIYDIQSLDSELAICLVEFQALACQRKYAESNLTRDCQISDLTYRGCRIEDLAIEFALPGYPEYVLSPGSRSDCLNAENLEEYVRHVVDATVKSGIARQMEAFKSGFNEVFPLKKLQVFSEDELERLLCGEQDTWDFAKLVDHIKFDHGYTSSSPPVINLLEIIQEFGSIQRRAFLQFITGSPRLPPGGLAALNPKFTVVRKNNSNDVDHDLPSVMTCANYLKLPPYSSKEKMREKLLYAITEGQGSFHLS

SEQ ID NO: 54316 - protein, 59 aa, Zea Mays
MWRLKTRNPLIRRGLVTTIQIRSLGATNTSLYHLPMSSAEAWVSTTLLQCLSLPSGRWG

SEQ ID NO: 54317 - protein, 346 aa, Zea Mays
MFYMCIPTGIALGYVYGGLVGKYLNWRAAFWGESILMVPFVILGFVIKPLNLKGFAHNTTKEYGQMLNPEVQDQINNNATKHVLPGGIEDLSGKVPQKFSLSSFCHGIMTEIGRFSKDMKELLQEKVFVIVVLGYISYNFVIGAYSYWGPKAGQEIYNMGSADLMFGGITIVCGIIGSLAGGFILDKIGSTIPNAFKLLSGATFVGAIFCFGAFCFKSLYGFIPSFAVGELSVFATQAPVNFVCLHAVKPHLRPLAMAVSTVSIHIFGDVPSSPLVGLLQDKINNWRATALILTSILFAAVVFWFIGIFIPSVDRFNEESEHGLTVAERSNLRPLLDEKDEPRTSD

SEQ ID NO: 54318 - protein, 194 aa, Zea Mays
MAVLMRNLHALNKLPYSKLDSKTFGITDGVVFVTYSSLIASSENRSRLQQLVQWCGSEFDGLLVFDECHKAKNLIPEAGSQPTRTGKAVLEIQDMLPQARVVYCSATGASEPRNLGYMVRLGLWGDGTSFENFNQFLGALEKGGVGALELVAMDMKARGMYVCRTLSYKGANFDILESLLEERMMDIFVSMIAH

SEQ ID NO: 54319 - protein, 116 aa, Zea Mays
MHQPLQPNSWVDAVVYLVDAYDKERFAESKKELDALLSDDSLANVPFLILGNKIDIPYAASEEELRYHLGLSNFTTGKGKVNLGDSNVRPLEVFMCSVVRKMGYGDGFKWVSQYIK

SEQ ID NO: 54320 - protein, 248 aa, Zea Mays
MITTRTPTLSTAASLLLTHRHRILAARTLSVSVSAAAGSSSIPVKGRAVPRRGGAVPPLRLVRVPLGVPVPRLPQAQGPRPRHRRHGREAYLRADQGERRASGLGVPRRRRRGARRRARPSQRRPEREGAIRDRQLQLRREANRPRAVGQAAEDGGEQRELRDHPDAQRRVQRHRQEPRAGPLPGPPPGLHRRGQRAGLRRHQQRRLQVRLRQEAGAVRRGRDEIVRGSGQMRGDSWQAALYLWRPAD

SEQ ID NO: 54321 - protein, 141 aa, Zea Mays
MKGRNDSGHSKRPVVLCCVMIVCLCLLFLYFSGSNGQAGSAAFEYGTKFSRSLGWGSDDGEDGSEESIFGTGDADDVKPKSFPVCDDRHSELIPCLDRNLIYQMRLKLDLNLMEHYERHCPPPERRFNCLIPPPHGYKATT

SEQ ID NO: 54322 - protein, 1921 aa, Zea Mays
MEALNELCDLVAAHPDLLLADKLAWLSSRCAAAPGAAAPQRASRAHLHSLLALARLLPAGGAGAGAEGDAAPPAPLLFFLASHAFLSPAFWPQSFAPAPFLARLLPLLAAAPSSPALSSALSAALLAALDVADPTSAPLARAFLSAAAAAAPLPLLPADAAPIAARLLLEFLGSEEEPIRAKGKGEDTLGEENGGAKEVVRRFEEEEVDELERKEVAFRLTVHMLGGEGGLETEQIGKVRNAAARQVRSLTDFLKIRKRDWREQGTQLRARINTKLMCCQAAVGVLVRSVSTMDTDIKSSKDMLQQTLAWFIEATKSCILSSWRKLKICEELFCTLLNGISQITVSRGGQLLPADMAGSSPGALFEAVVKLSCEIIEFGWTKDRALVDTFVMRLAAYVRERNDYEEEDGKGKEAVPVIRLNVIRLLAELCVCLKKWEVVDMILPLFIEHLEEGDASSPSSLRLRLLDAISRVACLGFEKSYRESIVLMTRSYLDKVKALGASENNTVPSEATTERTETLPAGFLLVASNLTSTKLRSDYRHRLLSLCSDVGLVAESKSGRSGADLMGPLLPAVADICSDFDPVSTVEPSLLKLFRNLWFYVVLFGLAPPIQNNEAPTKPVSTSLGTAESSSAIALQAVAGPYMWNSQWSVAVQRIAQGTPPLVVSSVKWLEDELELNTLHNPGSRGGNGNENSAVGQRAALSAALGGRVEVAAMNTISGVKATYLLAVAFLEILRFSCNGGILSATSTLNRSNSAFSCVFEYLLTPNLTPAVTQCLTAVAHRAFETVLSWLDDRISDIGEGADVRESVLSVHACFLIKSMSQRDEHVRDVSVKLLTQLKEKFPQVLWNSSCLDLLLISVHNELTSGPVSDPAWVATVRSLYQKIAREWLTSALSYAPCTTQGLIQENFCKPSGVQRTQHTADVVSLLSEIRICSGKNDWNGIRTANVPAVMDSAAAASGAKKEAPDFTLEVLSTAVVSATVKCNHAGEIAGMRRLFSTMGGINMGMSPPGTQSLHPHQSFDEVFVSKFVSLLQNFVVAAEKQPIDNSQFRETCSQATALLLDHMVSDSRANLEGFSQLIRLLCWCPAYISTPDAMETGIYIWTWLVSAAPSLGPLVLAELVDAWLWTIDTKRGLFASDMNYCGPDAKLRPHLIAGEPEAPPEKDPVEAIIAHRLWLGFFIDRFEVVRHDSIEQLLLLGRMLQGTMKSPAHFSHHPAATGTFFTAMLLGLKFCSCQSQSNLQKCNMGLQLLEDRVYRAALGWFSYAPEWYESPNKTYAQREAQSVSVFVHFLQNERTSGPVDSVSKLQGREGEPSMADHIHPVWGCVDNYTNAREKRKQLLLTLSQNEADRLEVWAQPIHTKDTTTFRGKISSDKWIDHVRTAFAVDPRIALSMPLRFPTNATMQSEITQLVQTRLLELRTIPEALPFFITPKAVDENSVLLQQLPHWAPCSVTQALEFLTPPYKGHPRVMAYVLRVLETYPPETVTFFMPQLVQSLRYDEGKLVEGYLLGATRRSNIFAHILIWHLQGEYVDESEKDAAALKGSAFQSLLPAVKDKIIESFTPEARDMFEREFDFFDKVTSISGVLFPLPKDERRAGIRRELEKISIPGDDLYLPTATNKLVRGIQLDSGIPLQSAAKVPIMITFNVVDRDGDPNDVKPQACIFKVGDDCRQDVLALQVIALLRDVFQAVGLNLYLFPYGVLPTGPGRGIIEVVPDTRSRNQMGETTDGGLLEIFQQDYGPVGSPSFETAREMFMISSAGYAVASLLLQPKDRHNGNLLFDSHGRLVHIDFGFILEISPGGNMGFESAHFKLSHEMTQLLDPSGTMKSDTWNQFLRLCVKGYLAARRHMNGILSTVNLMVDSGLPCFSRGDPINNLRKRFHPEMNEREAANFMVRTCADAYNKWTTAGYDLIQYLQQGIEK

SEQ ID NO: 54323 - protein, 823 aa, Zea Mays
MLTFQLSDQTLHPFDHASFQGTARLSAVRCPPRALRSRAALPAARPRAHWTSFRPAPIDPAAMSSAAVSSSSSTFFLALASASPGGRRRARVGSSPFHTGASLSFAFWAPPSPPRAPRDAALVRAEAEAGGKDAPPERSGDAARLPRARRNAVSKRRDPLQPVGRYGSATGNTARTGAASCQNAALADVEIKSIVAAPPTSIVKFPAPGYRMILPSGDIAPETVLPAPKPLHESPAVNSVPPVSIPNPDTDGIAALAEKKYAQVDGDSNGIAPPTVEPLVQEATWDFKKYIGFDEPDEAKDDSRVGADDAGSFEHYGDNDSGPLAGENVMNVIVVAAECSPWCKTGGLGDVVGALPKALARRGHRVMVVVPRYGDYVEAFDMGIRKYYKAAGQVHDLEVNYFHAFIDGVDFVFIDAPLFRHRQDDIYGGSRQEIMKRMILFCKVAVEVPWHVPCGGVCYGDGNLVFIANDWHTALLPVYLKAYYRDHGLMQYTRSVLVIHNIAHQGRGPVDEFPYMDLPEHYLQHFELYDPVGGEHANIFAAGLKMADRVVTVSRGYLWELKTVEGGWGLHDIIRSNDWKINGIVNGIDHQEWNPKVDVHLRSDGYTNYSLETLDAGKRQCKAALQRELGLEVRDDVPLLGFIGRLDGQKGVDIIGDAMPWIAGQDVQLVMLGTGRADLERMLQHLEREHPNKVRGWVGFSVPMAHRITAGADVLVMPSRFEPCGLNQLYAMAYGTVPVVHAVGGLRDTVAPFDPFSDAGLGWTFDRAEANKLIEALRHCLDTYRNYEESWKSLQARGMSQDLSWDHAAELYEDVLVKAKYQW

SEQ ID NO: 54324 - protein, 872 aa, Zea Mays
MIELSKLDCDVLVGHNISGFDLDVLLHRAQTCKVPSSMWSKIGRLRRSLMPRLTKGSTLYGSGASPGIMSCVAGRLLCDTYLCSRDLLKEVSYSLTQLAETQLKKVRKEVSPHDIPMMFQSSGELLKLVEYGETDAWLSLELMFHLSVLPLTRQLTNISGNLWGKTLQGARAQRVEYLLLHSFHARKFIAPDKFARNKELNSTKRKMNPDTGGANADDGAADPSVDDEVHNGDQSKARKGPSYAGGLVLEPKKGLYDKYVLLLDFNSLYPSIIQEFNICFTTVERSSDGSVPNLPASKVTGVLPELLRSLVERRRMVKSWLKTASGLKKQQFDIQQQALKLTANSMYGCLGFSNSRFYAKPLAELITLQGREILQNTVDLVQNNLNLEVIYGDTDSIMIHTGLDDISRAKAIAGKVIQEVNKKYRCLEIDLDGIYKRMLLLKKKKYAAIKVALDGSLRENIERKGLDMVRRDWSLLSKDIGDFCLKQILSGGTCDDVVESIHSSLVQVQEQMRSGQIELEKYVITKSLTKAPEDYPDAKNQPHVQVALRLKQNGYSGCSAGDTVPYIICSQQDSDNAHSVGIAQRARHPEELKRDPDKWMIDIDYYLSQQIHPVVSRLCASIQGTSPARLAECLGLDSAKFQPRLTESSNQDTSMMLLSVIDDEDERYRGCEPLRLSCPSCSGTFDCPPVSSLITSASATSVSDPIEGKDATANFWRHMRCPRCLDNTVESKFSPSMLANQMKRQADNFISLYYKGLQMCDDEGCKYSTHSVNLRVMGDSERGTVCPNYPRCNGRLVRQYKESDLYRQLSYFCYVLDATRCLEKLDQKARLPFEREFVAVGQTIKLALLEIQKIRDRCAFGWVQLKDLAVSI

SEQ ID NO: 54325 - protein, 226 aa, Zea Mays
MSNRRFIVKEMLGQGTFGQVVKCWDTETNDYVAVKVIKNQPAFYHQAIMEVSLLRTLNQKFDPDDQHNIVRMLDYLSFQNHLCIAFEMLGQNLYELLKRNHLRGLKLKYVQAFSKQILDAMVVMREAGIIHCDLKPENILLAPSVATAAAVKVIDFGSACLEGKTVYSYIQSRYYRSPEVLLGYPYTTAIDMWSFGCIVAELFLGLPLFPGATEYDVLQRMVKILG

SEQ ID NO: 54326 - protein, 240 aa, Zea Mays
MAAALSQLDDEIVRGMAIGAVFTDYAGKINCLDFHRKEDLLVTSSEDDSIRMYNITSATLLKTTYHRKHGADRVCFSHHPSSILCSSRYNLESAESLRYLSLYDNRCLRYFKGHKDRVVSLCMSPVNDSFMSGSLDHSVRIWDLRVNACQGILRLRGRPSVAYDQQGLVFAVAMEGGAIKLFDSRSYDKGPFDTFLVGGDTAEVSDIKFSNDGKSMLLTTTNNHIYVLDAYGGDKGVALV

SEQ ID NO: 54327 - protein, 184 aa, Zea Mays
MEAAAVAAALRSPTATTAAAAAGPTWRAAAPGAASLAFDRRRSFAFGSIKGLGRQQLTSRSTRRRSSVVRASWSPSESLPPSSSIAPLRMESPAGQLLSQILHTHPHLLSAAAEQQLEQLQTDREADKEKDKESDAGDKLAPTGGDLVLYRRIAEVKEKERRRTLEEILYALVVQKFLTKKKKS

SEQ ID NO: 54328 - protein, 188 aa, Zea Mays
MDKHITQLQTHSPGHRTDTCVVARAEIKMEKEHIKMAMLRQEQTFRQQVHELHRVYQVQKQLMMQMQIAKTNSYGNEAAERQTKPTEKLEHRQWCGSSGKTEAKLAEDFSLELTLATGAGRRGEEEKPSNSDSEATMSSSTSAESEPGQGFAPKSDVTNLRFQNESSRHDAQVLQSPWRYQCLSLKMA

SEQ ID NO: 54329 - protein, 223 aa, Zea Mays
MRTELSEKFDHAIKGVSAKLEEQRVERISQLEENNTLRSKLKDLADQYNITQQKYAHQLKEKMLELELADLRLQQHQEKAAQEHTQMQLYAEQVSQLMTTEKNLRLQLASDGERFQHFQDALSKSNEVFETYKQEMEKMISVIKNLKKENEFLKGKCENSDIAIVKLIEERELTKKQIEKLKNQREKLESLCRTLQAERKQGPSASIPDAPSSQEVSATSQES

SEQ ID NO: 54330 - protein, 404 aa, Zea Mays
MHDPSEIRNLPIDIAFGRLQEWLVDRKRVPHDWRKRLAGIRARIAPAFSALPRNLHPSLLALDPEEIGYLEAKKIYSILLESNTESRNIFGRLTGSAGEWESIIKAYEKDHVFLGEAAQIMVQNVNYDIPYQRKQMQKTQQQLAELDRREADIKRLAALSATRYVEACQELGLQGINVREELIESAKTLPSTFSKILEVLNSDPVSNAMEYYTTFVKDCHTEDKRNSDSVLPKLKDLQANPPSLHVSVYNEIKSSLGEASKSPGFTVIAGEIDSNVAAADDIDWDISVDTNEIDWDIGAVEQPGEESGDGFGSYEIIDANIELAGSENYNVGVSDKSMNKEDLASSESGICWDITADSSEEIASIQNASSVLEQSQSQMIAEDRSLLLEKEYRNNILDDLLEGR

SEQ ID NO: 54331 - protein, 456 aa, Zea Mays
MEQPQCNAPLQAVGQEKPRERRKRRYRRCVAEQLRESFAVDADYEYISKDHKPDCQNGSSRSTKVSSPDVITKPDHDESAEVVDSKSEEAQITDSEQATYASANNDLKGTKAYQEADVSGLYNLAMAIIDYRGHRVVAQSIIPGILQGDKSDSLLYGSVDNGKKISWNETFHSKVVEAAKRLHLKEHVVLDGSGNPVKLAATVECKGIVGSDDRHYILDLMRVTPRDSNYIGQGHRFCVLRPELIASFVEAESMKQSLKQKVPDAPVASTSDAKATSVEADDKSEESSVHTHKENDNSSSEILFNPNVFTEYKLDGSPEEIAADEELVKRAGTYLIDIVIPKIVQDLCSLDISPMDGQTLTDALHLHGINIRYLGKIAGMVKHLPHLQDLFSAEIIVRSAKHVIKDILRQSLDHDIGPAIAHFLNCFMGKVLGASTEGSLSDMQSKTLKFHFFILI

SEQ ID NO: 54332 - protein, 86 aa, Zea Mays
MLTQFTPICGYDSLSRTVERLEPFVTASFIFLAHPCCLTAVRVRNSKITVVLKKFFQILNMKLFSLIEMLGYMVYLKTISSNLPIY

SEQ ID NO: 54333 - protein, 499 aa, Zea Mays
MRSCSGEHMPTKFSPQLVPSNIPLRRWNIPAVPTQVEHKRRARLRKPKDCRSALSPPVAAGAMAIGGKEVKDDLEEAPPPVLDEAMRPRRVALFVEPSPFAYISGYKNRFQNFIKHLREMGDEVIVVTNHEGVPQEFHGAKVIGSWSFPCPMYGKVPLSLALSPRIISEVAKFKPDIIHASSPGIMVFGALAIAKLLGVPLVMSYHTHVPVYIPRYTFSWLVEPMWQVIRFLHRAADLTLVPSAAISKDFETAQVISANRIRLWNKGVDSASFHPRFRSHEMRVRLSDGEPEKPLVIHVGRFGREKSLDFLKMVMERLPGVRIAFIGDGPYRGELEKMFEGMPAVFTGMMQGEELSQAYASGDVFIMPSESETLGQVVLESMSSGVPVVAARAGGIPDIIPEDQEGRTSFLFTPGDLDDCLGKVQQLLTNREFRENMGRTARSEMEKCDWRAASKTIRNEFYNAAIWYWRKKHAELVKPLQWLAQMFLPAPEVRSIMQC

SEQ ID NO: 54334 - protein, 243 aa, Zea Mays
MYGGGGGGGHYDGGSGGAGNANALFGGGGFMPSQSTVVPENSGLSKGRSAQTLLPLTVKQTMDAAQTSGDRSNFAINGVEVSTIRLVGRMLGKVERVTDVVFTLDDGTGKIDVNRWENEASDAKEMADANNENYVIVIGGLKGFQGKRHVVAYAVRRVTNFNEITCHFLHCIQVHMELTGLKVDGNYISNLVLSVFHDPSVMDQEHGLHIKDVIDRLKLPDDVVRTRLAACFPAHRFFKFLVV

SEQ ID NO: 54335 - protein, 188 aa, Zea Mays
MRSCSSARQMLLTRLSSVSCSSTAQQLHAGVGKFAAAACWSWKKKREELPCFRARLAGKPPRASPAKGGIVPASDDDDGVSLGTVKLPGNIDTARLESLLFQISSPDAIDQVDKVEGGIRLGFVAVEDGATRTLVYIDCLVSPAPDGSGPVFRAIRNGPMKDKEPPGEPRIMRSLLQALEKSIQIARV

SEQ ID NO: 54336 - protein, 296 aa, Zea Mays
MLIGPNAPISFESKYRGSHMAHVYDFYKPDLASEYPVVDGKLSQTCYLMALDSCYNVFCKKYEKHEGKQFSIFDADYVVFHSPYNKLVQKSFARLYYNDFLRNCSTVDEESREKLAPYAGLSSEESYQSRDLEKASQQVAKNLYESKVQPTTLIPKQVGNMYTASLYAALASVIHNRHETLAGQRIVMFSYGSGLTSTMFSFKINEGHHPFSLLNIANIMDVSKKLKARHVVPPKKFIEVLKLMEHRYGAKDFVTSQDTSLLSVGTYYLTHVDSKYRRFYDVKGDGVTTTAMSNGH

SEQ ID NO: 54337 - protein, 172 aa, Zea Mays
MLELKLEEATMLINERDSEILELDALSHVQPQNTVACNNYPLSLQSDVDRLFLEKMEAEIQCFILTRASQDWKLLTMDQFALNEAQKSLLSDHKSLETKLRHAENRAMMLEEMVDKLESQCKALSETSEVLKLQAGASRASLFCSIQFVLLCIAIGTLLVRFLSSSPEIVPT

SEQ ID NO: 54338 - protein, 79 aa, Zea Mays
MNGSMFANVCDNVLFHARPQNALLCFLGTSFFVFRKIKSRLSILMLVSLMLKGEGMMLEVAVVDFLFAMIMTLLRKLFH

SEQ ID NO: 54339 - protein, 248 aa, Zea Mays
MESRNVVVCDNGTGYVKCGFAGENFPTSVFPCVVGRPLLRYEESLQEQELTDIVVGAACADLRHQLDVSYPVTNGIVQNWDDMGHIWDHAFYSELKVDPSECKILLTDPPLNPVKNREKMIETMFEKYNFAGVFIQIQAVLSLYAQGLLTGLVIDSGDGVTHVVPVVDGYSYPHLTKRMNVAGRHITSYLVDLLSRRGYAMNKSADFETVREIKEKLCYISYDYKREYQLGLETTILVKSYTMEELLK

SEQ ID NO: 54340 - protein, 525 aa, Zea Mays
MHAMRYLLIQLLLQVLLHPDEYWEAAVDVTICCKKSFPVIAQGDNSSAQESAEHGSQESDEDGFEESDEDGSEDPNEEVSLEFMDVLVQTFLSILPHASGPVCFTVEQVFRVFCDDITETGLLDMLRVVKIDLKDRHQTDSDDEDDGRVDIEDDDETVMEDEEVGEIDNVTDGLDENTDDDSTDEDDLDQDDFNKTVPNETKGGGKTETTKDGDDSDDSDGMDDDAMFRIDPYIARIFKERNLPGSDTKQSQLMRFKLRVLTLLDIYLQRNPGKVLVLEVYSFLMQAFVKSHGADGTEQFRQRISGILQRRVFKGNEYPKGDAVEFGKLESLLEKALRLTSRSRYNTVASVAQNATFWILKIINSKHCSEQELARVVDLFRSILSDYDRKKSRLKLGFVKQVAKRNPWIGQKLFGFVLQRAENTKAQYRRNQLLELAEFILKSWADGTSEMFLNHLSQLCGLIQAALSAVAENKSRRKEVRNFCTGILQTVLKLGLKDQFQKALSPETYSLCEAKLGAAFTAFKK

SEQ ID NO: 54341 - protein, 88 aa, Zea Mays
MAMRTALTSLPARLRAPAPPAATGGRRLLSDGKGRVLSEEERAKESIYIQKMERERQEKLKKRLEQEKADSDKAKPADADKVFSDSEL

SEQ ID NO: 54342 - protein, 154 aa, Zea Mays
MAASGNNRFSLTCARLRKFMMEQNRKATLTIFYQGQVSTFHHFPADRAKVLMQMASSVTGNTPEKGVAVATAVPKKAQTSDDQPSPAGAGMPPIARKLTLQNFLRKRKNRIAGTDDADRNEDASPWKKRDSAAGAGGTPAGDVPDDASWLALRL

SEQ ID NO: 54343 - protein, 151 aa, Zea Mays
MTSAASFPSSLFPFPTRASTPPLPSSSSRPSHSRPHLRIRSPKPNNPTVAPASSRMEVAQPQASNAQGGAEPAMKLLFVEMGVGYDQHGQDITAAAVRACKDAITSNSIPAFRGGSIPGVNTDQMKLQIKLGVPRSTQHLLDAERVKAVFP

SEQ ID NO: 54344 - protein, 364 aa, Zea Mays
MAPARLRGMLNIGFQLMITIGILAAELINYGTNKIKAGYGWRVSLALAAVPAAIITLGSLFLPDTPNSLLERGHPEEARRMLRRIRGTDDIGEEYADLVAASEEARQVRHPWRNILRRRYRAQLTMAVAIPFFQQLTGINVIMFYAPVLFDTLGFKNDASLMSSVITGLVNVFATVVSIVTVDRVGRRKLFLQGGAQMIVCQLIVGTLIAAKFGTSGTGDIAKGYAAVVVVFICAYVAGFAWSWGPLGWLVPSEIFPLEIRPAGQSINVSVNMFFTFCIAQAFLTMLCHFKFGLFYFFAGWVVIMTVFIAFFLPETKNVPIEEMVLVWKSHWFWKRFIADEDVHVGIGNNHPAKNGSDTKGADA

SEQ ID NO: 54345 - protein, 52 aa, Zea Mays
MDSWAERPISICLDSQGDCISPSIHFMEGFSSAVSVSLIGDGSQPCCTLWVC

SEQ ID NO: 54346 - protein, 50 aa, Zea Mays
MSTKLEAWRIKYMLLNWVCKMDLYACDLGISTGLTLITPTIEELCSAYRV

SEQ ID NO: 54347 - protein, 379 aa, Zea Mays
MGKKGKWFGAVKKVFSPESKEKKEEARRALRALRGLVRLKSLVEGNSVKRQSASTLRCMQTLSRVQSQIRSRRAKMSEENQALQRQLLLKQELENFRMGENWDDSTQSKEQIEASLISRQEAAIRRERALAYAFSHQWKSTSRSANPMFVDPNNLQWGWSWLERWMAAKPWEGRNGTDKESNIDRGSVKNMSLNLGVGEGEITKAFNRRDSKPEKPSPPTPKPARPASRQSPSTPSARVAPIPARRKSSTPKNGLSQVDDDVRSVLSVQSERPRRHSIATTSTMRDDESLASSPSLPSYMVPTESARAKSRTATANGAETPEKGGSAGPVKKRLSFQGGAAAASPMRRHSGPPKVESAVKDIAAPPQPEALVANGGGSK

SEQ ID NO: 54348 - protein, 318 aa, Zea Mays
MASSTLPAYPFRMSLPGLRAPDPAKVKHVSVRAPARRLPVAASAAPSGAAAAAARERRRFLESYGLNPNDFEEDAEENPREERKDRRRRRQSGRGEQTAEAAVTPAKVEEPRETHKMLQVLGGKVRRRKLLSPKDRNVRPMMEVVRGAAFDILQSAGGSPASLRPGRWLDLYSGTGSVGIEAMSRGCSEAHFVEMDPWVISEVLKPNLECTGFIDVSQIHMLRVEKFLANAEKSHGKYPSFDYISVTPPYLEVNYSTLLAQLARSPLVGKDCFILVEYPLKTDMAESCGNLVQIADRRFGRTNLLIYGPTWSEKKKKR

SEQ ID NO: 54349 - protein, 532 aa, Zea Mays
MLCSKRNGRLMYHSLSKDRPLAENISDELDLRIARVLESTGYHTDEGFWNDPAKYKISDNRRHVAIVTTASLPWMTGTAINPLFRAAYLARSAKQKVTLVVPWLSKSDQELVYPNNITFSSPEEQETYIRNWLQERIGFEANFKISFYPGKFSKERRSIIPAGDTSQFISSKEADIAILEEPEHLNWYHHGKRWTDKFNHVIGVVHTNYLEYIKREKNGAIQSFLVKHINNWVTRAYCHKVLRLSAATQDLPRSVVCNVHGVNPKFLNVGEKIAADRECGQKVFSKGAYFLGKMVWAKGYRELIDLLSKHKNDLEGFMIDVYGNGEDSEAVQNAARKFDLNINFFKGKDHADDSLHGYKVFVNPSVSDVLCTATAEALAMGKFVVCADHPSNDFFKSFPNCLTYRTSAEFVARVKEAMATEPQPLTSEQRYSLSWEAATERFMEYSELDKVLNRNGHPGRNGKVNKARKIPLLPKLSDVVDGGLAFAHHCLTGNEILRLATGAIPGTRDYDKQQCMDLNLLPPQVQHPVYGW

SEQ ID NO: 54350 - protein, 529 aa, Zea Mays
MEILNLKDTFEKDSFFRKLPNIAEQLPREIVLKKLLPVLASSLEFGSAAAPALTVLLKMGSWLPADQFNIKVLPTIVKLFASNDRAIRACLLHHINQFGESMSAQIVDEQVFPHVATGFSDTDGTIRELTLKSMLVLAPKLSQRTISGSLLKYLSKLQVDEEPGIRTNTTILLGNIAGYMNDGTRKRVLINAFTVRALRDTFPPARAAGIMALSVTSSYYEMTEIATRILPNIVVLTFDPNSDVRTKAFQATDQFLQIAKQHHEKLNTGDNSVAESTGVKLKPGNAGLLGWAMSSVTQKGKPFDHAPISTANANNSQASTTSTATPDTQASTLAYAPSTSTSLDQAASASARSSVDGWGELEDGNIHEENSSDKDGWDDVDPFEDKPSPSLLSNIQAAQKRPVVQPKQPVANSSKPNPLKAPKSEDDPLWGPIAAAPPKSAVKSADIKPSTSHNDEDDLWGSIAAPPKSSGKPLKPAVANSDDLWGAIAAPPPATKARPLASSGRGRGTKPAQPKLGAQRIGRTSSTGM

SEQ ID NO: 54351 - protein, 238 aa, Zea Mays
MEGLALLPLTMRAKVACFRPAHLPPVLAMGAGANNHEESSPLIPAAVAAPAYEKPVSAHAFGGVPRESWNSGILSCLGRNDEFCSSDVEVCLLGTVAPCVLYGSNVERLAAGQGTFANSCLPYTGLYLLGNSLFGWNCLAPWFSHPTRTAIRQRYNLEGSFEAFTRQCGCCGDLVEDEERREHLEAACDLATHYLCHPCALCQEGRELRRRVPHPGFNNGHSVFVMMPPMEQTMGRGM

SEQ ID NO: 54352 - protein, 234 aa, Zea Mays
MACSFSAAITVSSAPTPAARPLAAATQSVCIARSAVATTARPLRLAASRSARATRLVARASVVDDLPLVGNKAPDFEAEAVFDQEFINVKLSDYIGKKYVILFFYPLDFTFVCPTEITAFSDRYEEFEKLNTEVLGVSIDSVFSHLAWVQTDRKSGGLGDLKYPLVSDVTKSISKAFGVLIPDQGIALRGLFIIDKEGVIQHSTINNLAIGRSVDETMRTLQSTGHNWKSIEVD

SEQ ID NO: 54353 - protein, 69 aa, Zea Mays
MTGAVGPKITTLQLQRHPSISTVHRKPRSKESRALQQAGSDCIEGVARNHDVIQQFCHASLLSWKSGRV

SEQ ID NO: 54354 - protein, 624 aa, Zea Mays
MQIVMEKSGQNAHILLSMLVKHLEHKNVLKQPDMNLDIIEVTSRLAGHSKAQSSTALMASISDMVRHMGKSMQSLASDAGPGDNMVKWNSRYGKAVDECLVQLSRKVGDAGPILDTLAVVLENISSSMIVARSTIFAAYRTAQIVASLPNLSHQSKAFPEALFHQLLLAMVYPDCGTHLGAHRIFSVVLVPSAVAPCSFSDTSRTRKIDLRRTLSRTTSVFSSSAALFGKLKRDMLSFRESPLHDNTKLLPISEDADEISANDAKLFKSQTIQRMASTKDISLPSSTDASTLSEQTPNQEKDAVTLMLSVRQANLLLSSLWTQALSPENVPRNYEAISHTYSLMLLFSRAKGSGADVLVGSFQLAFSLRSVSLQAGFLPPSRRRSLFTLATSMLVFFSKAFNVPALIPVVKHVLTESTVDPFLCLIEDCRLQALDSAAQSCKLYGSKEDDDQALKSLSNIDMNEHQSKETSVSLILDSLEDLSESELSTIRKQLIEEFSADDICLGSHFTETPSKSAAQNGKLHHKSMEVIPFGFVFEDDTLVEASDSLVEPHLRHLPCNSVLDVDRLLNSVLETSQHVGRMSVSTDQDLPFKEVANQCEALLIGKQQKLSICMSVREKKVNLK

SEQ ID NO: 54355 - protein, 277 aa, Zea Mays
MSKENVTDTSVATFSMWRFRNLGVFAMEREWCAVIKMLLDFLFIGLVDVGSRSPEEVVLSENLLHAAVRRKSVNMVRFLLRYRPNKNSKGTAQTYLFRPDALGPSMITPLHIAAATSDAEDVLDVLTDDPGLIGISAWSNARDGTGFTPEDYARQRGNDAYLNLVQKKIDKHLGKGRVVLGVPSSICSVITDGVKPGDVSLEICMPMSASVPGCLLCSRKARVYPNSTSRTFLYRPAMLTVMGVAVVCVCVGILLHTFPRVYAAPTFRWELLERGPM

SEQ ID NO: 54356 - protein, 1041 aa, Zea Mays
MVAEAAPFSSSAIWSCHRDEITFDRLHKVFDNARAREREREMLYPDACGGGGRGWISPVIPNYGRGHGTRDTCALHTAHLSCDTLVDFWSALGEETRSSLLRMKEEDFIERLMHRFDSKRFCRDCRRNVIREFKELKELKRMRREPRCTSWFCVADTTFKCEVFEDAILVDWHQSLLEQDGIYHHFEWAIGTDEGKSDILNFENVGMNGQVHRKGLDLDHFEDYFVTLRAWRLDGRCTEFCVKAHALKGQSCVHRRLIVGDGFVTITKGESIRSFFEYAEEAEEEDEDDVVDRDSNDPDGDIAHPQKHAKSPELAREFLLDAAAVIFKEQIEKAFREGTARQNAHSVFVSLALKLLEERVHVACKEIITLEKQTKLLEEEEKEKREEEERRERRRTKEREKKNRRKERLKGKDRDKEKTLVRSKKPDLSPFSLCSQATPSNNESQDVLDLRYSDSEEEDNVVVGEHYPDSSADQSSSKDSDERSNGHECSVTIEFVPSDCDSSFLCDEPKSSRNLRFRRDFPEEKDASYWHEGCCDDSGDTQWQSRERTRNNTRNYNSVFNTNNRTRDRYNPCSCSHQEDYRYFTTATRSSRETKMPRKTVAEKPRLQYRRCYPPDSFAVSNGGRVGGTPNKNPGPKQVWEPMDARKKTGNGNSATGAADGSDQVECSNNISECEKLEAVCDSLVEICSEISAETCKSDTDQPWRQGEKNQSACSDESKCVDKPNCSKDTGRTTNLTTSDSSSCLSEGDRDSSMTSLSVQNVESSSASDSEESSDRNNSSPGDIPAKNVSRTLLEMCAGNGFREYQPKGLNPPNGNQFGFMVAPSQEQMLYQQKVHAPPYSSPFMGFHNHPLAVPTNGYLPYTQPGHFYPASMTPVGYGVAGDQCVDFSMQYRNNIHPYSGPEFGFLPSQPVHKTSVNFHAVPVTPLTPLCSRGMPVATNQERQQSPALFPKLKQAVLVPETVCAGDNTFKQKGDDVDSTPFSLFQFNLPIAPPTLATSKERSGELAPAQIARVQPCSREETNVKEYNIFSGCDGVMFQLN

SEQ ID NO: 54357 - protein, 173 aa, Zea Mays
MASGETNAGNTQRGNTLPNGDIYVGNFAGLVPHGFGKYMWTDGTLYYGEWDTSKMSGRGAIQWPSGASYDGDLCGGFIDGTGSFKGVDGSVYKGSWRMNRKHGMGTMVYANDDTYEGLWNEGLPDGFGKYTWVDGNIYIGLWKSGKMNGRGVMQWTNGDTLDCNWLNGLAHGK

SEQ ID NO: 54358 - protein, 1004 aa, Zea Mays
MFPWEMDIDGESSKTLGQMEDLEKIPLENESCGICRDIVIDRGVLDCCSHWFCYTCIDNWAAITNRCPLCKSEFQHITCTPVYGTIGATDEDEYSLTSCDDDWYGQEESSTLSFPSYYIDAEAVVCLDDGDCKIRNGLVAAEDDSTLDTSIACDSCDKWYHAICVAFNATMASDSSWLCPRCKFNEVEYEANVILKQNLGEDCVIGSDRTCTNASFSGRVSVSVADEGETALVVSMVGAHSETRGGLSEASLGLETAHETFNCSPYPSHSKDVLVADASSLRNTDIVSRSQNKPSEINVVHTLCSEPTETSLQFSPIREPATTIFSSEQDNMSTERLEVPKLVSSCPVVDNSKEAKSTGEENAAQQSNNELSSVIKSPQPASSDAVHQMKTAQNLQLPLRHDEHSSDDRKEEHIESGNEMIHPAKKAKLEVQEDINVIGNFDFSSIHSHTTSPAKAITDDIMSESVAQQKSIPDIMSIVDGEVYRRDPGRELAKPVGRRAGDKPGPRVKKIFRKEEGKESSALVQKLQKEIKEVVRDTGTNILEKDESFDEKLLTAFRAAIGKSVDGPAKSTNTNQLIRTRRSLLQKGKKRENLTKKLYGTSTGRRRSDWHRDWEVEFWKYRCSPGINPEKIETLQSVLQLLKKSSEMDKESAKGKREENNNSSILSRLYLADASVVPRKDDIRPLSALAGCAPLEKSSQIKASCNKSSSIPAGGNETMKISSPSSTGKASSYSILNKEAPSRRENRNSQPSQDKRNQSSGDIKQDKRKWALEILARKNASSITNKDQTGGNDALKGNFPLLAQLPVDMRPQLAAGSNKKVPVSVRQAQFHRIAEHYLQKANLDVIRRCADTELAIADAVNVEKGIYERSNSKSIYVNLCSQATRQHAKAKSDNDTSTLTKRTESGSDQISQEATSEGTNVSGSDMEEDLNRAAISNQKNELEDDTAPEHIVHKDTVSFNSAEDALRKAGLFDSPPNSPERGNTAVEGNSESTAVSNCPKFSQK

SEQ ID NO: 54359 - protein, 209 aa, Zea Mays
MPPSQTHPKRRKGRSVERRIIVCFPKMSSPSKRREMDLMKLMMSDYKVEMVNDGMQEFFVEFRGPNESIYQGGVWKIRVELPDAYPYKSPSIGFINKIYHPNVDEMSGSVCLDVINQTWSPMFDLVNVFEVFLPQLLLYPNPSDPLNGDAAALMMRDRPAYEQKVKEYCEKYAKPGDAGVTPEEQSSDEELSEDEDDSGDEEIMGKPDP

SEQ ID NO: 54360 - protein, 146 aa, Zea Mays
MSQARFERLADLLASDILKPCTKEQGSIGITANEDPYNANEMSPSDQRQNHVSASRKRLISLPTSEEAKTGKRQRENGDDMIPTSENYRPEDALEHLQDSKGTDLPESFTVKKLREGDNDDVGNIVSSSNIFADRYTGDDEEVDVD

SEQ ID NO: 54361 - protein, 175 aa, Zea Mays
MAIAESCVDAVVMEMVAVYCGGLYTAKPELAARRIEAIGFQVGHQLSERYTMERPRFSDHLEAIKFICKDFWSELFKKQIDNLKTNHRGTFVLQDNRFRWLTRVSLDPRTENTDSTENDSAALGDTAAQTTTMLLYFPCGLIRGALTNLGISCSVSADMSNLPAWASKPPKNTSL

SEQ ID NO: 54362 - protein, 437 aa, Zea Mays
MHYDLPPWSISILPDCKTTVYNTASVGSQISQMKMEWAGGFTWQSYNEDINSLGDESFATVGLLEQINVTRDNTDYLWYTTYVDIAQDEQFLSNGKNPMLTVMSAGHALHIFVNGQLTGTVYGSVEDPKLTYSGNVKLWSGSNTISCLSIAVGLPNVGEHFETWNAGILGPVTLDGLNEGRRDLTWQKWTYKVGLKGEALSLHSLSGSSSVEWGEPVQKQPLSWYKAFFNAPDGDEPLALDMSSMGKGQIWINGQGIGRYWPGYKASGTCGICDYRGEYDEKKCQTNCGDSSQRWYHVPRSWLNPTGNLLVIFEEWGGDPTGISMVKRIAGSICADVSEWQPSMANWRTKGYEKAKVHLQCDHGRKMTHIKFASFGTPQGSCGSYSEGGCHAHKSYDIFWKSCIGQERCGVSVVPDAFGGDPCPGTMKRAVVEAICG

SEQ ID NO: 54363 - protein, 281 aa, Zea Mays
MADQIARDPAFNRMAEQLQRSAQSTGEQGTPPLNPQQYMETMQKVMENPQFMTMAERLGNALMQDPAMSSMLETFSSPSHKEQLEERMSRIKEDPAMKSILDELENGGPSAMMKYWNDPDTLQKIGEAMGASFPFGAGSSAEPSGTEETEEEGGDDDESIVHHTASVGDEEGLKKALDGGADKDEEDSEGRRALHFACGYGELKCAQILLEAGAAVDALDKNKNTPLHYAAGYGRKECVDLLLKHGAAVTLQNLDGKTPIDVAKLNNQDEVLKLLEKDAFL

SEQ ID NO: 54364 - protein, 305 aa, Zea Mays
MIRQDISLLHGLGIKFVLVPGTHVQIDKLLAERGKKAKYAGRYRITDSDSLDAAMEAAGRIRLTIEAKLSPGPPMLNLRRHGVNGRWHEISDNVASGNFLGAKRRGVVGGIDYGFTGEVKKIDVSRIRERLDRDSIVVVSNMGYSSAGEVLNCNTYEVATACALSIEADKLICIVDGQIFDEHGRVNRFMSIEEADMLIRTRAKQSEIAANYVKVVDEEDINHVRCLPMKHGTEHGMNGRDHINGYTASFRNGVGFNDGNGLSGEQGFAIGGEERLSRSNGYLSELAAAAYVCHGSSIPGFQQCS

SEQ ID NO: 54365 - protein, 60 aa, Zea Mays
MNVGSLDDHFEIDFNSDDDIEYKMNKMSITPQRTFYHPLATNSESNRMPARIRPSVSPPS

SEQ ID NO: 54366 - protein, 137 aa, Zea Mays
MEISKFRYELCPRYMKERKFWRVYFLLVNSYIAPFEKKYFEELKVKAEEEKKDSQKEASQASTTAEPKDTKVPSKTSSTNPEHDLDVFLLGDLGSDDEASVGGDDGLDDDFDKIDATSGLESDDDDKKAATGKAEGV

SEQ ID NO: 54367 - protein, 312 aa, Zea Mays
MSTNDSMSMVFKCLSKGAVDFLVKPLRKNELKNLWQHVWRRCHSSSGSESGIQTQKCAKLNTGDEYENGSDSNHDDEENDDGDDDDFSVGLNARDGSDNGSGTQSSWTKRAVEIDSPQPISPDQLVDPPDSTCAQVIHPRSEICSNKWLPTANKRNVKKQKENKDESMGRYLGIGAPRNSSAEYQSSLNDVSVNPIEKGHENHMSKCKSKKETMAEDDCTNMPSATNAETADLISSIARNTEGQQAVQAVDAPDGPSKMANGNDKNHDSHIEVTPHELGLKRSRTNGATAEIHDERNILKRSDQSAFTRCKT

SEQ ID NO: 54368 - protein, 209 aa, Zea Mays
MQTGPTTAASGSAYAEFGKTKVIVSVFGPRESKKAMMYSDVGRLNCNVSYTTFATPVRGQGADNKEYSSMLHKALEGAVMLHTFPKTTVDVFALVLESGGSDLPIIISCASLALADAGIMMYDLVTSVSVSCFRKNIIIDPTSDEEAWQDGSLVVAFMPARKEITQLTLTGEWSDGRITNAVELCMDACSKLGDILRDRLKDTATLTCE

SEQ ID NO: 54369 - protein, 285 aa, Zea Mays
MASKPSNTILKYFKPLLDLHQPILIRSLLDILHAVCESPTVQLKSDVLLDLLCSLGLSVSSERKSGDEMASIARLLHVGTKKIYKQNRDICVVKLPLIFTSLGDILSSEFEEARFSSLEGFKGLIDNCIDETLVSQGIAQMKARHQGLKSDPTIIDKICAILEGLLDVRYSDVWDRSFHVISVAFDKLGEFSADLLPEAVRNLADMQNLSDDDFSFRKQLDACLGSAVAAMGPKNILEILQIQSISDENEWILPILEKHIVGASLQFFLRDILSMVGAIEKNIPK

SEQ ID NO: 54370 - protein, 293 aa, Zea Mays
MAALHGLPGRGAEDGAADVPRVGVDGALLRGHRADVVHLHRARRDHGQPRGAVHRAAGVPLHLRRHQRHGLHTHLRQSAGAAGPARHGQGAGPVAAAAAGRRPRAVRGRHGVRGAARGQAAVARPRSGGRAAADVHHVAGAGVRGARRRGGVRDHRHPRVLLRPVARRHEEPRHGPCAARRRGRQLLQLCRARRRRRRHHAQRGGRMDPRRPGQGPPRLFLLVHGCSRRGQPAALPALLRQVQRQQQQQHILFLSLHTICAKYMAKCQQREMSIELVNETQQDARILHLASPQ

SEQ ID NO: 54371 - protein, 94 aa, Zea Mays
MRSMVNLGSEVYMQAEVPDTRHIFVDIGLGFHVEFTWQEALQFISVREARLTRQIDEYTHLIASIKAQIKLVCEGIREVLQLPAEKELSPRNTW

SEQ ID NO: 54372 - protein, 544 aa, Zea Mays
MELLRPRGDGCCPRVLSVSLLLLAALLWKHVSAAAITRGDFPEGFVFGAGASAYQIEGAWAEDGKKPSIWDTYTHSGYSIDRDTGDVAADQYHHYKEDVKLMHDMGLDAYRFSIAWSRLIPDGRGAVNPKGLEYYNSLIDELLRYGIQPHVTIYHFDLPQALQDEYNGLLSPRIIDDFTAYADVCFRSFGDRVKHWITVNEPNIEPIGGYDQGYLPPRRCSYPFGLGVTCTHGNSTTEPYAVAHHLLLAHASAVSLYRRKYQGEQGGRIGLTLLAWWYEPATQKPEDVEAAARANDFSLGWFMHPLVYGDYPPVMKRNVGARLPSLTARDSAMVRGSLDFVGINQYGAILVEADLGQLDRDLRDYYGDMATNFVTVPFESTVTRNQQVPRLGLRNHEAPWALSKLLEHLQTHYGNPPVMIHENGAGHEPDPSGGFLYDDEFRAHFLRVYVEAALASVRNGSDLRGYFVWSFMDVFEFLFSYRFRFGLYGVDFAADNRTRYARRSARWYAGFLRGGAATSRPPLFQRGHTAPPIRSENQPHVSVL

SEQ ID NO: 54373 - protein, 413 aa, Zea Mays
MLLDEIDKTGSDVRGDPASALLEVLDPEQNKAFNDHYLNVPFDLSKVIFVATANKMQPIPPPLLDRMEVIELPGYTPEEKLKIAMKHLIPRVLEQHGLSTANLQIPEAMVKLIIERYTREAGVRNLERNLAALARAAAVKVAEQVKTLRLGKEIQPITTTLLDSRLADGGEVEMEVIPMGHDMSNTYENPSPMTVDEAMLEKVLGPPRFDDTEAADRVASPGVSVGLVWTSVGGEVQFVEATAMVGKGDLHLTGQLGDVIKESAQLALTWVRARAADLNLSPASDINLLESRDIHIHFPAGAVPKDGPSAGVTLVTALVSLFSNRKVRADTAMTGEMTLRGIVLPVGGVKDKVLAAHRYGIKRVILRERNMKDLSEVPSPILSGMEILLVKHIEDVLDHAFEGGCPLKSRSKL

SEQ ID NO: 54374 - protein, 80 aa, Zea Mays
MGKKQKKPGKGKEKTERKTAKGEEKRARRDSRKVGEEDDIEAILRSIQKEEAKKEVHVEENVPAPSPRSNCSVKAPQSFK

SEQ ID NO: 54375 - protein, 314 aa, Zea Mays
MKFDLSMEMDDSHGTMVNKSEENDFEKKGTSDPVVYQLVRVEGDGTLVPATEDDVLQFEHFLHNEKVDLPPIEDADHVEEFFNNDCMLLKKPDLEDGSSKLETVEAHTQKLGANLEDKGPSVEPKGIQPSVEMILVKDGDKGNHLRKVPEVPLKVSSENEHAEAVDSKGVRNLQAKVCSAVSKPKIKHGLTRKHHRAWTLSEVVKLVDGVARYGAGKWSEIRKLSFASYSYRTSVDLKDKWRNLIRATQTQLPAQKDGACPRKTNPSIIPIPPSILLRVKELHELQSQGGGFTAPVKFSGQDGKVLQGKGSGFL

SEQ ID NO: 54376 - protein, 96 aa, Zea Mays
MSMIYTLNGSDVVVRAASPYLREKMLLPRFIHPTAFSTRSILLRYTHCVWLLVTCIVNTWSLLKRNFIKIAYCFLSLKSQVQSRGDLCLQLPDIVR

SEQ ID NO: 54377 - protein, 252 aa, Zea Mays
MAMIDEPLYPIAVLIDELKNEDIQLRLNSIRRLSTIARALGEERTRKELIPFLSENNDDEDEVLLAMAEELGVFIPYVGGVEHAHVLLPPLETLCTVEETCVRDKAVESLCRIGAQMKETDIVDWFIPVVKRLAAGEWFTARVSSCGLFHIAYPSALDQLKTELRTIYGQLCQDDMPMVRRAAASNLGKFAATVEQNHLKTEIMSIFDDLTQDDQDSVRLLAVEGCAALGKLLEPQDCVAHILPVIVNFSQS

SEQ ID NO: 54378 - protein, 76 aa, Zea Mays
MPTLTKLYSMEEAALHNTPDDCWVIVDGKIYDVTKYLEDHPGGADVLLEATGRSRTRDLPASLRTTWCSTGQSQQL

SEQ ID NO: 54379 - protein, 586 aa, Zea Mays
MLDMMFGRNINDGETEEKNGEEEDGDGEKKHASHMFCKTLTASDTSTHGGFSVPRRAAEDCFPPLDYEQLRPSQELIAKDLHGMKWRFRHIYRGQPRRHLLTTGWSSFINKKKLVSGDAVLFLRGNDGELRLGVRRAVQLKNEALLEAVNCTDSKLLMLSAVANSLDNRSIFHICFNPRVGASEFIVPYCKFLKSLNYHFSVGTRFKVGCENEDANERSFGLIIGISEVDPIHWPGSKWKSLLIKWDGATKYSHQNRVSPWDIEGVGSSVSVTHRLSSSVSKRTKLCFPPSDLDTPILDGNGRPDSVETERFHRVLQGQELVHSSIHGTACSHSSDSPRCQGSYGRRFSADAWNCKMNDVMSGPRHLNATGFAYQPLGFSESVKFSEVLQGQEMSQAVPSFMRSAFNSGTQNGRVRPFDYVQRSDATQGYALQQFNLPATEVHSPSSVLMFNQTMVPHAELDGATNREEVHGSRYLSSNAIGREAEPWPSMQQQRASVNGSEPLDTTEASAPARNAESGSVGRGAGRSNCKLFGFSLTEKILGTDGGGVKEGNYEVDRQTPRVLDLFGHGSTPGALHALCAAPLGI

SEQ ID NO: 54380 - protein, 111 aa, Zea Mays
MHGIFVMSFRSAHLLAAACSCNMDSSRIFVIMFWRCSFGCCSQQIRNAILVHLPLYCMRPELCDWNNVNTRLSTMVTLLRCSWLCKTFSLTAQNRTVLIVVTTPLGHKMVN

SEQ ID NO: 54381 - protein, 147 aa, Zea Mays
MLDDMLEKNLEIVKAPCLNLVDPMETGGGIKLFKKAPPGISMDSTDKWHVQLKRPRIVPGEEVDEKSKKFRHMLRSVVVDGSDIVVSAKKASERSLARLEVREAAAKAKAKREEERVQELKKVRGEKWLPSVARQMKEEKAWELRRQ

SEQ ID NO: 54382 - protein, 203 aa, Zea Mays
MIDQGRLMTEAVSIPVIGDADNGYGNCMNVKRTVKGFINAGFAGIILEDQVSPKACGHTQGRKVVSREEAIMHIKAAVDARNESGSDIVIVARTDSRQAVSLNEALWRVRAFADAGADVLFIDALASREEMKAFCAIAPGVPKMANMLEGGGKTPILSPVELEEIGYKIIAYPLSLIGVSMRAMEYFIARLTASQWIMHIVCH

SEQ ID NO: 54383 - protein, 106 aa, Zea Mays
MAVGLYSLGLSPPPRLDTILFPQLRPHLRRRVPARVAAAGTSWSPAAGDSEDGVGGWWFPEYEKSMKQARGRIGFKRAVVVGLGASAAIALAGLAWRFPSSQKPTN

SEQ ID NO: 54384 - protein, 1388 aa, Zea Mays
MSMKEESDEVATKTRLLSLELLQGLLEGVSNAFTKNFHFIDSVKAYLSYALLRASVTSSPVVFQYACGIFSVLLLRFRESLKGEIGVFFPLIVLRSLDSSDSSLSQKASVLRMLEKVCKDPQMLADVFVNYDCDLEGPNLFERTVSALSRIAQGSQIADTNSIVSSQTVSVKGSSLQCLVSILKSLAVWEQLRRYSLKQGSIVESHEGDASRSVTTDEMKSQEDVRNQFERAKAHKSTLEAAISEFNRKPTKGIEYLLSNKLIENKASSVAQFLKSNPGLDKVMIGEYLGQHEEFPLAVMHAYVDSMKFSGLKFDAAIREFLKGFRLPGEAQKIDRIMEKFAERYCADNPELFKNADTAYVLAYAVIMLNTDAHNPMVWPKMSKSDFVRMNTASDAEECAPKELLEEIYDSIVKEEIKIKDDSHDTSKTTKRPETEETGRLVNILNLALPRLKSASDTKAESEKIIKQTQALFRNQGQKKGVFHVAQQVELVRPMLEAVGWPLLATFSVTMEEGDSKPRVVSCMEGFRAGIHLTRVLGMDTMRYAFLTSLVRFTFLHAPKEMRSKNVEALKTLLGLADTDMDALQDTWNAVLECVSRLEYITSNPSISATVMLGSNQISRDSVVQSLKELAGKPAEQIFVNSVKLPSDSIVEFFTALCGVSAEELKQTPARVFSLQKLVEISYYNMARIRLVWARIWSVLAQHFIAAGSHHEEKVAMYAIDSLRQLGMKYLERAELNNFTFQSDILKPFVILMRNSHNSKIRGLIVDCIVQLIKSKVGSIKSGWRCVFMIFTAAADDEDESIVESAFENVEQVILEHFDQVVGDCFMDCVNCLIGFANNKCTPRISLKAIALLRICEDRLAEGFIPGGAVKPIDVVPEANFDVSEHYWFPMLAGLSDLTLDSRPEVRHCALEVLFDLLNERGHKFSSPFWESIFHRVLFPIFDHVRHAGRDGLSSSGDDWLRDTSIHSLQLICNLFNTFYKEVSFMLPPLLSLLLECAKKTDQTVVSIALGALVHLIEVGGHQFSDGDWDTLLKSIRDASYTTQPLELLNSLRFQKSKHQQLLSREESNAQGNSYLDSQGEPSISDSNNGEHNHPEAGLQTILENSEGRTQPAVFPRGQSFGQRIMGNMMDNILVRSLTSKSKGRTDDIAPPSPVKAPDDEADKAEEEESPMMETVRSKCITQLLLLGAIESIQKKYWSRLKATQQIAIMDILLSLLEFASSYNSPSNLRTRMHHIPPERPPLNLLRQELAGTTIYLDILHKSTVEQDEKDSIEETNGLNVESDDQEKIKYLAEGKLVSFCGQVLKEASDLQPSTGEAASADIHRVLDLRAPVIVKVLKGMCIMDAQIFKRHLKEFYPLITKLICCDQMDVRGALGDLFSKQLTPLMS

SEQ ID NO: 54385 - protein, 150 aa, Zea Mays
MIHNVVISVSIGPPNSRFLPSKDKSSWDPKDVADCILSDRSTMKVTTGQRMTESSVLDAHVAEVDGEPYWYYEYLVRKSPTKSAPEPNLFRHNVACTAERDGYLYSLNASTLSKQWESMGPFLQKTVASFRLLPGTENYVPPYKDPWRFW

SEQ ID NO: 54386 - protein, 84 aa, Zea Mays
MAAGSIRVTMEVGADGVALITIANPPVNALHPIIIAGLKDKYAEALRRDDVKAIVLTGDVSLMPDVSVELVSNMMEEGKKPSVA

SEQ ID NO: 54387 - protein, 484 aa, Zea Mays
MSSSGPSPATGIHASPPLGLLPATGTHHTRSWGKTTSTSFTGSTTKHEQSLHGNVKPLQLAANESSRLAYRSPALKNQWNLPASSSSTNVVTTFDDNEHVSSSVIEEKVGVLLLNLGGPETLDDVQPFLFNLFADPDIIRLPRLFRFLQRPLAKLISTFRAPKSKEGYASIGGGSPLRKITDEQANALKIALEKKKLNANIYVGMRYWYPFTEEAIDQIKKDKITKLVVLPLYPQYSISTSGSSIRVLQDIVKEDSYFSGLPISIIESWYQRDGYVKSMSDLIEKELSAFSNPEEVMIFFSAHGVPLTYVEDAGDPYRDQMEDCIALIMGELRSRGILNSHTLAYQSRVGPVQWLKPYTDEVLVELGQKGVKSLLAVPVSFVSEHIETLEEIDMEYKELALESGIKNWGRVPALGCTSTFISDLADAVVEALPSASALATRKPDDIDSSMDLTHYLTKMLFGSILAFVLLLSPRLVSAFRSTML

SEQ ID NO: 54388 - protein, 307 aa, Zea Mays
MRPHAVGTGGGGVGRRKAGAAAAAASREWMVVPASGPARVEEAGKHAVMARTGLPARDLRVLDPLLSYPSTILGRERAIVVNLERVKALITATEVLLPNTKDPAFARFVRDLQTRVLASSSDQAAEFTDMEGESSNVASPFPLPSASKGHEMEMTKKTTAVVPEMTSSSSMPNLAIAKDGNTNVLPFEFRALEVCLESACRSLEDETSTLEQEAYPALDELTSKISTLNLERVRQIKSRLVAISGRVQKVRDELEHLLDDEMDMAEMYLTEKLTQQEISEASSRAEVDDPSQTEEDSLPWLASPPHH

SEQ ID NO: 54389 - protein, 203 aa, Zea Mays
MRNFVVRCSLTTLVMRRLEKTARYFKNLGTLGFWSQLVCTIVSAGILAFSTVVTGKVTAPFTFYATAAGIAAAFISSFWSFGYIRLSERLRRTSKEPAKAPPRADVVNSLKNGIVLNILGMGAAVLGMQATVGALVAKALTTSAVPYYQAAAPGQSPVLALDVFLVQASANTILSHFLGLASSLELLRSVSLPPAEAAAPAGA

SEQ ID NO: 54390 - protein, 239 aa, Zea Mays
MVLEIRRGIVCGFSMTWMELDIGALAKVVGDNATSEFFLNASKARHIAIDSILWNSEMEQWLDYWLPGDADCQEVHEWKPNSQNRNIFASNFVPLWLNAYHSEFVRFADEAKSNRVMASLKASGLLHAAGIATSLTNTSQQWDFPNGWAPLQHLIAEGLLHSGSEAKKLAEDIATRWVRTNYAAYKATGAMHEKYDVEACGESGGGGEYKPQTGFGWSNGVVLSFLEEFGWPEGKEIAC

SEQ ID NO: 54391 - protein, 1020 aa, Zea Mays
MESYLEERFGGVQAKNSSEEALRRWRRLCSVVKNPKRRFRFTANLEKRGEAEAIKHANHEKLRVAVLVSKAALQFLHGLTLRSEYVVPEEVKAAGFQICADELGSIVEGHDSKKLITQGGVDGIAEKLATSKTDGLSTADDSIKRRQDIYGVNRFTESEVRSFWVFVWEALQDTTLIILAVCAFVSLVVGIVVEGWPKGAHDGLGIVASILLVVFVTATSDYRQSLQFKDLDKEKKKIHVQVTRNGFRQRLSIYDLLPGDVVHLAIGDQVPADGLFIYGFSLLINESSLTGESEPVAVNEDNPFLLSGTKVQDGSCKMLVTTVGMRTQWGKLMATLSEGGDDETPLQVKLNGVATIIGQIGLFFAVITFIVLSQGLFSKKYHEQMLLSWSGDDALELLEHFAIAVTIVVVAVPEGLPLAVTLSLAFAMKKMMNDKALVRHLAACETMGSATTICSDKTGTLTTNHMAVVKACICGNIKEVNGSQNASKLRSELPEIVIKTLLESIFNNTGGEVVINQDGKYQILGTPTETALLEFALSLGGDFKAKRDETKIVKVEPFNSTKKRMSVILELPGGGCRAHCKGASEIVLAACDKFVDETGGVHPLDKITADKLNGIIDSFAGEALRTLCLAYKDMEEGFSNADHIPLQGYTCIGIIGIKDPVRPGVKESVATCRAAGIMVRMVTGDNINTAKAIARECGILTEDGIAIEGPEFREKSLAELLELVPKIQVMARSSPLDKHTLVKHLRTTFNDVVAVTGDGTNDAPALHEADIGLAMGIAGTEVAKESADVIILDDNFSTIVTVAKWGRSVYINIQKFVQFQLTVNVVALLVNFSSACFTGNAPLTAVQLLWVNMIMDTLGALALATEPPNDDLMKREPVGRTGKFITNVMWRNILGQSFYQFFVMWYLQTQGKNFFGLEGSGTDIVLNTIIFNSFVFCQVFNEISSREMEKINVLKGMTRNYVFMAVLSSTVIFQFIMVQFLGEFANTTPLTIHQWLASVLLGLAGMPIAAAVKLIPVGSS

SEQ ID NO: 54392 - protein, 315 aa, Zea Mays
MEDLLNTEIGKNDYDWLLTPPGTPRDPTLDAAEKAPSSIVTKHTVTRSSSTTRASRLSTYETENGHLTFPTRPARSISVSCRAVQSTPNNIRSSIVNANISSVNSRSTTQSKRTATLTASKPSVASSRPVPTRSSTPVEARLSCSRSSTPTSRSRTLSSSSSSSTSAVSRPSSSSGKVPAITYSSSSSSTVSSVSRSSSRSSTPTRQPAMRSSTPSARRISGSNNMTSNGRPLASSGRSSAPSSAPSSRPSSPNIRTQAPVHPLGIPDFPNETPPNLRAKLPERPLSAGRVRPGITSGVRSTPNPEPVLSVTVKK

SEQ ID NO: 54393 - protein, 969 aa, Zea Mays
MGSGGSLLGQLTGAGRPACWIIFDIYVENAIDGKHLSVTSAIGIIKEMTKTMQVLNEASWQETFKALWISTLRLVQRAREPLEGPIPHLDARLCMLLALIPLSIAAILQEESDMFGVEGNKILPQRQGLISSLQDLIQYSGLLVPPSSVVNAANAAASKAAIFKANYKAGAGNTSMMDQTDSSMKAAGNMLHLIIEACISRKLIDTSAYLWHGYVVPSRTLKDTALPQESPWLNFMKGSQLSEPLIDALVATPASSVAELDKLYSVATNGSEEEKTAAAKILCGASLVRGWNIQEHVVSMVVKLLSASLPSDSSTSTPGSMSHYLAHMSTLNEILLGVSYGDVIHILSLYGMVPDVAVALMPLCEAFGSIAPPPNHKSTILGETSVYLVFSCAFLCLLRLWKFYRPPQEYCLTGRGGSVKLELTLDYLLLMHNNRIFSNSSAPNRDSYNSMGSVNEVSAQPIYIDSFPKLSAWYFQNQACIASTLSGLCNKNPVHQVANKILNMICRKMNKEAVPFVLEAVLTACAHGRLSSRDLTTSLRDLVDFLPASLAAIVSYFSAEITRGIWKPVPMNGTEWPSPGASLHSIEAEVKEILASAGVQINSCYPRGVPPMLPLPMAALVSLTITFKLDRSLEYIQGVIGHALENCAGGSSWPSMPIIGALWTQKVRRWHDFIVLSCMRSPFGRDKDAVAQLIRSCFSSFLQSSSSGSDIIANRGVGALLGDSITDQGLRLPMAPGFVYLRTCRTFHDTYFVSEVILKQVIEWAHKLANGWSFNGPPQLKSGRTPLSCAASMAHQVAMLGGGLLCIAGGPLVVQVLYEDTLPTLLLSAREQSLKDPGPVSSTLQGYAMANMLFYCGSLLWGADRSSPVMKLSFLSRRPRVVRNHMDFIAGVLDGHILLGCDPGTWKAYVSQFMFLVVKFVPSWLPDIKLDTLKKIAAGLRSWHEHDLALSLLERGGPQAISVVVETFL

SEQ ID NO: 54394 - protein, 343 aa, Zea Mays
MIMEAGAGEAAPSAPRRLTLPWKVRLLLLCLDVVAGLSMRRDGTINRSIFNLFDLRATASTRPDRQGVRSADVDASRGLWARVFWPSPESSAAPLPVVVYFHGGAFTLLSAASYVYDAMCRRFCRELGAVVVSVNYRLAPEHRWPAAYEDGVAMLRYLASAGLPDSVDVPVDLSRCFLAGDSAGANIAHHVAQRWTTASSPPRSIPVHLAGAILVQPYFGGEERTEAEVRLDGNVPVVTVRGSDWMWRAFLPEGADRNHSAAHVTDDNADLADGFPPVMVVIGGFDPLQEWQRRYADVLRRRGKEVRVVEFPDAIHTFFLFPELTDHGTLVEAMKAFIREQRI

SEQ ID NO: 54395 - protein, 175 aa, Zea Mays
MLKDPRRLYAPGRIYHIVERRTCRCGRYPPVVKTAVPVDGRFEHIVLSCNATADHAIIWIEREAQKALDLMLEEENTLAVPSEQRMERNETLQREHVEEHRAALRRAVTLSVPDGRRPSPYGTFDDVEQHRQQPERSESFPPAGPRQRMSWNDLIERVFDKDEDGQIVLRSSVLL

SEQ ID NO: 54396 - protein, 373 aa, Zea Mays
MDATANSDVQRAEEFKLKANDAFKANKFSQAIELYSQAIELNSSNAVYWANRAFAHTKLEEYGSAVQDATKAIEIDSRYSKGYYRRGAAYLAMGKFKEALKDFQQVKKICPNDPDATRKLKECEKAVQKIRFEEAISAGDDERRSVADSIDYHIIEVEPHYAGPRIDGEEITIEFVKAMLDEFKKQKCIHKRYAYQIVLKTLDLLRSMPSLVDVDVPNGGHFTVCGDVHGQYFDLLNIFDLNGLPSEENPYLFNGDFVDRGSFSVEVILTLFAFKCLYPKAMYLARGNHESKSMNKIYGFEGEVRSKLGEKFVELFAEVFCWLPLAHVINNKVFVVHGGLFSVDGVKLSDIRSIDRFCEPPEEDILELHYFSL

SEQ ID NO: 54397 - protein, 345 aa, Zea Mays
MAEFLEASCVAWRQTELREGGRGRTKQQQQRHPLASFPFSPSSPTAGVASTRARPAGGCRRCTRGPWAAAAYLYLRAAGGGGGGGSYASPLAMDAGVEKCGDAAAEGGGDLYAVLGLKKECSDADLKVAYRKLAKKWHPDKCSSSSISVKHMEEAKEKFQEIQGAYSVLSDANKRLLYDVGVYDDEDDEDSMQGMGDFIGEMTQMMSQVRPMRQESFEELQQLFVDMFQSDIDSGFCNGTAKGHQVQGQAKSRTCSPRSPPTTIVKEAEVSSCNGFNKRGSSAMDSGKPPRPVECGAGQSQAGFCFGVSDTPKPRGPNANRKRNGRKQKLFPKHYVTSEDDTAGS

SEQ ID NO: 54398 - protein, 249 aa, Zea Mays
MQSESEWSQLAYVTFKDSQGADTAVLLSGATIVDRAVIITPAENYQLPPEAHKQLSGANVSTESAVRKAEDVVSSMLAKGFVLSKDALNLARSFDERHNILSNATATVASLDRQYGLSEKISLGRAIVGSKVKEVDERYQVSELTKSALAAAEQKASVAGSAILSNQYVSAGASWLTSAFDMVTKAAGDMTSMAKDKVERAEEERKAIMWEERSGLVSEYAKIHLDEPSSWEPAVLPLESVDEQKLQAV

SEQ ID NO: 54399 - protein, 1285 aa, Zea Mays
MAIPVEEAIAALSTFSLEDEQPDVQGLAVLLSSERYATNSPIEYSDVAAYRLSLGEDTKAINQLNTLIKEGKEMTSLLYTYRSCVKALPQLPDSMKHNQADLYLETYQVLDMEMSHLREIQRWQASAASKLAADMQRFSRPERLVNGPTITHFWSMLKLLDVLLQLDHLKNAKASIPNDFSWYKRTFTQVSTQWQDTDTMREELDDLQIFLSTRWAILLNLHAEMFRTNTVEDILQVLIVFCVESLELDFALLFPERHTLLRVLPVLVVLATSSEKESESLYKRVKINRLLNVFKNDPVIPAFPDLHLSPAAILKELSSYFQNFSSQTRLLALQAPHEIQGRELQDYQRHYLILNHMGTIRADHDDFSIRFASAMDQMIRLKSSDGVYNDWSRDIKGNMYDIVVEGFQLLSRWTGRIWEQCAWKFSRPISDSQQNSMTCFDYEKVVRYNYTAEERRALLELIGYIKSIGLMMQHCDTLVSEALWETIHMEVQDFVQDKLDTMLRTTFRKKKDLSRILSDMRTLSADWMASTSKADPEQHSLHQETEEMRQNTFYPRPVAPTAAQIHCLQFLICELVSGGNLRKVGGLFGNSGSGIPVEDLKQLETFFYKLSFFLHILDYTATIGTLTDLGFLWFREFYLESSRVIQFPIECSLPWMLVGHVIESEDAGLLESILIPFDLYNDSAQHALTSLKQRFLYDEIEAEADLCFDLLAQKLNEIIFTYYKSCAASTLLDSSFTYACDDGDKYFVKPLRFDAIFKLRRVMVLGRTIDLRSIITQRMNKIFRENIDFLLERFENGDLCGVVELQQLLDILELTHQSISRFLELDSYSLMLSEMQENLSLVSYSSRISSQIWSEMQTDFLPNFILCNTTQRFVRSAKGTHHSSHRSSASTGKPYFYCGSHDLTMAYQGLAGLYRDFFGVPHMFAVVKLLGSRSLPAIIRALLDHISSKITGLLPKINALQEALPKSIGLLSFDGGIAGCQKIVHEILTWEAKSEVKTEVLHDLKEIGSALYWMSILDIVLRQIDTTQFMQSAPWLGLVPGNDGQVKHAYSDNTPFTTLLSAASNAVTSSPTCPNPSTFLVMSKQAEAASLLYKSNLNSGSVLEYALAFTSAALDRHYSKWSATPKTGFIDITTSKDFYRIFSGLQYSYLEDSINNPSKKQEMLGDSVAWAGCTIMYLLGQQQHFELFDFSYQFLNVAEVESATVSHYQSSERTKSSNFLQGYEGILEAMRKARRLNNHVFSMLRARCPLEDKVACAIKPSGAPLHRMKFMNTVSAFETLPQRVT

SEQ ID NO: 54400 - protein, 69 aa, Zea Mays
MRHAVKLESIPAAGDSSSQKNIQAKRVQKCVETLDVLKVSNARLQAVVVTTKWETFDAAATTTKWELFD

SEQ ID NO: 54401 - protein, 171 aa, Zea Mays
MRTKLYIKTSIVTVSMMAGYLWYEYIYKLDKITYNKLHPYTSWIPITVYICLRNFTQEFRGFSLTLFAWLGKITLETYISQFHIWLRSSVPNGQPKWLLSIIPNYPLLNFMLTTAIYVAVSHRLFELTNTLKMVFVPNRDNKRLSYNFVAGTAISAALYFVSFVLIGIAGY

SEQ ID NO: 54402 - protein, 1309 aa, Zea Mays
MMPNAVTNSTKDVLEADDTTFNNEFLIKLDQLGDDPVISLGNMLVELIQHEDSCSGDSNGPTSTYKLLLLKESISKEIEKTELEIDSLEGELKSVNTEAATTLEGSPTGVTHTENLSPSSGTSKVPGSVEICDTSDMIKEPGELIGSPKVPVVQYDDVKSADMMEIETAPVHNAKTVPSEAGAISPVVAEGKACAAADLSSLKASEEAGSQNDIDNGRLETSSRQANADSMKIEISDDLPVKKWTYHDHKSDLLSSVTSANSAIAKEINEVLFKSLPADTPRLDLFASSHLLSQRKSDLIVKERLGVCKTRLRLKEQMLTMKFKAYCHLWKDVQLFSANKQRSKSNKRTDQSNRTSQIGSQRQRSSNRSRLTMPAGNLSTFSTPEMSDVAMRLFSEFKIKRCRNYLKMPALIIDEKEKEWLKLMNKNGLVEDPVLVEKERVMINPWTQEEKKIFMELLAKFGKDFSKIASFITHKSTADCVEFYYKHHKSDSFREVKKLLDLRQQQPTSNFLGAKSGHKWNPESNAASLDMLGVASVVAAHGLEYAKQVEKISAKSLIRTAYGPNVTSVANKSSDKECIDHVPLHERESVAADVLAGICGTLSPDGMGSCITSSADPGQKISMKRVEHVLSQENDKTVEEEDTLSDQECEVDPVDWNDDEKSIFIEAMNNYGKDFARISSCVKSKSYEQCKVFFSKARKSLGLDLIHQGAADVSMPASDTNGGKSDTDEACAVEMDSAICSTQSCSKIAMDVCPTEGAIGGPNSVIISKQAEAYISNGCNADVKIEEDEKVADKNCSIVDAKRSSDATHEAGPIDINCPGSTDKLQGTDDVVDLVNMHSNSGISSSAKHAVAIHSEMRSTLHSVEVLQTDKGEGTGTDLSWVEECSHHALDNTPMKNGNSGAPAFLASDSGIKDNVRISNITAASTVSPAFTSSYQHSVPGDMPLPKPKPLVTPLTPKDLMPVQFSSVLPDPTAIRFEGIASITTPNFEDTGNRVSGALGAKEMSKYPAFRDPSGNQQSTLFCNIDGYMNHRLTTELPFFSERTASGTVNTSQADRLTQTKLQNGRSSSLCLQNNSDGIQWPRDHEGGLEGSLRPCSRNTSSEGDEQQKRPGDVKLFGQILSHQSTLQSSGLSCNGNKSKPPSPKIDTSVRSMNNPMDRVVCSSRPGTTPHLGLEERLARCYGHLDGSTAQPEPLLVMAKRQRSLAGVQFYSAKNGTLGVLPDYQQPSTQPQQSDPKRVERLSDPQKRNVLELISGFQQPGRVARFGGAGILVSGNVSDPVAAALKAQYGPGSKIMGSDVDPWTDIGSR

SEQ ID NO: 54403 - protein, 265 aa, Zea Mays
MSLEFIATIASSIWCEMNIRKERFKQEWDLVIVNALTAACCNLMVLGLLAPCRSYASTSRFDFQNAIEKLPNNIFEKSYPLREFDLAKRISAFFYKAAELSLVGFVAGSVQGGMSIVLSARKERRLSVTIPSISTNALGYGAFLGLYANLRYQLLCGVDQYMVKRFDVLGVAIFFSTAARLMNIQIGEASRRTWLGEEADPQYSDRLLRAYKRPVEVDADQSRWFISKDAIVSGLGLLGIKQGGPEATFSKSRRKRVIRKKVTSG

SEQ ID NO: 54404 - protein, 434 aa, Zea Mays
MHGGGAASPDAAICISPEAGPIVGVAPAGIRVENCYVFKSRLQEYAQRVGIPTPEYHTLKEGPSHEPVFKSTVFVNNTKYESLPGFFSRKAAEQSAAEVALMEIAMSAPVTEIRNMPAVQETGLCKNLLQEYAQKMNYAIPSYICTKQASGVAPFVCSVEIGGILYIGAAARTKKEAEIKAARTALLAIQSQSEGGANGAKKYIVVPGQRPDKETNKNPTETPIPLRVKKRGSRKKWNKRKFRRMADRIVDAGKDAEGLGTLLHDDYEEARRIGYELPTDTAMVQFNKEVVMTQPGEGDRIVQLEPPRDPAEVQYNKEARSVEQDPPRDPAEVQHNKEARSVEQDPPRDPAEVQHNKEARTVEQDPPSNTEVWKPDNKATTTEQESVSAFIALRSNGDSTDVEAAPGDTLMMQGQESEATMQEASHAGEQAQPN

SEQ ID NO: 54405 - protein, 333 aa, Zea Mays
MGSKLVGCGSAIPTLSVSNDDLSKIVETSDEWIAARTGIRNRRVLSGDETLRGLSIQAAQRALEMAGVKAEDVDLVLLCTSTPDDLFGGAAQVLSEVGCTKAFGFDITAACSGFLVGLITATRFIKGGGFQNVLVIGADALSKYVDWTDRGTCILFGDAAGAVLVQACSADEDGMLGFCVQSDGNGQKHLSAIAANDESILSNTNGVPGFPPKKATYSCIQMNGKEVFRFAVRCVPQSIEKALQEAGLPASSIDWLLLHQANQRIIDAAASRLDIPSDKVISNLANYGNTSAASIPLALDEAVRSGKVKTGDIIAASGFGAGLTWGSAIVKWG

SEQ ID NO: 54406 - protein, 726 aa, Zea Mays
MASAQAPSSAAAPSRKDHLEAGKKRLEQFRKKKAAKKANAAGAEQAKVPAPDVEPNQASTSSVPWAVYENGPESASSGAEFLSNAPVNVYTSVGVSSVRPQQDAVTDGGSKFYGNLSFSDLVNGHHENWRGDEARKRDEHSPDKDVQSTSKLSAFGNSSLTLPSTDNMPSWGRISLSSQVHDTKQSSSYSSSTLFGKSENAYSQDYSTKSDTSSQLRDTSKDSSQVEQSLYASTRDYGNAFNSSRTIVTVEHDTNVGITRTSADSAPGVNFERQDPFLSSGYPTTYTRSRPSFLDSIGVQRVPPTTQASYREPAKANQLSHNSNYQSSFVKQSNQQPTSSNAADISFASESQEYSHEKGSYGSSNHPDFSLPKEERSIQHGKQTFQNFATHGKDDDFATLEQLIEDLTKEKFSLQRSLQKSQELAETLATDNSALTDKFNQQAHVISQLTSDMERLQEEIQAQLLALESVRTEYANAQLECSAADERAKVLAAEVILLEDKALRLRSSELKLEKEVEGLHSEISAYRRKVSSLEKERQHLQSTVEALQEEKKLLYSKLRNIPVNERATTVEKPSVDKKDASTVTEDLDTGEISSSETLTSTVDILEDAGTSVLRSNIVSDFPSSEQVSSSIPDDQLRMIDNINSLMSELAVEREELLRALRIESSNCSKLKELNKDLTQKLEVQTQRLELLTSQRMANENALAKPIDTRPINEATMYADEGDEKIM

SEQ ID NO: 54407 - protein, 381 aa, Zea Mays
MRFGICDMVAVAKILKATLVLPSLDHTSYWADDSEFKDLFNWRHFIESLKEDIDIVETLPPEYSDIEPLAKAPVSWSKVHYYRDEILPLLKKHKVIYFTHTDSRLANNGLPSYIQKLRCRVNYRSLKYSHTIEDLGNTLVSRMRQDRSPYLALHLRYEKDMLAFTGCSHNLTSEEEEELRKMRYEVSHWKEKEINATERRSLGGCPLTPRETSILLKGLGFTRSTRIYLVAGEAFGNGSMNALKDDFPNIYSHSTLATEEELAPFKNHQNMLAGLDYIVALQSDVFIYTYDGNMAKAVQGHRRFENFRKTVNPDRMNFVNLIDEFDGGRVPWDIFSSEVKRLHKDRIGAPYFREPGEFPKLEESFFANPLPGCICEQHSEE

SEQ ID NO: 54408 - protein, 69 aa, Zea Mays
MVEATACVSNAELFNNCVCINFLIKPVPVWRLTQASVLLPLAVLIHHLVFALSVDMCHLILKIHSDLYR

SEQ ID NO: 54409 - protein, 258 aa, Zea Mays
MHQDAHEFLNFLLNELVDILEKESSAAKDSPQSSSPEKAPNGPVQPLANGVKKEPPVTLVHKNFQGILTNETRCLRCETVTARDETFLDLSVDIEQNSSITSCLKNFCSTETLNAEDKFFCDKCCSLQEAQKRMKIKKAPHILVIHLKRFKYIEQLGRYKKLSYRVVFPMELKLSNTSDDVDTEYSLFAVVVHVGSGPNHGHYVSLVKSHNHWLFFDDENVEMVEEQTLQTFFGSSHEYSGNTDHGYILFYEGLGGKS

SEQ ID NO: 54410 - protein, 71 aa, Zea Mays
MTSTPGSTRSGHSCHRRVNAPPVHAVPSSREMNEYFAAEQRRQQQDFIDKYNFDPANDCPLPGRFEWVKLD

SEQ ID NO: 54411 - protein, 370 aa, Zea Mays
MTDDQIHWFSIVNSLMIVLFLSGMVAMIMLRTLYRDISRYNQLETQEEAQEETGWKLVHGDVFRPPTYSDLLCVYVGTGVQFFGMLVVTMIFAVLGFLSPSNRGGLMTAMLLVWVLMGLLAGYSSSRLYKMFKGSEWKKITLQTAFLFPGVAFVIFFILNALIWGEKSSGAVPFTTMFALVLLWFGISVPLVFVGSYLGFKKPAMEPPVKTNKIPRQIPEQAWYMNPLFTILIGGVLPFGAVFIELFFILTSIWLHQFYYIFGFLFLVFVILIITCAEITIVLCYFQLCSEDYMWWWRSYLTSGSSALYLFLYAGFYFFTKLQITKLVSGILYFGYMLLASYAFFVLTGTIGFCACFWFTRLIYSSVKID

SEQ ID NO: 54412 - protein, 124 aa, Zea Mays
MVAGGSGITPMFQVTRAILENPKDNTKVHLIYANVTYEDILLKEELDGMAKNYPDRFKIYYVLNQPPEVWDGGVGFVSKEMIQTHCPAPAADIQVLRCGPPPMNKAMAAHLDDLGYTKEMQFQF

SEQ ID NO: 54413 - protein, 100 aa, Zea Mays
MAVWEHGVTLRRGITATRQRRRQIPGNQLGFPAQDSHDPVSGDSTELLNGTSAGWSSQRRIDGSGCAHKSLCANGGSTSSPLGWLRGGRHSFKLRTESEQ

SEQ ID NO: 54414 - protein, 498 aa, Zea Mays
MATAPASLSLSASTLPTRLRAAAVLAGMRWRQPQRGRMVVRAKIREIFMPALSSTMTEGKIVSWSAGEGDRVSKGDAVVVVESDKADMDVETFHDGIVAVVLVQAGESAPVGAPIALLAESEEEVPLALAKAQELSNGQPQQAPPAPTEDAAATPPPPSAPATAPTPVAVGTKGIASPHAKKLAKQHRVDLAKVTGTGPYGRITSADVEAAAGIQPKSKPAPAAAAPPPVAAPSVGAVPQSAVLPPVPGATVVPFTTMQAAVSKNMVESLAVPAFRVGYPIITDKLDELYEKVKPKGVTMTVLLAKAAAMALAQHPVVNASCRDGKSFTYNSNINIAVAVAIDGGLITPVLQDADKLDIYLLSQNWKDLVKKARAKQLQPNEYSSGTFTLSNLGMFGVDRFDAILPPGQGAIMAVGASKPTVVADKDGFFSVKSKMLVNVTADHRIVYGADLAAFLQTFAKVRSFPTSLINRASPRDRFEIELFKCGLTRSRSSTGLI

SEQ ID NO: 54415 - protein, 478 aa, Zea Mays
MDAKRQGFFSALREEVARGLSPGRARRRSASNAAEVAAALRRLGGGGEALAPLMEGPDPEAGPGATCGGSARKEGGWGRWVRGQLQLTRAPALEAGAGAGSGAAAAAAAAGRRNDLRLLLGVMGAPLAPVHVCAAEPLPHLSIKDTPIETSSAQYILQQYLAASGGQRLLSSIRNSYAMGKVRMVATEFEAGGRVVRNRMAAQRAEPGRFVLWQMAPEMWYMELAVGGSKVHAGCNGKLVWRHTPWLGAHSAKGPVRPLRRALQGLDPLTAASMFAGARCIGERKVNGEDCFILKLSADPETLRARSEGLAEIIRHVLFGYFSHKSGLLVHLEDSHLTRIQSATGGDAVYWETTISSSVEDYRAVDGVVVAHAGRSAVTLFRFGEAAVGLGHTKTRMEEAWTIEEVAFDVPGLSADCFIPPTDVGPGSVSEAAELPRGERSKAAAGLVLPCHRARVAALEKADDGGVAWSGALQLGCK

SEQ ID NO: 54416 - protein, 246 aa, Zea Mays
MKGLFKTKPRTPVDIVRQTRECLVHLDLHSGSRSGDAKRDEKMTELSKNIRDMKSILYGNGESEPVTEACVQLTQEFFRENTLRLLIIHLPKLNLETRKDATQVVANLQRQQVSSKIVASEYLESNKDLLDILILGYENMDIALHYGAMLRECIRHQSIARYVLESEHMKKFFDYIQLPNFDIASDASATFKELLTRHKATVAEFLSNNYDWFFEEFNSRLLSSTNYITKRQAIKEHDWPIHIISF

SEQ ID NO: 54417 - protein, 431 aa, Zea Mays
MSAADPSAAPAAAADPDGPDSVRLTWNTWPRSKVEASRCVVPLAATISPTRVPDPSAASPPPLPYPPLRCKPPCSALLNPFARVDFAAKIWICPLCFSRNHFPPHYAAISESNVPAELFPQCSTVDYIVGGAGIPGVGGAPPPPPPVFLFVIDTCVIEEELEYVKMAMRKAVALLPEHALVGLVTFGTQVHLHELGFSDLSKIYVFRGTKEISKDQILDQLGLAGAGRPGFPKMPQQPGGPQVNGMHPPSTAGVNRFLLPVSDCEIALSTLLDELQPDQWPVEAGNRAIRCTGVALSVAAGLLGACMPGTGARIIALLGGPCTEGPGMIVSKDLSEPVRSHKDLDKDAAPHFQKAVKFYDGLAKQLVSQGHVLDVFASALDQVGLAEMKVAIERTGGLVVLSESFGHSVFKDSFKRIFEGGEQSLGLSFKG

SEQ ID NO: 54418 - protein, 442 aa, Zea Mays
MTVYIELEEKSLVDQLEKLVQEERWEIEEGSQTNILSSSMQVFLVIRKSLKRCSALTKNQTLFNLFQVFQRILKAYAAKLYARLPKGGTGIVAAATGTDGQIRTSDRDERMICYIVNTAEYCHQTSGELAENVAKMINPQFADKVDMSEVQDEFSAVITKALMTLVHGLETKFDAEMVAMTRVPWATLESVGDQSEYVNGISSILSSSIPVLGTLLSPTYFQYFLDKLAASLGPRFYLNIYKCKHISETGAQQMLLDTQAVKTILLDIPALGKQSTGAASYSKFVSREMGKAEALLKVILSPVDSVANTYRALLPEGTPLEFQRILDLKGLKKADQQAILEDFNKHAPAPAPAIKHPAVAPTVATPVATASVQIVPSVATPAVSITPSMASLKGALANQEDVLARAAALGRGAATTGFKRFLALTEAAKDRKDGPFRKLFNA

SEQ ID NO: 54419 - protein, 232 aa, Zea Mays
MYGGGGGGGHYDGGSGGAGNANALFGGGGFMPSQSTVVPENSGLSKGRSAQTLLPLTVKQTMDAAQTSGDRSNFAINGVEVSTIRLVGRMLGKVERVTDVVFTLDDGTGKIDVNRWENEASDAKEMADANNENYVIVIGGLKGFQGKRHVVAYAVRRVTNFNEITCHFLHCIQVHMELTGLKQIYSSAATYGGVAHAPSQPNPVDGNYISNLVLSVFHDPSVMSMDCTSKMS

SEQ ID NO: 54420 - protein, 124 aa, Zea Mays
MPSSVRSLVVLNLYNYGSGRHPWGDLRPEYLEKKGFVEAHSDDGLLEIFGLKEGWHASFVMAELIKAKHIAQAAAIKFEMRGGEWNRAYVQMDGEPWKQPLLQEHSTIVEINKVPYHSLMINGE

SEQ ID NO: 54421 - protein, 588 aa, Zea Mays
MPADVSGSDELREENMEGITSEILETVLSNKVMDRETPVGSEDVLSSPTCTQPCLQNDQSKSVVTFAASVEACIGAKQESIKLANSPMHDTKSAYSSSCPTGRISFKLYDWNPAEFPRRLRHQIFEWLGSMPVELEGYIRPGCIILTVFIAMPQHMWDKLSDDAADLLRNLVNSPNSLLLGKGAFFIHVNNMLFQVLKDETTLMSTRLDIQAPRIDYVHPTWFEAGKPVNLILYGSSLDQPNFRSLLSFGGDYLKHDCYRLPSHDTFDGFESGDFIPDSQHEIFRIHITQSRPDIYGPAFVEVENMFGLSNFVPILFGSKQLCSELERIHDALCGSYSENNVLGELLSASSDPHEHRKLCSSVMSGFLIDIGWLIRKPTPDEFKSVLSSTNIQRWICMLKFLIQNDFINVLEIIVKSMDSIMGSEVLSNLERGRLEDHVTAFLGYVSHARNIADRRANHDEKTQIETRGIIVTSPNQPNLGASVPFASENTDFGGDNKLNSTDEEEIMPLVTRDVSHRHCCQPDTTVRWLKPSLIVTYPGGATRMRLVTTVAVAAVLCFTACLVLFHPHGVGVLAAPVKRYLSSDSAS

SEQ ID NO: 54422 - protein, 162 aa, Zea Mays
MSRTQIVKQLWAYIRQNNLQDPDDKRKIICNDELRVVFETDTTDMFKMNKLLAKHITPLDPKDQLHEVKRMKAPTVVPQPPPINQPSVVISDALAKFIGTDGTFPQDDALKYLWDYIKANQLEDVISGSILCDSKLQELFGCESIPMSGLSEMLGHHFIKKT

SEQ ID NO: 54423 - protein, 95 aa, Zea Mays
MDIVIKDGVWVGHLLSGYSLPMDMSSQVNVKSSEEVAGMWKHSIKVSYEATKAAFPGGEVIAHLDHKSFKGWQKNAVTCFLQEQNIRIGKPSDFL

SEQ ID NO: 54424 - protein, 494 aa, Zea Mays
MESSSKSSYSKLSAANDKMDSDAAGSHESARSNGLSVDAADKAPAAGGAGRADKTSDASTGSSDDSLVDSSGGTGRHTKRHTGSDRRWEAIRSASAGGSPLSLVHFRLLKRLGYGDIGSVYLVELRGTGTFFAMKVMDKEALISRNKLVRAHTERQILGLLDHPFLPTLYTHFETDKFYCLVMEYCCGGNLHSLRQKQPNRHFTEQAARFYASEVLLALEYLHMLGIVYRDLKPENVLVRDGGHIMLSDFDLSLRCSVSPMLVRSSSVHAAANNGVVHADGASQQGQGCIQSPSAFFPRIVLPKKSRKTSRSDSSIKDGSILEFNAEPTDARSTSFVGTHEYLAPEIVRGEGHGSAVDWWTFGIFLYELLHGTTPFKGDSNRATLCNVVDQPLRFPDAAPPVPVSTVARDLIRGLLVKDPQKRIATRRGAAEIKQHPFFDGVNWALVRDAHPPSVPDPADLGRFASKEKPAAAVATAHRAPAAKPKTGNFVQYF

SEQ ID NO: 54425 - protein, 1470 aa, Zea Mays
MTAEGTACNGAGEALKAEFAPEKVVAVSLEEKPVGEREGEDVGGPFLIVNGGDSDGHSEPGSDLGKAPDEDPASEEDDVPTFNAAPDAAVAGDHGTAEGQVGAQGAALGASSADGGDRASDGSEGSADESRGDPSSDCVAEVAQQEAVGEEDSGAAALASRECEPTITSADSEAHYVDSEVEDKEGTVDGSAVVDAVEAVVHQEASTEQDEDAAVMSSGHDDALTSPKSCSAAVESEVIREDSKEQSITDGVEPQQQGTVGASTLVENEHLCADMMADSFVAANEPDSQEDAAVMSSGHDDALTSPKSCSAAVESEVIREDSKEQSITDGVEPQQQGTVGASALVENEHLCVDMAADSFVAATEPDSQEDAAVESCGHDDLLTFTESGSADIESEVYGEDSEQKESNTVVVEIVVQGVGRADVLMANGHLCADTQAGSSEATTEPENHANGSKLTDVAESVEGDAGSGEQDTMDSSQTNGHIYVALSADSCIVPSESKAHSFETDGQRTDQLQEEAPKLEAEVLEGVLKPTERNCAGSVEKLIGEEVGTDGHASIGGTADAYGEQEAKPMQVEGEVTCGILEFEKVDKDGEEGLCDDYTVGVVSSNEETELPMKEKVDEAVPSVNVGGPEKVTDNTSQDTKTVDFIDEITAESNFKAENMVEVKSAAREVDKTEVKDLAFADEANVAPLHLQRDCESVMETIEHEKVELPGGCQAHEIVYSSELEPKKEFEMGVDGAVPLQGAAASVASVFHHEPMSIDLSENDSGNHSGPTTALESCDHVQNEESISQEISMTTIEQPIAIDQVEPVNLNVDELVVDDDQPGFAPRCESARLDKPGCTSKKDDSNEIVEDSKSLENQLEICNAATMSDECSSRNANEDPSPINMSAECSSRTANEGFSPINEASHLAEESCLSDKSYNAISYENGNGPAKSSEEPDKSCNAIICENENEPAKSSDVVETRCVEALAPSSVGTVVTAEQKDNGHRASGEWHGDNVQVIGQQQKIYIIKVPKFAGDDLWNKIQAAQAHLDHLTQERDAINRRRQKQKAVCDQYREKLEAARREEREARTAHGDKKNDLNNVRSVLGKLHQANSAEELDELIAKKERTMQHETISLKEEKLLIKEINELKAQRKQLSTTMGSKAEINEAFDQKDHIHERHKVLKKDSDVLLTNLKFLEENTRKIQKSFEDERTGLRKLTEEHRAANEIRQKAYIEWTELRSEPSKKNEYFFRYRDDRNAAEIFRANGDINGLKSHCNSQIEGVMEMWNKNEEFRKQYVESNKVSTLKRLGTHDGRKLGPDEDPPVISSRRPSSIYPLSASSPGVATLASIPAPVVAAPAAVSAKEDSFPVLEAPQTSKRTKSKASDICAQTENNSVIVSEAEALEQTLKEKARLLEEQLELARKAEELARKEEELSKERAAAEKERLRMEQKAKAKEAEERKRRKAEKDKEKAEFKARKEAEEREKVSNSNS

SEQ ID NO: 54426 - protein, 479 aa, Zea Mays
MTLQVKFEEVAFSFNGGKDSTVLLHLIRAGYYLYKKDSGDVAQTDAVKNCPLRTIYFESPCAFPEINSFTYEIVSTYGLPLETIHSDFKSGLEGLLKEKPTKAIFIGTRIGDPNAVGQEQFSPSSPGWPPFMRVNPILDWSYRDVWSFLITCKVKYCSLYDQGYTSIGSIHDTVPNALLSDSSSEKSFRPAYMLTDGRLERAGRTKKINPKVEMNSAASNGINDTEGGRMISRAASIIVVGDEILFGTTEDNLGAALCKKLHAIGWRVSHVAVVRNEIDSVAEEVERCKSTDDMVFIFGGLGPLHSDVSLAGVAKAFGVRLAPDEEFEDYLSQLMGNNYTGDRNEMAQLPEGITELLHHKTLPLPLIKCRNVIALAATNMDELDTEWDCLLGTQESGLMPSKPFVSKHLSTTLSDVQIASVLAKLCLEFSDVYIGCHRISRAGPLVVNLTGKDNQRVDAAAEKLTSSFEGQFSQLNSCK

SEQ ID NO: 54427 - protein, 120 aa, Zea Mays
MQDDTDDADFPFAVDDVDPDSRPGSSGGKDTGDPVGSSFHKSQDAAVGYLVHLLKSARPLRDFSYSSHTSMGESIEAGSTSSFMSRRTSDALEEFESFKEIRENLLARSRSWLQDSLDKS

SEQ ID NO: 54428 - protein, 191 aa, Zea Mays
MFAVVTEAMWQMNLGDAMELGPYPERVGDPDCSYYMRTGMCRFGMTCKFNHPADRKLAVAAARMKGEYPQRIGQPECQYYLKTGTCKFGATCKFHHPREKAAMATRVQLNELGYPLRLNEKECAYYLRTGQCKFGSTWGCNKLALVEICFFHCKSKVARSFKLCTSYCSSWACSGPRVESLCCADWFFILG

SEQ ID NO: 54429 - protein, 145 aa, Zea Mays
MAIVSLAATSMTFSRFARRRSACVRGSRLPPKQPWRPRCSAVRSTSAACSPRFRTAPLPRLLGHSDPEDLPAERRHHHDRPLLRRESPPPPQQVGVPEQAAGFPGARPGAGHLGRTARARHGRAQHPRPSTSARPRKPRFVEMVD

SEQ ID NO: 54430 - protein, 970 aa, Zea Mays
MPVRSSVAMTTTAARALAALVLVTAAAAAAAVADDGAALVEIKKSFRNVGNVLYDWAGDDYCSWRGVLCDNVTFAVAALDLKSNGLSGQIPDEIGDCSSLRTLDFSFNNLDGDIPFSISKLKHLENLILKNNQLIGAIPSTLSQLPNLKILDLAQNKLTGEIPRLIYWNEVLQYLGLRGNHLEGSLSPDMCQLTGLWYFDVKNNSLTGAIPDTIGNCTSFQVLDLSYNRFTGPIPFNIGFLQVATLSLQGNKFTGPIPSVIGLMQALAVLDLSYNQLSGPIPSILGNLTYTEKLYMQGNRLTGSIPPELGNMSTLHYLELNDNQLTGSIPPELGRLTGLFDLNLANNHLEGPIPDNLSSCVNLNSFNAYGNKLNGTIPRSLRKLESMTYLNLSSNFISGSIPIELSRINNLDTLDLSCNMMTGPIPSSIGNLEHLLRLNLSKNDLVGFIPAEFGNLRSVMEIDLSYNHLGGLIPQELGMLQNLMLLKLENNNITGDVSSLMNCFSLNILNVSYNNLAGAVPTDNNFTRFSHDSFLGNPGLCGYWLGSSCRSTGHRDKPPISKAAIIGVAVGGLVILLMILVAVCRPHHPPAFKDATVSKPVSNGPPKLVILHMNMALHVFDDIMRMTENLSEKYIIGYGASSTVYKCVLKNCKPVAIKKLYAHYPQSLKEFETELETVGSIKHRNLVSLQGYSLSPVGNLLFYDYMESGSLWDVLHEGSSKKNKLDWVTRLRIALGAAQGLAYLHHDCSPRIIHRDVKSKNILLDKDYEAHLTDFGIAKSLCVSKTHTSTYVMGTIGYIDPEYARTSRLNEKSDVYSYGIVLLELLTGKKPVDNECNLHHLILSKTASNEVMETVDPDVGDTCKDLGEVKKLFQLALLCTKRQPSDRPTMHEVVRVLDCLVNPEPPPQPQQQQQKAHAHHQLPPQPSPPAYVDEYVSLRGTGALSCANSSSTSDAELFLKFGEAISQNMV

SEQ ID NO: 54431 - protein, 66 aa, Zea Mays
MTNFPSALYNFVMNVTLSDEPAMEAFKFSSYYSLCSNPPFQIVPTCKSLAFLKLLFPPLQFLSFKF

SEQ ID NO: 54432 - protein, 172 aa, Zea Mays
MPTTGPRSPTPPRASSSQTPRLPRLRPSPPHRKENLCSDVYLRQQMDDQGWVDISLIAGFKKVQGLKKDLQYIKETVQSSSILEMKDNKIRKHDDWVKWVIPRESNPDVPSSSASVPRPDVNNLTAHLGGMDLQDSASSAGAVEPKHNDVVQNGSPSGNEEAAVAEDSSDQQ

SEQ ID NO: 54433 - protein, 122 aa, Zea Mays
MLYYPYLPKVIGSDFLERRLRDIHSNREDRAACHVFGHTHFCWDSVVDEIRYVQAPLAYPRERKRRMNGEGWLPFCVYRDGFNPEIYPALWSDYYNKNKREPENTQLAPWVASHYAKYHKFH

SEQ ID NO: 54434 - protein, 532 aa, Zea Mays
MFESIDKGNLIYKIDVFLTSSVFRTWKDSIIVLQSTKSLQPWCENLKVINHCIDCIASKASIDPSEVEWSYTYNRKKLPSENGIDSHWNGVRKQPMVPSDWWVEDLCELEVDLYKRVIMTIKAKGSTPAAVIGEALRAYAYRRLLGSLEDAVSNGVDCTKRRAALDAIVFLLPAEEGSVSCGFLLKLLGAACLLESGESHRVNLIKRIGTQLDGASVPDLLIPLNTNEDNISSIDLIMAIVEEFMSRNGDSGTEKFQDDEGIVDIEKSTSVSSASKLAVAKLIDGYLAEIAKDPNLPLPKLIALAEMVSSLPRPTHDGLYRAIDMYLKEHPSLSKSEKKKLCGLMDCKQLSQDACMHAVQNERLPLRVVVQVLFFEQVRASSSVASARSDANSTSGLPSAVRSLLPRENGNSIGSSRSAATTMTTEEEESGVPTSSDINSLRSMRLANNSGGSERSSGSSDVNNKSSDDRSAAATGKAKGTMLMPKKMLSKLWSGKTNAGESSSSDTSDSPGSANPEEAKSTQSRITWRSVS

SEQ ID NO: 54435 - protein, 270 aa, Zea Mays
MTEGQTNDFLRDMIEMRKRQKSGRDTYAKGKSKRVGGGDGGDGGAAGDSADDGDAKGSGDDADADKDSKRMRTKFEELCNEDKILVFFKKLLNEWNQELDEMTELEKRTAKGKSMVATFKQCARYLSPLFEFCRKKVLPDDIRRALLVIVECCMKRDYLAAMDQYIKLAIGNAPWPIGVTMVGIHERSAREKIYTNSVAHIMNDETTRKYLQSIKRLMTLSQRRYPALPSKSVEFNSLANGSDLQALLSEENGSGKASEERLRLMPALKE

SEQ ID NO: 54436 - protein, 314 aa, Zea Mays
MAERVVGTGSFGVVFQAKCIETGETVAIKKVLQDKRYKNRELQIMRSIDHCNVISLKHCFFSTTSRDELFLNLVMEFVPESLYRVLKHYKDMKQRMPLIYVKLYMYQIFRGLAYIHTVPGICHRDIKPQNILVDPLSHQVKVCDFGSAKILIKGEANISYICSRYYRAPELIFGATEYTTSIDIWSAGCVLAELLLSQPLFPGESAVDQLVEIIKVLGTPTREEIRCMNPNYTEFKFPQIKACPWHKIFHKRMPPEAIDLVSRLLQYSPNLRCSALEACAHSFFDELRESHARLPNGRPFPPLFNFKQEVSVLV

SEQ ID NO: 54437 - protein, 106 aa, Zea Mays
MLGNVNTSSALSAFEKMEEKVMAMESQAEALGQLATDDLEGKFALLETSSVDDDLSQLKKELSGSSLKGELPPGRTAVSNSGAGRPFPDLEIESELNELRRKAKEY

SEQ ID NO: 54438 - protein, 95 aa, Zea Mays
MFPKRYSKSNSSKGLTNIQANAVEETSTRRAALEASINEVLFQIIKFANEKKDHIPAIPDRIFNHEIMIPSSDSVFGWNTDVIRRVLNSGHPYSL

SEQ ID NO: 54439 - protein, 771 aa, Zea Mays
MKELAAERAKRMKAEEEERIKNQKAKALAKLEELNRRSSVLQKKSNDTKVETDDAHDKQQIGLDVNAKLDTSTEQHDVVTPDRLTALLPPNDPNHTMVQIQAQSTAQSNALDGGKAHDAHTTSSLVKNTHSNMEHVVQKSISQSHNISMVKTKQGYRKRQVVSEEKISGEKASASVTTDSSVQKNVDVPVDTVTAVVAPHDDPPTQNKKGTRHLRSKKKVDDASVISKHPPVVFNEQNTVKISTEPKTHTGGVIISSSIVPIEGTIVTVGSITVGGLSLTAMNQEHVNSADGTNSTESGLSRPQQARKSGKHQHVLRPVEKPHGNDGVLWAPDMLPLHNEQSDGAMPTAAVADVTQPAGKAINDGENVTRTKRAEMERYVPKPMSKELQQHNPSHDKEAIDKPGAAKSHPAAEPKKTSKGHGGKSNPSWRKRDPDQPAMVAPNSVDQADNSYESKEVQNCTDMNQPVELGKEDTQLKSNVDAAAENSSAPAQTVPLSAGGAKEHSAANRQRRQHFKAQRNEASSYSNESKVREGKNDSVYQSASPVIDSNSSNHKNVPRSDVKNSGIVSHSRAWKPKTNSHPQNSSDGKIAVEGKVDSHGGRLELNMPKGSDTITHQDTSSKPMKRSDGTDEASHSKQENLTQEDGNQKIETGQEQANPAPRRQGQPNARYHRGGGAHRGRGGYDTGRPNHGTNAERWKGGSHLEYQPVGSQNKAGGDFQLSQGMEDRTEGPPASGQAFGERGHSRGLRPAGRFVRRNTASTSTTNSHQHE

SEQ ID NO: 54440 - protein, 132 aa, Zea Mays
MLRPNASLSSALNMLVQAGVSSIPIVDDNDSLLDTYSRSDITALAKDKVYTHVRLDEMTIHQALQLGQDANTPFGFFNGQRCQMCLRSDPLLKVMERLANPGVRRVFIVEAGSKRVEGIISLSDIFKFLLSL

SEQ ID NO: 54441 - protein, 243 aa, Zea Mays
MSNEMYSTIARVTDGIYEGIAIGGDVFPGSTLSDHILRFNNIPQVKMMVVLGELGGKDEYSLVEALKQGKVQKPVVAWVSGTCARLFKSEVQFGHAGAKSGGELESAQAKNQALKEAGAIVPTSYEALESAIKETFDKLFEEGKISPVTEITPPLIPEDLKTAIKSGKVRAPTHIISTISDDRGDEPCYAGVPMSTIIEQGYGVGDVISLLWFKRSLPRYCTQFIELLLGPERTLFPAWCLDY

SEQ ID NO: 54442 - protein, 322 aa, Zea Mays
MSSLSSIEAYFEFFAARSAQEHEELEEAEIELELIEKEKSVPNFVEHTNDTMVLAMPSYDRDGSEVNKRLQQIRENIRSLERSRLKEEITARRQKKLLLRHAREKYLEETRSRETELMQELDRERALEMEREVERQRQLDIERAKSRELQFNIDLEKEKQTQRELQRELEQVELGRSSRREFSANPNSRSRERYRERDGGGRAQQEAGSLRSSSSRGQEGGSAQAPAPAGPGPTVMLAGSRTFSGANLPTILQPRERAADEDSAWAEDASSNGDPELDGVRPHGPRGSRSSSSRQVAERRERDGTAAGTGRREGKWERKQHP

SEQ ID NO: 54443 - protein, 82 aa, Zea Mays
MAARMLIADPPRILRRQAPKPHAPTSPATPPAAKKPDLVERTADFAVIVSSRLPSPAPGGPPPVCSDDIELVPETPQFRLNT

SEQ ID NO: 54444 - protein, 733 aa, Zea Mays
MEAMEELSELAESMRQAASLLADDDPSDDAAPRRPTTFLNAVALGNVGAGKSAVLNSLIGHPVLPTGENGATRAPIVVDLQREPGLSSKSIVLQIDSKSQQVSASALRHSLQDRLSRGASGGSGRGRVDEIYLKLRTSTAPSLKLIDLPGIDQRAVDDSMINEYAGHNDAILLIVIPAMQAADVASSRALRLAKDIDADGTRTVGVISKVDQANGDAKTIACVQALLSNKGPKNLPDIEWVALIGQSVAIASAQSVGSENSLETAWRAEAESLKNILTGSPQNKLGRIALVDTIAKQIRKRMKVRVPNLLSGLQGKSQMVQDELARLGESMVQSAEGTRAVALELCREFEDKFLAHITSGEGSGWKIVASFEGKFPDRIKQLPLDRHFDLNNVKRIVLEADGYQPYLISPEKGLRSLIKIVLEMAKEPSRLCVEEVHRVLLDIVNASANATPGLGRYPPFKREVVAIASNALETFKNDAKKMVVALVDMERAFVPPQHFIRLVQRRMERQRREDELRNRSSKKTQEAEQPTSKRASSPQTDAEQGGGSLKSMKDKSGQQDKDTKEGSNLQVAGPAGEITAGYLLKKSAKTNGWSKRWFVLNEKSGKLGYTKKQEERHFRGVITLEECNLEEVEEEEPSKSSKDSKKANGSEKISSLVFKITNRVAYKTVLKAHSAVVLKAESMADKVEWVNKIKAVIQSKGGSFKGPSTEGSSMRQSNSDGALVPLYILDVPI

SEQ ID NO: 54445 - protein, 119 aa, Zea Mays
MIMATNRPDVLDPALLRPGRLDRKIEIPLPNEQGRMEVLKIHAAGIAKHGEIDYEAVVKLAEGFNGADMRNLCTEAGMAAIRAERDYVIHEDFMKAVRKLNDAKKLESSAHYSADFGKD

SEQ ID NO: 54446 - protein, 50 aa, Zea Mays
MLLPPIDDAENFVRMQGRDFGVICLWRARFSCCSGAGAKTCTTSAAFGYK

SEQ ID NO: 54447 - protein, 491 aa, Zea Mays
MAAQVVAAAGTPVARPLGGGSGADALRPAARMPRERRTGAVAARGRRESQVVSVISRAPRPDAGVLPVSPDDDAAVKEEANFQHLKAIQQLATAANGVWSKPNVRRKTKIVCTIGPSTNTRDMIWKLAETGMNVARLNMSHGDHASHQKVIDLVKEYNASHADNVIAIMLDTKGPEVRSGDLPQPIFLESGQEFTFTIKRGVGTDTCVSVNYDDFVNDVEVGDMLLVDGGMMSFLVKSKTEDSVKCEVIDGGELKSRRHLNVRGKSATLPSITDKDWDDIKFGVDNQVDYYAVSFVKDAQVVHELKDYLKSCNADIHVIVKIESADSIPNLHSIITASDGAMVARGDLGAELPIEEVPLLQEEIIRMCRSMGKAVIVATNMLESMIVHPTPTRAEVSDIAIAVREGADAVMLSGETAHGKERVRQRLALYQGVCPVQMEFSDDAEKTFGNALSYLLKHGMVKDGEEVALVQSGKHPIWRSQSTHNIQVRKI

SEQ ID NO: 54448 - protein, 316 aa, Zea Mays
MHQISLSVPSSVLHQVPEGHVGVYWRGGALLKTITPPGFHLKLPLITQYEPIQVTLQTDQVRDIPCGTKGGVMISFDKIEVVNRLRKEFVHETLLNYGVHYDKTWIYDKIHHEINQFCSAHSLQQVYIDMFDQIDETMKEAIQRDCTRYAPGIEIISVRVTKPNIPGSIRRNFELMEEERTKALIAIEKQKVAEKEAETQKKIALSEAEKNAQVSKILMEQKLMEKDSSKRQEKIDNEMYLAREKALADANYYRILKEAEANRLKLTPEYLELRFIESIANNSKIFFGEKIPNMIMDQRLLKNYLDAVPRKDHYEM

SEQ ID NO: 54449 - protein, 375 aa, Zea Mays
MAFNKIKVSNPVVEMDGDEMTRVFWKSIKDKLIFPFVDLDIKYFDLGLPHRDATDDKVTVEAAEATLKYNVAIKCATITPDEARVNEFGLKAMWKSPNGTIRNILNGTVFREPIICKNIPRLVPGWTKPICIGRHAFGDQYRATDAVIKGPGKLKLVFEGKEEQVELEVFNFTGAGGVALSMFKDIFQEVYEAGWKTKFEAAGIWYEHRLIDDMVAYALKSEGGYVWACKNYDGDVQSDFLAQGFGSLGLMTSVLVCPDGKTIEAEAAHGTVTRHYRVHQKGGETSTNSIASIFAWTRGLAHRAKLDDNARLLDFTQKLEAACVGAVESGKMTKDLALLVHGSSNITRSHYLNTEEFIDAVADELRSRLAANSNL

SEQ ID NO: 54450 - protein, 448 aa, Zea Mays
MFASPWQPVIGDKHQRLCVTPIAVDCSSSVKFSVKGFNIVQPTTKLLCVFDEKYLIQEETQMLLEDSTMQQGPQCLTFSCSFPCTSGRGFIEIEDYDQSSLSVPFVVTDKDVCSEIRMLEHGLDLVSFDQTSKRIDDLMIYRSRALHFLHEIGWLLQRSHVRATSEQRQYCPDRFPVARFRWLLSFAVDQEWCAVLRKLLNTMFQGDIDVLSPIEFALGENLLHTAVKKRSKPLVEFLLRYTTTNIAPVGGGDGAPVQFLFTPAMTELSNITPLHIAATISDAIGVLDALTDDPQQLGIKAWKNARDATGFTPEEYAAKRGNISYIQMVQDKIDRRVTRAHVSVTIPSTIDTVGKHGSRMKPADQITFGVEKKQLSINQTLSCRQCVQQAQQLAFHPRTNRFLSNRTAMLSLVSIAAVCVCVGLIMKSLPQVGCMKPFLWDNIRWGPN

SEQ ID NO: 54451 - protein, 192 aa, Zea Mays
MVRGALTLPHGTGKTVRVAVFAEGPGADEARAAGADVVGGDELIEEIRTGGGKLSFDKCIATPMFMPRLSKVARILGPRGLMPNPKLGSVTNDVSGAVKAAKSGRVDFKIDKTAIVHVGLGKVNFTEESLRENIGAFVHALLLAKPVGLKKTSKYVGYVKKFTLSSTMGPGLPVTIPSLSVAADHYNKVQVS

SEQ ID NO: 54452 - protein, 577 aa, Zea Mays
MLLLRANALAAVPVSFSITPAASYSCFPWPSSSTTAASCSVGSSARLDAAVQYDPLRPGSDAWAHPDGMVTAEGDEEKQRYDTEGESNDWEGEGPQGSSDPEGINVPRQRYIAVPKEALLDAVLSQFASDDDDAADFKRCARCLDAILHAEHKRMLEEMRTSYMLTQRHRDEEEEQDDTDTASGSDYVNGKAGSGFFGITQLDGTLFLTRSVDLRTLLGLTPDPDSQTRVAFATQFQRSFMTLLRNAQFEELSAQDLLLTYALNNDYLLTLPIYVDWKKAAQSNAIIFRRGYATERQKGLLLVEKLDYLQSKLLQNVFFSLSKPLKKPGKWLNEALKRSTDNQGFQIWIDKLRLWLKEQTYADNSLLLIESSSWDKLSSDQLPDADVPIWIAAQRAVSRYEGILSPVGPRGRLLRRLLKWTGLIPSLPEATIKSNNETKHLEGHVRPNFLPRITLANIWEPASRESCNNNIWEMVKASFRILFGRSTLQEPAFQELILLYTDEVVPSETKDEMVPLQLKIYERIPIPDLPVVFPHKKLSFRILDTVRLDIATVIGLLAYVVNYKFESLASSPSAFSS

SEQ ID NO: 54453 - protein, 492 aa, Zea Mays
MPLAAAAAAVAACPSPIGLTRSLCRIEAHPRRRRRFRLEANSSASTSAPAPTAADEGGGAGLCPVVRFDMADFTVADRVSVGLHGRSDEMIFEATVCDPSSELYGSTVVLRQLKSLQAKRRGRRALEVLKKLARRQMMYHSYALQVHGYIAPCNAVEEEDVPLVLVHGYHGSHSLRHWLQLSDWIPTLEATLALDEEQVRRVGDDSVGGPAVTRQLRLIRILMRDLLIGVNYLHSHGLAHTELRIENVHVSPIDKHVKVGILGNAADFQDNDLSSSTIASNNDRRKMMIAFDMRCVGFIMAKMVLRELMDPSTFFKFKSFLTKGNDPSCLREFLLPTLYQNSPSGNIGLQMLDRQWGAGWNLLALLLATKPEERISCVDALRHPFLCGPKWRINPSANLIRWGLGSTAVRMAEDYIYGRHQRRRLSYFVELMEVLNPSLRTQNWLHLLPGRWRLLYCTGRHIGLTLQLCQNPIGLTTNLAVREFCLSPHQQG

SEQ ID NO: 54454 - protein, 489 aa, Zea Mays
MFGQRAMKVENMVKLKEEFDYKSLCRRLDIELDKLIAENERQRKYFDDEVERIRDEAQCRIAEAERECKITLENEKTKCHQEYLDSIRILEEKWKVHQQSPKKQNEEAESTSNDTREVHNLLQNEKMLRQSAEDEASDLKNQVSHWKKLEATATAEVVKLRKMLDTEASQKEKLEAEIDILRSQLLQMSMEADETGSLDKGNGPGKIFPGLDSLVSQTRSSQFREQSNGPKQPIAKLFEQVGLQKILSLLESEEPDVRVHAVKVVANLAAEEANQEKIVEAGGLTSLLMLLRSSEDETIRRVAAGAIANLAMNETNQDLIMAEGGVTLLSMTASDAEDPQTLRMVAGAIANLCGNDKLQIRLRGEGGIKALLGMVRCGHPDVLAQVARGIANFAKCESRAATQGNKVGKSLLIDDGSLPWIVKNANNEAAPIRRHIELALCHLAQHGALWELVRISRDCSREDIRKLAYRTLTSSPTLQAEMRRLGIKL

SEQ ID NO: 54455 - protein, 282 aa, Zea Mays
MADFGVLHRNELSGALTGLTRVRRFQQDDAHIFCREDQIKDEVKAVLEFINYVYEIFGFKYELELSTRPEKYLGEVETWNKAEQQLTEALNEFGKPWKINEGDGAFYGPKIDIGVFDALKRKFQCATLQLDFQLPIRFKLAYSAEDEAKIERPVMIHRAILGSVERMLAILLEHYNGKWPLWLSPRQAIVCSVSSGSVEYAKQVLATLHEAGFHVDIDASDRTIQKKVREAQLAQFNYILVVGAQEAETGNICVRVRDNADLVTTSVDGFITRLREEIAAFK

SEQ ID NO: 54456 - protein, 169 aa, Zea Mays
MAAARADGERRIGVAIDYSESAKKALDWAIDNLLHHGDTLVVVHVLHHGAEETKHTLWAKSGSPLIPLSEFREPEVMQGYGVRPDAEVLDAIDTAARQKQLKVVAKLYWGDAREKLCDAVEDLRIDSLVMGSRGLGPIQRYSTILRLHYYYYSTIEMLPHQDWNALFSL

SEQ ID NO: 54457 - protein, 115 aa, Zea Mays
MGQSMEMGTIHAGNFLRRFCSTLGMNNQAVRAAQDAVKHSEELDIRRSPISIAAAVIYMITQLSEDKKPLKDISLATGVAEGTIRNSYKDLYPYASRLIPNTYAKEEDLKNLCTP

SEQ ID NO: 54458 - protein, 540 aa, Zea Mays
MNDCMSSYEKLKKFKIDSMDLKINIIAALVAAGRASEVQAAMKALKVDLTTRALRDTRSFELAYNSACSLIENKKYSEAKEQLDLAKRIGKEELMVEDYGEADIEYELAPVSAQLAYVQQLQGQSQEAMQTYVNMINGQSADLSSLAVATTNLISIKGTKDTADSLKKLDRLIGTTTAPNQLHLVENLDYKLSPWQKEALYSARVLLLLHANKTEQAHELVRGLLGMFPDSVFPVLLQAAVHVKEKKIHKAEDVLSQYAEKRPENSKGLLLALAQIAANANHFQLAADSLSRIPDIQHMPATVATLVALKERLGDSNAAASVLDSAINWWKNSMTEDNKLDILTREAAAFKLSHGRDEEACLLYEELVKSHGSIEALAGLVMTSARTNLEKAEQYEKKLKPLPGLKGVNVESLEKTSGARHVEGPQDMKVDVPEEVKKQKAKKRKRKPRYPKGFDPANPGPPPDPERWLPRRERSSYRPKRKDKRAQVRGAQGAVSRETSATNVGASSKGSQTTNSSKTPAVNAEQPKTSNKSRKKKSRH

SEQ ID NO: 54459 - protein, 200 aa, Zea Mays
MKITALLVLKPSTSGAGSSSSGGESGPEAVVLANAIDVSHFGYFQRSAAREFIVFVARTVAQRTQPGQRQSVQHEEYKVHSHNRNGLCAVAFMDDHYPVLDEYQKAYGDSWKSVTADETQQWAFLTDALTKFQDPAEADKLMKIQRDLDETKIILHKTIESVLARGERLDSLVEKSSDLSAASQMFYKQAKKTNQCCTIL

SEQ ID NO: 54460 - protein, 81 aa, Zea Mays
MTKSRPGVLLGPPPSGSAAAAARREFLSRVAMLGLRARAASQLQRPTPSPSSASSASFSLARLGCASPLAALAYSVGCSLE

SEQ ID NO: 54461 - protein, 966 aa, Zea Mays
MLEVLDMAPPPPPPPPPPHARHHQGAAKGGHAERRKQPLQSSVTQPKAEPAAAAAAAVLPEGGKRCGGGGGRRRGGRGRAKAPPGEPRVALALAPPPRTVIGPPVPSKGLSFCRRPGFGTVGARCVVKANHFLAELPDKDLIQYDVKITPEVSSRTVNRAIMAELVRLYRSSDLGMRLPAYDGRKNLYTAGTLPFDAREFVVRLTDEDDGTGVPPREREYRVAIKFAARADLHHLRQFIAGRQADAPQEALQVLDIVLRELANQRYVSIGRSFYSPDIRKPQRLGDGLQSWCGFYQSIRPTQMGLSLNIDMSSTAFIEPLPVIEFVAQILGKDVISRPLADANRIKIKKALRGVKVEVTHRGNVRRKYRISGLTTQPTHELIFPIDEQMNMKSVVEYFKEMYGFTIQHPHLPCLQVGNQKKANYLPMEACKIVEGQRYTKRLNEKQITSLLKVTCQRPREQEMDILQTVHQNGYEQDPYAKEFGINISEKLTYVEARVLPAPWLKYHDTGKEKECLPQVGQWNMVNKKVINGCKVSHWACINFSRSVPEATARGFCQELAQMCQISGMEFNSEPVMPIYSARPDQVVKALKSVYNIALNKLKGKELELLLAILPDNNGPLYGDIKRICETDLGLISQCCLTKHVFKISKQYLANVSLKINVKMGGRNTVLLDAISWSIPLVSDIPTIIFGADVTHPETGEDSSPSIAAVVASQDWPEVTKYAGLVCAQAHRQELIQDLYKTWHDPQRGTVTGGMIRELLISFRKATGQKPLRIIFYRDGVSEGQFYQVLLYELDAIRKACASLEPNYQPPVTFVVVQKRHHTRLFTNNHKDRSSMDKSGNILPGTVVDSKICHPTEFDFYLCSHAGIQGTSRPAHYHVLWDENNFTADEMQTLTNNLCYTYARCTRSVSVVPPAYYAHLAAFRARFYMEPEMSENQTSKSSNGTNGGLVKPLPAVKEKVKRVMFYC

SEQ ID NO: 54462 - protein, 107 aa, Zea Mays
MATFTKLEDSPMFRKQVNSLEHLTDELKERCSNLHKGCKRFMGSLDEAYAGDLSFADSLQAFGAGLDDPISVAIGGPVMSKFTTAFRELGTYKELLRSQVVRVTQKE

SEQ ID NO: 54463 - protein, 113 aa, Zea Mays
MEGAERPRRRGGHLPGGHRGRSRERPPRRGLRALPLEHRSGVSCDPGGHGGGGGGGVSSRAPGTAAEKDGPRSSGPTGGRKAWTAGYRNVVERRVVEGDEVAWIRDGMFYGIL

SEQ ID NO: 54464 - protein, 317 aa, Zea Mays
MENHASSAWTDTETLLLLEGVLKHGDDWDLIAQHVRTKNKSECIAMLIQLPFGEHMLGTINGKFVSRLHINQTDDGKTNQHIMESSSHSTEMADGMQIDGSEDSADKSVEEYPTKRRRLFFSMDATTSLMEQLAILTTAASPDVAAAAADAAIKAFGNENPQARKAFRLNEQEYKTKAFASNHVQQIDHKVSNKDTAMHGQSGSDKQEKKFIASAYQLRAAVATAVGVAAARAKMLADQEEREMELLMASVIETQLRKMQYKIKHFEELDSLMDQEYTAIQQMKGSLMNEWIKVLEHAFRAGVSLPRDELLTKLLLN

SEQ ID NO: 54465 - protein, 383 aa, Zea Mays
MALYLAEASRYFACTDLFREPSKYAWSDYYEDHFILPSQRIALVTNKRVMLLQCLDLDKMDKKPSKILWDVPWEEVLSLELAKAGYQRPSHVIIHLKNFRRSENFVRLIKCNIDNEREPQALSLCCSIRKMWRSHQAAMKVIPLKVPSGQRHVYFVSDDDKKESHSLSRPLLSSGGTSTDVEQQFINNTVHFQKMWSSEPEIQSRCKLVAKQIADDGRVFSIWRPLCPNGYVSIGDIAHVGIHPPHFAAVYKNINGNFALPLGYDLVWRNCAEDYKSPVSIWLPRPPGGYVALGCVAVPSFKEPTLDCAFCVDERLAEDAAYEEQIIWASSDAYPWGCYIYQVQSASMQFMALRVPKEQSELRPKKILESFLQQASETQTSRA

SEQ ID NO: 54466 - protein, 298 aa, Zea Mays
MNRRNTDNLVEDLLGDFEYQLQAPYIMYRNAAQEVIGIWFYNSQECQEVANLFSRILNAFSKVPPKPKIPPVQSEFEEVEAAPVLVDGPLEPQTSNIMSTTTHIQEDPLSAFFSAAANAGGNSAVAVARQPIQLFGATPVATHAATSITTIQSPGLHYLLPSQASSVSGMPADAHGSIGRSTNLVNPSLFSPLTSSQTTMVCTNSVVAIAPPQHPQTAQQPQSAPLLQPFLLPTASPSPPYGTPLLQPFPPPNPSPSLASAPVLSPALSRDKVRDALLRLVENDEFIDLVYGEIMNRQ

SEQ ID NO: 54467 - protein, 670 aa, Zea Mays
MGGVAHPTHHQSVSQQPQPRTITKAAHESTTAPRLFFFTCVACPAPMETLLAGNPANGVAKPTCNGVGALPVANSHAIIATPPAAATLAPAGATLGRHLARRLVQIGASDVFAVPGDFNLTLLDYLIAEPGLTLVGCCNELNAGYAADGYARSRGVGACAVTFTVGGLSVLNAIAGAYSENLPVVCIVGGPNSNDYGTNRILHHTIGLPDFSQELRCFQTITCYQAIINNLDDAHEQIDTAIATALRESKPVYISVSCNLAGLSHPTFSRDPVPMFISPRLSNKANLEYAVEAAADFLNKAVKPVMVGGPKIRVAKAREAFAAVADASGYPFAVMPAAKGLVPEHHPRFIGTYWGAVSTTFCAEIVESADAYLFAGPIFNDYSSVGYSLLLKREKAVIVQPDRMVVGDGPAFGCILMPEFLRALAKRLRRNTTAYDNYRRIFVPDREPPNGKPNEPLRVNVLFKHIKGMLSGDSAVVAETGDSWFNCQKLRLPEGCGYEFQMQYGSIGWSVGATLGYAQAAKDKRVIACIGDGSFQVTAQDVSTMLRCGQKSIIFLINNGGYTIEVEIHDGPYNVIKNWDYTGLVNAIHNSEGSDGGAAQGGDRHGDGRQERLPLLHRGNRAQGRHEQGAPRVGVQGLRRQQQAAQSPVMSPSIGLERSCNGACACVCLP

SEQ ID NO: 54468 - protein, 53 aa, Zea Mays
MSEERPVPRRESPWGLPEGDTRQPKAHRCNDRAEDVVQDGINPIYMSRNTSSN

SEQ ID NO: 54469 - protein, 88 aa, Zea Mays
MSLVVQQSTIHLTKPLFDNSSYFEVIKFPGGITIIPPQTAFLLQKPHATFNFTLNYPIYKLQDRTNELKDQMEAALLLNPYEICSFDL

SEQ ID NO: 54470 - protein, 687 aa, Zea Mays
MAIEPSVDAKNTENNSSEFAVNGHPNQNDSSDSDLSNIDDGDNSEDEDGSTNTISSYHVNDFQRLALACDDGSVRLYNVPESGRTLSVAWSSNAKFVFSGSSDGLIRCWDSTSFHEMYRITVGLGGASNSPELCVWSLLFLRCGTIVSGDSTGSVQFWDSRHGTLLQAHSYHKGDVNALTTVPSGNRVFSAGSDGQVILYKISKDEFGASKNVIKEQVQKWVYVGYLRAHTHDIRALTMAVPICREDALPEEKVVKIRRREKHEFSYHRWAHLGVPMLISGGDDAKLFAYSAREFTQFSPHNFCPAPQHPLIKLARNSTVNGDYVMLVQSSNFLDVLLVTVQNKLTTPSTSSSRGDATVRQLVRLKSKGSRKIISSAACANGTLLAYSDGVRPCLFALRHKGGKKYTLDKLELPKGLPCSQSMLFTVDSSNLILAGRNGKIYIIDIATREISNVFHPTRRADGAKISREPPVTKMFLSADGQWLAAVNCYGDIYVFNLEVQRQHWFISRMNGGSVTSGGFCPKNNTLIITTSKNEVYVFDVETKQLGEWSKRYTHQLPRSFQEFPGEVIGLSFSPQSSSSVIVYSTRAMCYIDFGLPVVEDVDLPNGSAGAAEKSDTKKIKKARQKRKAHDEESKQEKRNNLSFFAFKEPVLFVGHLLDSSILIVEKRWMDVVEGFGAPVHRHIYGT

SEQ ID NO: 54471 - protein, 499 aa, Zea Mays
MLFTIAVGVMWVMGAAALQKYIGSLGGIGASGVGSSSSYSPKEMNKDIMPEKNVKTFKDVKGCDDAKKELEEVVEYLKNPSKFTRLGGKLPKGILLTGAPGTGKTLLAKAIAGEAGVPFFYRAGSEFEEMFVGVGARRVRSLFQAAKKKAPCIVFIDEIDAVGSTRKQWEGHTKKTLHQLLVEMDGFEQNEGIIVMAATNLADILDPALTRPGRFDRHIVVPSPDVRGRQEILELYLQDKPVANDVDINAIARSTPGFNGADLANLVNIAAIKAAVEGADKLNAVQLEFAKDRIIMGTERRSMFISDESRKLTAYHESGHAIVALNTQGAHPIHKATILPRGSALGMVTQLPSQDETSISKKQLLARLDVCMGGRVAEELIFGEDNVTTGARNDLHTATELAQYMVSNCGMSDAIGPVHVKERPSVEMQSRIDAEVVKLLREAYGRVKRLLKKHEKQLHALANALLERETLTADEINKVVHPYQEEPQFSFQDEEFALT

SEQ ID NO: 54472 - protein, 234 aa, Zea Mays
MALANKLGGLLKKATSSNPSVYQAIRCMSSKLFVGGISYQTDDHSLRDEFAKYGQVIEARIIIDRESGRSRGFGFVTYTSSEEASAAITALDGKTLDGRSIRVNHANEKTGGFRGGGGYGGGHYGGGGGSGGYGGGDYGGNYSNRGGGGDYGVAGGGGGNFTAGGSDSFANSNFGSDSSFGGNGAGGFDATGGSTGDDGFSGTPDDNFGGNKNEETMDDIFKDDEPDSYADKRS

SEQ ID NO: 54473 - protein, 128 aa, Zea Mays
MLKELRHLRMERDSIEDKIHHLEWSLKLDDISENQKEKLFSEHDNLLKQRGHVRGLHQEAQRQHHQKFHKVWGQLMKTGYQNSRFAHQVERFACLYSSQVTNFGLYSPDKYYRPSEDYMPHEFDVLGL

SEQ ID NO: 54474 - protein, 944 aa, Zea Mays
MLFPERPFKSSPKLKSSFDSDNGLDYPDDALTKSKNMPIVQSSLPTLGIRNLVKDSIYKDSHELSVRISTEEEVKDHPSNCGDQPMQLNGPHHDSTQGKSKGLMDINESLRVLAKLREASWTPPESVHHARLSYDAPRFSYDGKEATSKLREVPRLSLDIKEGHLWNREIDSRLDPSLSSADRNSNTVTGSNAAFETQQEQPACKRLPSVVAKLMGLEELPEHNQSTASSHACNTVQENKQDAMLNSLSISYQYEHAPQQERNPDSTVRNLPNSKFPVQTAPWKQQERIVLPRKLPKGSKGAHGREPAAPWNQLKDLDFQQPNKDLRALKQILDSAKGLLENKKREEAFMPKLYNGNHDDQEMASANMRLNRNTNNMWMPEESNAESSFKSPIVIMKPSKSANLYSKVDSSVFPLGGSSDLPQPQTSNSTDRRKASTINRTAKGQYAKLSPRVPTSQPLVSCDRRSYGRNDDSSNNQKSSSLLVTESSTRRQQLPRNSSVSMQKNKNSTSPKLLQRKLDPERRARPPIPSAESNKSERQSGDRNNSETVSPRSKFRRKLVRPQGDDGMPIGLNNRTRSLYQHDNDMSIRSDGSISVASELDIISNDRSTGVNISNFEQGIGTPSGRNPQKVKTSYDANMDVPSVDPSAAISERPSPVSVLDSSFDQEDLFPTSRTPNSLAVDDERETLEEPWKPSVAIQSKNNKLANVASLLEKLQQLSVNKDEDAPPVDHIAFLCETESPDHRYVSEILLASGLLMKDLGSGQTGLQLHSSGYPINPDLFHVLEQRKAGWVSTPDGIHQSRSGTKSDPRRAHRKLMFDTVNELLLQKFEKETAVYALSSFTRAKDPPAKTFSGQQLPKFISSGIEELDMERSSISQKDSSVIPDAEILRRLQGWTSFSKELPGMVLEIERSIFKELVDEVVHGESADGPEMKAAGRRRRRLFA

SEQ ID NO: 54475 - protein, 182 aa, Zea Mays
MSFLFGKRKTPAELLRENKRMLDRSIREIERERQGLQAQEKKLITEIKKTAKEGQMGAVKVMAKDLIRTRHQITKFYQLKSQLQGVSLRVQTLKSTQAMGDAMKGVTKAMSQMNRQLNLPGLQRIMQEFERQNERMEMVSEVMGDAIDDALEGDEEEEETEELVNQVLDEIGIDINQEKSCT

SEQ ID NO: 54476 - protein, 93 aa, Zea Mays
MHGAAVFVVQTGSAVQCRGLIRAQVLAREAVHTDRRVCPSTPSASVNVCQSERVVSSCTYVWNTTFVLRPPAANAIQDEPCARCLRCLVGPEL

SEQ ID NO: 54477 - protein, 160 aa, Zea Mays
MNAIDLILKKLSEDVHYPPNLSSPFPYAGLTFPSYPGVPVGYMIPQVPYSNAVNYGPNNGYGGRYQNNKPTTPMRSPASNEAQESLTIGIADEHIGAVVGRAGRNITEIIQASGARIKISDRGDYISGTSDRKVTITGTPEAIRTAESMIMQRVSASSER

SEQ ID NO: 54478 - protein, 111 aa, Zea Mays
MIAALTGALPSGRLEEVSYVLLSLSRAFGEDMLNWARESINLIPPQALTDAERLRFFNIISDATSGSSLHNITDRFGEISDICRRNKTVQDLVQSALRPQDLTVTVVRQQM

SEQ ID NO: 54479 - protein, 906 aa, Zea Mays
MEREERRLTELGQKILETFVLSHIFSGIEVAYQEAVALKRQEELIREEEEEAGLLEHQMKGKRGGGVNEKDKRAKKKQTKQKKNRKAKDKERDEKCEVKILERLRDETAIDNSDGLPSQVEVIAKIDALEEGSSDGSDMSNRGKNQRNKGLSIISFAEEGDGLPSTSNVTGGLGRNSSGCCTAPKLDQDTVLLTLRDRLRKLGQRLHEKNIEGQKLLKKHFEARDAKAKEEPSDSSNSLDKPPDVPEIPVHSSEDTVDLKVNGTPKKDASVVNPVLEDSVSGIPVTANNEPVPSPTTTKMDPVSNKVNGSSLKMKVTMASPCSKSHPADMDKDASLPSKSPRTNRAAPVPPKLPSADKATLVPSKLPSVDKATPVPQKSPLVNKVAQARPKSPAVDKATPHRPKSPAVDKATPVRSQSPAVDKATLVRPQSPAVDKATPVRPQSAAVDKATPVRPKSPAIDKATPIAPKSPPVDKASPALPKSLSGAKDALFPSRSLQIDKFTPAAPRLSQDDKAALPSSEQSHISPATSSEAQGATTRKVTTTTSLSEAAAAWRPSSAPVLPTPRSTGPAASHIQTSTLLSRSMSEAAGRRPVNDPSFSAPSYTPQTYRNAIIGKSGLSMTSASLAYQPSSLDQDTAPSRPLSAYASSTVMMPPAGRSDQSSARHGFKSGPGKLEAHDGWQQWKGDSNVDMHLWRDHAPYQQMTNSQAYEQSRRDDTYQQACSRGTEKFSRHAGLQARQQFQTETPASHVWHQPQGPVAEEFPHLDIINDLLEEDQINGSIPESFRQDYNVFGLPFSPRGNLSDMEMASVRSPARFNSPKYDGGLSGAYDMNAVNGLRERQFPSLDIYSNGLSDVSASKPWLNGSASPSVSLGVNTNGYHPQVGEYLGGGVNGVSLWRRHANGRW

SEQ ID NO: 54480 - protein, 408 aa, Zea Mays
MPGAHQAPACYDALSARLVERAEFRACFTSGFSISAARLGLPDVGLISYGEMIDQGRLMTEAVSIPVIGDADNGYGNCMNVKRTVKGFINAGFAGIILEDQACGHTQGRKVVSREEAIMHIKAAVDARNESGSDIVIVARTDSRQAVSLNEALWRVRAFADAGADVLFIDALASREEMKAFCAIAPGVPKMANMLEGGGKTPILSPVELEEIGYKIIAYPLSLIGVSMRAMEDALIAIRGGRIPPPSSLPTFEEIKNTLGFNHYYEEDKRYAVTPAQPLYGTGYDNYTSEPNSPGDSRSRAKKTQEPVIDILPQLYDIGSSDSRGPSTGMWSRTLRLKITGRDGIQKIDARIPAGFLEGMTRIIPGLAGANIMERLRNAPVDTDNPQNGQILLDFEDAMGDRIQVFIA

SEQ ID NO: 54481 - protein, 66 aa, Zea Mays
MELMRSPTLFLRKEHKLAVGRLFRTVLSCHPQNDVSQWEKELYSRTEAYLQRGVTKPIGLPIRSFF

SEQ ID NO: 54482 - protein, 51 aa, Zea Mays
MMLIMVLIWRKLVQQRCVLRQEILLAMGFPELCPNRSLSAPMMKAKQWMAH

SEQ ID NO: 54483 - protein, 317 aa, Zea Mays
MQIALPSMPSLYIISFLYQACLEIHKVGGHILDRIILHNFAWELLQKVINIYENFLSSVESGNSPVSEKGILQILLDLRFIGDVLSGGTSSSTNTTEMQTKQDSLPSTISKTSFRRKQSQLHADSAVIEPINKLVNRLSQILDPIDWATYEPYLWENEKQSYKRHVVLFGFLVQLNHMYTGTMQKLPTKSNTDSNIMRCSQVPRFKYLPISAPAISSRSHKPSLQSLSSESTSKNPWKSYSNGDRSTTPEFDDNASLVGAAPLLKSFVTQVGTKFGENTSRWGSMLSDGQVGKLSDILPGPAAGFFSSFTSGARYDS

SEQ ID NO: 54484 - protein, 273 aa, Zea Mays
MEVVAKANHVTVMDHEMKSRREHFVPDPMRIPRTIMEQWNPQIADSLPDAFCGGWVGFFSYDTVRYVETKKLPFSKAPHDDRNLPDIHLGLYSDVIVFDHVEKKTHVIHWVRTDCYRSVDEAYEDGRNRLEALLSRLHCLNVPTLSSGSIKLNVENFGPVMQKSTMSSEEYKNIVVQAKEHILAGDIFQVVLSQRFERRTFADPFEIYRALRIVNPSPYMAYLQARGCILVASSPENSYPGTKEDNNQSSACWNHKKRQNKSRRQNFRTIAFE

SEQ ID NO: 54485 - protein, 537 aa, Zea Mays
MTKRERKDPGRMTSLGSLTKQPNLSWVPPGYRGFCKAKKCNWRIHASQLPDGKTWQVKKMSKRHYCRSRSKMEKNCMANQYWVRDKVVPMLRENPNLGAGALVKKLQEKYLIQVSYCVAWKGKELALDELMGKWEDSFDHIYAFKAAIEKESPGSVVEIQTEKVGEKIRFCKMFVAFKACIDGFLQGCRPYLGIDSTVLTGRWKGQLASAVAIDGHNWMFPVALGLFESESKDSWKWFMEKLQTAIGSPHGLVISTDAGKGIDSALTNAFNNGVEHRECVRHLFKNFQKRFHGEVFERNLWPAARAYRRTVHDKHYNIMKIASPAAIKWLEDTHKHLWARCYFSTASKCDYVTNNIAETFNCWIKDEKSLPPVELIDRIRQKILEKFFVRKNLADKLTGTILPSVMKQLHDAGRGLVGYVVHKGPDHTAEVSGVHKDLTPWRHTIDLVNRECSCKKWQLTGLPCTHALSVIGCFRNLKLEDYVDSYYSVEKFKTAYVGKIPTLTDKTEWEQPEVGYKVWPPILKRAAGSQGQEGSLE

SEQ ID NO: 54486 - protein, 77 aa, Zea Mays
MEPETFEQLEVSKELFGKAAAYLKDEMKVNLQYFDGRPMSGTVPQRVTCTVVEAQPNTKGLTAQPQHHLLLKRVRIL

SEQ ID NO: 54487 - protein, 117 aa, Zea Mays
MCDLLWSDPEDTVDGWGLSPRGAGFLFGGNVVSSFNHSNNIDYICRAHQLVMEGYKWMFNSKIVTVWSAPNYCYRCGNIAAILELDENLNKQFRVFEAAPHESRGVPAKRPAPDYFL

SEQ ID NO: 54488 - protein, 337 aa, Zea Mays
MYGSVSQLGTGNAILIILQLFFAGIIVICLDELLQKGYGLGSGISLFIATNICENIIWKAFSPTTINSGRGAEFEGAVIALFHLLITRTDKVRALREAFYRQNLPNVTNLLATVLVFLIVIYFQGFRVVLPVRSKNARGQQGSYPIKLFYTSNMPIILHSALITNLYFISQLLYRKYSGNFLVNLLGKWKESEYSGHSVPVGGLAYYVTAPSSLADVLANPVHALFYVVFMLSACALFSKTWIEVSGSSAKDVAKQLKEQQMVMPGHRESNLQRELNRYIPTAAAFGGVCIGALTVLADFMGAIGSGTGILLAVTIIYQYFETFEKERATELGFFGF

SEQ ID NO: 54489 - protein, 77 aa, Zea Mays
MLACDAAVPASRPLSWPTPGELDDLFAIYLKSIPKPEKLSRLQYLLGISNEKANEMQYAASEGSLPVAAEEKEELAF

SEQ ID NO: 54490 - protein, 125 aa, Zea Mays
MWSRFPCIEARGFIFGPAIALAIGAKFIPLRKPKKLPGEVFSESYVLEYGMDCLEMHVGAIEPGERVVVVDDLVATGGTLSAAIRLLERAGANVVECACLIGLPKFKDFYKLNGKPVYILVESRK

SEQ ID NO: 54491 - protein, 395 aa, Zea Mays
MLAGGIDKETSLAWMICGNELFIWNYLVSVAKDCIVLDIPSSLIGYNDVKPLLSIQWTVCIMRWHNSGASTRNSGEMLHRKSSTGVILCNKRTQAVAYWPDISAESSRSPVLSSSDHGEVSTCGAASDFLRFNSLIAAAVPGCIHECIAIASEPAGALWLFQCSPEGIRQRKVHADTLGDGGSDLYQKCDGGRSLVWLPSNVSSEGSDRKFFLLTNNEVQCWSISLLHDINVKKLGSHEIVGTDGDVGIKKDIAGQKNIWLLDMQIDEHGKEFSILVATLCKDRVSGSNYTQYSLLTMMYKPNQKFSSEDNVAKVERFLEKKAPSQVIIPKARVEDDKFLFSMRLKTGGKPSGSVIILSGDGTATVAMYWRGSTRLYQFDLPWDAEKVLDASINP

SEQ ID NO: 54492 - protein, 422 aa, Zea Mays
MGKGLIPADLDTWKQRRKVITPGFHALFIEAMVRTFTRCSERTISKLEELTESEGREQNSTIVDLEAEFSNLALDIIGLGVFNFDFDSVTKESPVIKAVYGTLFEAEHRSTFYIPYWNLPLTKWIVPRQRKFHSDLKVINNCLDNLIKNAKETRQEADVEKLQQRDYSSLKDASLLRFLVDMRGADADDRQLRDDLMTMLIAGHETTAAVLTWSVFLLAQSPTRMRKAQAEVDSVLSNGAITVESLKKLEYIKLIILEALRLYPQPPLLIRRSLRPDKLPGGCNGAKEGYEIPAGTDIFVSVYNLHRSPYFWDRPNEFEPERFSVPKKDESIEGWSGFDPDRSPGAMYPNEIIADFAFLPFGGGPRKCVGDQFALLESTVALALLLRKFDVELRGSPDEVEMVTGATIHTKNGLWCRLRRRT

SEQ ID NO: 54493 - protein, 342 aa, Zea Mays
MACSNKILTSQEVHELWLQEKAASEMDYRPSRMAVVAKHAEAFIREFFDQNPLSHVGLVTIKDGIAHRLTEIGGSPESQIKALMGKLECSGDSSLQNALDLVHGYLDQVPSYGHKEVLILYSALNTFDPGDITETIAKCKKSKIRCSVIGLAAEIFICKHLCEETGGSYTVALDESHFKELLLEHAPPPPAIAEYAAANLIKMGFPQRGAEELISICSCHKKIKSGAEGYICPRCKVNVCELPTECRTCGLTLVSSPHLARSYHHLFPVPPFDEVTPVPNRIQRGGQICFSCQQSLYNPDGQSNLHVRCPKCNQHFCLDCDIYIHESLHNCPGCESQRSIAS

SEQ ID NO: 54494 - protein, 486 aa, Zea Mays
MDESAQSAIDKLNGMLINDKKVYVGPFVRKQDRENVSNNIKFSNVYVKNLSDTVTDDELKEMFGKYGTITSAVVMRDSDGNSRCFGFVNFENADAAAQAVQELNGKIFNDKELYVGRAQKKSEREMELKEKFEKNIQEVAEKFQNTNLYLKNLDDNIDDEKLREIFAEYGNITSCKVMRDSYGVSRGSGFVSFKSAEDANRALTEMNGKMVGSKPLYVALAQRKDDRKAKLQAQFSQMRPVAMAPSVGPRMPMFPPSVPGVGQQLFYGQPPPAFINPQAGFAFQQPMMPGMRPGGPMPNFMMPMVQQGQQPQRPAGRRAGSGGMQQPMPMGSQQQIFPRGGRGYRYATGRGMPDPGMHNVGAVMPSPYEMGGMAMRDAGVSQPVPIGALATALANASPDQQRLMLGENLYPLVEQLEREQAAKVTGMLLEMDQTEVLHLLESPDALKAKVAEAMEVLRSAQHLQQSNASTEQQLANLSLNDGVLSS

SEQ ID NO: 54495 - protein, 201 aa, Zea Mays
MDVVEKIQRGTKLFLYDFDLKLLYGVYKADTRGGLDLVRHAFDGKFPAQVKFSVFKDCLPIPESSFKHAIKENYSSKGRFTQELNTKQVQRLLALFKPISLSKPAPQHIEDIRKPSDYEERRQLQHIEERAAPINVHAHPLEDRYKMTRSLHPPLFDEPRRGLVLNPYHMQEPQHVPLNYYHQVATRSPYHQPHMDIMHES

SEQ ID NO: 54496 - protein, 118 aa, Zea Mays
MLEPHQTISSLLLLLATSLLVLLPDVQPWSSSIRSTLLTLVLQLISGVQTPASSEASATSSRPSTRKTASEAYTGDYQHRSTGWSFTGACTLAASTLPRMSWSLWSPPCGSAGLQPRQ

SEQ ID NO: 54497 - protein, 213 aa, Zea Mays
MPLPVHGPACNSSGHLIGWHTFNSLPFSGKTATVVGEATPVLPRDLEWAGFVLNSRMLWKEADSKPDWVKDLDAVGENFEERWLKASKRSAAKKLSKLSRSHNESLLWIKKIPDIIAIDDEIYSNDDDPERWDMQIFRSIDSNSVKGFPKDPREATSKNLVFGKNVLIDMSVHTAYVNVIRGAQHFIYIENQYFLGSSFNWDSHRDVEIHGRN

SEQ ID NO: 54498 - protein, 785 aa, Zea Mays
MDRRSWLWRRKSTDKSPGETETSASEKITDEQDSAKSSPNSTRSPEITSKELEDDNDVKVKVLSERLSSVVLDVRAKDDLVKQHSKVAEEAVLGWEKAEKEISSLKAQLSAATAKNSALEDRLVHLDGALKECVRQLRRAKDEQDQTVQDALARQARQWESHKADLELRIVELTARLEAKSERSVVGATDGDTRSSRLAALEKENSALKLQLLAKTEELELRTIEKELNRRAAETASKQQLEGIRKVAKLQAECRRLQAAAQRRASSVNVELRRSPSSACVESLTDCQSDCSDSWASALVTELDQFKKDKSGASTRTASLVAADIDVMDDFLEMEKLASANGSSKGDAVEDASGQVEKALHEAQRELRTCRRRVMVAEERSAELQRQLNHANGDKHAMEAEAEAAEAKGRELEGKLELARADIAGLLDKGRILEERLESEKALTLELAAKYQDMETLEAEKRELNAQLETSRSEAKKLSDKIALMERKLEVEKALSIRLATKCHGVDALEAKKKGVELELESAREEIASLRNKASSLELQVMEEKASSAGLAMRCQELEELRSQLVSSNSRIVELNEKVKTLEDVIEKQRPVTAELESQLQSRHDEISSLKEDISLLQKKLESQKNLSSAYISALGASETEKKELATRFELGEKEAEELRGKTSLLEEQIHEERARSSEFAVKCRKMEEQFSRRSLLGHQPVKSSAIKDIQIRKETELAKAAGKLADCQKTIASLSSQLKSLADFDEFLPETETSGADSADAWDGDLKLLHPASYPTQIGCLAVT

SEQ ID NO: 54499 - protein, 141 aa, Zea Mays
MHTLAMFTGQLLCFSQVKCYVFNQKTLYDAYKKRTKDIEVDMEAYNKAKEADPEFYRDASSLQYGKVSNVPEENIDKMVKELKEREEKRKSFSRRRKFNEDKDIDSINDRNEHFNKKVERAFGKYTLEIKNNLERGTALPD

SEQ ID NO: 54500 - protein, 69 aa, Zea Mays
MRCPPNTVSTGNTPGVQRELADLPSPMPRSGDARHGQAPSSSLTDSETLSLSRFSLSWMLGGGSWLRPR

SEQ ID NO: 54501 - protein, 61 aa, Zea Mays
MRSTRTKALKSSLSRATSLVGRSLVPTRRLPSLPAHASRLTTPSLTRLMSMVTMLRPSTSF

SEQ ID NO: 54502 - protein, 256 aa, Zea Mays
MILFYPEDEKLFMVCFSFAEGPLAWALIVWRCSLVFSSFDKLVSVLIHLLPGIVLFTIRWWNPQTFAAMHPEGRDARVTWPYVEDKSYLWTWLFFVPLAAYTLWQLMYFLIVNVLRRQRLLRDPEVMTSYRELSKKAQKANNIWWRLSGLLGDRNRQVMYILLQALFTVATMALTVPIFLSYRMHVVFLILKVCASTWNGGSFILEVMPRQVVQKQLKKLDMKPMEQGSSTQGAPGGDGGTLGNHHQHTSEEHIQE

SEQ ID NO: 54503 - protein, 787 aa, Zea Mays
MRFRMMFETEESATRRYMGTITGISDMDPLRWKNSQWRNIQVAWDEAAPSERRTRVSLWEVEPVIAPFFIYPSPLFTAKRPRQPGVTDDDSSEMDNLFKRTMPWFGEEVGKRDLSTQNGLVPGLSLVQWMNMQHNPSLANTVMQPELLNSLAGKPVQTLAAADLSRQISFQPQFLQQNNIQFNTSLLPPQNQQTEQLANVIATPNQLGSVIVPQKAVQNSSSEQKQNLVTQPLQVSQPMVSVAQPQLVHTQLQQPQVVLQAQPQQPQVIVQAQLQQQQPLVQNHTTIQSGLQQIQLLQQQQVQQSVQEQQQIKIQPFQVPNDANMVTQLSDQMKIQLLKALQPQQPLVMEQQKMIFDLQQQAVNSQSTAQQCSQVATQVVGLHSSSTNQYPTQQKTQPLKTFQDFPGNAVSIVKPEIVTSVGARSLHVPGGVQSMKMDEVPSSSTSPSTNNNPVILRSTPSSSKNQCLPTAAKAPQSSVVLGSTLEQGMKPCDSTQHPMVIPKLAEERPATGQDYMNSTQLDYLDTSSSATSVCLSQADGSLQQSFPPSSFNQHQPLREAVPDSEFEVTDAGNNFLFGANIDGHMEPLNEDDLLGTAFEADKYMEQMPGNGISNYISSKDSQQELSSSMISHPFGVADIAFNSIDSSINDIQFLNRNSRAPGPVQQRMRTYTKVHKRGAVGRSIDINRYSGYDELKHDVARMFGIEGQLSDQNRVGWKLVYEDHEKDVLLVGDDPWEDFVNCVRCIRILSPQEERQMRLASDYGDSFLGNQACSSSDGGRPWRVTGD

SEQ ID NO: 54504 - protein, 251 aa, Zea Mays
MKKMVTGKTEKVAKAQRLQRDDIEIVPAEPVRDEEDTSSSSGESDVSEDELDDYRKAEVLAYAKKMLRKKQREQILDDAYNKYMFDDEGLPNWFVEDEKRHRQPMKPVTREEVAAMRAQFKEIDARPSKKVAEAKARKKRVAMKKLDKARQKADAIADQNDINELSKRKMIDRIYRKAMPTKPQKEYVVAKKGVQLRTGKGKVLVDPRMKKDKRASGTCKKGKKGGKGGKGKGGQKGMRGKTGKKAGKAPS

SEQ ID NO: 54505 - protein, 114 aa, Zea Mays
MAYLHAYVHFFDEHTYVTLLTTRSDAFYDLKDSRAHIQNALLKSNVLIEVQRSLHENALRVEDLPTNPSSQSASHPPESSQDISSQSLSSEMAIGGPGGLWHFIYKSIYLDQVD

SEQ ID NO: 54506 - protein, 898 aa, Zea Mays
MRSPQERNTRLENMTWRIWNLARKKKEFEKEEACRMSKRQPETEKTRADATADMSEDLFEGEKGEDAGDPSVAYGDSTTGSSPKTSSIDKLYIVLISLHGLVRGENMELGRDSDTGGQIKYVVELAKALSSSPGVYRVDLLTRQILAPNFDRSYGEPKELLVSTSGKNYKQEKGENSGAYIIRIPFGPKDKYLAKEHLWPFIQEFVDGALSHIVRMSKAIGEETGRGHPVWPAVIHGHYASAGIAAALLSGALNLPMAFTGHFLGKDKLEGLLKQGRQTREQINMTYKIMCRIEAEELSLDASEIVIASTRQEIEEQWNLYDGFEVILARKLRARVKRGANCYGRFMPRMVIIPPGVEFGHIIHDFDMDGEEENPCPASEDPPIWSQIMRFFTNPRKPMILAVARPYPEKNITTLVKAFGECRPLRELANLTLIMGNREAISKMHNMSAAVLTSVLTLIDEYDLYGQVAYPKHHKHSEVPDIYRLAARTKGAFVNVAYFEQFGVTLIEAAMNGLPIIATKNGAPVEINQVLNNGLLVDPHDQNAIADALYKLLSDKHLWSRCRENGLTNIHQFSWPEHCKNYLSRILTLGPRSPAIGNREERSNTPISGRKNIIVISVDSVNKEGLVRIIRNAIEVIHKENMSGSTGFVLSTSLTISEIHSLLLSGGMLPTDFDAFICNSGSNIYYPSHSGETSNNSKITFALDQNHQSHIEYRWGGEGLRKYLVKWATSVVERKGRTERQIIFEDPEHSSAYCLAFRVVNPNHLPPLKELRKLMRIQSLRCNALYNHSATRLSVVPIHASRSQALRYLCIRLGIEVPNVAVLVGESGDSDYEELLGGLHRTVILKGEFNIAANRIHTVRRYPLQDVVALDSSNIIGVDGYTTDDLRSALQQMGILAR

SEQ ID NO: 54507 - protein, 568 aa, Zea Mays
MSLQKLGKAMEAAKQCKSVLDAVESIFQCGIPGVMVEQKLQETVSKSVELLPELWKQAGAYQEALASYRRALLSQWNLDDECCTRIQKRFAVFLLYGGVEAAPPSLASQTEGSFVPRNNLEEAILLLMILLKKWFLGKTHWDPSVMEHLTFALSLCGQTSIIAKHLEEVLPGIYPRTERWYSLALCYFAVSHNEAALNLLRKSLNKNESPNDIMALLLAAKICSSNNLLSSEGVEYAKRAVRDAESSDGHLKSVALHVLGSCLSRKSKVASSDHQRSVLQAEALKSLNEAISLDRHNPELLFELGIEYAEQRNMHAALKCAKEFIDVTGGSVSKGWRLLLLVLSAQQRYSEAEVVTDAALDETAKWEQGPLLRIRAKLKVAQALPMEAVEAYRTLLALVQAQRKAYGSVKNGTEDNEDKVREVEVWHGLANLYSSLSYWRDAEICLQKAKALKTYSATTLHVEGNKHELHEKIQDAVAAYFNAISMEVEHVPSKVSIGALLSKQGPKFLPVARCFLSDALRLEPTNRMAWFYLGEVHKQDGRLADAADCFQAASMLEDSDPVESFRSL

SEQ ID NO: 54508 - protein, 484 aa, Zea Mays
MMVVVRNDIVKLFDTIKSYDDGTFYFDEKHVDATEYKGPIMTSASVVRGVTSFAAVASGKLDIPGDKILGLAKFFLGIGLPGSSKDCFNQIDSLSVLEDNRVFVPLILSLPTKVFSLSLKDQLKVEVTTVFGSAAPLLKVNLVQVLGTDSKVITNGNRELQYDLDKNVHYLDIAPLEIDVGKYSVVFEISLQEQERETVYATGGRNTESVFVTGLIKVDKAEIGISDNDAGTVESVQKLDLLKDTKVSLSANHLQKLRLSFQLTTPLGLTFKPHQVFLKLKHESKVEHLFVVPGSARQFKIVLDFLGLVEKFYYLSGRYDLELAVGDAAMENSFLRPLGHLELDLPEAPEKAPRPPAQAVDPFSKFGPKAEILHIFRAPEKRPPKELSLAFTGLTLLPFIGFLIGLVRLGVNVKNFPSLPGPAAFASVFHAGIGAVLLLYVLFWLKLDLFTTLKYLGFLGIFLVFVGHRTLSYLSSASAKQKTA

SEQ ID NO: 54509 - protein, 144 aa, Zea Mays
MPNCFSKTKQARMMIMYLLENKLSKTYLLLHFSKTIDHTQEVQIRKQAVATPVRFSDGSRQGLTMEKSTVVVSVPVVVMAETAETDYSSSFSHLCRMQSPRKMLGRVINQGIRELLRSLQYIRSIVLRWQTLFNSGGQLLQLPV

SEQ ID NO: 54510 - protein, 410 aa, Zea Mays
MWHEARRSERKVHDLMDAARRRAQRRAVYLARRRGDPQQALQVSGTRCRVHRDDALYQATEDQQGLIQWNGKQDVLIDRFDGRALLDFIRDSSSRPFRVQGKSEEEEELEEFVNFERYRDLIKHRRRGFSDEAGLQHVVQELEAKALLPFSFDKPQSSQPPASKGAYSQVGYSYKGDGNEESEDLDSDDDDEEEEVDDDDKDFSSDDSSDERMESIAKEFGIKRYNWLVYMDKKNKEQEKRQKEIVKGDPSIKKMSRRERRKASQIEREKEREAARSVGRVSYRDPYREQRRSPSYEAYSRGRRSRSRSRSRSPSHSRRHGRGIHAESNYWSKQKAPRVEYITEFGGSDDTSEPKVSGISPPSSPIRIDIPNRSGNSTFNICKYTLGELFSDGAYYLNPGVLKMTMSGIG

SEQ ID NO: 54511 - protein, 586 aa, Zea Mays
MFEGQRAPDYGSQGEVRLTFAENGSSKVGVRFDKQIPGGIDLGGSCELDHGLFCSVDSLCLDGPGWEDRAKHSFDVVFEFASEESQQVPVILFLKDVEKICGNNYTYHGLKNKLESFPAGVFIVGSQIQTDARKDKSNNGSPWLKFSYSQAAILDLAFQDSFGRAGEKNKEALKMSKHITKLFPNKVTIESPEDETELSQWKQLLGRDIEILKAKANFLKIQSFLTRHGMECTDLESVVCVKDRNLTSECVDKIVGYALSYQLKDHPIQTPGKDARVVLSGVSLKYGIDLLESIQSGPKKKSTKKSLKDVVTENEFEKRLLPDVIPPDEIGVTFEDIGALENVKETLQELVMLPLQRPELFSKGQLMKPCKGILLFGPPGTGKTMLAKAVATEAGANFINISMSSIASKWFGEGEKYVKAVFSLASKISPSVIFVDEVDGMLGRRENPGEHEAMRKMKNEFMVNWDGLRTKDKERVLVLAATNRPFDLDEAVVRRLPRRLMVNLPDAPNRKKILSVILAKEDLADDVDLEALANLTDGYSGSDLKVGILLRYFFLILFPRFFVLLATPIFAEPVYNCSTSSHKGNS

SEQ ID NO: 54512 - protein, 435 aa, Zea Mays
MWYLCVFYHRLLDYRRPEVESLAELFAGPGARESVEWRMPENHHVDSPFHLVRLPGDERLAAQVANRSLLVKGVYELWGYGTTYEELEKSVREYPDERKLPFLVPESSFKIVIDSFGKVISSQEQNEIIQSLTYIPFKGRVNLKKPDHRFFVMETDDYGSNNGLPPVVKRSIFFGREVGAADRHLLPTYQLKSRKYIGPTAMDAEMAFLMANQGLASPGKLVYDPFVGTGSILVAAAHFGAMTMGADIDIRVVRDGRGPNCNVWSNFEQYKLPEPLCLLRADNNLPPWRPGLKEMFDAIICDPPYGVRAGGRKSGGRKLIKGVKGPYTVPDEKRDNHIPSTAPYSLAECVHDLLHLAARMVVMGGRLVFFYPVLRDPELSVQPGSADHGEGCTLHRGDREVGRRAAPGVQGEPPEVDGGGQPPFRRVRASPGWEA

SEQ ID NO: 54513 - protein, 1090 aa, Zea Mays
MVAAFGEPVGGGKPTWEAAWRAAFERFQYKKSPHVSLETPTSSLIGSSVPEKASKGTAITTVPASKKVGKTVAPAHPAVTLHSPTSDFPFGSSTFNLQRGTHLDFSQAVSPFAYNSHMRHPSPGVAPWYTQSPGPRPAAWLIPPQNLIFDSSMQPVIPTNETAKGASSKNISVSHTVSSGVLPSLAPSIVSSPIAVVSDGKQKAASSSKRGTTSQKSRKKKKASASSEQQPVIASPHLKMNMPSFTPAIKHTAGLTLCGSKPVPNMGQIASEHNYQITGGMDSDQRIIFSEQIRGAVEQSAAQAKSASIDSVEAVKHKEGIWSHLSTISRNKLPPKVEEKLTSVAAAAEAAVSVAKAAAEAAKMASEAALQAKMMADEALSSSISVMSMHHEADQYNVISSPPILSSSTPASSLKTKNKSHAPGSIISVAREAARKRVEEASAAAKRAENLDAILKAAELAAEAVFRAGTIIGMGEPLPFTLRELLEAGPNGYWKSASARNKSGSCNDNPVTETLEVDAPANFNKSGRKRGRKPKYDQALPNSEPSSSCKELQSYGIHSGVGHGVVEDVPITVSPNGNNVTSPINIIWNGIEKGSAVEVLSDKGGFGVAWFSAKVIDINGNNVFVNYDNHNGSGPHEEWVPLRQEGDKPPQIRLAHPATLSKFKTRKRLRETAGSCLWVIGDHVDAWVNNSCWREGVISQNYETDETKYDVHFSVGGGGESLVVDAWSLRPSRVWKDGQWVEWSHARERKSKSNKGDSPPEKRQRIDLLQTGGNLSVLGEVGGSSKDNNINNAKNPEELKPLSLSQGEIVFNIGKSVVENKSDSLAFRRPGLQKEGSKVVYGVPKHGKKKKFMEVSKHYDAGQSDKISEGNSSNRFVKHLMPQLPRPRENASKVDPIRGRRVGETRSRLPKPTKSHNVGASSVPGKDSLPMQMHVPNSGVSERSSSFAGSSTSTSNNEKPTSENNNPVLGVGLRTEVSSGPELQTASTVPSSKPNVSTTNRAKRKYVPTVSNTNRGILKTSEKSSSDSAEPRRTTSDSAEPRRSNRRIQPTSRLLEGLQSSLVISKVPGEKVHRSNYKSASSRGRTQAHG

SEQ ID NO: 54514 - protein, 460 aa, Zea Mays
METSDRSQGAKSANEVALHDSGAKDHDTYTLGHSCTGNENSAVDEGSTRTDMSHMDSIVPSCVLEDSLNNPETGVPRGAVVAEQNEKENRIENHQTVYTEEGTTSGVSTKDAEASHISRSAEDVHEEVLDKEKMIISLEEEVKRLKAKLDQLEQHKHLVTESTSGVEYHGGKNGNHALNFGELFTAQGSINQPYSPQIKYTKLNFKVDTFFAVGSPLGVFLSLRNVRIGIGKGRDYWKDKNIIEEMPCCRQMFNIFHPFDPVAYRVEPLVCEDYQKKRPVIVPYHRGGKRIHVGVQEFTEDISARSQAIACQLKSLKVKAVAALLALSRNDTEEDGESANEEGRSYGSIMMERLTGSPDGRIDHVLQEKTFQHSYLSALGAHTNYWRDHDTALFILKHLYRDIPEDPPSDVVERMHIKLFYERDPVEEETPVTFSDHAAIKEFCRKVRAYSTKMEDDANC

SEQ ID NO: 54515 - protein, 69 aa, Zea Mays
MSMLSGLGSGGGIGVPNTSNVPPEELYATQLTQLQEMGFIDTAENIQALLATAGNVHAAVERLLGNLGQ

SEQ ID NO: 54516 - protein, 61 aa, Zea Mays
MVKASSREDAQPMTESSNAEVNTSSAVAAGESESHEIGSPKSLKDAIKPKHKRKKKKSDRS

SEQ ID NO: 54517 - protein, 95 aa, Zea Mays
MKAGGGHANSETEADLGRPPFVYKHLGSMATVGRYKALVDLRQSKESRGISLAGFVSWFIWRSAYLTRVVSWRNRFYVAINWLTTLLFGRDISRI

SEQ ID NO: 54518 - protein, 531 aa, Zea Mays
MARLQKSGQFQQLVLDPSRNYLTKTFYNANMKRRVLSRVECFVSSDPINNGWLKPRRSENFTSLESACVQREYKLPVRTRADCKAEQYEITGSPLSPSDADAVMIGDTNEISPWWQEFPKRWMIVLLCFFAFLLCNMDRVNMSIAILPMSSEFSWSPATVGLIQSSFFWGYLLTQILGGIWADRFGGKLVLGFGVIWWSIATVLTPLAAKIGLPCLLTMRAFMGIGEGVAMPAMNNILSKWIPVSERSRSLALVYSGMYLGSVTGLALSPLLISRFGWPSVFYAFGSLGSVWFALWQSKAHSSPDDDPELSKAEKRHILGGSPLKEPVTSIPWRLILSKAPVWALIISHFCHNWGTFILLTWMPTYYNQVLKFNLTESGLLCVLPWLTMAVFANIGGWIADTLVQRGISVTNVRKIMQSIGFLGPALFLTLLSKVRTPAMAVLCMACSQGSDAFSQSGLYSNHQDIGPRYAGVLLGLSNTAGVLAGVFGTAATGYILQKGSWDSVFKVSVVLYIVGTVVWNVFATGEKVLE

SEQ ID NO: 54519 - protein, 144 aa, Zea Mays
MSRLNIDDYQKEGSQPTLLITSDIVVVHEGIIREKPTTKEEARQFLKGYSGGHVSTVGSVVVTNLTTGKRLGSLDKAEVYFHDIPDEVIKSLIDEGVVFRVAGGLLLEHPLTLPFVEAVVGSSDSVMGLSKEVANKLIHDALST

SEQ ID NO: 54520 - protein, 85 aa, Zea Mays
MSVLLLDSIVDKHAIDIENGYLKMVKEMITASAKPTSTKSANEKHFLYDIVANGRNGIDVDKFDYVGRDCRACGLGCNFQYWSPA

SEQ ID NO: 54521 - protein, 317 aa, Zea Mays
MGLTGAYNSPLDDEAGIAVIAHAFSRGVTLFDTSDVYGPLTNEILLGKALKQLPREQVQVATKFGIRHDESGTRTVCGRPEYVRACCEASLRRLGIDCIDLYYQHRIDTTTPIEETIGELKKLVEEGKVKYIGLSEASPDTIRRAHAVHPITAVQMEWSLWSRDIEPEIVPLCRELGIGIVPYSPLGRGFFGGRGVKEQVSAESNLHGIPRFAPENLEKNKQIYLRMEELANKHQCSPAQLALAWVLHQGDDVVPIPGTTKIKNLDSNIDSLKVKLTDEDLKEMGSQIREEDVAGGRQFTSFAHTTWKYADTPKKQS

SEQ ID NO: 54522 - protein, 411 aa, Zea Mays
MIGAGLVAKKACELGLEVKPWVKTSLTPGSVVATEYLKHSGLQDYLNQQGFHVAAHGCATCVGNSGDLDGSVSAAITENDMVAAAVLSANRNFEGRVNPLTRANYLASPPLVVAYALAGTVDIDFEKEPIGVGKGGKEVFLRDIWPSNQEIDEVVESSVQTHLEGMSMTPPAAPPTVTEAYCLLNLGDSITTDHISYSGKIPEGTPAAKYLLEYGVEPKNFSSYGGRRGNNEVVMRGAFANMRIVNKLLDGKAGPWTIHVPTGEKLYVYDAAMKYKSEGHDMVIIAGSEYGSGSSRDSAAKGPMLLGVKSVIAKSFERIHRSNLVGMGIIPLCFKAGEDADSLGLTGRERYTIHLPTSTAELSPGQDVTVTTHDGRSFTCTLRLDTQLEVTYFNHGGILPYMVRNLAAQMK

SEQ ID NO: 54523 - protein, 408 aa, Zea Mays
MPMVRRAAASNLGKFAATVEQNHLKTEIMSIFDDLTQDDQDSVRLLAVEGCAALGKLLEPQDCVAHILPVIVNFSQDKSWRVRYMVANQLYELCEAVGPEPTRADLVPAYVRLLRDNEAEVRIAAAGKVTKFCRILNPQLSIQHILPCVKELSSDSSQHVRSALASVIMGMAPVLGKDATMEQLLPIFLSLLKDEFPDVRLNIISKLDQVNQVIGIDFLSQTLLPAIVELAEDRHWRVRLAIIEYIPLLASQLGVGFFDDKLGALCMQWLEDKVFSIRDAAANNLKRLAEEFGPEWAMQHIIPQVLEKINNPHYLYRMTILQAISLLAPVMGAEITCQKLLPVVINSSKDRVPNIKFNVAKVLKSLVPILDQSTVKPCLVELSEDPDVDVRYYANQALQACDQMMVSS

SEQ ID NO: 54524 - protein, 176 aa, Zea Mays
MSVALIKSDKDNRYGLDSVVTHDGTKMACWALSELSSFHDKLGIEAYNKVDVIGIDEAQFFDDLYDFCCKAADRDGKIVVVAGLDGDYKRRKFGSILDIVPLADSVTKLTARCELCGRRAFFTLRKTQETKTELIGGADVYMPVCRQHYMDGQIVIEATRIVLDLDRSTVTAKALK

SEQ ID NO: 54525 - protein, 506 aa, Zea Mays
MDDGGIQEEPPSTRFLTPTRSGGTRWVDGSEVDSSESTPSWSLEDERSAGGVSSNGGAAAASRVSSGAFRRRFGKRPRRVDSLDVESMNVRGAHGHSSKEISMLSTLAMAFQTLGVVYGDMGTSPLYVFSDVFSKVPIKSEVEILGALSLVMYTIALIPFAKYVFIVLKANDNGEGGTFALYSLICRYAKVSLLPNQQRVDEDISSFRLKLPTPELERAISVKDCLEKKPLFKNILLFLVLMGTSMVIGDGILTPSMSVMSAVSGLQGQVPGFDTNAVVIVSIVVLLLLFSVQRFGTGKVGFMFAPILALWFINLGSIGIYNLVKYDISVVRAFNPVYIYLFFETNGIKAWSALGGCVLCITGAEAMFADLGHFSVKSIQVAFTAVVFPCLLIAYMGQAAFLMKNPLVVERIFYDSVPGVLFWPVFVIATLAAMIASQAMISATFSCIKQAMALGCFPRIKIIHTSKKVMGQIYIPVMNWFLMVMCIIIVATFRSTNDIANAYDYG

SEQ ID NO: 54526 - protein, 666 aa, Zea Mays
MRWITSGDQQVMCLGFDWNSHEMSVMFLAKLAKPLIGTCRIVINSIHIKGDLLLSPILDGEAILYSFESTPEVRIGVAFGSGGSQAIPGMELPGVSTWLVKLLTETLGKTMVEPRRLCFSLPSVDLRKRAVGGVLSVTVVSASNLCKSTANDIGNCQSSNGGATYGIADNKVSQTFVEVEVGNLMRKTSTSKGLNPTWNSTFNMVLHGETGIVKFLLYELDSGGVKFNYLTSCEIKVKYVHDGSTIFWAIGHNSGVVAKHTEHCGQEVGMVVPFEDINGELTVSLVLKEWQFSDGSVTLSNSLGNGLQSSFDGSTKLQSTTGRKVRVRVVEGRALTANSKSGKCDPYVKLQYGKALYRTKTLTHTVRPVWNHKFEFDEISGGEYLKIKCYNADMFGDESIGSARVNLEGLLEGATRDVWVPLEKVDSGEIRLEIEAIKNDHNNSLQSSSSKAGSGWIELVIIEARDLVAADLRGTSDPYVRVHYGSKKKRTKVIYKTLSPQWNQTFEFLETGEPLILHVKDHNAVLPTASIGHCTVEYSMLSPNQSAEKWIPLQGVKSGEIHVRVALKVSVPGSEKKNMLGAGPFGKGHKMSTQMRDSLKRFTGLIDDGGDPEALALAVAEMEGIQGEQEEYVETLEREKAMLLHKINELGSEIIRTASGPPRTPY

SEQ ID NO: 54527 - protein, 277 aa, Zea Mays
MNVYVPKDRVTNLHQGYGFVEFRSEEDADYAIKTLNMIKLYGKPIRVNKASQDKKSLDVGANLFIGNLDPDVDEKLLYDTFSAFGVIVTNPKIMRDPETGNSRGFGFVSYESFESSDQAIEAMNNQHLCNRPITVSYAYKKDTKGERHGTPAERLLAANNPGSQKNRPHTMFASGPPTQGHPNGGPPVPRPYGNGTIPGQIQHIRQPPPPPVGQFPPPMQMHGQPTWPAQHSMPPPMPSQLQYRLPMRPPPPNMMPPPVGMNYNVSDITERPLIRGS
